(19) United States
(12) Patent Application Publication
(10) Pub. No.: US 2011/0189663 A1
(43) Pub. Date: Aug. 4, 2011

(54) ASSESSMENT OF RISK FOR COLORECTAL CANCER

(75) Inventors: Michelle Cotterchio, Toronto (CA); Steven Gallinger, Toronto (CA); Celia Greenwood, Montreal (CA); Thomas J. Hudson, Toronto (CA); Brent W. Zanke, Ottawa (CA); Michael Phillips, Hudson (CA); Saravanan Sundararajan, Montreal (CA); Alexandre Montpetit, Montreal (CA); Phillippe Laflamme, Montreal (CA); Vincent Ferretti, Mont-Royal (CA)

(73) Assignees: CANCER CARE ONTARIO, Toronto, ON (CA); MCGILL UNIVERSITY, Montreal, QC (CA)

(21) Appl. No.: 12/529,942

(22) PCT Filed: Mar. 5, 2008
(86) PCT No.: PCT/CA2008/000424

§ 371 Date: Jul. 19, 2010

(30) Foreign Application Priority Data
Mar. 5, 2007 (AU) 2007901147

(51) Int. Cl. C12Q 1/68

(52) U.S. Cl. 435/6.11; 435/6.1; 435/6.12

(57) ABSTRACT

Disclosed is a method for identifying an individual who has an altered risk for developing colorectal cancer comprising detecting a single nucleotide polymorphism (SNP).

### FIELD OF THE INVENTION

[0001] This invention relates to prediction of the susceptibility of an individual to colorectal cancer. Basis for the prediction lies in relating an individual's genetic makeup, as through molecular analysis, to the genetic makeup of a population of individuals.

### BACKGROUND

[0002] During the course of evolution, spontaneous mutations, arise in the genomes of organisms. Variations in genomic DNA sequences are created continuously at a rate of about 100 new base changes per individual (Kondrashov, 1995; Crow, 1995). These germ-line changes may produce an evolutionary advantage and be retained in the population, or they may be deleterious and ultimately eliminated. In many cases, equilibrium between multiple germline forms of a sequence is established within a population if reproductive ability of individuals containing either polymorphism is not affected. Over time, significant numbers of mutations have accumulated within the human population that may be observed to varying extents in geographically separated groups based upon the presence of common ancestors.

[0003] Colorectal cancer is the third most common cancer and the third most common cause of death from cancer for both men and women. Colorectal cancer is responsible for more deaths that are not due primarily to tobacco use than any other type of cancer and inflicts a huge financial burden. Early detection of some human tumors such as uterine cervical cancer has dramatically reduced mortality from this condition (Herzog, 2003). Early detection of colorectal cancer can reasonably be expected to prevent death from this condition by identifying patients at risk for the disease, or those with the disease in an early stage and allow life saving intervention. A validated genetic test for colorectal cancer predisposition will have clinical utility, allowing prevention of cancer mortality through targeted screening programs. There are good reasons to expect that at least some of the genetic risks of common disease is due to common variants—for example, based on evolutionary arguments, and the fact that most human genetic variation is common. Although approximately 20% of colorectal cancers have a familial component with relatives exhibiting a doubling of risk (Carstensen et al., 1996), less than 5% of colorectal cancer is explained by rare, highly penetrant genetic syndromes such as APC and HNPCC (de Leon et al., 1999). Familial colorectal cancer occurring in patterns inconsistent with classical inherited syndromes suggests that variation in genome sequence plays a major role in determining individual risk to colorectal cancer. These genetic causes appear complex due to a variety of reasons such as genetic heterogeneity, incomplete penetrance, phenocopies and variation in exposures to environmental co-factors etc. There is little insight into the genetic or environmental determinants of almost 90% of cases of human colorectal carcinoma (Lynch and de La, 2003).

[0004] Although common human genetic variation is limited compared to other species, it remains impractical to discover and test every one of the estimated 10,000,000 common genotype variants (Sachidanandam et al., 2001) as predictors of disease risk. Genotypic complexity is reduced through linkage disequilibrium that exists across long segments of the human genome with restriction in the diversity of haplotypes observed (Daly et al., 2001; Rioux et al., 2001; Liu et al., 2004). That is, single nucleotide polymorphisms found at specific locations within the human genome are inherited in conjunction with nucleotides that can be polymorphic that are physically located near by. In European genomes, allelic association between pairs of markers typically extends over 10-50k, although there is tremendous variability in the magnitude of association observed at any given distance (Clark et al., 1998; Kikuchi et al., 2003; Dunning et al., 2000; Abecasis et al., 2001). Genome-wide data (Gabriel et al., 2002; Reich et al., 2001; Dawson et al., 2002) supports the generality of this description as well as its application across populations. This confirms that measurement of single nucleotide polymorphisms at sites in tight linkage disequilibrium with adjacent genomic regions can provide information about the presence of diversity not just at sites actually measured, but also about large areas of the adjacent genome.

[0005] Numerous types of polymorphisms exist and are created when DNA sequences are either inserted or deleted from the genome. Another source of sequence variation results from the presence of repeated sequences in the genome variously termed short tandem repeats (STR), variable number of tandem repeats (VNTR), short sequence repeats (SSR) or microsatellites. These repeats commonly are comprised of 1 to 5 base pairs. Polymorphism occurs due to variation in the number of repeated sequences found at a particular locus.

[0006] The most common form of genomic variability are single nucleotide polymorphisms or SNPs. SNPs account for as much as 90% of human DNA polymorphism (Collins et al., 1998). SNPs are single base pair positions in genomic DNA at which different sequence alternatives (genotypes) exist in a population. By common definition, the least frequent allele occurs at least 1% of the time. These nucleotide substitutions may be a transition, which is the substitution of one purine by another purine or the substitution of one pyrimidine by another, or they may be transversions in which a purine is replaced by a pyrimidine or vice versa.

[0007] Typically SNPs are observed in about 1 in 1000 base pairs (Wang et al., 1998; Taillon-Miller et al., 1999). The frequency of SNPs varies with the type and location of the change. Specifically, two-thirds of the substitutions involve the C [symbol] T (G [symbol] A) type, which may occur due to 5-methylcytosine deamination reactions that occur commonly. SNPs occur at a much higher frequency in non-coding regions than they do in coding regions.

### SUMMARY OF THE INVENTION

[0008] It has been discovered that polymorphic variations in a number of loci in human genomic DNA are associated with susceptibility to colorectal cancer. This invention thus includes methods for identifying a subject at risk of colorectal and/or determining risk of colorectal cancer in a subject, which comprise detecting the presence or absence of one or more polymorphic variations associated with colorectal cancer in a nucleic acid sample from the subject. In a specific embodiment, this invention relates to identifying an individual who is at altered risk for developing colorectal cancer based on the presence of specific genotypes defined by 230 single nucleotide polymorphism (SNPs), observed alone or in combination.

[0009] Through large scale genotyping studies on 2,198 blood samples from patients with colorectal cancer and 2,124 control samples from unaffected individuals we have identified 230 polymorphic markers found in 85 genes which are found more frequently in patients with colorectal cancer than in those without this disease. These markers, or those in close linkage disequilibrium, may change the composition, function or abundance of the elements of cellular constituents resulting in a predisposition to colorectal cancer. Measuring these markers in individuals who do not ostensibly have colorectal cancer will identify those at heightened risk for the subsequent development of colorectal cancer, providing benefit for, but not limited to, individuals, insurers, care givers and employers. Genes containing colorectal cancer-associated polymorphic markers that we have identified and genes found in linkage disequilibrium with these that we have identified are valuable targets for the development of therapeutics that inhibit or augment the activity of the gene products of these genes for therapeutic use in, but not restricted to, colorectal cancer. Information obtained from the detection of SNPs associated with colorectal cancer is of great value in the treatment and prevention of this condition.

[0010] Accordingly, one aspect of the present invention provides a method for diagnosing a genetic predisposition to colorectal cancer in a subject, comprising obtaining a sample containing at least one polynucleotide from the subject and analyzing the polynucleotide to detect the genetic polymorphism wherein the presence or absence of the polymorphism is associated with an altered susceptibility to developing colorectal cancer. In one embodiment, one or more of the 230 polymorphisms found distributed among 85 genes that we have identified may be used.

[0011] Another aspect of the present invention provides an isolated nucleic acid sequence comprising at least 16 contiguous nucleotides or their complements found in the genomic sequences of to the 85 genes adjacent to and including the 230 polymorphic sites the inventors have identified to be associated with colorectal cancer.

[0012] Yet another aspect of the invention provides a method for treating colorectal cancer comprising obtaining a sample of biological material containing at least one polynucleotide from the subject, analyzing the polynucleotides to detect the presence of at least one polymorphism associated with colorectal cancer and treating the subject in such a way as to counteract the effect of any such polymorphism detected.

[0013] Still another aspect of the invention provides a method for the prophylactic treatment of a subject identified with a genetic predisposition to colorectal cancer identified through the measurement of all or some of the 230 polymorphic SNP markers described in Tables 1 to 230.

[0014] Further scope of the applicability of the present invention will become apparent from the detailed description provided below. It should be understood however, that the following detailed description and examples, while indicating preferred embodiments of the invention, are given by way of illustration only, since various changes and modification within the spirit and scope of the invention will become apparent to those skilled in the art from the following detailed description.

[0015] Tables 1 to 230 report the result of a genotyping analysis of 4,322 samples by measuring 385,562 single nucleotide polymorphisms in peripheral blood DNA from 2,128 subjects (1,059 cases with colorectal cancer and 1,069 age matched individuals undiseased at the time of testing), and validating the identified CRC-associated alleles by using peripheral blood DNA from a second and third, different, group of 2,194 subjects (687 and 452 cases, respectively, with colorectal cancer and 688 and 367 age matched individuals undiseased, respectively, at the time of testing).

### DETAILED DESCRIPTION OF THE INVENTION

[0016] It has been discovered that polymorphic variants in a number of sequences, SEQ ID NOs:1 to 5618 are associated with an altered risk of developing colorectal cancer in subjects. The present invention thus provides SNPs associated with colorectal cancer, nucleic acid molecules containing SNPs, methods and reagents for the detection of the SNPs disclosed herein, uses of these SNPs for the development of detection reagents, and assays or kits that utilize such reagents. The colorectal cancer-associated SNPs disclosed herein are useful for diagnosing, screening for, and evaluating predisposition to colorectal cancer and related pathologies in humans. Furthermore, such SNPs and their encoded products are useful targets for the development of therapeutic agents.

[0017] A large number of colorectal cancer-associated SNPs have been identified by genotyping DNA from 4,322 individuals, 2,198 of these individuals having been previously diagnosed with colorectal cancer and 2,124 being “control” or individuals thought to be free of colorectal cancer.

[0018] The present invention thus provides individual SNPs associated with colorectal cancer, genomic sequences (SEQ ID NOs:5619 to 5703) containing SNPs, and transcript sequences amino acid sequences. The invention includes methods of detecting these polymorphisms in a test sample, methods of determining the risk of an individual of having or developing colorectal cancer, methods of screening for compounds useful for treating disorders associated with a variant gene/protein such as colorectal cancer, compounds identified by these screening methods, methods of using the disclosed SNPs to select a treatment strategy, methods of treating a disorder associated with a variant gene/protein (i.e., therapeutic methods), and methods of using the SNPs of the present invention for human identification.

[0019] When the presence in the genome of an individual of a particular base, e.g., adenine, at a particular location in the genome correlates with an increased probability of that individual contracting colorectal cancer vis-à-vis a population not having that base at that location in the genome, that individual is said to be at “increased risk” of contracting colorectal cancer, i.e., to have an increased susceptibility. In certain cases, this effect can be a “dominant” effect in which case such increased probability exists when the base is present in one or the other or both alleles of the individual. In certain cases, the effect can be said to be “recessive”, in which case such increased probability exists only when the base is present in both alleles of the individual.

[0020] When the presence in the genome of an individual of a particular base, e.g., adenine, at a particular location in the genome decreases the probability of that individual contracting colorectal cancer vis-à-vis a population not having that base at that location in the genome, that individual is said to be at “decreased risk” of contracting colorectal cancer, i.e., to have a decreased susceptibility. Such an allele is sometimes referred to in the art as being “protective”. As with increased risk, it is also possible for a decreased risk to be characterized to as dominant or recessive.

[0021] An “altered risk” means either an increased or a decreased risk.

[0022] The genetic analysis detailed below linked colorectal cancer with SNPs in the human genome. A SNP is a particular type of polymorphic site, a polymorphic site being a region in a nucleic acid sequence at which two or more alternative nucleotides are observed in a significant number of individuals from a population. A polymorphic site may be a nucleotide sequence of two or more nucleotides, an inserted nucleotide or nucleotide sequence, a deleted nucleotide or nucleotide sequence, or a microsatellite, for example. A polymorphic site that is two or more nucleotides in length may be 3, 4, 5, 6, 7, 8, 9, 10, 11, 12, 13, 14, 15 or more, 20 or more, 30 or more, 50 or more, 75 or more, 100 or more, 500 or more, or about 1000 nucleotides in length, where all or some of the nucleotide sequences differ within the region. Each of the specific polymorphic sites found in SEQ ID NOs:5619 to 5703 is a “single nucleotide polymorphism” or a “SNP.”

[0023] Where there are two, three, or four alternative nucleotide sequences at a polymorphic site, each nucleotide sequence is referred to as a “polymorphic variant” or “nucleic acid variant.” Where two polymorphic variants exist, for example, the polymorphic variant represented in a majority of samples from a population is sometimes referred to as a “prevalent allele” and the polymorphic variant that is less prevalently represented is sometimes referred to as an “uncommon allele.” An individual who possesses two prevalent alleles or two uncommon alleles is “homozygous” with respect to the polymorphism, and an individual who possesses one prevalent allele and one uncommon allele is “heterozygous” with respect to the polymorphism. Individuals who are homozygous with respect to one allele are sometimes predisposed to a different phenotype as compared to individuals who are heterozygous or homozygous with respect to another allele.

[0024] A genotype or polymorphic variant may also be expressed in terms of a “haplotype,” which refers to the identity of two or more polymorphic variants occurring within genomic DNA on the same strand of DNA. For example, two SNPs may exist within a gene where each SNP position may include a cytosine variation or an adenine variation. Certain individuals in a population may carry an allele (heterozygous) or two alleles (homozygous) having the gene with a cytosine at each SNP position. As the two cytosines corresponding to each SNP in the gene travel together on one or both alleles in these individuals, the individuals can be characterized as having a cytosine/cytosine haplotype with respect to the two SNPs in the gene.

[0025] A “phenotype” is a trait which can be compared between individuals, such as presence or absence of a condition, for example, occurrence of colorectal cancer.

[0026] Polymorphic variants are often reported without any determination of whether the variant is represented in a significant fraction of a population. Some reported variants are sequencing errors and/or not biologically relevant. Thus, it is often not known whether a reported polymorphic variant is statistically significant or biologically relevant until the presence of the variant is detected in a population of individuals and the frequency of the variant is determined.

[0027] A polymorphic variant may be detected on either or both strands of a double-stranded nucleic acid. Also, a polymorphic variant may be located within an intron or exon of a gene or within a portion of a regulatory region such as a promoter, a 5′ untranslated region (UTR), a 3′ UTR, and in DNA (e.g., genomic DNA (gDNA) and complementary DNA (cDNA)), RNA (e.g., mRNA, tRNA, and rRNA), or a polypeptide. Polymorphic variations may or may not result in detectable differences in gene expression, polypeptide structure, or polypeptide function.

[0028] In our genetic analysis associating colorectal cancer with the polymorphic variants set forth in the tables, samples from individuals having been diagnosed with colorectal cancer and individuals not having cancer were allelotyped and genotyped. The allele frequency for each polymorphic variant among cases and controls was determined. These allele frequencies were compared in cases and controls, or combinations. Particular SNPs were thus found to be associated with colorectal cancer when genotype and haplotype frequency differences calculated between case and control pools were established to be statistically significant.

[0029] As mentioned above, polymorphic variants can travel together. Such variants are said to be in “linkage disequilibrium” so that heritable elements e.g., alleles that have a tendency to be inherited together instead of being inherited independently by random assortment are in linkage disequilibrium. Alleles are randomly assorted or inherited independently of each other if the frequency of the two alleles together is the product of the frequencies of the two alleles individually. For example, if two alleles at different polymorphic sites are present in 50% of the chromosomes in a population, then they would be said to assort randomly if the two alleles are present together on 25% of the chromosomes in the population. A higher percentage would mean that the two alleles are linked. For example, a first polymorphic site P1 having two alleles, e.g. A and C—each appearing in 50% of the individuals in a given population, is said to be in linkage disequilibrium with a second polymorphic site P2 having two alleles e.g. G and T—each appearing in 50% of the individuals in a given population, if particular combinations of alleles are observed in individuals at a frequency greater than 25% (if the polymorphic sites are not linked, then one would expect a 50% chance of an individual having A at P1 and a 50% chance of having G at P2 thus leading to a 25% chance of having the combination of A at P1 and G at P2 together). Heritable elements that are in linkage disequilibrium are said to be “linked” or “genetically linked” to each other.

[0030] One can see that in the case of a group of SNPs that are in linkage disequilibrium with each other, knowledge of the existence of all such SNPs in a particular individual generally provides redundant information. Thus, when identifying an individual who has an altered risk for developing colorectal cancer according to this invention, it is necessary to detect only one SNP of such a group of SNPs associated with an altered risk of developing colorectal cancer.

[0031] It has been shown that each SNP in the genomic sequences identified as SEQ ID NOs:5619 to 5703 is associated with the occurrence of colorectal cancer. Thus, featured herein are methods for identifying a risk of colorectal cancer in a subject, which includes detecting the presence or absence of one or more of the SNPs described herein in a human nucleic acid sample.

[0032] Three different analyses were performed for each marker: (a) a test of trend across the 3 genotypes (Sasieni et al. 1997); (b) a dominant model where the homozygous genotype for allele “B” is combined with the prevalent heterozygote genotype; and (c) a recessive model where the homozygous genotype for allele “A” is combined with the heterozygous genotype. Using permutation analysis, the empirical p-value for the maximum of these three test statistics was calculated. Odds ratios measuring the strength of the association are also reported for the model corresponding to the largest of the three test statistics.

[0033] Pertinent results for each SNP are summarized in the tables: Chromosomal number and position—using the International Human Genome Sequencing Consortium build 35 (http://www.ncbi.nlm.nih.gov/genome/seq/) as made available by the National Center for Biotechnology Information (NCBI), National Library of Medicine, Building 38A, Bethesda, Md. 20894 U.S.A., gene marker name—using the nomenclature of the NCBI dbSNP (http://www.ncbi.nlm.nih.gov/SNP/) and gene name—using the unigene naming convention. Under the “Case Flag” the number 1 designates Cases and the number 0 designates Controls. The identity of the base designated “A” in the analysis is indicated where 1=A (adenine), 2=C (cytosine), 3=G (guanine) and 4=T (thymidine). “B” indicates the polymorphic allele. AA, AB, BB are the counts of the number of individuals with the given genotype, by cases/controls. For dominant models, an odds ratio measuring the increase in risk associated with one or two copies of allele B is calculated. For recessive models, an odds ratio associated with exactly two copies of allele B is calculated. For the trend models, the Mantel-Haenszel odds ratio showing the increase in risk with each additional copy of allele B is calculated.

[0034] It has been discovered that each polymorphic variation in the genomic sequences identified as SEQ ID NOs:5619 to 5703 is associated with the occurrence of colorectal cancer. Thus, featured herein are methods for identifying a risk of colorectal cancer in a subject, which comprises detecting the presence or absence of one or more of the polymorphic variations described herein in a human nucleic acid sample. The polymorphic variation, SNP, are detailed in the tables.

[0035] Methods for determining whether a subject is susceptible to, i.e., at risk of colorectal cancer are provided herein. These methods include detecting the presence or absence of one or more polymorphic variations, i.e., SNPs, associated with colorectal cancer in a sample from a subject.

[0036] SNPs can be associated with a disease state in humans or in animals. The association can be direct, as in conditions where the substitution of a base results in alteration of the protein coding sequence of a gene which contributes directly to the pathophysiology of the condition.

[0037] Common examples of this include diseases such sickle cell anemia and cystic fibrosis. The association can be indirect when the SNP plays no role in the disease, but is located close to the defective gene such that there is a strong association between the presence of the SNP and the disease state. Because of the high frequency of SNPs within the genome, there is a greater probability that a SNP will be linked to a genetic locus of interest than other types of genetic markers.

[0038] Disease-associated SNPs can occur in coding and non-coding regions of the genome. When located in the coding region altered function of the ensuing protein sequence may occur. If it occurs in the regulatory region of a gene it may affect expression of the protein. If the protein is involved in protecting the body against pathological conditions this can result in disease susceptibility.

[0039] Numerous methods exist for the measurement of specific SNP genotypes. Individuals carrying mutations in one or more SNPs of the present invention may be detected at the DNA level by a variety of techniques. Nucleic acids for diagnosis may be obtained from a patient's cells, such as from blood, urine, saliva, tissue biopsy and autopsy material.

[0040] The genomic DNA may be used directly for detection or may be amplified enzymatically by using PCR prior to analysis (Saiki et al., 1986). RNA or cDNA may also be used in the same ways. As an example, PCR primers complementary to the nucleic acid of one or more SNPs of the present invention can be used to identify and analyze the presence or absence of the SNP. For example, deletions and insertions can be detected by a change in size of the amplified product in comparison to the normal genotype. Point mutations can be identified by hybridizing amplified DNA to radiolabeled SNP RNA of the present invention or alternatively, radiolabeled SNP antisense DNA sequences of the present invention. Perfectly matched sequences can be distinguished from mismatched duplexes by RNase A digestion or by differences in melting temperatures.

[0041] Sequence differences between a reference gene and genes having mutations also may be revealed by direct DNA sequencing. In addition, cloned DNA segments may be employed as probes to detect specific DNA segments. The sensitivity of such methods can be greatly enhanced by appropriate use of PCR or another amplification method. For example, a sequencing primer is used with double-stranded PCR product or a single-stranded template molecule generated by a modified PCR. The sequence determination is performed by conventional procedures with radiolabeled nucleotide or by automatic sequencing procedures with fluorescent-tags.

[0042] Genetic testing based on DNA sequence differences may be achieved by detection of alteration in electrophoretic mobility of DNA fragments in gels, with or without denaturing agents. Small sequence deletions and insertions can be visualized by high resolution gel electrophoresis. DNA fragments of different sequences may be distinguished on denaturing formamide gradient gels in which the mobilities of different DNA fragments are retarded in the gel at different positions according to their specific melting or partial melting temperatures (Myers et al., 1985).

[0043] Sequence changes at specific locations also may be revealed by nuclease protection assays, such as RNase and S1 protection or the chemical cleavage method (Cotton et al., 1988).

[0044] Thus the detection of a specific DNA sequence may be achieved-by-methods which include, but are not limited to, hybridization, RNase protection, chemical cleavage, direct DNA sequencing or the use of restriction enzymes, (e.g., restriction fragment length polymorphisms (“RFLP”) and Southern blotting of genomic DNA).

[0045] In addition to more conventional gel-electrophoresis and DNA sequencing, mutations also can be detected by in situ analysis.

[0046] Genetic mutations can be identified by hybridizing a sample and control nucleic acids, e.g., DNA or RNA, to high density arrays containing hundreds or thousands of oligonucleotide probes (Cronin et al., 1996; Kozal et al., 1996). For example, genetic mutations can be identified in two-dimensional arrays containing light-generated DNA probes as described in Cronin et al., supra. Briefly, a first hybridization array of probes can be used to scan through long stretches of DNA in a sample and control to identify base changes between the sequences by making linear arrays of sequential overlapping probes. This step allows the identification of point mutations. This step is followed by a second hybridization array that allows the characterization of specific mutations by using smaller, specialized probe arrays complementary to all variants or mutations detected. Each mutation array is composed of parallel probe sets, one complementary to the wild-type gene and the other complementary to the mutant gene. Specific mutations can also be determined through direct sequencing of one or both strands of DNA using dideoxy nucleotide chain termination chemistry, electrophoresis through a semi-solid matrix and fluorescent or radioactive chain length detection techniques.

[0047] Further mutation detection techniques may involve differential susceptibility of the polymorphic double strand to restriction endonuclease digestion, or altered electrophoretic gel mobility of single or double stranded gene fragments containing one polymorphic form. Other techniques to detect specific DNA polymorphisms or mutation may involve evaluation of the structural characteristics at the site of polymorphism using nuclear magnetic resonance or x-ray diffraction techniques.

[0048] These genetic tests are useful for prognosing and/or diagnosing colorectal cancer and often are useful for determining whether an individual is at an increased or decreased risk of developing or having colorectal cancer.

[0049] Thus, the invention includes a method for identifying a subject at risk of colorectal cancer, which includes detecting in a nucleic acid sample from the subject the presence or absence of a SNP associated with colorectal cancer at a polymorphic site in a nucleotide sequence identified as SEQ ID NOs:1 to 5703.

[0050] Results from prognostic tests may be combined with other test results to diagnose colorectal cancer. For example, prognostic results may be gathered, a patient sample may be ordered based on a determined predisposition to colorectal cancer, the patient sample analyzed, and the results of the analysis may be utilized to diagnose colorectal cancer. Also colorectal cancer diagnostic methods can be developed from studies used to generate prognostic/diagnostic methods in which populations are stratified into subpopulations having different progressions of colorectal cancer. In another embodiment, prognostic results may be gathered; a patient's risk factors for developing colorectal cancer analyzed (e.g., age, family history); and a patient sample may be ordered based on a determined predisposition to colorectal cancer. In an alternative embodiment, the results from predisposition analyses may be combined with other test results indicative of colorectal cancer, which were previously, concurrently, or subsequently gathered with respect to the predisposition testing. In these embodiments, the combination of the prognostic test results with other test results can be probative of colorectal cancer, and the combination can be utilized as a colorectal cancer diagnostic.

[0051] Risk of colorectal cancer sometimes is expressed as a probability, such as an odds ratio, percentage, or risk factor. The risk is based upon the presence or absence of one or more of the SNP variants described herein, and also may be based in part upon phenotypic traits of the individual being tested. Methods for calculating risk based upon patient data are well known (Agresti, 2001). Allelotyping and genotyping analyses may be carried out in populations other than those exemplified herein to enhance the predictive power of the prognostic method. These further analyses are executed in view of the exemplified procedures described herein, and may be based upon the same polymorphic variations or additional polymorphic variations. Risk determinations for colorectal cancer are useful in a variety of applications. In one embodiment, colorectal cancer risk determinations are used by clinicians to direct appropriate detection, preventative and treatment procedures to subjects who most require these. In another embodiment, colorectal cancer risk determinations are used by health insurers for preparing actuarial tables and for calculating insurance premiums.

[0052] The nucleic acid sample typically is isolated from a biological sample obtained from a subject. For example, nucleic acid can be isolated from blood, saliva, sputum, urine, cell scrapings, and biopsy tissue. The nucleic acid sample can be isolated from a biological sample using standard techniques. The nucleic acid sample may be isolated from the subject and then directly utilized in a method for determining the presence of a polymorphic variant, or alternatively, the sample may be isolated and then stored (e.g., frozen) for a period of time before being subjected to analysis.

[0053] The presence or absence of a polymorphic variant is determined using one or both chromosomal complements represented in the nucleic acid sample. Determining the presence or absence of a polymorphic variant in both chromosomal complements represented in a nucleic acid sample is useful for determining the zygosity of an individual for the polymorphic variant (i.e., whether the individual is homozygous or heterozygous for the polymorphic variant). Any oligonucleotide-based diagnostic may be utilized to determine whether a sample includes the presence or absence of a polymorphic variant in a sample. For example, primer extension methods, ligase sequence determination methods (e.g., U.S. Pat. Nos. 5,679,524 and 5,952,174, and WO 01/27326), mismatch sequence determination methods (e.g., U.S. Pat. Nos. 5,851,770; 5,958,692; 6,110,684; and 6,183,958), microarray sequence determination methods, restriction fragment length polymorphism (RFLP), single strand conformation polymorphism detection (SSCP) (e.g., U.S. Pat. Nos. 5,891,625 and 6,013,499), PCR-based assays (e.g., TAQMAN™ PCR System (Applied Biosystems)), and nucleotide sequencing methods may be used.

[0054] Oligonucleotide extension methods typically involve providing a pair of oligonucleotide primers in a polymerase chain reaction (PCR) or in other nucleic acid amplification methods for the purpose of amplifying a region from the nucleic acid sample that comprises the polymorphic variation. One oligonucleotide primer is complementary to a region 3′ of the polymorphism and the other is complementary to a region 5′ of the polymorphism. A PCR primer pair may be used in methods disclosed in U.S. Pat. Nos. 4,683,195;4,683,202, 4,965,188; 5,656,493; 5,998,143; 6,140,054; WO 01/27327; and WO 01/27329 for example. PCR primer pairs may also be used in any commercially available machines that perform PCR, such as any of the GENEAMP™, systems available from Applied Biosystems. Also, those of ordinary skill in the art will be able to design oligonucleotide primers based upon the nucleotide sequences set forth in SEQ ID NOs:1 to 5703.

[0055] Also provided is an extension oligonucleotide that hybridizes to the amplified fragment adjacent to the polymorphic variation. An adjacent fragment refers to the 3′ end of the extension oligonucleotide being often 1 nucleotide from the 5′ end of the polymorphic site, and sometimes 2, 3, 4, 5, 6, 7, 8, 9, or 10 nucleotides from the 5′ end of the polymorphic site, in the nucleic acid when the extension oligonucleotide is hybridized to the nucleic acid. The extension oligonucleotide then is extended by one or more nucleotides, and the number and/or type of nucleotides that are added to the extension oligonucleotide determine whether the polymorphic variant is present. Oligonucleotide extension methods are disclosed, for example, in U.S. Pat. Nos. 4,656,127; 4,851,331; 5,679,524; 5,834,189; 5,876,934; 5,908,755; 5,912,118; 5,976,802; 5,981,186; 6,004,744; 6,013,431; 6,017,702; 6,046,005; 6,087,095; 6,210,891; and WO 01/20039. Oligonucleotide extension methods using mass spectrometry are described, for example, in U.S. Pat. Nos. 5,547,835; 5,605,798; 5,691,141; 5,849,542; 5,869,242; 5,928,906; 6,043,031; and 6,194,144. Multiple extension oligonucleotides may be utilized in one reaction, which is referred to as multiplexing.

[0056] A microarray can be utilized for determining whether a SNP is present or absent in a nucleic acid sample. A microarray may include any oligonucleotides described herein, and methods for making and using oligonucleotide microarrays suitable for diagnostic use are disclosed in U.S. Pat. Nos. 5,492,806; 5,525,464; 5,589,330; 5,695,940; 5,849,483; 6,018,041; 6,045,996; 6,136,541; 6,142,681; 6,156,501; 6,197,506; 6,223,127; 6,225,625; 6,229,911; 6,239,273; WO 00/52625; WO 01/25485; and WO 01/29259. The microarray typically comprises a solid support and the oligonucleotides may be linked to this solid support by covalent bonds or by non-covalent interactions. The oligonucleotides may also be linked to the solid support directly or by a spacer molecule. A microarray may comprise one or more oligonucleotides complementary to a SNP set forth in the tables.

[0057] A kit also may be utilized for determining whether a polymorphic variant is present or absent in a nucleic acid sample. A kit can include one or more pairs of oligonucleotide primers useful for amplifying a fragment of a nucleotide sequence of interest, where the fragment includes a polymorphic site. The kit sometimes comprises a polymerizing agent, for example, a thermo-stable nucleic acid polymerase such as one disclosed in U.S. Pat. No. 4,889,818 or 6,077,664. Also, the kit often comprises an elongation oligonucleotide that hybridizes to the nucleotide sequence in a nucleic acid sample adjacent to the polymorphic site. Where the kit includes an elongation oligonucleotide, it can also include chain elongating nucleotides, such as dATP, dTTP, dGTP, dCTP, and dITP, including analogs of dATP, dTTP, dGTP, dCTP and dITP, provided that such analogs are substrates for a thermo-stable nucleic acid polymerase and can be incorporated into a nucleic acid chain elongated from the extension oligonucleotide. Along with chain elongating nucleotides would be one or more chain terminating nucleotides such as ddATP, ddTTP, ddGTP, ddCTP. The kit can include one or more oligonucleotide primer pairs, a polymerizing agent, chain elongating nucleotides, at least one elongation oligonucleotide, and one or more chain terminating nucleotides. Kits optionally include buffers, vials, microtiter plates, and instructions for use.

[0058] An individual identified as being susceptible to colorectal cancer may be heterozygous or homozygous with respect to the allele associated with an increased risk of colorectal cancer, as indicated in the tables. A subject homozygous for an allele associated with an increased risk of colorectal cancer is at a comparatively high risk of colorectal cancer as far as that SNP is concerned whether or not the allelic effect has been determined to be dominant or recessive. A subject who is heterozygous for an allele associated with an increased risk of colorectal cancer, in which the allelic effect is recessive would likely be at a comparatively reduced risk of colorectal cancer predicted by that SNP.

[0059] Individuals carrying mutations in one or more SNP of the present invention may be detected at the protein level by a variety of techniques. Cells suitable for diagnosis may be obtained from a patient's blood, urine, saliva, tissue biopsy and autopsy material.

[0060] Also featured are methods for determining risk of colorectal cancer and/or identifying a subject at risk of colorectal cancer by contacting a polypeptide or protein encoded by a nucleotide sequence from a subject with an antibody that specifically binds to an epitope associated with an altered, usually increased risk of colorectal cancer in the polypeptide.

### Isolated Nucleic Acids

[0061] Oligonucleotides can be linked to a second moiety, which can be another nucleic acid molecule to provide, for example, a tail sequence (e.g., a polyadenosine tail), an adapter sequence (e.g., phage M13 universal tail sequence), etc. Alternatively, the moiety might be one that facilitates linkage to a solid support or a detectable label, e.g., a radioactive label, a fluorescent label, a chemiluminescent label, a paramagnetic label, etc.

[0062] Nucleic acid sequences shown in the tables can be used for diagnostic purposes for detection and control of polypeptide expression. Also, oligonucleotide sequences such as antisense RNA, small-interfering RNA (siRNA) and DNA molecules and ribozymes that function to inhibit translation of a polypeptide are part of this invention.

[0063] Antisense RNA and DNA molecules, siRNA and ribozymes can be prepared by known methods. These include techniques for chemically synthesizing oligodeoxyribonucleotides such as solid phase phosphoramidite chemical synthesis. Alternatively, RNA molecules may be generated by in vitro and in vivo transcription of DNA sequences encoding the antisense RNA molecule. Such DNA sequences can be incorporated into vectors which incorporate suitable RNA polymerase promoters such as the T7 or SP6 polymerase promoters, or antisense cDNA constructs that synthesize antisense RNA constitutively or inducibly, depending on the promoter used, can be introduced stably into cell lines.

[0064] DNA encoding a polypeptide can also be used in the diagnosis of colorectal cancer, resulting from aberrant expression of a target gene. For example, the nucleic acid sequence can be used in hybridization assays of biopsies or autopsies to diagnose abnormalities of expression or function (e.g., Southern or Northern blot analysis, in situ hybridization assays).

[0065] Expression of a polypeptide during embryonic development can also be determined using nucleic acid encoding the polypeptide, particularly production of a functionally impaired polypeptide that is the cause of colorectal cancer. In situ hybridizations using a polypeptide as a probe can be employed to predict problems related to colorectal cancer. Administration of human active polypeptide, recombinantly produced can be used to treat disease states related to functionally impaired polypeptide. Alternatively, gene therapy approaches may be employed to remedy deficiencies of functional polypeptide or to replace or compete with a dysfunctional polypeptide.

[0066] Included as part of this invention are nucleic acid vectors, often expression vectors, which contain a nucleotide sequence set forth in the tables. A vector is a nucleic acid molecule capable of transporting another nucleic acid to which it has been linked and can include a plasmid, cosmid, or viral vector. The vector can be capable of autonomous replication or it can integrate into a host DNA. Viral vectors may include replication defective retroviruses, adenoviruses and adeno-associated viruses for example.

[0067] A vector can include a nucleotide sequence from the tables in a form suitable for expression of an encoded protein or nucleic acid in a host cell. The recombinant expression vector generally includes one or more regulatory sequences operatively linked to the nucleic acid sequence to be expressed. A regulatory sequence includes promoters, enhancers and other expression control elements (e.g., polyadenylation signals). Regulatory sequences include those that direct constitutive expression of a nucleotide sequence, as well as tissue-specific regulatory and/or inducible sequences. The design of the expression vector can depend on such factors as the choice of the host cell to be transformed, the level of expression of polypeptide desired, etc. Expression vectors can be introduced into host cells to produce the desired polypeptides, including fusion polypeptides.

[0068] Recombinant expression vectors can be designed for expression of polypeptides in prokaryotic or eukaryotic cells. For example, the polypeptides can be expressed in E. coli, insect cells (e.g., using baculovirus expression vectors), yeast cells, or mammalian cells. Suitable host cells are discussed further by Goeddel (Goeddel, 1990). A recombinant expression vector can also be transcribed and translated in vitro, for example using T7 promoter regulatory sequences and T7 polymerase.

[0069] Expression of polypeptides in prokaryotes can be carried out in E. coli with vectors containing constitutive or inducible promoters directing the expression of either fusion or non-fusion polypeptides. Fusion vectors add a number of amino acids to a polypeptide. Such fusion vectors typically serve to increase expression of recombinant polypeptide, to increase the solubility of the recombinant polypeptide and/or to aid in the purification of the recombinant polypeptide by acting as a ligand during purification. Often, a proteolytic cleavage site is introduced at the junction of the fusion moiety and the recombinant polypeptide to enable separation of the recombinant polypeptide from the fusion moiety after purification of the fusion polypeptide. Such enzymes, and their cognate recognition sequences, include Factor Xa, thrombin and enterokinase. Typical fusion expression vectors include pGEX (Pharmacia Biotech Inc; (Smith & Johnson, 1988)), pMAL (New England Biolabs, Beverly, Mass.) and pRIT5 (Pharmacia, Piscataway, N.J.) which fuse glutathione S-transferase (GST), maltose E binding polypeptide, or polypeptide A, respectively, to the target recombinant polypeptide.

[0070] Purified fusion polypeptides can be used in screening assays and to generate antibodies specific for polypeptides. In a therapeutic embodiment, fusion polypeptide expressed in a retroviral expression vector can be used to infect bone marrow cells that are subsequently transplanted into irradiated recipients. The pathology of the subject recipient is then examined after sufficient time has passed.

[0071] Expressing a polypeptide in host bacteria with an impaired capacity to proteolytically cleave the recombinant polypeptide can be used to maximize recombinant polypeptide expression (Gottesman, 1990). The nucleotide sequence of the nucleic acid to be inserted into an expression vector can be changed so that the individual codons for each amino acid are those preferentially utilized in E. coli (Wada et al., 1992).

[0072] When used in mammalian cells, the expression vector's control functions are often provided by viral regulatory elements. For example, commonly used promoters are derived from polyoma, Adenovirus 2, cytomegalovirus and Simian Virus 40. Recombinant mammalian expression vectors can be capable of directing expression of the nucleic acid in a particular cell type (e.g., tissue-specific regulatory elements are used to express the nucleic acid). Examples of suitable tissue-specific promoters include an albumin promoter (Pinkert et al., 1987), lymphoid-specific promoters (Calame and Eaton, 1988), promoters of immunoglobulins (Banerji et al., 1983; Queen and Baltimore, 1983), neuron-specific promoters (Byrne and Ruddle, 1989), pancreas-specific promoters (Edlund et al., 1985), and mammary gland-specific promoters (e.g., milk whey promoter; U.S. Pat. No. 4,873,316 and European Application Publication No. 264,166). Developmentally-regulated promoters are sometimes utilized, for example, the murine box promoters (Kessel and Gruss, 1990) and the .alpha.-fetopolypeptide promoter (Camper and Tilghman, 1989).

[0073] A nucleic acid from one of the tables might be cloned into an expression vector in an antisense orientation. Regulatory sequences (e.g., viral promoters and/or enhancers) operatively linked to a nucleic acid cloned in the antisense orientation can be chosen for directing constitutive, tissue specific or cell type specific expression of antisense RNA in a variety of cell types. Antisense expression vectors can be in the form of a recombinant plasmid, phagemid or attenuated virus.

[0074] The invention includes host cells having a nucleotide sequence from the tables within a recombinant expression vector or a fragment of such a sequence, which facilitate homologous recombination into a specific site of the host cell genome. Terms such as host cell and recombinant host cell refer not only to the particular subject cell but also to the progeny of a cell. Because certain modifications may occur in succeeding generations due to either mutation or environmental influences, such progeny may not, in fact, be identical to the parent cell. A host cell can be any prokaryotic or eukaryotic cell. For example, a polypeptide can be expressed in bacterial cells such as E. coli, insect cells, yeast or mammalian cells (such as Chinese hamster ovary cells (CHO) or COS cells).

[0075] Vectors can be introduced into host cells via conventional transformation or transfection techniques. The terms transformation and transfection refer to a variety of techniques known for introducing foreign nucleic acid (e.g., DNA) into a host cell, including calcium phosphate or calcium chloride co-precipitation, transduction/infection, DEAE-dextran-mediated transfection, lipofection, or electroporation.

[0076] A host cell can be used to produce a polypeptide. Accordingly, methods for producing a polypeptide using the host cells are included as part of this invention. Such a method can include culturing host cells into which a recombinant expression vector encoding a polypeptide has been introduced in a suitable medium such that the polypeptide is produced. The method can further include isolating the polypeptide from the medium or the host cell.

[0077] The invention also includes cells or purified preparations of cells which include a transgene from the tables, or which otherwise mis-express a polypeptide. Cell preparations can consist of human or non-human cells, e.g., rodent cells, e.g., mouse or rat cells, rabbit cells, or pig cells. The transgene can be mis-expressed, e.g., over-expressed or under-expressed. In other embodiments, the cell or cells include a gene which misexpresses an endogenous polypeptide (e.g., expression of a gene is disrupted, also known as a knockout). Such cells can serve as a model for studying disorders which are related to mutated or mis-expressed alleles or for use in drug screening. Also provided are human cells (e.g., hematopoietic stem cells) transformed with a nucleic acid from the tables.

[0078] The invention includes cells or a purified preparation thereof (e.g., human cells) in which an endogenous nucleic acid from the tables is under the control of a regulatory sequence that does not normally control the expression of the endogenous gene corresponding to the sequence. The expression characteristics of an endogenous gene within a cell (e.g., a cell line or microorganism) can be modified by inserting a heterologous DNA regulatory element into the genome of the cell such that the inserted regulatory element is operably linked to the corresponding endogenous gene. For example, an endogenous corresponding gene (e.g., a gene which is transcriptionally silent, not normally expressed, or expressed only at very low levels) may be activated by inserting a regulatory element which is capable of promoting the expression of a normally expressed gene product in that cell. Techniques such as targeted homologous recombinations, can be used to insert the heterologous DNA as described in, e.g., Chappel, U.S. Pat. No. 5,272,071; WO 91/06667, published on May 16, 1991.

[0079] Non-human transgenic animals that express a heterologous polypeptide (e.g., expressed from a nucleic acid from the tables) can be generated. Such animals are useful for studying the function and/or activity of a polypeptide and for identifying and/or evaluating modulators of the activity of the nucleic acids and encoded polypeptides. A transgenic animal is a non-human animal such as a mammal (e.g., a non-human primate such as chimpanzee, baboon, or macaque; an ungulate such as an equine, bovine, or caprine; or a rodent such as a rat, a mouse, or an Israeli sand rat), a bird (e.g., a chicken or a turkey), an amphibian (e.g., a frog, salamander, or newt), or an insect (e.g., Drosophila melanogaster), in which one or more of the cells of the animal includes a transgene. A transgene is exogenous DNA or a rearrangement (e.g., a deletion of endogenous chromosomal DNA) that is often integrated into or occurs in the genome of cells in a transgenic animal. A transgene can direct expression of an encoded gene product in one or more cell types or tissues of the transgenic animal. Thus, a transgenic animal can be one in which an endogenous nucleic acid homologous to a nucleic acid from the tables has been altered by homologous recombination between the endogenous gene and an exogenous DNA molecule introduced into a cell of the animal (e.g., an embryonic cell of the animal) prior to development of the animal.

[0080] Intronic sequences and polyadenylation signals can also be included in the transgene to increase expression efficiency of the transgene. One or more tissue-specific regulatory sequences can be operably linked to a nucleotide sequence from the tables to direct expression of an encoded polypeptide to particular cells. A transgenic founder animal can be identified based upon the presence of the nucleotide sequence in its genome and/or expression of encoded mRNA in tissues or cells of the animals. A transgenic founder animal can then be used to breed additional animals carrying the transgene. Moreover, transgenic animals carrying a nucleotide sequence can further be bred to other transgenic animals carrying other transgenes.

[0081] Polypeptides can be expressed in transgenic animals or plants by introducing a nucleic acid encoding the polypeptide into the genome of an animal. In certain embodiments the nucleic acid is placed under the control of a tissue specific promoter, e.g., a milk or egg specific promoter, and recovered from the milk or eggs produced by the animal. Also included is a population of cells from a transgenic animal.

[0082] Isolated polypeptides encoded by a nucleotide sequence from the tables can be synthesized. Isolated polypeptides include both the full-length polypeptide and the mature polypeptide (i.e., the polypeptide minus the signal sequence or propeptide domain). An isolated, or purified, polypeptide or protein is substantially free of cellular material or other contaminating proteins from the cell or tissue source from which the protein is derived, or is substantially free from chemical precursors or other chemicals when chemically synthesized. Substantially free means a preparation of a polypeptide having less than about 5% (by dry weight) of contaminating protein, or of chemical precursors or non-target chemicals. When the desired polypeptide is recombinantly produced, it is typically substantially free of culture medium, specifically, where culture medium represents less than about 10% of the polypeptide preparation.

[0083] Also, polypeptides may exist as chimeric or fusion polypeptides. As used herein, a “target chimeric polypeptide” or “target fusion polypeptide” includes a target polypeptide linked to a different polypeptide. The target polypeptide in the fusion polypeptide can correspond to an entire or nearly entire polypeptide as it exists in nature or a fragment thereof. The other polypeptide can be fused to the N-terminus or C-terminus of the target polypeptide.

[0084] Fusion polypeptides can include a moiety having high affinity for a ligand. For example, the fusion polypeptide can be a GST-target fusion polypeptide in which the target sequences are fused to the C-terminus of the GST sequences, or a polyhistidine-target fusion polypeptide in which the target polypeptide is fused at the N- or C-terminus to a string of histidine residues. Such fusion polypeptides can facilitate purification of recombinant target polypeptide. Expression vectors are commercially available that already encode a fusion moiety (e.g., a GST polypeptide), and a nucleotide sequence from the tables, or a substantially identical nucleotide sequence thereof, can be cloned into an expression vector such that the fusion moiety is linked in-frame to the target polypeptide. Further, the fusion polypeptide can be a target polypeptide containing a heterologous signal sequence at its N-terminus. In certain host cells (e.g., mammalian host cells), expression, secretion, cellular internalization, and cellular localization of a target polypeptide can be increased through use of a heterologous signal sequence. Fusion polypeptides can also include all or a part of a serum polypeptide (e.g., an IgG constant region or human serum albumin).

[0085] Target polypeptides can be incorporated into pharmaceutical compositions and administered to a subject in vivo. Administration of these polypeptides can be used to affect the bioavailability of a substrate of the polypeptide and may effectively increase polypeptide biological activity in a cell. Target fusion polypeptides may be useful therapeutically for the treatment of disorders caused by, for example, (i) aberrant modification or mutation of a gene encoding a polypeptide; (ii) mis-regulation of the gene encoding the polypeptide; and (iii) aberrant post-translational modification of a polypeptide. Also, target polypeptides can be used as immunogens to produce anti-target antibodies in a subject, to purify the polypeptide ligands or binding partners, and in screening assays to identify molecules which inhibit or enhance the interaction of a polypeptide with a substrate.

[0086] Polypeptides can be differentially modified during or after translation, e.g., by glycosylation, acetylation, phosphorylation, amidation, derivatization by known protecting/blocking groups, proteolytic cleavage, linkage to an antibody molecule or other cellular ligand, etc. Any known modification including specific chemical cleavage by cyanogen bromide, trypsin, chymotrypsin, papain, V8 protease, NaBH₄; acetylation, formylation, oxidation, reduction; metabolic synthesis in the presence of tunicamycin; etc. may be used. Additional post-translational modifications include, for example, N-linked or O-linked carbohydrate chains, processing of N-terminal or C-terminal ends), attachment of chemical moieties to the amino acid backbone, chemical modifications of N-linked or O-linked carbohydrate chains, and addition or deletion of an N-terminal methionine residue as a result of prokaryotic host cell expression. The polypeptide fragments may also be modified with a detectable label, such as an enzymatic, fluorescent, isotopic or affinity label to allow for detection and isolation of the polypeptide.

[0087] Chemically modified derivatives of polypeptides that can provide additional advantages such as increased solubility, stability and circulating time of the polypeptide, or decreased immunogenicity (see e.g., U.S. Pat. No. 4,179,337) are also part of this invention. The chemical moieties for derivitization may be selected from water soluble polymers such as polyethylene glycol, ethylene glycol/propylene glycol copolymers, carboxymethylcellulose, dextran, polyvinyl alcohol and the like. The polypeptides may be modified at random positions within the molecule, or at predetermined positions within the molecule and may include one, two, three or more attached chemical moieties.

[0088] The polymer may be of any molecular weight, and may be branched or unbranched. For polyethylene glycol, the molecular weight often is between about 1 kDa and about 100 kDa for ease in handling and manufacturing. Other sizes may be used, depending on the desired therapeutic profile (e.g., the duration of sustained release desired, the effects, if any on biological activity, the ease in handling, the degree or lack of antigenicity and other known effects of the polyethylene glycol to a therapeutic protein or analog).

[0089] The polymers can be attached to the polypeptide with consideration of effects on functional or antigenic domains of the polypeptide. There are a number of attachment methods available to those skilled in the art (e.g., EP 0 401 384 (coupling PEG to G-CSF) and Malik et al. (Malik et al., 1992) For example, polyethylene glycol may be covalently bound through amino acid residues via a reactive group, such as a free amino or carboxyl group. Reactive groups are those to which an activated polyethylene glycol molecule may be bound. The amino acid residues having a free amino group may include lysine residues and the N-terminal amino acid residues; those having a free carboxyl group may include aspartic acid residues, glutamic acid residues and the C-terminal amino acid residue. Sulfhydryl groups may also be used as a reactive group for attaching the polyethylene glycol molecules. For therapeutic purposes, the attachment sometimes is at an amino group, such as attachment at the N-terminus or lysine group.

[0090] Proteins can be chemically modified at the N-terminus. Using polyethylene glycol, for example, one may select from a variety of polyethylene glycol molecules (by molecular weight, branching, and the like), the proportion of polyethylene glycol molecules to protein (polypeptide) molecules in the reaction mix, the type of pegylation reaction to be performed, and the method of obtaining the selected N-terminally pegylated protein. The method of obtaining the N-terminally pegylated preparation (i.e., separating this moiety from other monopegylated moieties if necessary) may be by purification of the N-terminally pegylated material from a population of pegylated protein molecules. Selective proteins chemically modified at the N-terminus may be accomplished by reductive alkylation, which exploits differential reactivity of different types of primary amino groups (lysine versus the N-terminal) available for derivatization in a particular protein. Under the appropriate reaction conditions, substantially selective derivatization of the protein at the N-terminus with a carbonyl group containing polymer is achievable.

### Applications of Prognostic and Diagnostic Results to Pharmacogenomic Methods

[0091] Pharmacogenomics is a discipline that involves tailoring a treatment for a subject according to the subject's genotype. For example, based upon the outcome of a prognostic test, a clinician or physician may target pertinent information and preventative or therapeutic treatments to a subject who would be benefited by the information or treatment and avoid directing such information and treatments to a subject who would not be benefited (e.g., the treatment has no therapeutic effect and/or the subject experiences adverse side effects). As therapeutic approaches for colorectal cancer continue to evolve and improve, the goal of treatments for colorectal cancer related disorders is to intervene even before clinical signs manifest themselves. Thus, genetic markers associated with susceptibility to colorectal cancer prove useful for early diagnosis, prevention and treatment of colorectal cancer.

[0092] The following is an example of a pharmacogenomic embodiment. A particular treatment regimen can exert a differential effect depending upon the subject's genotype. Where a candidate therapeutic exhibits a significant beneficial interaction with a prevalent allele and a comparatively weak interaction with an uncommon allele (e.g., an order of magnitude or greater difference in the interaction), such a therapeutic typically would not be administered to a subject genotyped as being homozygous for the uncommon allele, and sometimes not administered to a subject genotyped as being heterozygous for the uncommon allele. In another example, where a candidate therapeutic is not significantly toxic when administered to subjects who are homozygous for a prevalent allele but is comparatively toxic when administered to subjects heterozygous or homozygous for an uncommon allele, the candidate therapeutic is not typically administered to subjects who are genotyped as being heterozygous or homozygous with respect to the uncommon allele.

[0093] Methods of the invention are applicable to pharmacogenomic methods for detecting, preventing, alleviating and/or treating colorectal cancer. For example, a nucleic acid sample from an individual may be subjected to a genetic test. Where one or more SNPs associated with increased risk of colorectal cancer are identified in a subject, information for detecting, preventing or treating colorectal cancer and/or one or more colorectal cancer detection, prevention and/or treatment regimens then may be directed to and/or prescribed to that subject.

[0094] In certain embodiments, a detection, preventative and/or treatment regimen is specifically prescribed and/or administered to individuals who will most benefit from it based upon their risk of developing colorectal cancer assessed by the methods described herein. Methods are thus provided for identifying a subject at risk of colorectal cancer and then prescribing a detection, therapeutic, or preventative regimen to individuals identified as being at increased risk of colorectal cancer. Thus, certain embodiments are directed to methods for treating colorectal cancer in a subject, reducing risk of colorectal cancer in a subject, or early detection of colorectal cancer in a subject, which comprise: detecting the presence or absence of a SNP associated with colorectal cancer in a nucleotide sequence set forth in SEQ ID NOs:1 to 5703, and prescribing or administering a colorectal cancer treatment regimen, preventative regimen and/or detection regimen to a subject from whom the sample originated where the presence of one or more SNPs associated with colorectal cancer are detected in the nucleotide sequence. In these methods, genetic results may be utilized in combination with other test results to diagnose colorectal cancer as described above.

[0095] The use of certain colorectal cancer treatments are known in the art, and include surgery, chemotherapy and/or radiation therapy. Any of the treatments may be used in combination to treat or prevent colorectal cancer (e.g., surgery followed by radiation therapy or chemotherapy).

[0096] Pharmacogenomic methods also may be used to analyze and predict a response to a colorectal cancer treatment or a drug. For example, if pharmacogenomic analysis indicates a likelihood that an individual will respond positively to a colorectal cancer treatment with a particular drug, the drug may be administered to the individual. Conversely, if the analysis indicates that an individual is likely to respond negatively to treatment with a particular drug, an alternative course of treatment may be prescribed. A negative response may be defined as either the absence of an efficacious response or the presence of toxic side effects. The response to a therapeutic treatment can be predicted in a background study in which subjects in any of the following populations are genotyped: a population that responds favorably to a treatment regimen, a population that does not respond significantly to a treatment regimen, and a population that responds adversely to a treatment regiment (e.g., exhibits one or more side effects). These populations are provided as examples and other populations and subpopulations may be analyzed. Based upon the results of these analyses, a subject is genotyped to predict whether he or she will respond favorably to a treatment regimen, not respond significantly to a treatment regimen, or respond adversely to a treatment regimen.

[0097] The methods described herein also are applicable to clinical drug trials. One or more SNPs indicative of response to an agent for treating colorectal cancer or to side effects to an agent for treating colorectal cancer may be identified. Thereafter, potential participants, in clinical trials of such an agent may be screened to identify those individuals most likely to respond favorably to the drug and exclude those likely to experience side effects. In that way, the effectiveness of drug treatment may be measured in individuals who respond positively to the drug, without lowering the measurement as a result of the inclusion of individuals who are unlikely to respond positively in the study and without risking undesirable safety problems.

[0098] Thus, another embodiment is a method of selecting an individual for inclusion in a clinical trial of a treatment or drug comprising the steps of: (a) obtaining a nucleic acid sample from an individual; (b) determining the identity of a polymorphic variant, e.g., SNP which is associated with a positive response to the treatment or the drug, or at least one SNP which is associated with a negative response to the treatment or the drug in the nucleic acid sample, and (c) including the individual in the clinical trial if the nucleic acid sample contains the SNP associated with a positive response to the treatment or the drug or if the nucleic acid sample lacks said SNP associated with a negative response to the treatment or the drug. The SNP may be in a sequence selected individually or in any combination from those disclosed in the tables. Step (c) can also include administering the drug or the treatment to the individual if the nucleic acid sample contains the SNP associated with a positive response to the treatment or the drug and the nucleic acid sample lacks the SNP associated with a negative response to the treatment or the drug.

### Compositions Comprising Colorectal Cancer-Directed Molecules

[0099] The invention includes a composition made up of a colorectal cancer cell and one or more molecules specifically directed and targeted to a nucleic acid comprising a nucleotide sequence shown in the tables, or a polypeptide encoded thereby. Such directed molecules include, but are not limited to, a compound that binds to a nucleic acid or a polypeptide; a RNAi or siRNA molecule having a strand complementary to a nucleotide sequence; an antisense nucleic acid complementary to an RNA encoded by a DNA sequence; a ribozyme that hybridizes to a nucleotide sequence; a nucleic acid aptamer that specifically binds a polypeptide; and an antibody that specifically binds to a polypeptide or binds to a nucleic acid. In specific embodiments, the colorectal cancer directed molecule interacts with a nucleic acid or polypeptide variant associated with colorectal cancer.

### Compounds

[0100] Compounds can be obtained using any of numerous approaches in combinatorial library methods known in the art, including: biological libraries; peptoid libraries (libraries of molecules having the functionalities of peptides, but with a novel, non-peptide backbone which are resistant to enzymatic degradation but which nevertheless remain bioactive (Zuckermann et al., 1994). Biological library and peptoid library approaches are typically limited to peptide libraries, while the other approaches are applicable to peptide, non-peptide oligomer or small molecule libraries of compounds (Lam, 1997). Examples of methods for synthesizing molecular libraries are described, for example, in DeWitt et al. (DeWitt et al., 1993), Erb et al. (Erb et al., 1994), Zuckermann et al. (Zuckermann et al., 1994), Cho et al. (Cho et al., 1993) and Gallop et al. (Gallop et al., 1994).

[0101] Libraries of compounds may be presented in solution (Houghten et al., 1992), or on beads (Lam et al., 1991), chips (Fodor et al., 1993), bacteria or spores (Ladner, U.S. Pat. No. 5,223,409), plasmids (Cull et al., 1992) or on phage (Scott and Smith, 1990; Devlin et al., 1990; Cwirla et al., 1990; Felici et al., 1991).

[0102] A compound sometimes alters expression and sometimes alters activity of a target polypeptide and may be a small molecule. Small molecules include peptides, peptidomimetics (e.g., peptoids), amino acids, amino acid analogs, polynucleotides, polynucleotide analogs, nucleotides, nucleotide analogs, organic or inorganic compounds (i.e., including heteroorganic and organometallic compounds) having a molecular weight less than about 10,000 grams per mole, organic or inorganic compounds having a molecular weight less than about 5,000 grams per mole, organic or inorganic compounds having a molecular weight less than about 1,000 grams per mole, organic or inorganic compounds having a molecular weight less than about 500 grams per mole, and salts, esters, and other pharmaceutically acceptable forms of such compounds.

[0103] An antisense nucleic acid refers to a nucleotide sequence complementary to a sense nucleic acid encoding a polypeptide, e.g., complementary to, the coding strand of a double-stranded cDNA molecule or complementary to an mRNA sequence. The antisense nucleic acid can be complementary to an entire coding strand in a nucleic acid molecule having a sequence of one of SEQ ID NOs:5619 to 5703, or to a portion thereof. In another embodiment, the antisense nucleic acid molecule is antisense to a non-coding region of the coding strand of a nucleotide sequence, e.g., 5′ and 3′ untranslated regions.

[0104] An antisense nucleic acid can be designed such that it is complementary to the entire coding region of an mRNA encoded by a nucleotide sequence of interest, and often the antisense nucleic acid is an oligonucleotide antisense to only a portion of a coding or non-coding region of the mRNA. For example, the antisense oligonucleotide can be complementary to the region surrounding the translation start site of the mRNA, e.g., between the −10 and +10 regions of the target gene nucleotide (SNP) sequence of interest. An antisense oligonucleotide can be, for example, about 7, 10, 15, 20, 25, 30, 35, 40, 45, 50, 55, 60, 65, 70, 75, 80, or more nucleotides in length. The antisense nucleic acids, which include the ribozymes described below, can be designed to target a nucleotide sequence in any of SEQ ID NOs:5619 to 5703. Uncommon alleles and prevalent alleles can be targeted, and those associated with an increased risk of colorectal cancer are often designed, tested, and administered to subjects.

[0105] An antisense nucleic acid can be constructed using chemical synthesis and enzymatic ligation reactions using standard procedures. For example, an antisense nucleic acid molecule can be chemically synthesized using naturally occurring nucleotides or variously modified nucleotides designed to increase the biological stability of the molecules or to increase the physical stability of the duplex formed between the antisense and sense nucleic acids, e.g., phosphorothioate derivatives and acridine substituted nucleotides can be used. Antisense nucleic acid also can be produced biologically using an expression vector into which a nucleic acid has been subcloned in an antisense orientation (i.e., RNA transcribed from the inserted nucleic acid will be of an antisense orientation to a target nucleic acid of interest.

[0106] When utilized as therapeutics, antisense nucleic acids typically are administered to a subject (e.g., by direct injection at a tissue site) or generated in situ such that they hybridize with or bind to cellular mRNA and/or genomic DNA encoding a polypeptide and thereby inhibit expression of the polypeptide, for example, by inhibiting transcription and/or translation. Alternatively, antisense nucleic acid molecules can be modified to target selected cells and then are administered systemically. For systemic administration, antisense molecules can be modified such that they specifically bind to receptors or antigens expressed on a selected cell surface, for example, by linking antisense nucleic acid molecules to peptides or antibodies which bind to cell surface receptors or antigens. Antisense nucleic acid molecules can also be delivered to cells using vectors. Sufficient intracellular concentrations of antisense molecules are achieved by incorporating a strong promoter, such as a pol II or pol III promoter, in the vector construct.

[0107] Antisense nucleic acid molecules sometimes are anomeric nucleic acid molecules (Gautier et al., 1987). Antisense nucleic acid molecules can also comprise a 2′-o-methylribonucleotide (Inoue et al., 1987a) or a chimeric RNA-DNA analogue (Inoue et al., 1987b). Antisense nucleic acids sometimes are composed of DNA or peptide nucleic acid (PNA).

[0108] In another embodiment, an antisense nucleic acid is a ribozyme. A ribozyme having specificity for a target nucleotide sequence can include one or more sequences complementary to such a nucleotide sequence, and a sequence having a known catalytic region responsible for mRNA cleavage (see e.g., U.S. Pat. No. 5,093,246 or Haselhoff and Gerlach (Haseloff and Gerlach, 1988). For example, a derivative of a Tetrahymena L-19 IVS RNA is sometimes utilized in which the nucleotide sequence of the active site is complementary to the nucleotide sequence to be cleaved in a mRNA (see e.g., Cech et al., U.S. Pat. No. 4,987,071; and Cech et al., U.S. Pat. No. 5,116,742). Also, target mRNA sequences can be used to select a catalytic RNA having a specific ribonuclease activity from a pool of RNA molecules (Bartel and Szostak, 1993).

[0109] Colorectal cancer directed molecules include in certain embodiments nucleic acids that can form triple helix structures with a target nucleotide sequence, especially one that includes a regulatory region that controls expression of a polypeptide. Gene expression can be inhibited by targeting nucleotide sequences complementary to the regulatory region of a target nucleotide sequence (e.g., promoter and/or enhancers) to form triple helical structures that prevent transcription of a gene in target cells (Helene, 1991; Helene et al., 1992; Maher, III, 1992). Potential sequences that can be targeted for triple helix formation can be increased by creating a switchback nucleic acid molecule. Switchback molecules are synthesized in an alternating 5′-3′,3′-5′ manner, such that they base pair with first one strand of a duplex and then the other, eliminating the necessity for a sizeable stretch of either purines or pyrimidines to be present on one strand of a duplex.

[0110] Colorectal cancer directed molecules include RNAi and siRNA nucleic acids. Gene expression may be inhibited by the introduction of double-stranded RNA (dsRNA), which induces potent and specific gene silencing, a phenomenon called RNA interference or RNAi. See, e.g., Fire et al., U.S. Pat. No. 6,506,559; Tuschl et al., PCT International Publication No. WO 01/75164; Kay et al., PCT International Publication No. WO 03/010180A1; or Bosher J M, Labouesse (Bosher and Labouesse, 2000). This process has been improved by decreasing the size of the double-stranded RNA to 20-24 base pairs (to create small-interfering RNAs or siRNAs) that switched off genes in mammalian cells without initiating an acute phase response, i.e., a host defense mechanism that often results in cell death (Caplen et al., 2001a; Elbashir et al., 2002). There is increasing evidence of post-transcriptional gene silencing by RNA interference (RNAi) for inhibiting targeted expression in mammalian cells at the mRNA level, in human cells. There is additional evidence of effective methods for inhibiting the proliferation and migration of tumor cells in human patients, and for inhibiting metastatic cancer development (see, e.g., U.S. patent application No. US2001000993183; Caplen et al. (Caplen et al., 2001b), Abderrahman et al. (Abderrahmani et al., 2001).

[0111] An siRNA or RNAi is a nucleic acid that forms a double stranded RNA and has the ability to reduce or inhibit expression of a gene or target gene when the siRNA is delivered to or expressed in the same cell as the gene or target gene. siRNA is short double-stranded RNA formed by the complementary strands. Complementary portions of the siRNA that hybridize to form the double stranded molecule often have substantial or complete identity to the target molecule sequence. In one embodiment, an siRNA is a nucleic acid that has substantial or complete identity to a target gene and forms a double stranded siRNA.

[0112] When designing the siRNA molecules, the targeted region often is selected from a given DNA sequence beginning 50 to 100 nucleotides downstream of the start codon. See, e.g., Elbashir et al. (Elbashir et al., 2002). Initially, 5′ or 3′ UTRs and regions nearby the start codon were avoided assuming that UTR-binding proteins and/or translation initiation complexes may interfere with binding of the siRNP or RISC endonuclease complex. Sometimes regions of the target 23 nucleotides in length conforming to the sequence motif AA (N19)TT (N, an nucleotide), and regions with approximately 30% to 70% G/C-content (often about 50% G/C-content) often are selected. If no suitable sequences are found, the search often is extended using the motif NA (N2 1). The sequence of the sense siRNA sometimes corresponds to (N19) TT or N21 (position 3 to 23 of the 23-nt motif), respectively. In the latter case, the 3′ end of the sense siRNA often is converted to TT. The rationale for this sequence conversion is to generate a symmetric duplex with respect to the sequence composition of the sense and antisense 3′ overhangs. The antisense siRNA is synthesized as the complement to position 1 to 21 of the 23-nt motif. Because position 1 of the 23-nt motif is not recognized sequence-specifically by the antisense siRNA, the 3′-most nucleotide residue of the antisense siRNA can be chosen deliberately. However, the penultimate nucleotide of the antisense siRNA (complementary to position 2 of the 23-nt motif) often is complementary to the targeted sequence. For simplifying chemical synthesis, TT often is utilized. siRNAs corresponding to the target motif NAR (N17)YNN, where R is purine (A,G) and Y is pyrimidine (C,U), often are selected. Respective 21 nucleotide sense and antisense siRNAs often begin with a purine nucleotide and can also be expressed from pol III expression vectors without a change in targeting site. Expression of RNAs from pol III promoters can be more efficient when the first transcribed nucleotide is a purine.

[0113] The sequence of the siRNA can correspond to the full length target gene, or a subsequence thereof. Often, the siRNA is about 15 to about 50 nucleotides in length (e.g., each complementary sequence of the double stranded siRNA is 15 to 50 nucleotides in length, and the double stranded siRNA is about 15 to 50 base pairs in length, sometimes about 20 to 30 nucleotides in length or about 20 to 25 nucleotides in length, e.g., 20, 21, 22, 23, 24, 25, 26, 27, 28, 29, or 30 nucleotides in length. The siRNA sometimes is about 21 nucleotides in length. Methods of using siRNA are known in the art, and specific siRNA molecules may be purchased from a number of companies including Dharmacon Research, Inc.

[0114] Antisense, ribozyme, RNAi and siRNA nucleic acids can be altered to form modified nucleic acid molecules. The nucleic acids can be altered at base moieties, sugar moieties or phosphate backbone moieties to improve stability, hybridization, or solubility of the molecule. For example, the deoxyribose phosphate backbone of nucleic acid molecules can be modified to generate peptide nucleic acids (see Hyrup et al., Bioorganic & Medicinal Chemistry 4 (1): 5-23 (1996)). A peptide nucleic acid, or PNA, refers to a nucleic acid mimic such as a DNA mimic, in which the deoxyribose phosphate backbone is replaced by a pseudopeptide backbone and only the four natural nucleobases are retained. The neutral backbone of a PNA can allow for specific hybridization to DNA and RNA under conditions of low ionic strength. Synthesis of PNA oligomers can be performed using standard solid phase peptide synthesis protocols as described, for example, in Hyrup et al. (Hyrup and Nielsen, 1996), and Perry-O'Keefe et al. (Abderrahmani et al., 2001).

[0115] PNA nucleic acids can be used in prognostic, diagnostic, and therapeutic applications. For example, PNAs can be used as anti-sense or anti-gene agents for sequence-specific modulation of gene expression by, for example, inducing transcription or translation arrest or inhibiting replication. PNA nucleic acid molecules can also be used in the analysis of SNPs in a gene, (e.g., by PNA-directed PCR clamping); as artificial restriction enzymes when used in combination with other enzymes, (e.g., S1 nucleases (Hyrup and Nielsen, 1996) or as probes or primers for DNA sequencing or hybridization (Hyrup and Nielsen, 1996; Perry-O'Keefe et al., 1996).

[0116] In other embodiments, oligonucleotides may include other appended groups such as peptides (e.g., for targeting host cell receptors in vivo), or agents facilitating transport across cell membranes (see e.g., Letsinger et al. (Letsinger et al., 1989); Lemaitre et al. (Lemaitre et al., 1987) and PCT Publication No. WO88/09810) or the blood-brain barrier (see, e.g., PCT Publication No. WO89/10134). In addition, oligonucleotides can be modified with hybridization-triggered cleavage agents (van der Krol et al., 1988) or intercalating agents (Zon, 1988). To this end, the oligonucleotide may be conjugated to another molecule, (e.g., a peptide, hybridization triggered cross-linking agent, transport agent, or hybridization-triggered cleavage agent).

[0117] Also included as part of this invention are molecular beacon oligonucleotide primer and probe molecules having one or more regions complementary to a target nucleotide sequence, two complementary regions one having a fluorophore and one a quencher such that the molecular beacon is useful for quantifying the presence of the nucleic acid in a sample. Molecular beacon nucleic acids are described, for example, in Lizardi et al., U.S. Pat. No. 5,854,033; Nazarenko et al., U.S. Pat. No. 5,866,336, and Livak et al., U.S. Pat. No. 5,876,930.

### Antibodies

[0118] An immunogen typically is used to prepare antibodies by immunizing a suitable subject, (e.g., rabbit, goat, mouse or other mammal). An appropriate immunogenic preparation can contain, for example, recombinantly expressed chemically synthesized polypeptide. The preparation can further include an adjuvant, such as Freund's complete or incomplete adjuvant, or a similar immunostimulatory agent. Amino acid polymorphisms can be detected using antibodies specific for the altered epitope by western analysis after the electrophoresis of denatured proteins. Protein polymorphism can also be detected using fluorescently identified antibodies which bind to specific polymorphic epitopes and detected in whole cells using fluorescence activated cell sorting techniques (FACS). Polymorphic protein sequence may also be determined by NMR spectroscopy or by x-ray diffraction studies. Further, determination of polymorphic sites in proteins may be accomplished by observing differential cleavage by specific or non specific proteases.

[0119] An antibody is an immunoglobulin molecule or immunologically active portion thereof, i.e., an antigen-binding portion. Examples of immunologically active portions of immunoglobulin molecules include F(ab) and F(ab′)₂ fragments which can be generated by treating the antibody with an enzyme such as pepsin. An antibody can be polyclonal, monoclonal, or recombinant (e.g., a chimeric or humanized), fully human, non-human (e.g., murine), or a single chain antibody. An antibody may have effector function and can fix complement, and is sometimes coupled to a toxin or imaging agent.

[0120] A full-length polypeptide or antigenic peptide fragment encoded by a target nucleotide sequence can be used as an immunogen or can be used to identify antibodies made with other immunogens, e.g., cells, membrane preparations, and the like. An antigenic peptide often includes at least 8 amino acid residues of the amino acid sequences encoded by a nucleotide sequence of one of SEQ ID NOs:5619 to 5703, and encompasses an epitope. Antigenic peptides sometimes include 10 or more amino acids, 15 or more amino acids, 20 or more amino acids, or 30 or more amino acids. Hydrophilic and hydrophobic fragments of polypeptides sometimes are used as immunogens.

[0121] Epitopes encompassed by the antigenic peptide are regions located on the surface of the polypeptide (e.g., hydrophilic regions) as well as regions with high antigenicity. For example, an Emini surface probability analysis of the human polypeptide sequence can be used to indicate the regions that have a particularly high probability of being localized to the surface of the polypeptide and are thus likely to constitute surface residues useful for targeting antibody production. The antibody may bind an epitope on any domain or region on polypeptides for use in the invention.

[0122] Also, chimeric, humanized, and completely human antibodies are useful for applications which include repeated administration to subjects. Chimeric and humanized monoclonal antibodies, comprising both human and non-human portions, can be made using standard recombinant DNA techniques. Such chimeric and humanized monoclonal antibodies can be produced by recombinant DNA techniques, for example using methods described in Robinson et al., PCT International Publication No. WO 87/02671; Akira, et al., European Patent Application 184,187; Taniguchi, M., European Patent Application 171,496; Morrison et al., European Patent Application 173,494; Neuberger et al., PCT International Publication No. WO 86/01533; Cabilly et al., U.S. Pat. No. 4,816,567; Cabilly et al., European Patent Application 125,023; (Better et al., 1988; Liu et al., 1987a; Liu et al., 1987b; Sun et al., 1987; Nishimura et al., 1987; Wood et al., 1985; Shaw et al., 1988; Morrison, 1985; Verhoeyen et al., 1988; Beidler et al., 1988) and Winter, U.S. Pat. No. 5,225,539.

[0123] Completely human antibodies can be particularly desirable for therapeutic treatment of human patients. Such antibodies can be produced using transgenic mice that are incapable of expressing endogenous immunoglobulin heavy and light chains genes, but which can express human heavy and light chain genes. See, for example, Lonberg and Huszar (Lonberg and Huszar, 1995) and U.S. Pat. Nos. 5,625,126; 5,633,425; 5,569,825; 5,661,016; and 5,545,806. In addition, companies such as Abgenix, Inc. (Fremont, Calif.) and Medarex, Inc. (Princeton, N.J.), can be engaged to provide human antibodies directed against a selected antigen. Completely human antibodies that recognize a selected epitope also can be generated using guided selection. In this approach a selected non-human monoclonal antibody (e.g., a murine antibody) is used to guide the selection of a completely human antibody recognizing the same epitope. This technology is described for example by Jespers et al. (Jespers et al., 1994).

[0124] An antibody can be a single chain antibody. A single chain antibody (scFV) can be engineered (see, e.g., Colcher et al. (Colcher et al., 1999) and Reiter (Reiter and Pastan, 1996). Single chain antibodies can be dimerized or multimerized to generate multivalent antibodies having specificities for different epitopes of the same target polypeptide.

[0125] Antibodies also may be selected or modified so that they exhibit reduced or no ability to bind an Fc receptor. For example, an antibody may be an isotype or subtype, fragment or other mutant, which does not support binding to an Fc receptor (e.g., it has a mutagenized or deleted Fc receptor binding region).

[0126] Also, an antibody (or fragment thereof) may be conjugated to a therapeutic moiety such as a cytotoxin, a therapeutic agent or a radioactive metal ion. A cytotoxin or cytotoxic agent includes any agent that is detrimental to cells. Examples include taxol, cytochalasin B, gramicidin D, ethidium bromide, emetine, mitomycin, etoposide, tenoposide, vincristine, vinblastine, colchicin, doxorubicin, daunorubicin, dihydroxy anthracin dione, mitoxantrone, mithramycin, actinomycin D, 1 dehydrotestosterone, glucocorticoids, procaine, tetracaine, lidocaine, propranolol, and puromycin and analogs or homologs thereof. Therapeutic agents include antimetabolites (e.g., methotrexate, 6-mercaptopurine, 6-thioguanine, cytarabine, 5-fluorouracil decarbazine), alkylating agents (e.g., mechlorethamine, thiotepa chlorambucil, melphalan, carmustine (BCNU) and lomustine (CCNU), cyclophosphamide, busulfan, dibromomannitol, streptozotocin, mitomycin C, and cis-dichlorodiamine platinum (II) (DDP) cisplatin), anthracyclines (e.g., daunorubicin (formerly daunomycin) and doxorubicin), antibiotics (e.g., dactinomycin (formerly actinomycin), bleomycin, mithramycin, and anthramycin (AMC)), and anti-mitotic agents (e.g., vincristine and vinblastine).

[0127] Antibody conjugates can be used for modifying a given biological response. For example, the drug moiety may be a protein or polypeptide possessing a desired biological activity. Such proteins may include, for example, a toxin such as abrin, ricin A, pseudomonas exotoxin, or diphtheria toxin; a polypeptide such as tumor necrosis factor, γ-interferon, α-interferon, nerve growth factor, platelet derived growth factor, tissue plasminogen activator; or, biological response modifiers such as, for example, lymphokines, interleukin-1 (“IL-1”), interleukin-2 (“IL-2”), interleukin-6 (“IL-6”), granulocyte macrophage colony stimulating factor (“GM-CSF”), granulocyte colony stimulating factor (“G-CSF”), or other growth factors. Also, an antibody can be conjugated to a second antibody to form an antibody heteroconjugate as described by Segal in U.S. Pat. No. 4,676,980, for example.

[0128] An antibody (e.g., monoclonal antibody) can be used to isolate target polypeptides by standard techniques, such as affinity chromatography or immunoprecipitation. Moreover, an antibody can be used to detect a target polypeptide (e.g., in a cellular lysate or cell supernatant) in order to evaluate the abundance and pattern of expression of the polypeptide. Antibodies can be used diagnostically to monitor polypeptide levels in tissue as part of a clinical testing procedure, e.g., to determine the efficacy of a given treatment regimen. Detection can be facilitated by coupling (i.e., physically linking) the antibody to a detectable substance. Examples of detectable substances include various enzymes, prosthetic groups, fluorescent materials, luminescent materials, bioluminescent materials, and radioactive materials. Examples of suitable enzymes include horseradish peroxidase, alkaline phosphatase, β-galactosidase, or acetylcholinesterase; examples of suitable prosthetic group complexes include streptavidin/biotin and avidin/biotin; examples of suitable fluorescent materials include umbelliferone, fluorescein, fluorescein isothiocyanate, rhodamine, dichlorotriazinylamine fluorescein, dansyl chloride or phycoerythrin; an example of a luminescent material includes luminol; examples of bioluminescent materials include luciferase, luciferin, and aequorin, and examples of suitable radioactive material include ¹²⁵I, ¹³¹I, ³⁵S or ³H. Also, an antibody can be utilized as a test molecule for determining whether it can treat colorectal cancer, and as a therapeutic for administration to a subject for treating colorectal cancer.

[0129] An antibody can be made by immunizing with a purified antigen, or a fragment thereof, a membrane associated antigen, tissues, e.g., crude tissue preparations, whole cells, preferably living cells, lysed cells, or cell fractions.

[0130] Included as part of this invention are antibodies which bind only a native polypeptide, only denatured or otherwise non-native polypeptide, or which bind both, as well as those having linear or conformational epitopes. Conformational epitopes sometimes can be identified by selecting antibodies, that bind to native but not denatured polypeptide. Also featured are antibodies that specifically bind to a polypeptide variant associated with colorectal cancer.

### Screening Assays

[0131] The invention includes methods for identifying a candidate therapeutic for treating colorectal cancer. The methods include contacting a test molecule with a target molecule in a system. A target molecule is a nucleic acid molecule having a sequence of any of SEQ ID NOs:1 to 5703, or a fragment thereof, or a polypeptide encoded by the nucleic acid molecules of SEQ ID NOs:5619 to 5703. The method also includes determining the presence or absence of an interaction between the test molecule and the target molecule, where the presence of an interaction between the test molecule and the nucleic acid or polypeptide identifies the test molecule as a candidate colorectal cancer therapeutic. The interaction between the test molecule and the target molecule may be quantified.

[0132] Test molecules and candidate therapeutics include compounds, antisense nucleic acids, siRNA molecules, ribozymes, polypeptides or proteins encoded by target nucleic acids, and immunotherapeutics (e.g., antibodies and HLA-presented polypeptide fragments). A test molecule or candidate therapeutic may act as a modulator of target molecule concentration or target molecule function in a system. A modulator may agonize (i.e., up-regulates) or antagonize (i.e., down-regulates) a target molecule concentration partially or completely in a system by affecting such cellular functions as DNA replication and/or DNA processing (e.g., DNA methylation or DNA repair), RNA transcription and/or RNA processing (e.g., removal of intronic sequences and/or translocation of spliced mRNA from the nucleus), polypeptide production (e.g., translation of the polypeptide from mRNA), and/or polypeptide post-translational modification (e.g., glycosylation, phosphorylation, and proteolysis of pro-polypeptides). A modulator may also agonize or antagonize a biological function of a target molecule partially or completely, where the function may include adopting a certain structural conformation, interacting with one or more binding partners, ligand binding, catalysis (e.g., phosphorylation, dephosphorylation, hydrolysis, methylation, and isomerization), and an effect upon a cellular event (e.g., effecting progression of colorectal cancer).

[0133] According to an aspect of this invention a system, i.e., a cell free in vitro environment and a cell-based environment such as a collection of cells, a tissue, an organ, or an organism, is contacted with a test molecule in a variety of manners, including adding molecules in solution and allowing them to interact with one another by diffusion, cell injection, and any administration routes in an animal. An interaction refers to an effect of a test molecule on test molecule, where the effect sometimes is binding between the test molecule and the target molecule, and sometimes is an observable change in cells, tissue, or organism.

[0134] There are known methods for detecting the presence or absence of interaction between a test molecule and a target molecule. For example, titrametric, acidimetric, radiometric, NMR, monolayer, polarographic, spectrophotometric, fluorescent, and ESR assays probative of a target molecule interaction may be utilized.

[0135] Test molecule/target molecule interactions can be detected and/or quantified using known assays. For example, an interaction can be determined by labeling the test molecule and/or the target molecule, where the label is covalently or non-covalently attached to the test molecule or target molecule. The label is sometimes a radioactive molecule such as ¹²⁵I, ¹³¹I, ³⁵S or ³H, which can be detected by direct counting of radio-emission or by scintillation counting. Also, enzymatic labels such as horseradish peroxidase, alkaline phosphatase, or luciferase may be utilized where the enzymatic label can be detected by determining conversion of an appropriate substrate to product. In addition, presence or absence of an interaction can be determined without labeling. For example, a microphysiometer (e.g., Cytosensor) is an analytical instrument that measures the rate at which a cell acidifies its environment using a light-addressable potentiometric sensor (LAPS). Changes in this acidification rate can be used as an indication of an interaction between a test molecule and target molecule (McConnell et al., 1992).

[0136] In cell-based systems, cells typically include a nucleic acid from SEQ ID NOs:1 to 5703 or a polypeptide encoded by the nucleic acid molecules from SEQ ID NOs:5619 to 5703, and are often of mammalian origin, although the cell can be of any origin. Whole cells, cell homogenates, and cell fractions (e.g., cell membrane fractions) can be subjected to analysis. Where interactions between a test molecule with a target polypeptide are monitored, soluble and/or membrane bound forms of the polypeptide may be utilized. Where membrane-bound forms of the polypeptide are used, it may be desirable to utilize a solubilizing agent. Examples of such solubilizing agents include non-ionic detergents such as n-octylglucoside, n-dodecylglucoside, n-dodecylmaltoside, octanoyl-N-methylglucamide, decanoyl-N-methylglucamide, Triton™X-100, Triton™ X-114, etc.

[0137] An interaction between a test molecule and target molecule also can be detected by monitoring fluorescence energy transfer (FET) (see, e.g., Lakowicz et U.S. Pat. No. 5,631,169; Stavrianopoulos et al., U.S. Pat. No. 4,868,103). A fluorophore label on a first, donor molecule is selected such that its emitted fluorescent energy will be absorbed by a fluorescent label on a second, acceptor molecule, which in turn is able to fluoresce due to the absorbed energy. Alternately, the donor polypeptide molecule may simply utilize the natural fluorescent energy of tryptophan residues. Labels are chosen that emit different wavelengths of light, such that the acceptor molecule label may be differentiated from that of the donor. Since the efficiency of energy transfer between the labels is related to the distance separating the molecules, the spatial relationship between the molecules can be assessed. In a situation in which binding occurs between the molecules, the fluorescent emission of the acceptor molecule label in the assay should be maximal. An FET binding event can be conveniently measured through standard fluorometric detection means well known in the art (e.g., using a fluorimeter).

[0138] In another embodiment, determining the presence or absence of an interaction between a test molecule and a target molecule can be effected by monitoring surface plasmon resonance (Sjolander and Urbaniczky, 1991; Szabo et al., 1995). Surface plasmon resonance (SPR) or biomolecular interaction analysis (BIA) can be utilized to detect biospecific interactions in real time, without labeling any of the interactants (e.g., BIAcore). Changes in the mass at the binding surface (indicative of a binding event) result in alterations of the refractive index of light near the surface (the optical phenomenon of surface plasmon resonance, resulting in a detectable signal which can be used as an indication of real-time reactions between biological molecules.

[0139] In another embodiment, the target molecule or test molecules are anchored to a solid phase, facilitating the detection of target molecule/test molecule complexes and separation of the complexes from free, uncomplexed molecules. The target molecule or test molecule is immobilized to the solid support. In one embodiment, the target molecule is anchored to a solid surface, and the test molecule, which is not anchored, can be labeled, either directly or indirectly, with detectable labels.

[0140] It may be desirable to immobilize a target molecule, an anti-target molecule antibody, and/or test molecules to facilitate separation of target molecule/test molecule complexes from uncomplexed forms, as well as to accommodate automation of the assay. The attachment between a test molecule and/or target molecule and the solid support may be covalent or non-covalent (see, e.g., U.S. Pat. No. 6,022,688 for non-covalent attachments). The solid support may be one or more surfaces of the system, such as one or more surfaces in each well of a microtiter plate, a surface of a silicon wafer, a surface of a bead (Lam et al., 1991) that is optionally linked to another solid support, or a channel in a microfluidic device, for example. Types of solid supports, linker molecules for covalent and non-covalent attachments to solid supports, and methods for immobilizing nucleic acids and other molecules to solid supports are known (see, e.g., U.S. Pat. Nos. 6,261,776; 5,900,481; 6,133,436; and 6,022,688; and WIPO publication WO 01/18234).

[0141] In one embodiment, a target molecule may be immobilized to surfaces via biotin and streptavidin. For example, a biotinylated polypeptide can be prepared from biotin-NHS (N-hydroxysuccinimide, e.g., biotinylation kit, Pierce Chemicals, Rockford, Ill.), and immobilized in the wells of streptavidin-coated 96 well plates (Pierce Chemical). In another embodiment, a target polypeptide can be prepared as a fusion polypeptide. For example, glutathione-S-transferase/-polypeptide fusion can be adsorbed onto glutathione sepharose beads (Sigma Chemical, St. Louis, Mo.) or glutathione derivatized microtiter plates, which are then combined with a test molecule under conditions conducive to complex formation (e.g., at physiological conditions for salt and pH). Following incubation, the beads or microtiter plate wells are washed to remove any unbound components, or the matrix is immobilized in the case of beads, and complex formation is determined directly or indirectly as described above. Alternatively, the complexes can be dissociated from the matrix, and the level of target molecule binding or activity is determined using standard techniques.

[0142] In one embodiment, the non-immobilized component is added to the coated surface containing the anchored component. After the reaction is complete, unreacted components are removed (e.g., by washing) under conditions such that a significant percentage of complexes formed will remain immobilized to the solid surface. The detection of complexes anchored on the solid surface can be accomplished in a number of manners. Where the previously non-immobilized component is pre-labeled, the detection of label immobilized on the surface indicates that complexes were formed. Where the previously non-immobilized component is not pre-labeled, an indirect label can be used to detect complexes anchored on the surface, e.g., by adding a labeled antibody specific for the immobilized component, where the antibody, in turn, can be directly labeled or indirectly labeled with, e.g., a labeled anti-Ig antibody.

[0143] In another embodiment, an assay is performed utilizing antibodies that specifically bind a target molecule or test molecule but do not interfere with binding of the target molecule to the test molecule. Such antibodies can be linked to a solid support, and unbound target molecule may be immobilized by antibody conjugation. Methods for detecting such complexes, in addition to those described above for the GST-immobilized complexes, include immunodetection of complexes using antibodies reactive with the target molecule, as well as enzyme-linked assays which rely on detecting an enzymatic activity associated with the target molecule.

[0144] Cell free assays also can be conducted in a liquid phase. In such an assay, reaction products are separated from unreacted components, by known techniques, including: differential centrifugation (Rivas and Minton, 1993); electrophoresis (1999) and immunoprecipitation (1999). Media and chromatographic techniques are known (Heegaard, 1998; Hage and Tweed, 1997). Further, fluorescence energy transfer may also be conveniently utilized to detect binding without further purification of the complex from solution.

[0145] In another embodiment, modulators of target molecule expression are identified. For example, a cell or cell free mixture is contacted with a candidate compound and the expression of target mRNA or polypeptide is evaluated relative to the level of expression of target mRNA or polypeptide in the absence of the candidate compound. When expression of target mRNA or polypeptide is greater in the presence of the candidate compound than in its absence, the candidate compound is identified as an agonist of target mRNA or polypeptide expression. Alternatively, when expression of target mRNA or polypeptide is less (e.g., less with statistical significance) in the presence of the candidate compound than in its absence, the candidate compound is identified as an antagonist or inhibitor of target mRNA or polypeptide expression. The level of target mRNA or polypeptide expression can be determined by methods described herein.

[0146] In another embodiment, binding partners that interact with a target molecule are detected. The target molecules can interact with one or more cellular or extra-cellular macromolecules, such as polypeptides in vivo, and these interacting molecules or binding partners. Binding partners can agonize or antagonize target molecule biological activity. Also, test molecules that agonize or antagonize interactions between target molecules and binding partners can be useful as therapeutic molecules as they can up-regulate or down-regulated target molecule activity in vivo and thereby treat colorectal cancer.

[0147] Binding partners of target molecules can be identified by known methods. For example, binding partners may be identified by lysing cells and analyzing cell lysates by electrophoretic techniques. Alternatively, a two-hybrid assay or three-hybrid assay can be utilized (Zervos et al., 1993; Madura et al., 1993; Bartel et al., 1993; Iwabuchi et al., 1993): see also, e.g., U.S. Pat. No. 5,283,317 and Brent WO94/10300. A two-hybrid system is based on the modular nature of most transcription factors, which consist of separable DNA-binding and activation domains. The assay often utilizes two different DNA constructs. In one construct, a nucleic acid from one of SEQ ID NOs:5619 to 5703, sometimes referred to as the bait, is fused to a gene encoding the DNA binding domain of a known transcription factor (e.g., GAL-4). In another construct, a DNA sequence from a library of DNA sequences that encodes a potential binding partner, sometimes referred to as the prey, is fused to a gene that encodes an activation domain of the known transcription factor. Sometimes, a target nucleic acid can be fused to the activation domain. If the bait and the prey molecules interact in vivo, the DNA-binding and activation domains of the transcription factor are brought into close proximity. This proximity allows transcription of a reporter gene (e.g., lacZ) which is operably linked to a transcriptional regulatory site responsive to the transcription factor. Expression of the reporter gene can be detected and cell colonies containing the functional transcription factor can be isolated and used to identify the potential binding partner.

[0148] In an embodiment for identifying test molecules that antagonize or agonize complex formation between target molecules and binding partners, a reaction mixture containing the target molecule and the binding partner is prepared, under conditions and for a time sufficient to allow complex formation. The reaction mixture often is provided in the presence or absence of the test molecule. The test molecule can be included initially in the reaction mixture, or can be added at a time subsequent to the addition of the target molecule and its binding partner. Control reaction mixtures are incubated without the test molecule or with a placebo. Formation of any complexes between the target molecule and the binding partner then is detected. Decreased formation of a complex in the reaction mixture containing test molecule as compared to in a control reaction mixture indicates that the molecule antagonizes target molecule/binding partner complex formation. Alternatively, increased formation of a complex in the reaction mixture containing test molecule as compared to in a control reaction mixture, indicates that the molecule agonizes target molecule/binding partner complex formation. In another embodiment, complex formation of target molecule/binding partner can be compared to complex formation of mutant target molecule/binding partner (e.g., amino acid modifications in a target polypeptide). Such a comparison can be important in those cases where it is desirable to identify test molecules that modulate interactions of mutant but not non-mutated target gene products.

[0149] The assays can be conducted in a heterogeneous or homogeneous format. In heterogeneous assays, a target molecule and/or the binding partner are immobilized to a solid phase, and complexes are detected on the solid phase at the end of the reaction. In homogeneous assays, the entire reaction is carried out in a liquid phase. In either approach, the order of addition of reactants can be varied to obtain different information about the molecules being tested. For example, test compounds that agonize target molecule/binding partner interactions can be identified by conducting the reaction in the presence of the test molecule in a competition format. Alternatively, test molecules that agonize preformed complexes, e.g., molecules with higher binding constants that displace one of the components from the complex, can be tested by adding the test compound to the reaction mixture after complexes have been formed.

[0150] In a heterogeneous assay, the target molecule or the binding partner is anchored onto a solid surface (e.g., a microtiter plate), while the non-anchored species is labeled, either directly or indirectly. The anchored molecule can be immobilized by non-covalent or covalent attachments. Alternatively, an immobilized antibody specific for the molecule to be anchored can be used to anchor the molecule to the solid surface. The partner of the immobilized species is exposed to the coated surface with or without the test molecule. After the reaction is complete, unreacted components are removed (e.g., by washing) such that a significant portion of any complexes formed will remain immobilized on the solid surface. Where the non-immobilized species is pre-labeled, the detection of label immobilized on the surface is indicative of complex. Where the non-immobilized species is not pre-labeled, an indirect label can be used to detect complexes anchored to the surface; e.g., by using a labeled antibody specific for the initially non-immobilized species. Depending upon the order of addition of reaction components, test compounds that inhibit complex formation or that disrupt preformed complexes can be detected.

[0151] The reaction can be conducted in a liquid phase in the presence or absence of test molecule, where the reaction products are separated from unreacted components, and the complexes are detected (e.g., using an immobilized antibody specific for one of the binding components to anchor any complexes formed in solution, and a labeled antibody specific for the other partner to detect anchored complexes). Again, depending upon the order of addition of reactants to the liquid phase, test compounds that inhibit complex or that disrupt preformed complexes can be identified.

[0152] In an alternate embodiment, a homogeneous assay can be utilized. For example, a preformed complex of the target gene product and the interactive cellular or extra-cellular binding partner-product is prepared. One or both of the target molecule or binding partner is labeled, and the signal generated by the label(s) is quenched upon complex formation (e.g., U.S. Pat. No. 4,109,496 that-utilizes this approach for immunoassays). Addition of a test molecule that competes with and displaces one of the species from the preformed complex will result in the generation of a signal above background. In this way, test substances that disrupt target molecule/binding partner complexes can be identified.

### Identification of Candidate Therapeutics

[0153] Candidate therapeutics for treating colorectal cancer are identified from a group of test molecules that interact with a target molecule. Test molecules are normally ranked according to the degree with which they modulate (e.g., agonize or antagonize) a function associated with the target molecule (e.g., DNA replication and/or processing, RNA transcription and/or processing, polypeptide production and/or processing, and/or biological function/activity), and then top ranking modulators are selected. Also, pharmacogenomic information can determine the rank of a modulator. The top 10% of ranked test molecules often are selected for further testing as candidate therapeutics, and sometimes the top 15%, 20%, or 25% of ranked test molecules are selected for further testing as candidate therapeutics. Candidate therapeutics typically are formulated for administration to a subject.

### Therapeutic Formulations

[0154] Formulations and pharmaceutical compositions typically include in combination with a pharmaceutically acceptable carrier one or more target molecule modulators. The modulator often is a test molecule identified as having an interaction with a target molecule by a screening method. The modulator may be a compound, an antisense nucleic acid, a ribozyme, an antibody, or a binding partner. Also, formulations may include a polypeptide combination with a pharmaceutically acceptable carrier.

[0155] A pharmaceutically acceptable carrier includes solvents, dispersion media, coatings, antibacterial and antifungal agents, isotonic and absorption delaying agents, and the like, compatible with pharmaceutical administration. See for example, Remington's Pharmaceutical Sciences (2005). Supplementary active compounds can also be incorporated into the compositions. Pharmaceutical compositions can be included in a container, pack, or dispenser together with instructions for administration.

[0156] A pharmaceutical composition typically is formulated to be compatible with its intended route of administration. Examples of routes of administration include parenteral, e.g., intravenous, intradermal, subcutaneous, oral (e.g., inhalation), transdermal (topical), transmucosal, and rectal administrations Solutions or suspensions used for parenteral, intradermal, or subcutaneous application can include the following components: a sterile diluent such as water for injection, saline solution, fixed oils, polyethylene glycols, glycerin, propylene glycol or other synthetic solvents; antibacterial agents such as benzyl alcohol or methyl parabens; antioxidants such as ascorbic acid or sodium bisulfite; chelating agents such as ethylenediaminetetraacetic acid; buffers such as acetates, citrates or phosphates and agents for the adjustment of tonicity such as sodium chloride or dextrose. pH can be adjusted with acids or bases, such as hydrochloric acid or sodium hydroxide. The parenteral preparation can be enclosed in ampoules, disposable syringes or multiple dose vials made of glass or plastic.

[0157] Oral compositions generally include an inert diluent or an edible carrier. For the purpose of oral therapeutic administration, the active compound can be incorporated with excipients and used in the form of tablets, troches, or capsules, e.g., gelatin capsules. Oral compositions can also be prepared using a fluid carrier for use as a mouthwash. Pharmaceutically compatible binding agents, and/or adjuvant materials can be included as part of the composition. The tablets, pills, capsules, troches and the like can contain any of the following ingredients, or compounds of a similar nature: a binder such as microcrystalline cellulose, gum tragacanth or gelatin; an excipient such as starch or lactose, a disintegrating agent such as alginic acid, Primogel, or corn starch; a lubricant such as magnesium stearate; a glidant such as colloidal silicon dioxide; a sweetening agent such as sucrose or saccharin; or a flavoring agent such as peppermint, methyl salicylate, or orange flavoring.

[0158] Pharmaceutical compositions suitable for injectable use include sterile aqueous solutions (where water soluble) or dispersions and sterile powders for the extemporaneous preparation of sterile injectable solutions or dispersion. For intravenous administration, suitable carriers include physiological saline, bacteriostatic water, Cremophor EL™ (BASF, Parsippany, N.J.) or phosphate buffered saline (PBS). The composition must be sterile and should be fluid to the extent that easy syringability exists. It should be stable under the conditions of manufacture and storage and must be preserved against the contaminating action of microorganisms such as bacteria and fungi. The carrier can be a solvent or dispersion medium containing, for example, water, ethanol, polyol (for example, glycerol, propylene glycol, and liquid polyethylene glycol, and the like), and suitable mixtures thereof. The proper fluidity can be maintained, for example, by the use of a coating such as lecithin, by the maintenance of the required particle size in the case of dispersion and by the use of surfactants. Prevention of the action of microorganisms can be achieved by various antibacterial and antifungal agents, for example, parabens, chlorobutanol, phenol, ascorbic acid, thimerosal, and the like. In many cases, it will be preferable to include isotonic agents, for example, sugars, polyalcohols such as mannitol or sorbitol, and/or sodium chloride in the composition. Prolonged absorption of the injectable compositions can be brought about by including in the composition an agent which delays absorption, for example, aluminum monostearate and gelatin.

[0159] Sterile injectable solutions can be prepared by incorporating the active compound in the required amount in an appropriate solvent with one or a combination of ingredients enumerated above, as required, followed by filtered sterilization. Generally, dispersions are prepared by incorporating the active compound into a sterile vehicle which contains a basic dispersion medium and the required other ingredients from those enumerated above. In the case of sterile powders for the preparation of sterile injectable solutions, the methods of preparation often utilized are vacuum drying and freeze-drying which yields a powder of the active ingredient plus any additional desired ingredient from a previously sterile-filtered solution thereof.

[0160] Systemic administration might be by transmucosal or transdermal means. For transmucosal or transdermal administration, penetrants appropriate to the barrier to be permeated are used in the formulation. Such penetrants are generally known in the art, and include, for example, for transmucosal administration, detergents, bile salts, and fusidic acid derivatives. Transmucosal administration can be accomplished through the use of nasal sprays or suppositories. For transdermal administration, the active compounds are formulated into ointments, salves, gels, or creams as generally known in the art. Molecules can also be prepared in the form of suppositories (e.g., with conventional suppository bases such as cocoa butter and other glycerides) or retention enemas for rectal delivery.

[0161] In one embodiment, active molecules are prepared with carriers that will protect the compound against rapid elimination from the body, such as a controlled release formulation, including implants and microencapsulated delivery systems. Biodegradable, biocompatible polymers can be used, such as ethylene vinyl acetate, polyanhydrides, polyglycolic acid, collagen, polyorthoesters, and polylactic acid. Methods for preparation of such formulations will be apparent to those skilled in the art. Materials can also be obtained commercially from Alza Corporation and Nova Pharmaceuticals, Inc. Liposomal suspensions (including liposomes targeted to infected cells with monoclonal antibodies to viral antigens) can also be used as pharmaceutically acceptable carriers. These can be prepared according to methods known to those skilled in the art, for example, as described in U.S. Pat. No. 4,522,811.

[0162] It is advantageous to formulate oral or parenteral compositions in dosage unit form for ease of administration and uniformity of dosage. Each unit containing a predetermined quantity of active compound is calculated to produce the desired therapeutic effect in association with the required pharmaceutical carrier.

[0163] Toxicity and therapeutic efficacy of such compounds can be determined by standard pharmaceutical procedures in cell cultures or experimental animals, e.g., for determining the LD₅₀ (the dose lethal to 50% of the population) and the ED.sub.50 (the dose therapeutically effective in 50% of the population). The dose ratio between toxic and therapeutic effects is the therapeutic index and it can be expressed as the ratio LD₅₀/ED₅₀. Molecules which exhibit high therapeutic indices often are utilized. While molecules that exhibit toxic side effects may be used, care should be taken to design a delivery system that targets such compounds to the site of affected tissue in order to minimize potential damage to uninfected cells and, thereby, reduce side effects.

[0164] The data obtained from the cell culture assays and animal studies can be used in formulating a range of dosage for use in humans. The dosage of such molecules typically lies within a range of circulating concentrations that include the ED₅₀ with little or no toxicity. The dosage may vary within this range depending upon the dosage form employed and the route of administration utilized. For any molecules used in methods described herein, the therapeutically effective dose can be estimated initially from cell culture assays. A dose may be formulated in animal models to achieve a circulating plasma concentration range that includes the IC.sub.50 (i.e., the concentration of the test compound which achieves a half-maximal inhibition of symptoms) as determined in cell culture. Such information can be used to more accurately determine useful doses in humans. Levels in plasma may be measured, for example, by high performance liquid chromatography.

[0165] As defined herein, a therapeutically effective amount of protein or polypeptide (i.e., an effective dosage) ranges from about 0.001 to 30 mg/kg body weight, sometimes about 0.01 to 25 mg/kg body weight, often about 0.1 to 20 mg/kg body weight, and more often about 1 to 10 mg/kg, 2 to 9 mg/kg, 3 to 8 mg/kg, 4 to 7 mg/kg, or 5 to 6 mg/kg body weight. The protein or polypeptide can be administered one time per week for between about 1 to 10 weeks, sometimes between 2 to 8 weeks, often between about 3 to 7 weeks, and more often for about 4, 5, or 6 weeks. The skilled artisan will appreciate that certain factors may influence the dosage and timing required to effectively treat a subject, including but not limited to the severity of the disease or disorder, previous treatments, the general health and/or age of the subject, and other diseases present. Moreover, treatment of a subject with a therapeutically effective amount of a protein, polypeptide, or antibody can include a single treatment or, can include a series of treatments.

[0166] For antibodies, a dosage of 0.1 mg/kg of body weight (generally 10 mg/kg to 20 mg/kg) is often utilized. If the antibody is to act in the brain, a dosage of 50 mg/kg to 100 mg/kg is often appropriate. Generally, partially human antibodies and fully human antibodies have a longer half-life within the human body than other antibodies. Accordingly, lower dosage and less frequent administration is often possible. Modifications such as lipidation can be used to stabilize antibodies and to enhance uptake and tissue penetration (e.g., into the brain). A method for lipidation of antibodies is described by Cruikshank et al. (Cruikshank et al., 1997).

[0167] Antibody conjugates can be used for modifying a given biological response, the drug moiety is not to be construed as limited to classical chemical therapeutic agents. For example, the drug moiety may be a protein or polypeptide possessing a desired biological activity. Such proteins may include, for example, a toxin such as abrin, ricin A, pseudomonas exotoxin, or diphtheria toxin; a polypeptide such as tumor necrosis factor, alpha-interferon, beta-interferon, nerve growth factor, platelet derived growth factor, tissue plasminogen activator; or, biological response modifiers such as, for example, lymphokines, interleukin-1 (“IL-1”), interleukin-2 (“IL-2”), interleukin-6 (“IL-6”), granulocyte macrophage colony stimulating factor (“GM-CSF”), granulocyte colony stimulating factor (“G-CSF”), or other growth factors. Alternatively, an antibody can be conjugated to a second antibody to form an antibody heteroconjugate as described by Segal in U.S. Pat. No. 4,676,980.

[0168] For compounds, exemplary doses include milligram or microgram amounts of the compound per kilogram of subject or sample weight, for example, about 1 microgram per kilogram to about 500 milligrams per kilogram, about 100 micrograms per kilogram to about 5 milligrams per kilogram, or about 1 microgram per kilogram to about 50 micrograms per kilogram. It is understood that appropriate doses of a small molecule depend upon the potency of the small molecule with respect to the expression or activity to be modulated. When one or more of these small molecules is to be administered to an animal (e.g., a human) in order to modulate expression or activity of a polypeptide or nucleic acid described herein, a physician, veterinarian, or researcher may, for example, prescribe a relatively low dose at first, subsequently increasing the dose until an appropriate response is obtained. In addition, it is understood that the specific dose level for any particular animal subject will depend upon a variety of factors including the activity of the specific compound employed, the age, body weight, general health, gender, and diet of the subject, the time of administration, the route of administration, the rate of excretion, any drug combination, and the degree of expression or activity to be modulated.

[0169] With regard to nucleic acid formulations, gene therapy vectors can be delivered to a subject by, for example, intravenous injection, local administration (see, e.g., U.S. Pat. No. 5,328,470) or by stereotactic injection (Chen et al., 1994). Pharmaceutical preparations of gene therapy vectors can include a gene therapy vector in an acceptable diluent, or can comprise a slow release matrix in which the gene delivery vehicle is imbedded. Alternatively, where the complete gene delivery vector can be produced intact from recombinant cells (e.g., retroviral vectors) the pharmaceutical preparation can include one or more cells which produce the gene delivery system. Examples of gene delivery vectors are described herein.

### Therapeutic Methods

[0170] A therapeutic formulation described above can be administered to a subject in need of a therapeutic for treating colorectal cancer. Therapeutic formulations can be administered by any of the paths described herein. With regard to both prophylactic and therapeutic methods of treatment, such treatments may be specifically tailored or modified, based on knowledge obtained from pharmacogenomic analyses described herein.

[0171] A treatment is the application or administration of a therapeutic formulation to a subject, or application or administration of a therapeutic agent to an isolated tissue or cell line from a subject with the purpose to cure, heal, alleviate, relieve, alter, remedy, ameliorate, improve or affect colorectal cancer, symptoms of colorectal cancer or a predisposition towards colorectal cancer. A therapeutic formulation includes small molecules, peptides, antibodies, ribozymes and antisense oligonucleotides. Administration of a therapeutic formulation can occur prior to the manifestation of symptoms characteristic of colorectal cancer, such that the cancer is prevented or delayed in its progression. The appropriate therapeutic composition can be determined based on screening assays described herein.

[0172] As discussed, successful treatment of colorectal cancer can be brought about by techniques that serve to agonize target molecule expression or function, or alternatively, antagonize target molecule expression or function. These techniques include administration of modulators that include, but are not limited to, small organic or inorganic molecules; antibodies (including, for example, polyclonal, monoclonal, humanized, anti-idiotypic, chimeric or single chain antibodies, and FAb, F(ab′)₂ and FAb expression library fragments, scFV molecules, and epitope-binding fragments thereof); and peptides, phosphopeptides, or polypeptides.

[0173] Further, antisense and ribozyme molecules that inhibit expression of the target gene can also be used to reduce the level of target gene expression, thus effectively reducing the level of target gene activity. Still further, triple helix molecules can be utilized in reducing the level of target gene activity. Antisense, ribozyme and triple helix molecules are discussed above. It is possible that the use of antisense, ribozyme, and/or triple helix molecules to reduce or inhibit mutant gene expression can also reduce or inhibit the transcription (triple helix) and/or translation (antisense, ribozyme) of mRNA produced by normal target gene alleles, such that the concentration of normal target gene product present can be lower than is necessary for a normal phenotype. In such cases, nucleic acid molecules that encode and express target gene polypeptides exhibiting normal target gene activity can be introduced into cells via gene therapy method. Alternatively, in instances in that the target gene encodes an extra-cellular polypeptide, it can be preferable to co-administer normal target gene polypeptide into the cell or tissue in order to maintain the requisite level of cellular or tissue target gene activity.

[0174] Another method by which nucleic acid molecules may be utilized in treating or preventing colorectal cancer is use of aptamer molecules specific for target molecules. Aptamers are nucleic acid molecules having a tertiary structure which permits them to specifically bind to ligands (Osborne et al., 1997; Patel, 1997).

[0175] Yet another method of utilizing nucleic acid molecules for colorectal cancer treatment is gene therapy, which can also be referred to as allele therapy. The invention thus includes a gene therapy method for treating colorectal cancer in a subject, which includes contacting one or more cells in the subject or from the subject with a nucleic acid having a first nucleotide sequence. Genomic DNA in the subject includes a second nucleotide sequence having one or more SNPs associated with colorectal cancer. The first and second nucleotide sequences typically are substantially identical to one another, and the first nucleotide sequence comprises fewer SNPs associated with colorectal cancer than the second nucleotide sequence. The first nucleotide sequence may comprise a gene sequence that encodes a full-length polypeptide or a fragment thereof. The subject is often a human. Allele therapy methods often are utilized in conjunction with a method of first determining whether a subject has genomic DNA that includes SNPs associated with colorectal cancer.

[0176] Another allele therapy is a method which comprises contacting one or more cells in the subject or from the subject with a polypeptide encoded by a nucleic acid having a first nucleotide sequence. Genomic DNA in the subject includes a second nucleotide sequence having one or more SNPs associated with colorectal cancer. The first and second nucleotide sequences typically are substantially identical to one another, and the first nucleotide sequence includes fewer SNPs associated with colorectal cancer than the second nucleotide sequence. The first nucleotide sequence may include a gene sequence that encodes a full-length polypeptide or a fragment thereof. The subject is usually a human.

[0177] For antibody-based therapies, antibodies can be generated that are both specific for target molecules and that reduce target molecule activity. Such antibodies may be administered in instances where antagonizing a target molecule function is appropriate for the treatment of colorectal cancer.

[0178] In circumstances where stimulating antibody production in an animal or a human subject by injection with a target molecule is harmful to the subject, it is possible to generate an immune response against the target molecule by use of anti-idiotypic antibodies (Herlyn and Birebent, 1999; Bhattacharya-Chatterjee and Foon, 1998). Introducing an anti-idiotypic antibody to a mammal or human subject often stimulates production of anti-anti-idiotypic antibodies, which typically are specific to the target molecule. Vaccines directed to colorectal cancer also may be generated in this fashion.

[0179] In instances where the target molecule is intracellular and whole antibodies are used, internalizing antibodies often are utilized. Lipofectin or liposomes can be used to deliver the antibody or a fragment of the Fab region that binds to the target antigen into cells. Where fragments of the antibody are used, the smallest inhibitory fragment that binds to the target antigen often is utilized. For example, peptides having an amino acid sequence corresponding to the Fv region of the antibody can be used. Alternatively, single chain neutralizing antibodies that bind to intracellular target antigens can also be administered. Such single chain antibodies can be administered, for example, by expressing nucleotide sequences encoding single-chain antibodies within the target cell population (Marasco et al., 1993).

[0180] Modulators can be administered to a patient at therapeutically effective doses to treat colorectal cancer. A therapeutically effective dose refers to an amount of the modulator sufficient to result in amelioration of symptoms of colorectal cancer. Toxicity and therapeutic efficacy of modulators can be determined by standard pharmaceutical procedures in cell cultures or experimental animals, e.g., for determining the LD₅₀ (the dose lethal to 50% of the population) and the ED₅₀ (the dose therapeutically effective in 50% of the population). The dose ratio between toxic and therapeutic effects is the therapeutic index and it can be expressed as the ratio LD₅₀/ED₅₀. Modulators that exhibit large therapeutic indices often are utilized. While modulators that exhibit toxic side effects can be used, care should be taken to design a delivery system that targets such molecules to the site of affected tissue in order to minimize potential damage to uninfected cells, thereby reducing side effects.

[0181] Data obtained from cell culture assays and animal studies can be used in formulating a range of dosages for use in humans. The dosage of such compounds typically lies within a range of circulating concentrations that include the ED₅₀ with little or no toxicity. The dosage can vary within this range depending upon the dosage form employed and the route of administration utilized. The therapeutically effective dose can be estimated initially from cell culture assays. A dose can be formulated in animal models to achieve a circulating plasma concentration range that includes the IC₅₀ (i.e., the concentration of the test compound that achieves a half-maximal inhibition of symptoms) as determined in cell culture. Such information can be used to more accurately determine useful doses in humans. Levels in plasma can be measured, for example, by high performance liquid chromatography.

[0182] Another example of effective dose determination for an individual is the ability to directly assay levels of “free” and “bound” compound in the serum of the test subject. Such assays may utilize antibody mimics and/or “biosensors” that have been created through molecular imprinting techniques. Molecules that modulate target molecule activity are used as a template, or “imprinting molecule”, to spatially organize polymerizable monomers prior to their polymerization with catalytic reagents. The subsequent removal of the imprinted molecule leaves a polymer matrix which contains a repeated “negative image” of the compound and is able to selectively rebind the molecule under biological assay conditions. A detailed review of this technique can be seen in Ansell et al. (Ansell et al., 1996). Such “imprinted” affinity matrixes are amenable to ligand-binding assays, whereby the immobilized monoclonal antibody component is replaced by an appropriately imprinted matrix. An example of the use of such matrixes in this way can be seen in Vlatakis, et al. (Vlatakis et al., 1993). Through the use of isotope-labeling, the “free” concentration of compound which modulates target molecule expression or activity readily can be monitored and used in calculations of IC₅₀. Such “imprinted” affinity matrixes can also be designed to include fluorescent groups whose photon-emitting properties measurably change upon local and selective binding of target compound. These changes readily can be assayed in real time using appropriate fiberoptic devices, in turn allowing the dose in a test subject to be quickly optimized based on its individual IC₅₀.

[0183] The examples set forth below are intended to illustrate but not limit the invention.

[0184] Genomic DNA samples from patients aged 25-74 and patients with both familial and sporadic CRC with family and unrelated ethnically matched controls were studied. We identified CRC-associated alleles by measuring 385,562 single nucleotide polymorphisms in peripheral blood DNA from 2,128 subjects (1,059 cases with colorectal cancer and 1,069 age matched individuals undiseased at the time of testing), and validating the identified CRC-associated alleles by using peripheral blood DNA from a second and third, different, group of 2,194 subjects (687 and 452 cases, respectively, with colorectal cancer and 688 and 367 age matched individuals undiseased, respectively, at the time of testing). Patients with clinically documented well characterized inherited colorectal cancer syndromes such as Familial Adenomatous Polyposis (FAP) or Hereditary Non Polyposis Colorectal Cancer were excluded from our analysis. Single nucleotide polymorphisms were selected to maximize measurement of genomic variability by choosing these markers that were in the greatest degree of linkage disequilibrium with neighboring SNPs. This was determined by calculating correlation coefficients (r²) with successive neighboring SNPs at each site of polymorphism until an arbitrary cut off of 0.8 was observed. Marker SNPs selected for measurement were in linkage disequilibrium with a maximal number of adjacent SNPs, thus providing an economical method for measuring diversity over a large portion of the genome.

[0185] Single Nucleotide Polymorphisms selected for study were derived from the International Haplotype Mapping Project (http://www.hapmap.org) August 2004 release, information about which is available from the National Institutes of Health, National Institutes of Health (NIH; http://www.nih.gov/), 9000 Rockville Pike, Bethesda, Md. 20892. The SNPs were analyzed on DNA from our control and study population using the Affymetrix GeneChip® Human Mapping 500K Array Set platform (http://www.affymetrix.com, Affymetrix, Inc., 3380 Central Expressway, Santa Clara, Calif. 95051). The SNPs for the Affymetrix GeneChip® Human Mapping 500K Array Set platforms were selected as to cover the entire genome, but the SNPs were preferentially selected in genic regions present on NspI and StyI restriction fragments varying in length from about 200 base pairs to about 1100 base pairs. Data was stored and organized using the Nanuq informatics environment of the McGill University and Genome Quebec Innovation Centre (http://www.genomequebec.mcgill.ca/; McGill University and Genome Québec Innovation Centre, 740, Docteur Penfield Avenue, Montreal, Québec H3A 1A4). Allele frequencies found within DNA from patients with colorectal cancer and those without this disease were compared using the univariate Mantel-Haenszel Chi-Square statistic.

[0186] The inventors of the present invention have discovered single base pair polymorphisms that are present in a highly significant percentage of the genetic DNA of individuals affected with colorectal cancer while only present in a smaller percentage of individuals who are not known to be affected by the disease.

### Example 1

[0187] For individuals with colorectal cancer, the distribution of polymorphic alleles at position 5652680 of chromosome 1 was different from those without colorectal cancer (Table 1). The dominant test for risk associated with carrying the G allele had an empirical p-value based on permutation analysis of 0.005204, and the corresponding dominant odds ratio is 1.467 (Table 1). These data further suggest that this marker is associated with colorectal cancer risk and that the G allele at position 5652680 of chromosome 1 is associated with an increased risk of developing colorectal cancer.

TABLE 1

| | |
|---|---|
| rs no. | 1763322 |
| Chromosome; Position | 1; 5652680 |
| Gene Name | unknown |
| Genotype; Phenotype | n = G; increased risk |
| Hardy-Weinberg | 0.01547 |

| Case | | | | | | | Odds |
|---|---|---|---|---|---|---|---|
| Flag | Allele B | AA | AB | BB | Model | p-Value | Ratio |
| 0 | G | 153 | 443 | 443 | Dominant | 0.005204 | 1.467 |
| 1 | G | 99 | 446 | 395 | | | |

[0188] Table 1A indicates SNPs found to be in strong linkage disequilibrium with rs1763322. To generate this list, correlation coefficients (r²) were calculated between the index SNP and all neighboring SNPs cited in the June 2006 HapMap data set release. An r² cut off of 0.50 was selected for inclusion as evidence for strong genetic linkage, i.e., a “strong linkage disequilibrium.

TABLE 1A
Linked SNPs

| SNP | r² | Position on chr1 | SEQ ID NO |
|---|---|---|---|
| rs697708 | 0.803 | 5643494 | 1 |
| rs707587 | 0.924 | 5645572 | 2 |
| rs707588 | 0.512 | 5645696 | 3 |
| rs707589 | 0.924 | 5645913 | 4 |
| rs707590 | 0.57 | 5647097 | 5 |
| rs707591 | 0.92 | 5647280 | 6 |
| rs813444 | 0.85 | 5647550 | 7 |
| rs770684 | 0.872 | 5647811 | 8 |
| rs2488379 | 0.889 | 5650870 | 9 |
| rs1695634 | 0.849 | 5650899 | 10 |
| rs1775408 | 0.889 | 5651404 | 11 |
| rs11260671 | 0.924 | 5651654 | 12 |
| rs1763319 | 0.921 | 5651818 | 13 |
| rs1695631 | 0.948 | 5651847 | 14 |
| rs1763321 | 1.0 | 5652214 | 15 |
| rs1695629 | 0.924 | 5652282 | 16 |
| rs1763322 | — | 5652680 | 17 |
| rs1695628 | 0.961 | 5652840 | 18 |
| rs1763323 | 0.957 | 5653015 | 19 |
| rs1763324 | 0.883 | 5653688 | 20 |

### Example 2

[0189] For individuals with colorectal cancer, the distribution of polymorphic alleles at position 17391832 of chromosome 1, found within the PADI4 gene, was different from those without colorectal cancer (Table 2). The trend test for risk associated with carrying the C allele had an empirical p-value of 0.006108 based on permutation analysis, and the corresponding Mantel-Haenszel odds ratio for trend is 1.349 (Table 2). These data further suggest that this marker, located within the PADI4 gene, is associated with colorectal cancer risk and that the C allele at position 17391832 of chromosome 1 is associated with an increased risk of developing colorectal cancer.

TABLE 2

| | |
|---|---|
| rs no. | 2147333 |
| Chromosome; Position | 1; 17391832 |
| Gene Name | PADI4 |
| SEQ ID NO; Position | 5619; 11835 |
| Genotype; Phenotype | n = C; increased risk |
| Hardy-Weinberg | 0.07235 |

| Case | | | | | | | |
|---|---|---|---|---|---|---|---|
| Flag | Allele B | AA | AB | BB | Model | p-Value | Odds Ratio |
| 0 | C | 770 | 163 | 3 | Trend | 0.006108 | 1.349 |
| 1 | C | 708 | 200 | 7 | | | |

[0190] Table 2A indicates SNPs found to be in strong linkage disequilibrium with rs2147333. To generate this list, correlation coefficients (r²) were calculated between the index SNP and all neighboring SNPs cited in the June 2006 HapMap data set release. An r² cut off of 0.50 was selected for inclusion as evidence for strong genetic linkage, i.e., a “strong linkage disequilibrium.

TABLE 2A
Linked SNPs

| SNP | r² | Position on chr1 | SEQ ID NO |
|---|---|---|---|
| rs2501804 | 0.556 | 17384494 | 21 |
| rs2501806 | 0.608 | 17386090 | 22 |
| rs6673715 | 1.0 | 17388878 | 23 |
| rs2147333 | — | 17391832 | 24 |
| rs2147332 | 1.0 | 17392000 | 25 |
| rs6692262 | 1.0 | 17396536 | 26 |
| rs1204895 | 0.654 | 17396934 | 27 |
| rs1635598 | 0.608 | 17402627 | 28 |
| rs1748036 | 0.608 | 17404594 | 29 |
| rs1635577 | 0.866 | 17411445 | 30 |
| rs1635576 | 0.881 | 17411632 | 31 |
| rs1748022 | 0.88 | 17412020 | 32 |
| rs1748019 | 0.881 | 17414282 | 33 |
| rs1635570 | 0.701 | 17419907 | 34 |

### Example 3

[0191] For individuals with colorectal cancer, the distribution of polymorphic alleles at position 18512119 of chromosome 1 was different from those without colorectal cancer (Table 3). The trend test for risk associated with carrying the A allele had an empirical p-value of 0.000118 based on permutation analysis, and the corresponding Mantel-Haenszel odds ratio for trend is 1.291 (Table 3). These data further suggest that this marker is associated with colorectal cancer risk and that the A allele at position 18512119 of chromosome 1 is associated with an increased risk of developing colorectal cancer.

TABLE 3

| | |
|---|---|
| rs no. | 11261011 |
| Chromosome; Position | 1; 18512119 |
| Gene Name | unknown |
| Genotype; Phenotype | n = A; increased risk |
| Hardy-Weinberg | 0.2132 |

| Case | | | | | | | |
|---|---|---|---|---|---|---|---|
| Flag | Allele B | AA | AB | BB | Model | p-Value | Odds Ratio |
| 0 | A | 523 | 428 | 71 | Trend | 0.000118 | 1.291 |
| 1 | A | 405 | 400 | 105 | | | |

[0192] Table 3A indicates SNPs found to be in strong linkage disequilibrium with rs11261011. To generate this list, correlation coefficients (r²) were calculated between the index SNP and all neighboring SNPs cited in the June 2006 HapMap data set release. An r² cut off of 0.50 was selected for inclusion as evidence for strong genetic linkage, i.e., a “strong linkage disequilibrium.

TABLE 3A
Linked SNPs

| SNP | r² | Position on chr1 | SEQ ID NO |
|---|---|---|---|
| rs2355880 | 0.581 | 18484832 | 35 |
| rs1568341 | 0.58 | 18484852 | 36 |
| rs7522180 | 0.917 | 18484976 | 37 |
| rs11577969 | 0.92 | 18485834 | 38 |
| rs11577970 | 0.916 | 18485839 | 39 |
| rs11261002 | 0.6 | 18492401 | 40 |
| rs6700748 | 0.6 | 18494907 | 41 |
| rs12128025 | 0.577 | 18495737 | 42 |
| rs11261003 | 0.6 | 18496318 | 43 |
| rs11488494 | 0.6 | 18496396 | 44 |
| rs6603896 | 0.6 | 18496810 | 45 |
| rs869080 | 0.925 | 18497170 | 46 |
| rs945501 | 0.597 | 18498465 | 47 |
| rs12074757 | 0.612 | 18499756 | 48 |
| rs12127617 | 0.58 | 18500442 | 49 |
| rs1414643 | 0.58 | 18501831 | 50 |
| rs6699137 | 0.594 | 18502267 | 51 |
| rs4920496 | 0.6 | 18503492 | 52 |
| rs2222257 | 0.56 | 18504683 | 53 |
| rs10796454 | 0.554 | 18506717 | 54 |
| rs10796455 | 0.56 | 18506806 | 55 |
| rs945503 | 0.56 | 18508721 | 56 |
| rs11261011 | — | 18512119 | 57 |

### Example 4

[0193] For individuals with colorectal cancer, the distribution of polymorphic alleles at position 20628809 of chromosome 1 was different from those without colorectal cancer (Table 4). The to dominant test for risk associated with carrying the A allele had an empirical p-value based on permutation analysis of 0.051552, and the corresponding dominant odds ratio is 1.451 (Table 4). These data further suggest that this marker is associated with colorectal cancer risk and that the A allele at position 20628809 of chromosome 1 is associated with an increased risk of developing colorectal cancer.

TABLE 4

| | |
|---|---|
| rs no. | 7545658 |
| Chromosome; Position | 1; 20628809 |
| Gene Name | unknown |
| Genotype; Phenotype | n = A; increased risk |
| Hardy-Weinberg | 0.03524 |

| Case | | | | | | | Odds |
|---|---|---|---|---|---|---|---|
| Flag | Allele B | AA | AB | BB | Model | p-Value | Ratio |
| 0 | A | 74 | 358 | 610 | Dominant | 0.051552 | 1.451 |
| 1 | A | 47 | 325 | 567 | | | |

[0194] Table 4A indicates SNPs found to be in strong linkage disequilibrium with rs7545658. To generate this list, correlation coefficients (r²) were calculated between the index SNP and all neighboring SNPs cited in the June 2006 HapMap data set release. An r² cut off of 0.50 was selected for inclusion as evidence for strong genetic linkage, i.e., a “strong linkage disequilibrium.

TABLE 4A
Linked SNPs

| SNP | r² | Position on chr1 | SEQ ID NO |
|---|---|---|---|
| rs7545658 | — | 20628809 | 58 |
| rs7555911 | 0.584 | 20628828 | 59 |

### Example 5

[0195] For individuals with colorectal cancer, the distribution of polymorphic alleles at position to 20901973 of chromosome 1, found within the EIF4G3 gene, was different from those without colorectal cancer (Table 5). The recessive test for risk associated with carrying the A allele had an empirical p-value of 0.006048 based on permutation analysis, and the corresponding recessive odds ratio is 1.359 (Table 5). These data further suggest that this marker, located within the EIF4G3 gene, is associated with colorectal cancer risk and that the A allele at position 20901973 of chromosome 1 is associated with an increased risk of developing colorectal cancer.

TABLE 5

| | |
|---|---|
| rs no. | 4654874 |
| Chromosome; Position | 1; 20901973 |
| Gene Name | EIF4G3 |
| SEQ ID NO; Position | 5620; 220821 |
| Genotype; Phenotype | n = A; increased risk |
| Hardy-Weinberg | 0.06983 |

| Case | | | | | | | Odds |
|---|---|---|---|---|---|---|---|
| Flag | Allele B | AA | AB | BB | Model | p-Value | Ratio |
| 0 | A | 322 | 550 | 186 | Recessive | 0.006048 | 1.359 |
| 1 | A | 291 | 447 | 214 | | | |

[0196] Table 5A indicates SNPs found to be in strong linkage disequilibrium with rs4654874. To generate this list, correlation coefficients (r²) were calculated between the index SNP and all neighboring SNPs cited in the June 2006 HapMap data set release. An r² cut off of 0.50 was selected for inclusion as evidence for strong genetic linkage, i.e., a “strong linkage disequilibrium.

TABLE 5A
Linked SNPs

| SNP | r² | Position on chr1 | SEQ ID NO |
|---|---|---|---|
| rs951805 | 0.669 | 20805662 | 60 |
| rs710311 | 0.75 | 20807307 | 61 |
| rs12123092 | 0.746 | 20812307 | 62 |
| rs12121807 | 0.75 | 20814435 | 63 |
| rs10916859 | 0.75 | 20833262 | 64 |
| rs7548269 | 0.669 | 20834778 | 65 |
| rs7548649 | 0.75 | 20835387 | 66 |
| rs3736880 | 0.75 | 20843033 | 67 |
| rs651085 | 0.932 | 20843089 | 68 |
| rs651538 | 0.966 | 20843172 | 69 |
| rs589755 | 0.963 | 20845152 | 70 |
| rs1021077 | 0.75 | 20851322 | 71 |
| rs12123093 | 0.643 | 20859722 | 72 |
| rs3856173 | 0.722 | 20860139 | 73 |
| rs4233274 | 1.0 | 20866984 | 74 |
| rs1152999 | 0.589 | 20868329 | 75 |
| rs1152998 | 0.804 | 20869596 | 76 |
| rs3125161 | 0.778 | 20871652 | 77 |
| rs3121071 | 0.579 | 20873726 | 78 |
| rs7520481 | 0.774 | 20885691 | 79 |
| rs935918 | 0.695 | 20890966 | 80 |
| rs10753507 | 0.793 | 20897686 | 81 |
| rs4654873 | 0.524 | 20897690 | 82 |
| rs10799665 | 0.6 | 20897946 | 83 |
| rs2320590 | 0.933 | 20900501 | 84 |
| rs4654874 | — | 20901973 | 85 |
| rs11805169 | 0.621 | 20902168 | 86 |
| rs4654875 | 0.587 | 20910482 | 87 |
| rs935917 | 0.778 | 20912408 | 88 |
| rs4654724 | 0.695 | 20922516 | 89 |
| rs2305463 | 0.931 | 20925487 | 90 |
| rs7543140 | 0.778 | 20925556 | 91 |
| rs1530946 | 0.695 | 20927846 | 92 |
| rs4654880 | 0.799 | 20931914 | 93 |
| rs10916885 | 1.0 | 20934009 | 94 |
| rs6695218 | 0.568 | 20935818 | 95 |
| rs7519685 | 0.695 | 20937929 | 96 |
| rs2167811 | 0.69 | 20939816 | 97 |
| rs3890762 | 0.966 | 20943571 | 98 |
| rs10737452 | 0.695 | 20945070 | 99 |
| rs10916891 | 0.579 | 20945280 | 100 |
| rs4654725 | 0.695 | 20945717 | 101 |
| rs4654726 | 0.778 | 20949204 | 102 |
| rs17449966 | 0.674 | 20949302 | 103 |
| rs7545133 | 0.778 | 20951449 | 104 |
| rs4654881 | 1.0 | 20955075 | 105 |
| rs2290381 | 0.695 | 20958577 | 106 |
| rs4654883 | 0.893 | 20959014 | 107 |
| rs4654727 | 0.778 | 20960041 | 108 |
| rs2275468 | 0.778 | 20965681 | 109 |
| rs6704421 | 0.966 | 20965980 | 110 |
| rs17410008 | 0.695 | 20966007 | 111 |
| rs4654729 | 1.0 | 20969559 | 112 |
| rs3767247 | 0.695 | 20972644 | 113 |
| rs4654887 | 0.778 | 20980229 | 114 |
| rs10916900 | 1.0 | 20984365 | 115 |
| rs6699704 | 0.579 | 20986738 | 116 |
| rs10916903 | 0.695 | 20993250 | 117 |
| rs11805006 | 1.0 | 20994909 | 118 |
| rs6692677 | 1.0 | 20997023 | 119 |
| rs17450586 | 0.594 | 20999899 | 120 |
| rs12407731 | 1.0 | 21000095 | 121 |
| rs10916906 | 0.688 | 21000981 | 122 |
| rs6698440 | 0.966 | 21004018 | 123 |
| rs10916907 | 0.966 | 21006394 | 124 |
| rs10442633 | 0.966 | 21010403 | 125 |
| rs12133780 | 0.743 | 21016114 | 126 |
| rs3767248 | 0.743 | 21022160 | 127 |
| rs6700459 | 0.66 | 21024702 | 128 |
| rs12137408 | 0.966 | 21028251 | 129 |
| rs6697555 | 0.743 | 21033244 | 130 |
| rs10916911 | 0.966 | 21035367 | 131 |
| rs6669077 | 0.964 | 21035826 | 132 |
| rs6697284 | 0.966 | 21040905 | 133 |
| rs2271115 | 0.743 | 21041170 | 134 |
| rs6700718 | 0.737 | 21044669 | 135 |
| rs4654893 | 0.579 | 21050902 | 136 |
| rs12021529 | 0.579 | 21051467 | 137 |
| rs7540023 | 0.599 | 21055398 | 138 |
| rs10916919 | 0.608 | 21062830 | 139 |
| rs10799677 | 0.562 | 21063762 | 140 |
| rs10799678 | 0.966 | 21068091 | 141 |
| rs12123300 | 0.62 | 21068874 | 142 |
| rs2874367 | 0.966 | 21069797 | 143 |
| rs11302414 | 0.716 | 21072609 | 144 |
| rs12130664 | 0.66 | 21078118 | 145 |
| rs6661116 | 0.743 | 21082461 | 146 |
| rs12070677 | 0.965 | 21082628 | 147 |
| rs6681064 | 0.743 | 21084950 | 148 |
| rs6659152 | 0.71 | 21101147 | 149 |
| rs6426658 | 0.66 | 21106482 | 150 |
| rs6685914 | 0.574 | 21107684 | 151 |
| rs6684976 | 0.743 | 21112807 | 152 |
| rs6668370 | 0.966 | 21114874 | 153 |
| rs6703227 | 0.743 | 21120116 | 154 |
| rs964466 | 0.594 | 21120469 | 155 |
| rs10493006 | 0.66 | 21121210 | 156 |
| rs6426665 | 0.966 | 21127511 | 157 |
| rs10916927 | 0.66 | 21131101 | 158 |
| rs6658526 | 0.583 | 21136620 | 159 |
| rs1354792 | 0.966 | 21137181 | 160 |
| rs12567861 | 0.579 | 21140439 | 161 |
| rs10916930 | 0.588 | 21140663 | 162 |
| rs6426667 | 0.965 | 21141522 | 163 |
| rs6426668 | 0.743 | 21141902 | 164 |
| rs6692244 | 0.743 | 21142192 | 165 |
| rs7521711 | 0.966 | 21145524 | 166 |
| rs1567128 | 0.525 | 21149959 | 167 |

### Example 6

[0197] For individuals with colorectal cancer, the distribution of polymorphic alleles at position 22090399 of chromosome 1 was different from those without colorectal cancer (Table 6). The trend test for risk associated with carrying the G allele had an empirical p-value of 0.001626 based on permutation analysis, and the corresponding Mantel-Haenszel odds ratio for trend is 1.262 (Table 6). These data further suggest that this marker is associated with colorectal cancer risk and that the G allele at position 22090399 of chromosome 1 is associated with an increased risk of developing colorectal cancer.

TABLE 6

| | |
|---|---|
| rs no. | 3117048 |
| Chromosome; Position | 1; 22090399 |
| Gene Name | unknown |
| Genotype; Phenotype | n = G; increased risk |
| Hardy-Weinberg | 0.00074 |

| Case | | | | | | | |
|---|---|---|---|---|---|---|---|
| Flag | Allele B | AA | AB | BB | Model | p-Value | Odds Ratio |
| 0 | G | 97 | 493 | 382 | Trend | 0.001626 | 1.262 |
| 1 | G | 76 | 438 | 444 | | | |

[0198] Table 6A indicates SNPs found to be in strong linkage disequilibrium with rs3117048. To generate this list, correlation coefficients (r²) were calculated between the index SNP and all neighboring SNPs cited in the June 2006 HapMap data set release. An r² cut off of 0.50 was selected for inclusion as evidence for strong genetic linkage, i.e., a “strong linkage disequilibrium.

TABLE 6A
Linked SNPs

| SNP | r² | Position on chr1 | SEQ ID NO |
|---|---|---|---|
| rs10799719 | 0.529 | 21994187 | 168 |
| rs6658920 | 0.505 | 22003045 | 169 |
| rs10917067 | 0.505 | 22010599 | 170 |
| rs7544500 | 0.535 | 22017145 | 171 |
| rs10917075 | 0.636 | 22028977 | 172 |
| rs12410694 | 0.591 | 22033247 | 173 |
| rs12410759 | 0.529 | 22033774 | 174 |
| rs8179387 | 0.591 | 22035462 | 175 |
| rs6699127 | 0.84 | 22037572 | 176 |
| rs12745683 | 0.591 | 22039203 | 177 |
| rs11582921 | 0.591 | 22040172 | 178 |
| rs6698084 | 0.837 | 22040277 | 179 |
| rs6688236 | 0.826 | 22051221 | 180 |
| rs12049408 | 0.765 | 22054010 | 181 |
| rs7520526 | 0.733 | 22057214 | 182 |
| rs4394607 | 0.964 | 22066093 | 183 |
| rs12405048 | 0.644 | 22066856 | 184 |
| rs12566806 | 0.747 | 22067235 | 185 |
| rs12032777 | 0.643 | 22070236 | 186 |
| rs12751986 | 0.676 | 22073585 | 187 |
| rs4344303 | 0.599 | 22081426 | 188 |
| rs3117048 | — | 22090399 | 189 |
| rs2501299 | 0.862 | 22090953 | 190 |

### Example 7

[0199] For individuals with colorectal cancer, the distribution of polymorphic alleles at position 33676444 of chromosome 1, found within the CSMD2 gene, was different from those without colorectal cancer (Table 7). The recessive test for risk associated with carrying the C allele had an empirical p-value of 0.000364 based on permutation analysis, and the corresponding recessive odds ratio is 1.426 (Table 7). These data further suggest that this marker, located within the CSMD2 gene, is associated with colorectal cancer risk and that the C allele at position 33676444 of chromosome 1 is associated with an increased risk of developing colorectal cancer.

TABLE 7

| | |
|---|---|
| rs no. | 1773026 |
| Chromosome; Position | 1; 33676444 |
| Gene Name | CSMD2 |
| SEQ ID NO; Position | 5621; 624093 |
| Genotype; Phenotype | n = C; increased risk |
| Hardy-Weinberg | 0.14007 |

| Case | Allele | | | | | | Odds |
|---|---|---|---|---|---|---|---|
| Flag | B | AA | AB | BB | Model | p-Value | Ratio |
| 0 | C | 211 | 511 | 254 | Recessive | 0.000364 | 1.426 |
| 1 | C | 205 | 431 | 319 | | | |

[0200] Table 7A indicates SNPs found to be in strong linkage disequilibrium with rs1773026. To generate this list, correlation coefficients (r²) were calculated between the index SNP and all neighboring SNPs cited in the June 2006 HapMap data set release. An r² cut off of 0.50 was selected for inclusion as evidence for strong genetic linkage, i.e., a “strong linkage disequilibrium.

TABLE 7A
Linked SNPs

| SNP | r² | Position on chr1 | SEQ ID NO |
|---|---|---|---|
| rs7545179 | 0.608 | 33594198 | 191 |
| rs7537510 | 0.604 | 33594270 | 192 |
| rs10914729 | 0.636 | 33595060 | 193 |
| rs10914730 | 0.615 | 33596139 | 194 |
| rs6425820 | 0.75 | 33605440 | 195 |
| rs10798954 | 0.75 | 33610121 | 196 |
| rs7531293 | 0.809 | 33616560 | 197 |
| rs903217 | 0.622 | 33651889 | 198 |
| rs2794599 | 0.605 | 33652136 | 199 |
| rs2131776 | 0.665 | 33654063 | 200 |
| rs1690557 | 0.713 | 33654926 | 201 |
| rs10753287 | 0.749 | 33660788 | 202 |
| rs2794593 | 0.542 | 33661463 | 203 |
| rs2641953 | 0.542 | 33670428 | 204 |
| rs1773026 | — | 33676444 | 205 |
| rs1773027 | 0.542 | 33676601 | 206 |

### Example 8

[0201] For individuals with colorectal cancer, the distribution of polymorphic alleles at position 40781063 of chromosome 1, found within the RIMS3 gene, was different from those without colorectal cancer (Table 8). The recessive test for risk associated with carrying the A allele had an empirical p-value of 0.001402 based on permutation analysis, and the corresponding recessive odds ratio is 3.527 (Table 8). These data further suggest that this marker, located within the RIMS3 gene, is associated with colorectal cancer risk and that the A allele at position 40781063 of chromosome 1 is associated with an increased risk of developing colorectal cancer.

TABLE 8

| | |
|---|---|
| rs no. | 1333827 |
| Chromosome; Position | 1; 40781063 |
| Gene Name | RIMS3 |
| SEQ ID NO; Position | 5622; 19359 |
| Genotype; Phenotype | n = A; increased risk |
| Hardy-Weinberg | 0.02451 |

| Case | | | | | | | |
|---|---|---|---|---|---|---|---|
| Flag | Allele B | AA | AB | BB | Model | p-Value | Odds Ratio |
| 0 | A | 771 | 228 | 7 | Recessive | 0.001402 | 3.527 |
| 1 | A | 754 | 217 | 24 | | | |

[0202] Table 8A indicates SNPs found to be in strong linkage disequilibrium with rs1333827. To generate this list, correlation coefficients (r²) were calculated between the index SNP and all neighboring SNPs cited in the June 2006 HapMap data set release. An r² cut off of 0.50 was selected for inclusion as evidence for strong genetic linkage, i.e., a “strong linkage disequilibrium.

TABLE 8A
Linked SNPs

| SNP | r² | Position on chr1 | SEQ ID NO |
|---|---|---|---|
| rs12059241 | 0.531 | 40754887 | 207 |
| rs12059305 | 0.532 | 40755019 | 208 |
| rs17412556 | 0.85 | 40757670 | 209 |
| rs661221 | 0.85 | 40762923 | 210 |
| rs2780946 | 1.0 | 40771174 | 211 |
| rs7555073 | 1.0 | 40775136 | 212 |
| rs850010 | 1.0 | 40776959 | 213 |
| rs664350 | 1.0 | 40777187 | 214 |
| rs636579 | 1.0 | 40778790 | 215 |
| rs474419 | 1.0 | 40779764 | 216 |
| rs620268 | 1.0 | 40780164 | 217 |
| rs1333827 | — | 40781063 | 218 |
| rs528992 | 1.0 | 40781288 | 219 |
| rs627178 | 1.0 | 40797069 | 220 |
| rs500789 | 1.0 | 40798090 | 221 |
| rs518437 | 1.0 | 40801268 | 222 |
| rs518312 | 1.0 | 40801318 | 223 |

### Example 9

[0203] For individuals with colorectal cancer, the distribution of polymorphic alleles at position 82422197 of chromosome 1 was different from those without colorectal cancer (Table 9). The recessive test for risk associated with carrying the A allele had an empirical p-value of 0.004479 based on permutation analysis, and the corresponding recessive odds ratio is 1.397 (Table 9). These data further suggest that this marker is associated with colorectal cancer risk and that the A allele at position 82422197 of chromosome 1 is associated with an increased risk of developing colorectal cancer.

TABLE 9

| | |
|---|---|
| rs no. | 7555416 |
| Chromosome; Position | 1; 82422197 |
| Gene Name | unknown |
| Genotype; Phenotype | n = A; increased risk |
| Hardy-Weinberg | 0.01416 |

| | | | | | | | Odds |
|---|---|---|---|---|---|---|---|
| Case Flag | Allele B | AA | AB | BB | Model | p-Value | Ratio |
| 0 | A | 249 | 473 | 159 | Recessive | 0.004479 | 1.397 |
| 1 | A | 238 | 448 | 211 | | | |

[0204] Table 9A indicates SNPs found to be in strong linkage disequilibrium with rs7555416. To generate this list, correlation coefficients (r²) were calculated between the index SNP and all neighboring SNPs cited in the June 2006 HapMap data set release. An r² cut off of 0.50 was selected for inclusion as evidence for strong genetic linkage, i.e., a “strong linkage disequilibrium.

TABLE 9A
Linked SNPs

| SNP | r² | Position on chr1 | SEQ ID NO |
|---|---|---|---|
| rs1505550 | 0.607 | 82399075 | 224 |
| rs10493711 | 0.686 | 82401753 | 225 |
| rs10493712 | 0.716 | 82402027 | 226 |
| rs10874295 | 0.935 | 82402309 | 227 |
| rs6659379 | 0.935 | 82404022 | 228 |
| rs6696329 | 0.661 | 82404407 | 229 |
| rs11163442 | 1.0 | 82406375 | 230 |
| rs11163443 | 0.966 | 82406489 | 231 |
| rs1144349 | 0.731 | 82406720 | 232 |
| rs10747391 | 1.0 | 82408523 | 233 |
| rs1505547 | 1.0 | 82411232 | 234 |
| rs11163444 | 1.0 | 82413745 | 235 |
| rs4376782 | 1.0 | 82416733 | 236 |
| rs10874297 | 1.0 | 82417487 | 237 |
| rs786371 | 1.0 | 82417910 | 238 |
| rs4001746 | 1.0 | 82418308 | 239 |
| rs786372 | 1.0 | 82418330 | 240 |
| rs3862244 | 0.967 | 82418366 | 241 |
| rs3899791 | 1.0 | 82419538 | 242 |
| rs10747392 | 1.0 | 82420496 | 243 |
| rs786377 | 0.921 | 82420704 | 244 |
| rs10493709 | 1.0 | 82421197 | 245 |
| rs7555416 | — | 82422197 | 246 |
| rs786383 | 0.736 | 82422368 | 247 |
| rs3862245 | 1.0 | 82423727 | 248 |
| rs796800 | 0.736 | 82424134 | 249 |
| rs786387 | 0.742 | 82424150 | 250 |
| rs946950 | 0.736 | 82424914 | 251 |
| rs946951 | 0.736 | 82424975 | 252 |
| rs946953 | 0.757 | 82425243 | 253 |
| rs2636201 | 0.728 | 82426612 | 254 |
| rs2792460 | 0.749 | 82427690 | 255 |
| rs2784743 | 0.736 | 82434461 | 256 |
| rs785605 | 0.736 | 82435415 | 257 |
| rs3850862 | 1.0 | 82439143 | 258 |
| rs2636204 | 0.702 | 82439471 | 259 |
| rs3887286 | 0.736 | 82444631 | 260 |
| rs1687108 | 0.71 | 82444660 | 261 |
| rs1856821 | 0.736 | 82447710 | 262 |
| rs1505546 | 0.723 | 82448718 | 263 |
| rs5003351 | 0.752 | 82449218 | 264 |
| rs1770686 | 0.736 | 82449749 | 265 |
| rs10874302 | 0.966 | 82449774 | 266 |
| rs1770685 | 0.965 | 82452506 | 267 |
| rs1361477 | 0.702 | 82452647 | 268 |
| rs7546730 | 0.967 | 82453300 | 269 |
| rs1032882 | 0.967 | 82453338 | 270 |
| rs1344337 | 0.702 | 82453515 | 271 |
| rs1032881 | 0.961 | 82453539 | 272 |
| rs1032880 | 0.677 | 82453848 | 273 |
| rs2174499 | 0.966 | 82453927 | 274 |
| rs6691688 | 0.967 | 82454106 | 275 |
| rs785608 | 0.934 | 82455294 | 276 |
| rs785610 | 0.934 | 82455776 | 277 |
| rs785612 | 0.93 | 82456621 | 278 |
| rs785613 | 0.933 | 82456752 | 279 |
| rs785614 | 0.934 | 82456889 | 280 |
| rs785615 | 0.934 | 82456912 | 281 |
| rs785617 | 0.661 | 82457399 | 282 |
| rs785618 | 0.964 | 82457424 | 283 |
| rs785619 | 0.934 | 82457468 | 284 |
| rs785620 | 0.934 | 82457982 | 285 |
| rs785621 | 0.934 | 82458227 | 286 |
| rs785622 | 0.93 | 82458977 | 287 |
| rs12060840 | 0.934 | 82459886 | 288 |
| rs785626 | 0.623 | 82460521 | 289 |
| rs9659679 | 0.934 | 82460840 | 290 |
| rs1505540 | 0.927 | 82466546 | 291 |
| rs10874304 | 0.934 | 82466878 | 292 |
| rs996725 | 0.677 | 82474430 | 293 |
| rs1770679 | 0.677 | 82476963 | 294 |
| rs12039636 | 0.669 | 82478914 | 295 |
| rs804675 | 0.902 | 82480981 | 296 |
| rs1876081 | 0.902 | 82481004 | 297 |
| rs7413734 | 0.934 | 82484336 | 298 |
| rs708664 | 0.933 | 82484391 | 299 |
| rs7415124 | 0.933 | 82484596 | 300 |
| rs11163456 | 0.934 | 82484930 | 301 |
| rs709738 | 0.929 | 82485259 | 302 |
| rs785586 | 0.93 | 82486216 | 303 |
| rs1934763 | 0.929 | 82487128 | 304 |
| rs7536542 | 0.934 | 82487294 | 305 |
| rs10782780 | 0.933 | 82488099 | 306 |
| rs10782781 | 0.933 | 82489906 | 307 |
| rs709741 | 0.927 | 82489977 | 308 |
| rs10874306 | 0.801 | 82490942 | 309 |
| rs709743 | 0.902 | 82490987 | 310 |
| rs698006 | 0.897 | 82492500 | 311 |
| rs698007 | 0.933 | 82492549 | 312 |
| rs1857814 | 0.871 | 82499839 | 313 |
| rs786082 | 0.887 | 82505085 | 314 |
| rs1505543 | 0.9 | 82505197 | 315 |
| rs6667706 | 0.898 | 82505473 | 316 |
| rs786081 | 0.847 | 82506578 | 317 |
| rs786080 | 0.9 | 82506826 | 318 |
| rs786078 | 0.897 | 82508028 | 319 |
| rs7513231 | 0.902 | 82508044 | 320 |
| rs786077 | 0.902 | 82509654 | 321 |
| rs786076 | 0.902 | 82510272 | 322 |
| rs786074 | 0.902 | 82511041 | 323 |

### Example 10

[0205] For individuals with colorectal cancer, the distribution of polymorphic alleles at position 95494480 of chromosome 1 was different from those without colorectal cancer (Table 10). The recessive test for risk associated with carrying the T allele had an empirical p-value of 0.002715 based on permutation analysis, and the corresponding recessive odds ratio is 1.395 (Table 10). These data further suggest that this marker is associated with colorectal cancer risk and that the T allele at position 95494480 of chromosome 1 is associated with an increased risk of developing colorectal cancer.

TABLE 10

| | |
|---|---|
| rs no. | 17113360 |
| Chromosome; Position | 1; 95494480 |
| Gene Name | unknown |
| Genotype; Phenotype | n = T; increased risk |
| Hardy-Weinberg | 0.88691 |

| | | | | | | | Odds |
|---|---|---|---|---|---|---|---|
| Case Flag | Allele B | AA | AB | BB | Model | p-Value | Ratio |
| 0 | T | 15 | 231 | 812 | Recessive | 0.002715 | 1.395 |
| 1 | T | 9 | 161 | 783 | | | |

[0206] Table 10A indicates SNPs found to be in strong linkage disequilibrium with rs17113360. To generate this list, correlation coefficients (r²) were calculated between the index SNP and all neighboring SNPs cited in the June 2006 HapMap data set release. An r² cut off of 0.50 was selected for inclusion as evidence for strong genetic linkage, i.e., a “strong linkage disequilibrium.

TABLE 10A
Linked SNPs

| SNP | r² | Position on chr1 | SEQ ID NO |
|---|---|---|---|
| rs2236390 | 0.908 | 95488809 | 324 |
| rs17113351 | 0.908 | 95491103 | 325 |
| rs17113357 | 0.908 | 95493443 | 326 |
| rs17113360 | — | 95494480 | 327 |
| rs17113368 | 0.81 | 95498250 | 328 |
| rs17113374 | 1.0 | 95501385 | 329 |
| rs11590181 | 0.831 | 95530617 | 330 |

### Example 11

[0207] For individuals with colorectal cancer, the distribution of polymorphic alleles at position 118562981 of chromosome 1 was different from those without colorectal cancer (Table 11). The trend test for risk associated with carrying the C allele had an empirical p-value of 0.005399 based on permutation analysis, and the corresponding Mantel-Haenszel odds ratio for trend is 1.237 (Table 11). These data further suggest that this marker is associated with colorectal cancer risk and that the C allele at position 118562981 of chromosome 1 is associated with an increased risk of developing colorectal cancer.

TABLE 11

| | |
|---|---|
| rs no. | 11578232 |
| Chromosome; Position | 1; 118562981 |
| Gene Name | unknown |
| Genotype; Phenotype | n = C; increased risk |
| Hardy-Weinberg | 0.06843 |

| Case | | | | | | | |
|---|---|---|---|---|---|---|---|
| Flag | Allele B | AA | AB | BB | Model | p-Value | Odds Ratio |
| 0 | C | 595 | 344 | 34 | Trend | 0.005399 | 1.237 |
| 1 | C | 534 | 375 | 51 | | | |

[0208] Table 11A indicates SNPs found to be in strong linkage disequilibrium with rs11578232. To generate this list, correlation coefficients (r²) were calculated between the index SNP and all neighboring SNPs cited in the June 2006 HapMap data set release. An r² cut off of 0.50 was selected for inclusion as evidence for strong genetic linkage, i.e., a “strong linkage disequilibrium.

TABLE 11A
Linked SNPs

| SNP | r² | Position on chr1 | SEQ ID NO |
|---|---|---|---|
| rs9428100 | 1.0 | 118561559 | 331 |
| rs6428739 | 1.0 | 118562029 | 332 |
| rs11578232 | — | 118562981 | 333 |
| rs9428101 | 1.0 | 118564656 | 334 |
| rs9428102 | 0.9 | 118564859 | 335 |
| rs2490197 | 0.95 | 118566872 | 336 |
| rs2490196 | 0.815 | 118566892 | 337 |
| rs9428108 | 0.95 | 118570326 | 338 |
| rs9428109 | 0.946 | 118571091 | 339 |
| rs6673532 | 0.89 | 118571342 | 340 |
| rs6665507 | 0.95 | 118571646 | 341 |
| rs10494209 | 0.95 | 118575513 | 342 |
| rs10923544 | 0.815 | 118578029 | 343 |
| rs10802020 | 0.942 | 118578119 | 344 |
| rs12135637 | 0.804 | 118578309 | 345 |
| rs6671887 | 0.804 | 118579425 | 346 |
| rs4129591 | 0.95 | 118580020 | 347 |
| rs6666507 | 0.815 | 118581538 | 348 |
| rs6690477 | 0.815 | 118581975 | 349 |
| rs12743674 | 0.815 | 118585388 | 350 |
| rs12730090 | 0.897 | 118585550 | 351 |
| rs4659078 | 0.776 | 118589180 | 352 |
| rs2474945 | 0.711 | 118596956 | 353 |
| rs2474943 | 0.682 | 118600709 | 354 |
| rs2474942 | 0.711 | 118601663 | 355 |
| rs2493800 | 0.711 | 118610570 | 356 |
| rs2474937 | 0.701 | 118615020 | 357 |
| rs2493807 | 0.774 | 118619695 | 358 |
| rs2493810 | 0.701 | 118621071 | 359 |
| rs2493816 | 0.711 | 118628630 | 360 |
| rs12066516 | 0.791 | 118640477 | 361 |
| rs17038260 | 0.76 | 118641626 | 362 |
| rs10923569 | 0.53 | 118664662 | 363 |

### Example 12

[0209] For individuals with colorectal cancer, the distribution of polymorphic alleles at position 143043494 of chromosome 1, found within the FLJ25124 gene, was different from those without colorectal cancer (Table 12). The recessive test for risk associated with carrying the C allele had an empirical p-value of 0.001269 based on permutation analysis, and the corresponding recessive odds ratio is 1.567 (Table 12). These data further suggest that this marker, located within the FLJ25124 gene, is associated with colorectal cancer risk and that the C allele at position 143043494 of chromosome 1 is associated with an increased risk of developing colorectal cancer.

TABLE 12

| | |
|---|---|
| rs no. | 12125340 |
| Chromosome; Position | 1; 143043494 |
| Gene Name | FLJ25124 |
| SEQ ID NO; Position | 5623; 5207 |
| enotype; Phenotype | n = C; increased risk |
| Hardy-Weinberg | 0.72035 |

| | | | | | | | Odds |
|---|---|---|---|---|---|---|---|
| Case Flag | Allele B | AA | AB | BB | Model | p-Value | Ratio |
| 0 | C | 498 | 460 | 100 | Recessive | 0.001269 | 1.567 |
| 1 | C | 419 | 400 | 134 | | | |

[0210] Table 12A indicates SNPs found to be in strong linkage disequilibrium with rs12125340. To generate this list, correlation coefficients (r²) were calculated between the index SNP and all neighboring SNPs cited in the June 2006 HapMap data set release. An r² cut off of 0.50 was selected for inclusion as evidence for strong genetic linkage, i.e., a “strong linkage disequilibrium.

TABLE 12A
Linked SNPs

| SNP | r² | Position on chr1 | SEQ ID NO |
|---|---|---|---|
| rs4636400 | 0.611 | 142933600 | 364 |
| rs6688400 | 0.678 | 142994415 | 365 |
| rs872786 | 0.678 | 142996870 | 366 |
| rs2274617 | 0.863 | 143024965 | 367 |
| rs12410298 | 0.519 | 143037007 | 368 |
| rs720899 | 0.965 | 143039966 | 369 |
| rs10494240 | 0.965 | 143040559 | 370 |
| rs12125340 | — | 143043494 | 371 |

### Example 13

[0211] For individuals with colorectal cancer, the distribution of polymorphic alleles at position 154420450 of chromosome 1, found within the LOC391105 gene, was different from those without colorectal cancer (Table 13). The recessive test for risk associated with carrying the T allele had an empirical p-value of 0.001106 based on permutation analysis, and the corresponding recessive odds ratio is 1.342 (Table 13). These data further suggest that this marker, located within the LOC391105 gene, is associated with colorectal cancer risk and that the T allele at position 154420450 of chromosome 1 is associated with an increased risk of developing colorectal cancer.

TABLE 13

| | |
|---|---|
| rs no. | 2758688 |
| Chromosome; Position | 1; 154420450 |
| Gene Name | LOC391105 |
| SEQ ID NO; Position | 5624; 16674 |
| Genotype; Phenotype | n = T; increased risk |
| Hardy-Weinberg | 0.94399 |

| | | | | | | | Odds |
|---|---|---|---|---|---|---|---|
| Case Flag | Allele B | AA | AB | BB | Model | p-Value | Ratio |
| 0 | T | 116 | 452 | 432 | Recessive | 0.001106 | 1.342 |
| 1 | T | 105 | 380 | 495 | | | |

[0212] Table 13A indicates SNPs found to be in strong linkage disequilibrium with rs2758688. To generate this list, correlation coefficients (r²) were calculated between the index SNP and all neighboring SNPs cited in the June 2006 HapMap data set release. An r² cut off of 0.50 was selected for inclusion as evidence for strong genetic linkage, i.e., a “strong linkage disequilibrium.

TABLE 13A
Linked SNPs

| SNP | r² | Position on chr1 | SEQ ID NO |
|---|---|---|---|
| rs7512219 | 0.503 | 154354010 | 372 |
| rs849820 | 0.589 | 154354638 | 373 |
| rs849819 | 0.589 | 154354747 | 374 |
| rs849817 | 0.589 | 154355118 | 375 |
| rs849816 | 0.589 | 154355147 | 376 |
| rs849815 | 0.633 | 154355235 | 377 |
| rs849814 | 0.589 | 154355289 | 378 |
| rs2758680 | 0.641 | 154356819 | 379 |
| rs861998 | 0.589 | 154356951 | 380 |
| rs849828 | 0.589 | 154358120 | 381 |
| rs849826 | 0.507 | 154359419 | 382 |
| rs1885561 | 0.568 | 154361742 | 383 |
| rs2779158 | 0.611 | 154362243 | 384 |
| rs2779159 | 0.568 | 154363430 | 385 |
| rs2777965 | 0.568 | 154363490 | 386 |
| rs12755544 | 0.617 | 154366090 | 387 |
| rs10489674 | 0.592 | 154379092 | 388 |
| rs2224607 | 0.617 | 154384794 | 389 |
| rs2208753 | 0.617 | 154397374 | 390 |
| rs1998377 | 1.0 | 154408258 | 391 |
| rs2777986 | 1.0 | 154409264 | 392 |
| rs2777987 | 1.0 | 154409463 | 393 |
| rs2248138 | 1.0 | 154419367 | 394 |
| rs2758688 | — | 154420450 | 395 |
| rs2758674 | 0.797 | 154423513 | 396 |
| rs1969742 | 1.0 | 154426410 | 397 |
| rs10489676 | 0.916 | 154432962 | 398 |
| rs2152710 | 0.834 | 154440037 | 399 |
| rs12136747 | 0.835 | 154450003 | 400 |
| rs6691569 | 0.753 | 154461171 | 401 |
| rs17676026 | 0.548 | 154479409 | 402 |
| rs17676303 | 0.527 | 154492764 | 403 |
| rs17727309 | 0.548 | 154492856 | 404 |
| rs17727339 | 0.548 | 154493187 | 405 |
| rs17676381 | 0.509 | 154494971 | 406 |
| rs7522309 | 0.516 | 154498579 | 407 |
| rs7524764 | 0.504 | 154498812 | 408 |
| rs2873404 | 0.516 | 154500310 | 409 |
| rs2317232 | 0.535 | 154501115 | 410 |
| rs7517149 | 0.516 | 154501714 | 411 |
| rs6427395 | 0.504 | 154503542 | 412 |
| rs10489679 | 0.516 | 154507828 | 413 |

### Example 14

[0213] For individuals with colorectal cancer, the distribution of polymorphic alleles at position 166408144 of chromosome 1, found within the SELL gene, was different from those without colorectal cancer (Table 14). The recessive test for risk associated with carrying the G allele had an empirical p-value of 0.063371 based on permutation analysis, and the corresponding recessive odds ratio is 1.330 (Table 14). These data further suggest that this marker, located within the SELL gene, is associated with colorectal cancer risk and that the G allele at position 166408144 of chromosome 1 is associated with an increased risk of developing colorectal cancer.

TABLE 14

| | |
|---|---|
| rs no. | 3177980 |
| Chromosome; Position | 1; 166408144 |
| Gene Name | SELL |
| SEQ ID NO; Position | 5625; 4242 |
| Genotype; Phenotype | n = G; increased risk |
| Hardy-Weinberg | 0.5407 |

| | | | | | | | Odds |
|---|---|---|---|---|---|---|---|
| Case Flag | Allele B | AA | AB | BB | Model | p-Value | Ratio |
| 0 | G | 607 | 429 | 83 | Recessive | 0.063371 | 1.330 |
| 1 | G | 579 | 425 | 107 | | | |

[0214] Table 14A indicates SNPs found to be in strong linkage disequilibrium with rs3177980. To generate this list, correlation coefficients (r²) were calculated between the index SNP and all neighboring SNPs cited in the June 2006 HapMap data set release. An r² cut off of 0.50 was selected for inclusion as evidence for strong genetic linkage, i.e., a “strong linkage disequilibrium.

TABLE 14A
Linked SNPs

| SNP | r² | Position on chr1 | SEQ ID NO |
|---|---|---|---|
| rs12938 | 0.685 | 166392439 | 414 |
| rs4987369 | 0.593 | 166394400 | 415 |
| rs4987367 | 0.593 | 166394636 | 416 |
| rs4987358 | 0.795 | 166397209 | 417 |
| rs2223286 | 0.685 | 166397290 | 418 |
| rs4140655 | 0.795 | 166398255 | 419 |
| rs4987353 | 0.685 | 166398645 | 420 |
| rs17525350 | 1.0 | 166401473 | 421 |
| rs3177980 | — | 166408144 | 422 |
| rs4987280 | 1.0 | 166411211 | 423 |
| rs12084893 | 0.958 | 166440044 | 424 |
| rs10489179 | 0.92 | 166451495 | 425 |
| rs10800473 | 0.92 | 166457690 | 426 |
| rs10919252 | 0.501 | 166534614 | 427 |
| rs1062976 | 0.544 | 166555318 | 428 |
| rs10489172 | 0.544 | 166556037 | 429 |
| rs17603022 | 0.523 | 166569936 | 430 |
| rs12089057 | 0.542 | 166577414 | 431 |

### Example 15

[0215] For individuals with colorectal cancer, the distribution of polymorphic alleles at position 182256575 of chromosome 1 was different from those without colorectal cancer (Table 15). The dominant test for risk associated with carrying the G allele had an empirical p-value based on permutation analysis of 0.009853, and the corresponding dominant odds ratio is 1.441 (Table 15). These data further suggest that this marker is associated with colorectal cancer risk and that the G allele at position 182256575 of chromosome 1 is associated with an increased risk of developing colorectal cancer.

TABLE 15

| | |
|---|---|
| rs no. | 1321999 |
| Chromosome; Position | 1; 182256575 |
| Gene Name | unknown |
| Genotype; Phenotype | n = G; increased risk |
| Hardy-Weinberg | 0.18201 |

| | | | | | | | Odds |
|---|---|---|---|---|---|---|---|
| Case Flag | Allele B | AA | AB | BB | Model | p-Value | Ratio |
| 0 | G | 943 | 96 | 5 | Dominant | 0.009853 | 1.441 |
| 1 | G | 810 | 120 | 5 | | | |

[0216] Table 15A indicates SNPs found to be in strong linkage disequilibrium with rs1321999. To generate this list, correlation coefficients (r²) were calculated between the index SNP and all neighboring SNPs cited in the June 2006 HapMap data set release. An r² cut off of 0.50 was selected for inclusion as evidence for strong genetic linkage, i.e., a “strong linkage disequilibrium.

TABLE 15A
Linked SNPs

| SNP | r² | Position on chr1 | SEQ ID NO |
|---|---|---|---|
| rs1321999 | — | 182256575 | 432 |
| rs10911755 | 1.0 | 182257700 | 433 |
| rs11586588 | 0.867 | 182264962 | 434 |
| rs11583193 | 1.0 | 182272275 | 435 |
| rs12402607 | 1.0 | 182275532 | 436 |
| rs12048982 | 1.0 | 182284803 | 437 |
| rs12046138 | 1.0 | 182285181 | 438 |

### Example 16

[0217] For individuals with colorectal cancer, the distribution of polymorphic alleles at position 187260102 of chromosome 1 was different from those without colorectal cancer (Table 16). The trend test for risk associated with carrying the C allele had an empirical p-value of 0.000492 based on permutation analysis, and the corresponding Mantel-Haenszel odds ratio for trend is 1.377 (Table 16). These data further suggest that this marker is associated with colorectal cancer risk and that the C allele at position 187260102 of chromosome 1 is associated with an increased risk of developing colorectal cancer.

TABLE 16

| | |
|---|---|
| rs no. | 1501501 |
| Chromosome; Position | 1; 187260102 |
| Gene Name | unknown |
| Genotype; Phenotype | n = C; increased risk |
| Hardy-Weinberg | 0.20499 |

| | | | | | | | Odds |
|---|---|---|---|---|---|---|---|
| Case Flag | Allele B | AA | AB | BB | Model | p-Value | Ratio |
| 0 | C | 27 | 316 | 677 | Trend | 0.000492 | 1.377 |
| 1 | C | 16 | 227 | 678 | | | |

[0218] Table 16A indicates SNPs found to be in strong linkage disequilibrium with rs1501501. To generate this list, correlation coefficients (r²) were calculated between the index SNP and all neighboring SNPs cited in the June 2006 HapMap data set release. An r² cut off of 0.50 was selected for inclusion as evidence for strong genetic linkage, i.e., a “strong linkage disequilibrium.

TABLE 16A
Linked SNPs

| SNP | r² | Position on chr1 | SEQ ID NO |
|---|---|---|---|
| rs1185693 | 0.599 | 187082093 | 439 |
| rs2490271 | 0.645 | 187174628 | 440 |
| rs814944 | 0.652 | 187199686 | 441 |
| rs7519248 | 0.8 | 187205762 | 442 |
| rs814905 | 0.839 | 187227358 | 443 |
| rs17370268 | 0.867 | 187229616 | 444 |
| rs755805 | 0.8 | 187235623 | 445 |
| rs814958 | 0.809 | 187245840 | 446 |
| rs17370393 | 0.871 | 187257909 | 447 |
| rs12072620 | 0.935 | 187259731 | 448 |
| rs1501501 | — | 187260102 | 449 |
| rs17379109 | 1.0 | 187262889 | 450 |
| rs1327872 | 1.0 | 187265357 | 451 |
| rs10920748 | 1.0 | 187265802 | 452 |
| rs1576115 | 0.935 | 187270060 | 453 |
| rs10920753 | 0.935 | 187271578 | 454 |
| rs10920754 | 0.935 | 187271664 | 455 |
| rs10800949 | 1.0 | 187272352 | 456 |
| rs12038727 | 0.682 | 187282856 | 457 |
| rs10920759 | 0.682 | 187294343 | 458 |
| rs17379742 | 0.64 | 187298692 | 459 |
| rs10920760 | 0.682 | 187306394 | 460 |
| rs2419670 | 0.584 | 187311887 | 461 |
| rs10458403 | 0.559 | 187316314 | 462 |
| rs720630 | 0.527 | 187319957 | 463 |
| rs658528 | 0.526 | 187337861 | 464 |

### Example 17

[0219] For individuals with colorectal cancer, the distribution of polymorphic alleles at position 200680317 of chromosome 1 was different from those without colorectal cancer (Table 17). The trend test for risk associated with carrying the G allele had an empirical p-value of 0.009365 based on permutation analysis, and the corresponding Mantel-Haenszel odds ratio for trend is 1.226 (Table 17). These data further suggest that this marker is associated with colorectal cancer risk and that the G allele at position 200680317 of chromosome 1 is associated with an increased risk of developing colorectal cancer.

TABLE 17

| | |
|---|---|
| rs no. | 12408223 |
| Chromosome; Position | 1; 200680317 |
| Gene Name | unknown |
| Genotype; Phenotype | n = G; increased risk |
| Hardy-Weinberg | 0.05042 |

| | | | | | | | Odds |
|---|---|---|---|---|---|---|---|
| Case Flag | Allele B | AA | AB | BB | Model | p-Value | Ratio |
| 0 | G | 649 | 231 | 32 | Trend | 0.009365 | 1.226 |
| 1 | G | 609 | 258 | 51 | | | |

[0220] Table 17A indicates SNPs found to be in strong linkage disequilibrium with rs12408223. To generate this list, correlation coefficients (r²) were calculated between the index SNP and all neighboring SNPs cited in the June 2006 HapMap data set release. An r² cut off of 0.50 was selected for inclusion as evidence for strong genetic linkage, i.e., a “strong linkage disequilibrium.

TABLE 17A
Linked SNPs

| SNP | r² | Position on chr1 | SEQ ID NO |
|---|---|---|---|
| rs7552670 | 0.611 | 200499985 | 465 |
| rs7540041 | 0.611 | 200501189 | 466 |
| rs10494844 | 0.611 | 200501548 | 467 |
| rs7532505 | 0.611 | 200506450 | 468 |
| rs6685918 | 0.588 | 200508966 | 469 |
| rs7546400 | 0.611 | 200509456 | 470 |
| rs4951259 | 0.611 | 200516826 | 471 |
| rs3753590 | 0.611 | 200519147 | 472 |
| rs12403365 | 0.611 | 200524239 | 473 |
| rs6673230 | 0.589 | 200527354 | 474 |
| rs10494847 | 0.611 | 200551097 | 475 |
| rs7520079 | 0.569 | 200565332 | 476 |
| rs16852420 | 0.544 | 200569854 | 477 |
| rs6673662 | 0.502 | 200588556 | 478 |
| rs16852507 | 0.678 | 200636760 | 479 |
| rs1317456 | 0.678 | 200644895 | 480 |
| rs12410049 | 0.678 | 200645480 | 481 |
| rs2001475 | 0.678 | 200645637 | 482 |
| rs12562918 | 0.662 | 200653088 | 483 |
| rs12566239 | 0.614 | 200677055 | 484 |
| rs12408223 | — | 200680317 | 485 |
| rs2810624 | 0.721 | 200687498 | 486 |
| rs2796423 | 0.765 | 200688166 | 487 |
| rs16852608 | 0.613 | 200698626 | 488 |

### Example 18

[0221] For individuals with colorectal cancer, the distribution of polymorphic alleles at position 211276776 of chromosome 1 was different from those without colorectal cancer (Table 18). The recessive test for risk associated with carrying the T allele had an empirical p-value of 0.001597 based on permutation analysis, and the corresponding recessive odds ratio is 1.361 (Table 18). These data further suggest that this marker is associated with colorectal cancer risk and that the T allele at position 211276776 of chromosome 1 is associated with an increased risk of developing colorectal cancer.

TABLE 18

| | |
|---|---|
| rs no. | 335554 |
| Chromosome; Position | 1; 211276776 |
| Gene Name | unknown |
| Genotype; Phenotype | n = T; increased risk |
| Hardy-Weinberg | 0.00491 |

| | | | | | | | Odds |
|---|---|---|---|---|---|---|---|
| Case Flag | Allele B | AA | AB | BB | Model | p-Value | Ratio |
| 0 | T | 22 | 327 | 622 | Recessive | 0.001597 | 1.361 |
| 1 | T | 16 | 261 | 672 | | | |

[0222] Table 18A indicates SNPs found to be in strong linkage disequilibrium with rs335554. To generate this list, correlation coefficients (r²) were calculated between the index SNP and all neighboring SNPs cited in the June 2006 HapMap data set release. An r² cut off of 0.50 was selected for inclusion as evidence for strong genetic linkage, i.e., a “strong linkage disequilibrium.

TABLE 18A
Linked SNPs

| SNP | r² | Position on chr1 | SEQ ID NO |
|---|---|---|---|
| rs335564 | 0.636 | 211255378 | 489 |
| rs335565 | 0.612 | 211257304 | 490 |
| rs335570 | 0.635 | 211261122 | 491 |
| rs335574 | 0.636 | 211262732 | 492 |
| rs6662756 | 0.636 | 211262877 | 493 |
| rs335577 | 0.636 | 211263362 | 494 |
| rs335581 | 0.636 | 211272121 | 495 |
| rs335554 | — | 211276776 | 496 |
| rs335556 | 0.612 | 211279482 | 497 |
| rs335558 | 0.635 | 211283002 | 498 |
| rs335529 | 0.635 | 211297540 | 499 |

### Example 19

[0223] For individuals with colorectal cancer, the distribution of polymorphic alleles at position 214640087 of chromosome 1 was different from those without colorectal cancer (Table 19). The recessive test for risk associated with carrying the T allele had an empirical p-value of 0.001243 based on permutation analysis, and the corresponding recessive odds ratio is 1.377 (Table 19). These data further suggest that this marker is associated with colorectal cancer risk and that the T allele at position 214640087 of chromosome 1 is associated with an increased risk of developing colorectal cancer.

TABLE 19

| | |
|---|---|
| rs no. | 10863373 |
| Chromosome; Position | 1; 214640087 |
| Gene Name | unknown |
| Genotype; Phenotype | n = T; increased risk |
| Hardy-Weinberg | 0.82672 |

| | | | | | | | Odds |
|---|---|---|---|---|---|---|---|
| Case Flag | Allele B | AA | AB | BB | Model | p-Value | Ratio |
| 0 | T | 29 | 293 | 680 | Recessive | 0.001243 | 1.377 |
| 1 | T | 20 | 232 | 733 | | | |

[0224] Table 19A indicates SNPs found to be in strong linkage disequilibrium with rs10863373. To generate this list, correlation coefficients (r²) were calculated between the index SNP and all neighboring SNPs cited in the June 2006 HapMap data set release. An r² cut off of 0.50 was selected for inclusion as evidence for strong genetic linkage, i.e., a “strong linkage disequilibrium.

TABLE 19A
Linked SNPs

| SNP | r² | Position on chr1 | SEQ ID NO |
|---|---|---|---|
| rs10863372 | 0.832 | 214639829 | 500 |
| rs10863373 | — | 214640087 | 501 |
| rs2130585 | 0.935 | 214640676 | 502 |
| rs11118029 | 0.688 | 214641707 | 503 |

### Example 20

[0225] For individuals with colorectal cancer, the distribution of polymorphic alleles at position 228779667 of chromosome 1 was different from those without colorectal cancer (Table 20). The trend test for risk associated with carrying the G allele had an empirical p-value of 0.00338 based on permutation analysis, and the corresponding Mantel-Haenszel odds ratio for trend is 1.207 (Table 20). These data further suggest that this marker is associated with colorectal cancer risk and that the G allele at position 228779667 of chromosome 1 is associated with an increased risk of developing colorectal cancer.

TABLE 20

| | |
|---|---|
| rs no. | 789367 |
| Chromosome; Position | 1; 228779667 |
| Gene Name | unknown |
| Genotype; Phenotype | n = G; increased risk |
| Hardy-Weinberg | 0.09491 |

| | | | | | | | Odds |
|---|---|---|---|---|---|---|---|
| Case Flag | Allele B | AA | AB | BB | Model | p-Value | Ratio |
| 0 | G | 465 | 491 | 102 | Trend | 0.00338 | 1.207 |
| 1 | G | 374 | 449 | 130 | | | |

[0226] Table 20A indicates SNPs found to be in strong linkage disequilibrium with rs789367. To generate this list, correlation coefficients (r²) were calculated between the index SNP and all neighboring SNPs cited in the June 2006 HapMap data set release. An r² cut off of 0.50 was selected for inclusion as evidence for strong genetic linkage, i.e., a “strong linkage disequilibrium.

TABLE 20A
Linked SNPs

| SNP | r² | Position on chr1 | SEQ ID NO |
|---|---|---|---|
| rs789367 | — | 228779667 | 504 |
| rs629436 | 0.548 | 228780820 | 505 |
| rs3120762 | 0.53 | 228781610 | 506 |
| rs3131806 | 0.561 | 228781647 | 507 |
| rs662251 | 0.557 | 228784137 | 508 |
| rs616415 | 0.558 | 228787987 | 509 |
| rs653428 | 0.503 | 228792350 | 512 |
| rs9286796 | 0.503 | 228793128 | 514 |

### Example 21

[0227] For individuals with colorectal cancer, the distribution of polymorphic alleles at position 228798840 of chromosome 1 was different from those without colorectal cancer (Table 21). The trend test for risk associated with carrying the G allele had an empirical p-value of 0.001512 based on permutation analysis, and the corresponding Mantel-Haenszel odds ratio for trend is 1.239 (Table 21). These data further suggest that this marker is associated with colorectal cancer risk and that the G allele at position 228798840 of chromosome 1 is associated with an increased risk of developing colorectal cancer.

TABLE 21

| | |
|---|---|
| rs no. | 586510 |
| Chromosome; Position | 1; 228798840 |
| Gene Name | unknown |
| Genotype; Phenotype | n = G; increased risk |
| Hardy-Weinberg | 0.21673 |

| | | | | | | | Odds |
|---|---|---|---|---|---|---|---|
| Case Flag | Allele B | AA | AB | BB | Model | p-Value | Ratio |
| 0 | G | 445 | 490 | 113 | Trend | 0.001512 | 1.239 |
| 1 | G | 343 | 470 | 133 | | | |

[0228] Table 21A indicates SNPs found to be in strong linkage disequilibrium with rs586510. To generate this list, correlation coefficients (r²) were calculated between the index SNP and all neighboring SNPs cited in the June 2006 HapMap data set release. An r² cut off of 0.50 was selected for inclusion as evidence for strong genetic linkage, i.e., a “strong linkage disequilibrium.

TABLE 21A
Linked SNPs

| SNP | r² | Position on chr1 | SEQ ID NO |
|---|---|---|---|
| rs629436 | 0.797 | 228780820 | 505 |
| rs3120762 | 0.802 | 228781610 | 506 |
| rs3131806 | 0.796 | 228781647 | 507 |
| rs662251 | 0.802 | 228784137 | 508 |
| rs616415 | 0.802 | 228787987 | 509 |
| rs668959 | 0.808 | 228791128 | 510 |
| rs592549 | 0.872 | 228792077 | 511 |
| rs653428 | 0.866 | 228792350 | 512 |
| rs9662828 | 0.872 | 228792421 | 513 |
| rs9286796 | 0.866 | 228793128 | 514 |
| rs1766593 | 1.0 | 228795562 | 515 |
| rs591175 | 1.0 | 228796991 | 516 |
| rs653891 | 0.711 | 228798772 | 517 |
| rs586510 | — | 228798840 | 518 |
| rs632585 | 0.616 | 228802209 | 519 |
| rs633041 | 0.966 | 228802332 | 520 |
| rs645925 | 0.621 | 228803037 | 521 |
| rs646020 | 0.621 | 228803110 | 522 |
| rs662140 | 1.0 | 228804365 | 523 |
| rs673705 | 1.0 | 228804648 | 524 |
| rs789363 | 0.966 | 228805071 | 525 |
| rs644690 | 0.501 | 228812020 | 526 |
| rs3131812 | 0.515 | 228815730 | 527 |

### Example 22

[0229] For individuals with colorectal cancer, the distribution of polymorphic alleles at position 229775255 of chromosome 1, found within the KIAA1804 gene, was different from those without colorectal cancer (Table 22). The trend test for risk associated with carrying the G allele had an empirical p-value of 0.001743 based on permutation analysis, and the corresponding Mantel-Haenszel odds ratio for trend is 1.276 (Table 22). These data further suggest that this marker, located within the KIAA1804 gene, is associated with colorectal cancer risk and that the G allele at position 229775255 of chromosome 1 is associated with an increased risk of developing colorectal cancer.

TABLE 22

| | |
|---|---|
| rs no. | 1294302 |
| Chromosome; Position | 1; 229775255 |
| Gene Name | KIAA1804 |
| SEQ ID NO; Position | 5626; 5007 |
| Genotype; Phenotype | n = G; increased risk |
| Hardy-Weinberg | 0.14657 |

| | | | | | | | Odds |
|---|---|---|---|---|---|---|---|
| Case Flag | Allele B | AA | AB | BB | Model | p-Value | Ratio |
| 0 | G | 642 | 374 | 41 | Trend | 0.001743 | 1.276 |
| 1 | G | 515 | 387 | 51 | | | |

[0230] Table 22A indicates SNPs found to be in strong linkage disequilibrium with rs1294302. To generate this list, correlation coefficients (r²) were calculated between the index SNP and all neighboring SNPs cited in the June 2006 HapMap data set release. An r² cut off of 0.50 was selected for inclusion as evidence for strong genetic linkage, i.e., a “strong linkage disequilibrium.

TABLE 22A
Linked SNPs

| SNP | r² | Position on chr1 | SEQ ID NO |
|---|---|---|---|
| rs1294348 | 0.636 | 229740644 | 528 |
| rs1294347 | 0.636 | 229740798 | 529 |
| rs1294345 | 0.636 | 229741584 | 530 |
| rs1294343 | 0.636 | 229742681 | 531 |
| rs1294342 | 0.636 | 229742852 | 532 |
| rs1294341 | 0.644 | 229743138 | 533 |
| rs1294310 | 1.0 | 229772462 | 534 |
| rs1294302 | — | 229775255 | 535 |
| rs1294300 | 1.0 | 229775633 | 536 |
| rs1294299 | 1.0 | 229775685 | 537 |
| rs1294298 | 1.0 | 229775732 | 538 |
| rs1294297 | 1.0 | 229776204 | 539 |
| rs1294296 | 1.0 | 229776296 | 540 |
| rs1294294 | 1.0 | 229776889 | 541 |
| rs1294293 | 1.0 | 229777047 | 542 |
| rs1294285 | 0.96 | 229779187 | 543 |
| rs1294279 | 1.0 | 229781272 | 544 |
| rs1294267 | 1.0 | 229782916 | 545 |
| rs4649302 | 0.877 | 229783979 | 546 |
| rs1294264 | 0.92 | 229788385 | 547 |
| rs4649222 | 0.729 | 229798172 | 548 |
| rs10752755 | 0.562 | 229802303 | 549 |

### Example 23

[0231] For individuals with colorectal cancer, the distribution of polymorphic alleles at position 236665853 of chromosome 1, found within the FMN2 gene, was different from those without colorectal cancer (Table 23). The trend test for risk associated with carrying the C allele had an empirical p-value of 0.007535 based on permutation analysis, and the corresponding Mantel-Haenszel odds ratio for trend is 1.351 (Table 23). These data further suggest that this marker, located within the FMN2 gene, is associated with colorectal cancer risk and that the C allele at position 236665853 of chromosome 1 is associated with an increased risk of developing colorectal cancer.

TABLE 23

| | |
|---|---|
| rs no. | 7542728 |
| Chromosome; Position | 1; 236665853 |
| Gene Name | FMN2 |
| SEQ ID NO; Position | 5627; 163844 |
| Genotype; Phenotype | n = C; increased risk |
| Hardy-Weinberg | 0.03578 |

| | | | | | | | Odds |
|---|---|---|---|---|---|---|---|
| Case Flag | Allele B | AA | AB | BB | Model | p-Value | Ratio |
| 0 | C | 866 | 115 | 9 | Trend | 0.007535 | 1.351 |
| 1 | C | 746 | 132 | 16 | | | |

[0232] Table 23A indicates SNPs found to be in strong linkage disequilibrium with rs7542728. To generate this list, correlation coefficients (r²) were calculated between the index SNP and all neighboring SNPs cited in the June 2006 HapMap data set release. An r² cut off of 0.50 was selected for inclusion as evidence for strong genetic linkage, i.e., a “strong linkage disequilibrium.

TABLE 23A
Linked SNPs

| SNP | r² | Position on chr1 | SEQ ID NO |
|---|---|---|---|
| rs7542728 | — | 236665853 | 550 |

### Example 24

[0233] For individuals with colorectal cancer, the distribution of polymorphic alleles at position 2143625 of chromosome 2, found within the MYT1L gene, was different from those without colorectal cancer (Table 24). The dominant test for risk associated with carrying the T allele had an empirical p-value based on permutation analysis of 0.002046, and the corresponding dominant odds ratio is 1.422 (Table 24). These data further suggest that this marker, located within the MYT1L gene, is associated with colorectal cancer risk and that the T allele at position 2143625 of chromosome 2 is associated with an increased risk of developing colorectal cancer.

TABLE 24

| | |
|---|---|
| rs no. | 17338512 |
| Chromosome; Position | 2; 2143625 |
| Gene Name | MYT1L |
| SEQ ID NO; Position | 5628; 161639 |
| Genotype; Phenotype | n = T; increased risk |
| Hardy-Weinberg | 0.43027 |

| Case | | | | | | | Odds |
|---|---|---|---|---|---|---|---|
| Flag | Allele B | AA | AB | BB | Model | p-Value | Ratio |
| 0 | T | 886 | 162 | 10 | Dominant | 0.002046 | 1.422 |
| 1 | T | 746 | 202 | 4 | | | |

[0234] Table 24A indicates SNPs found to be in strong linkage disequilibrium with rs17338512. To generate this list, correlation coefficients (r²) were calculated between the index SNP and all neighboring SNPs cited in the June 2006 HapMap data set release. An r² cut off of 0.50 was selected for inclusion as evidence for strong genetic linkage, i.e., a “strong linkage disequilibrium.

TABLE 24A
Linked SNPs

| SNP | r² | Position on chr2 | SEQ ID NO |
|---|---|---|---|
| rs6719219 | 0.561 | 1981076 | 551 |
| rs12468174 | 0.561 | 1997590 | 552 |
| rs11127292 | 0.574 | 2000240 | 553 |
| rs11685526 | 0.561 | 2041790 | 554 |
| rs17039339 | 0.73 | 2095003 | 555 |
| rs11687473 | 1.0 | 2135816 | 556 |
| rs12474442 | 1.0 | 2137239 | 557 |
| rs17247359 | 1.0 | 2138961 | 558 |
| rs17338519 | 1.0 | 2141402 | 559 |
| rs17338512 | — | 2143625 | 560 |
| rs17338505 | 1.0 | 2144206 | 561 |
| rs12467137 | 1.0 | 2145868 | 562 |
| rs11683072 | 1.0 | 2146474 | 563 |
| rs11680102 | 1.0 | 2148224 | 564 |
| rs11674222 | 1.0 | 2148955 | 565 |
| rs17247345 | 1.0 | 2149477 | 566 |
| rs11675244 | 1.0 | 2151490 | 567 |
| rs964568 | 1.0 | 2154044 | 568 |

### Example 25

[0235] For individuals with colorectal cancer, the distribution of polymorphic alleles at position 6817511 of chromosome 2 was different from those without colorectal cancer (Table 25). The dominant test for risk associated with carrying the G allele had an empirical p-value based on permutation analysis of 0.006141, and the corresponding dominant odds ratio is 1.320 (Table 25). These data further suggest that this marker is associated with colorectal cancer risk and that the G allele at position 6817511 of chromosome 2 is associated with an increased risk of developing colorectal cancer.

TABLE 25

| | rs no. | | | | 308019 | | |
|---|---|---|---|---|---|---|---|
| | Chromosome; Position | | | | 2; 6817511 | | |
| | Gene Name | | | | unknown | | |
| | Genotype; Phenotype | | | | n = G; increased risk | | |
| | Hardy-Weinberg | | | | 0.12891 | | |
| Case | | | | | | | Odds |
| Flag | Allele B | AA | AB | BB | Model | p-Value | Ratio |
| 0 | G | 294 | 477 | 235 | Dominant | 0.006141 | 1.320 |
| 1 | G | 238 | 511 | 250 | | | |

[0236] Table 25A indicates SNPs found to be in strong linkage disequilibrium with rs308019. To generate this list, correlation coefficients (r²) were calculated between the index SNP and all neighboring SNPs cited in the June 2006 HapMap data set release. An r² cut off of 0.50 was selected for inclusion as evidence for strong genetic linkage, i.e., a “strong linkage disequilibrium.

TABLE 25A
Linked SNPs

| SNP | r² | Position on chr2 | SEQ ID NO |
|---|---|---|---|
| rs308004 | 0.96 | 6787971 | 569 |
| rs308006 | 0.965 | 6788719 | 570 |
| rs307973 | 1.0 | 6791928 | 571 |
| rs307975 | 1.0 | 6795452 | 572 |
| rs2351936 | 1.0 | 6797609 | 573 |
| rs307994 | 1.0 | 6803426 | 574 |
| rs307971 | 1.0 | 6807649 | 575 |
| rs308015 | 1.0 | 6816663 | 576 |
| rs308017 | 1.0 | 6817235 | 577 |
| rs308018 | 1.0 | 6817416 | 578 |
| rs308019 | — | 6817511 | 579 |
| rs308020 | 0.933 | 6820094 | 580 |
| rs308024 | 0.933 | 6824454 | 581 |
| rs308025 | 0.933 | 6824649 | 582 |
| rs308029 | 0.933 | 6825691 | 583 |
| rs2102306 | 0.645 | 6832251 | 584 |
| rs12470246 | 0.6 | 6833027 | 585 |
| rs7595209 | 0.865 | 6834747 | 586 |
| rs967705 | 0.867 | 6836618 | 587 |
| rs954845 | 0.583 | 6837215 | 588 |

### Example 26

[0237] For individuals with colorectal cancer, the distribution of polymorphic alleles at position 10449016 of chromosome 2, found within the HPCAL1 gene, was different from those without colorectal cancer (Table 26). The dominant test for risk associated with carrying the C allele had an empirical p-value based on permutation analysis of 0.004781, and the corresponding dominant odds ratio is 1.324 (Table 26). These data further suggest that this marker, located within the HPCAL1 gene, is associated with colorectal cancer risk and that the C allele at position 10449016 of chromosome 2 is associated with an increased risk of developing colorectal cancer.

TABLE 26

| | rs no. | | | | 1974677 | | |
|---|---|---|---|---|---|---|---|
| | Chromosome; Position | | | | 2; 10449016 | | |
| | Gene Name | | | | HPCAL1 | | |
| | SEQ ID NO; Position | | | | 5629; 55379 | | |
| | Genotype; Phenotype | | | | n = C; increased risk | | |
| | Hardy-Weinberg | | | | 0.55939 | | |
| Case | | | | | | | Odds |
| Flag | Allele B | AA | AB | BB | Model | p-Value | Ratio |
| 0 | C | 321 | 496 | 176 | Dominant | 0.004781 | 1.324 |
| 1 | C | 258 | 520 | 195 | | | |

[0238] Table 26A indicates SNPs found to be in strong linkage disequilibrium with rs1974677. To generate this list, correlation coefficients (r²) were calculated between the index SNP and all neighboring SNPs cited in the June 2006 HapMap data set release. An r² cut off of 0.50 was selected for inclusion as evidence for strong genetic linkage, i.e., a “strong linkage disequilibrium.

TABLE 26A
Linked SNPs

| SNP | r² | Position on chr2 | SEQ ID NO |
|---|---|---|---|
| rs12618307 | 0.704 | 10447542 | 589 |
| rs12621651 | 0.751 | 10447613 | 590 |
| rs1974677 | — | 10449016 | 591 |

### Example 27

[0239] For individuals with colorectal cancer, the distribution of polymorphic alleles at position 14819616 of chromosome 2 was different from those without colorectal cancer (Table 27). The recessive test for risk associated with carrying the G allele had an empirical p-value of 0.002257 based on permutation analysis, and the corresponding recessive odds ratio is 1.315 (Table 27). These data further suggest that this marker is associated with colorectal cancer risk and that the G allele at position 14819616 of chromosome 2 is associated with an increased risk of developing colorectal cancer.

TABLE 27

| | rs no. | | | | 4670019 | | |
|---|---|---|---|---|---|---|---|
| | Chromosome; Position | | | | 2; 14819616 | | |
| | Gene Name | | | | unknown | | |
| | Genotype; Phenotype | | | | n = G; increased risk | | |
| | Hardy-Weinberg | | | | 0.08478 | | |
| Case | | | | | | | Odds |
| Flag | Allele B | AA | AB | BB | Model | p-Value | Ratio |
| 0 | G | 67 | 428 | 513 | Recessive | 0.002257 | 1.315 |
| 1 | G | 62 | 362 | 578 | | | |

[0240] Table 27A indicates SNPs found to be in strong linkage disequilibrium with rs4670019. To generate this list, correlation coefficients (r²) were calculated between the index SNP and all neighboring SNPs cited in the June 2006 HapMap data set release. An r² cut off of 0.50 was selected for inclusion as evidence for strong genetic linkage, i.e., a “strong linkage disequilibrium.

TABLE 27A
Linked SNPs

| SNP | r² | Position on chr2 | SEQ ID NO |
|---|---|---|---|
| rs4670011 | 0.501 | 14717418 | 592 |
| rs2196267 | 0.501 | 14730427 | 593 |
| rs1865456 | 0.501 | 14730636 | 594 |
| rs7559666 | 0.647 | 14733739 | 595 |
| rs4670012 | 0.542 | 14734664 | 596 |
| rs10803752 | 0.509 | 14736069 | 597 |
| rs3002 | 0.501 | 14741491 | 598 |
| rs10200543 | 0.501 | 14741776 | 599 |
| rs10202947 | 0.648 | 14747763 | 600 |
| rs6752249 | 0.509 | 14759875 | 601 |
| rs10185415 | 0.633 | 14762397 | 602 |
| rs2380623 | 0.639 | 14765208 | 603 |
| rs4670016 | 0.639 | 14766106 | 604 |
| rs1816503 | 0.508 | 14782636 | 605 |
| rs2705859 | 0.639 | 14784332 | 606 |
| rs967088 | 0.639 | 14791609 | 607 |
| rs2714298 | 0.676 | 14803091 | 608 |
| rs2705850 | 0.628 | 14805637 | 609 |
| rs2571642 | 0.74 | 14807512 | 610 |
| rs2571614 | 0.74 | 14811732 | 611 |
| rs1434964 | 0.74 | 14811975 | 612 |
| rs2714302 | 0.74 | 14813784 | 613 |
| rs1434968 | 0.74 | 14815996 | 614 |
| rs1897911 | 0.6 | 14817501 | 615 |
| rs1897912 | 0.615 | 14817638 | 616 |
| rs2714304 | 0.74 | 14818554 | 617 |
| rs1541960 | 0.6 | 14818772 | 618 |
| rs2714306 | 0.747 | 14819080 | 619 |
| rs2714307 | 0.74 | 14819413 | 620 |
| rs4670019 | — | 14819616 | 621 |
| rs2714308 | 0.763 | 14820033 | 622 |
| rs2705876 | 0.74 | 14820204 | 623 |
| rs722836 | 0.74 | 14821252 | 624 |
| rs722835 | 0.74 | 14821469 | 625 |
| rs2571617 | 0.734 | 14821774 | 626 |
| rs2571618 | 0.74 | 14822113 | 627 |
| rs2714231 | 0.736 | 14822372 | 628 |
| rs2705877 | 0.74 | 14823215 | 629 |
| rs2714233 | 0.74 | 14823397 | 630 |
| rs2714235 | 0.763 | 14824206 | 631 |
| rs2571619 | 0.763 | 14824355 | 632 |
| rs2571620 | 0.792 | 14824669 | 633 |
| rs2705844 | 0.74 | 14825477 | 634 |
| rs2714236 | 0.74 | 14825491 | 635 |
| rs2571621 | 0.6 | 14825515 | 636 |
| rs2714237 | 0.789 | 14825579 | 637 |
| rs2705843 | 0.788 | 14825843 | 638 |
| rs2571622 | 0.74 | 14825988 | 639 |
| rs2714238 | 0.74 | 14826533 | 640 |
| rs2571624 | 0.6 | 14826982 | 641 |
| rs2714240 | 0.6 | 14827692 | 642 |
| rs2714241 | 0.74 | 14828251 | 643 |
| rs2714242 | 0.74 | 14828478 | 644 |
| rs2714243 | 0.74 | 14828602 | 645 |
| rs2714244 | 0.731 | 14828866 | 646 |
| rs2571625 | 0.731 | 14829175 | 647 |
| rs2571626 | 0.66 | 14830288 | 648 |
| rs2714245 | 0.678 | 14830415 | 649 |
| rs7607607 | 0.796 | 14832593 | 650 |
| rs7607846 | 0.773 | 14832767 | 651 |
| rs2705853 | 0.516 | 14835129 | 652 |
| rs7602844 | 0.773 | 14836747 | 653 |
| rs1836522 | 0.802 | 14837340 | 654 |
| rs10199271 | 0.773 | 14841532 | 655 |
| rs2714248 | 0.523 | 14841955 | 656 |
| rs2010753 | 0.523 | 14842480 | 657 |
| rs1865454 | 0.518 | 14843205 | 658 |
| rs6705141 | 0.847 | 14847211 | 659 |
| rs1865455 | 0.847 | 14847384 | 660 |
| rs6737372 | 0.846 | 14848466 | 661 |
| rs1434969 | 0.812 | 14849112 | 662 |
| rs2714249 | 0.663 | 14850007 | 663 |
| rs6732328 | 0.812 | 14850241 | 664 |
| rs2714259 | 0.663 | 14854674 | 665 |
| rs1946675 | 0.663 | 14856969 | 666 |
| rs1946676 | 0.663 | 14857019 | 667 |
| rs4670021 | 0.808 | 14857404 | 668 |
| rs2705845 | 0.638 | 14858596 | 669 |
| rs7599163 | 0.779 | 14859653 | 670 |
| rs10929918 | 0.705 | 14861777 | 671 |
| rs2705847 | 0.502 | 14865257 | 672 |
| rs13339778 | 0.775 | 14867233 | 673 |
| rs2705854 | 0.607 | 14884637 | 674 |
| rs6747456 | 0.719 | 14885952 | 675 |
| rs7571164 | 0.743 | 14886528 | 676 |
| rs6760314 | 0.719 | 14889421 | 677 |
| rs6432473 | 0.526 | 14890602 | 678 |
| rs7590056 | 0.719 | 14891629 | 679 |
| rs7590304 | 0.713 | 14891836 | 680 |
| rs10929920 | 0.526 | 14893918 | 681 |
| rs7598987 | 0.567 | 14895761 | 682 |
| rs16862033 | 0.719 | 14895898 | 683 |
| rs1518786 | 0.719 | 14896644 | 684 |
| rs4670024 | 0.526 | 14897874 | 685 |
| rs6432474 | 0.719 | 14898959 | 686 |
| rs6432476 | 0.547 | 14901340 | 687 |
| rs7583588 | 0.719 | 14902171 | 688 |
| rs7558005 | 0.719 | 14902258 | 689 |
| rs6734577 | 0.718 | 14902695 | 690 |
| rs6724694 | 0.713 | 14902783 | 691 |
| rs7562308 | 0.719 | 14903803 | 692 |
| rs6750019 | 0.645 | 14904181 | 693 |
| rs17432222 | 0.519 | 14906178 | 694 |
| rs7582273 | 0.719 | 14906940 | 695 |
| rs6432478 | 0.719 | 14908749 | 696 |
| rs6729694 | 0.724 | 14913424 | 697 |
| rs6746706 | 0.719 | 14919179 | 698 |
| rs10211519 | 0.719 | 14921640 | 699 |
| rs16862066 | 0.719 | 14921971 | 700 |
| rs10174079 | 0.645 | 14924120 | 701 |
| rs16862076 | 0.673 | 14925890 | 702 |
| rs7599584 | 0.645 | 14927435 | 703 |
| rs1518790 | 0.645 | 14927984 | 704 |
| rs1518789 | 0.645 | 14928014 | 705 |
| rs1157907 | 0.618 | 14955346 | 706 |
| rs4670032 | 0.541 | 14975692 | 707 |
| rs908788 | 0.541 | 14979189 | 708 |

### Example 28

[0241] For individuals with colorectal cancer, the distribution of polymorphic alleles at position 16429905 of chromosome 2, found within the LOC391353 gene, was different from those without colorectal cancer (Table 28). The trend test for risk associated with carrying the G allele had an empirical p-value of 0.000839 based on permutation analysis, and the corresponding Mantel-Haenszel odds ratio for trend is 1.256 (Table 28). These data further suggest that this marker, located within the LOC391353 gene, is associated with colorectal cancer risk and that the G allele at position 16429905 of chromosome 2 is associated with an increased risk of developing colorectal cancer.

TABLE 28

| | |
|---|---|
| rs no. | 340779 |
| Chromosome; Position | 2; 16429905 |
| Gene Name | LOC391353 |
| SEQ ID NO; Position | 5630; 181465 |
| Genotype; Phenotype | n = G; increased risk |
| Hardy-Weinberg | 1 |

| Case | | | | | | | |
|---|---|---|---|---|---|---|---|
| Flag | Allele B | AA | AB | BB | Model | p-Value | Odds Ratio |
| 0 | G | 591 | 400 | 67 | Trend | 0.000839 | 1.256 |
| 1 | G | 471 | 390 | 90 | | | |

[0242] Table 28A indicates SNPs found to be in strong linkage disequilibrium with rs340779. To generate this list, correlation coefficients (r²) were calculated between the index SNP and all neighboring SNPs cited in the June 2006 HapMap data set release. An r² cut off of 0.50 was selected for inclusion as evidence for strong genetic linkage, i.e., a “strong linkage disequilibrium.

TABLE 28A
Linked SNPs

| SNP | r² | Position on chr2 | SEQ ID NO |
|---|---|---|---|
| rs340781 | 0.904 | 16423966 | 709 |
| rs340779 | — | 16429905 | 710 |
| rs186875 | 0.909 | 16436415 | 711 |
| rs340802 | 0.909 | 16436634 | 712 |
| rs340799 | 0.883 | 16438849 | 713 |
| rs163772 | 0.909 | 16441253 | 714 |
| rs2333848 | 0.517 | 16444388 | 715 |
| rs1430040 | 0.726 | 16449154 | 717 |
| rs1430041 | 0.724 | 16449252 | 718 |
| rs7568268 | 0.511 | 16452489 | 719 |
| rs7355442 | 0.726 | 16452960 | 720 |
| rs11680088 | 0.868 | 16453191 | 721 |
| rs2333850 | 0.656 | 16453401 | 722 |
| rs969605 | 0.726 | 16456670 | 723 |
| rs969604 | 0.726 | 16456858 | 724 |
| rs969603 | 0.726 | 16456971 | 725 |
| rs1030509 | 0.726 | 16457143 | 726 |
| rs13404283 | 0.726 | 16457924 | 727 |
| rs10202013 | 0.726 | 16458608 | 728 |
| rs11096501 | 0.726 | 16460229 | 729 |
| rs12466763 | 0.726 | 16460397 | 730 |
| rs7588594 | 0.638 | 16462574 | 731 |
| rs7594175 | 0.638 | 16462884 | 732 |
| rs11690983 | 0.595 | 16463084 | 733 |
| rs6531074 | 0.662 | 16466591 | 735 |

### Example 29

[0243] For individuals with colorectal cancer, the distribution of polymorphic alleles at position 16465684 of chromosome 2 was different from those without colorectal cancer (Table 29). The recessive test for risk associated with carrying the G allele had an empirical p-value of 0.005471 based on permutation analysis, and the corresponding recessive odds ratio is 1.378 (Table 29). These data further suggest that this marker is associated with colorectal cancer risk and that the G allele at position 16465684 of chromosome 2 is associated with an increased risk of developing colorectal cancer.

TABLE 29

| | |
|---|---|
| rs no. | 919432 |
| Chromosome; Position | 2; 16465684 |
| Gene Name | unknown |
| Genotype; Phenotype | n = G; increased risk |
| Hardy-Weinberg | 0.28104 |

| | | | | | | | Odds |
|---|---|---|---|---|---|---|---|
| Case Flag | Allele B | AA | AB | BB | Model | p-Value | Ratio |
| 0 | G | 408 | 542 | 156 | Recessive | 0.005471 | 1.378 |
| 1 | G | 371 | 535 | 205 | | | |

[0244] Table 29A indicates SNPs found to be in strong linkage disequilibrium with rs919432. To generate this list, correlation coefficients (r²) were calculated between the index SNP and all neighboring SNPs cited in the June 2006 HapMap data set release. An r² cut off of 0.50 was selected for inclusion as evidence for strong genetic linkage, i.e., a “strong linkage disequilibrium.

TABLE 29A
Linked SNPs

| SNP | r² | Position on chr2 | SEQ ID NO |
|---|---|---|---|
| rs2333848 | 0.886 | 16444388 | 715 |
| rs2163062 | 1.0 | 16445618 | 716 |
| rs7568268 | 0.928 | 16452489 | 719 |
| rs919432 | — | 16465684 | 734 |
| rs13020939 | 0.86 | 16469303 | 736 |
| rs891275 | 0.927 | 16470091 | 737 |

### Example 30

[0245] For individuals with colorectal cancer, the distribution of polymorphic alleles at position 19207725 of chromosome 2, found within the LOC388927 gene, was different from those without colorectal cancer (Table 30). The recessive test for risk associated with carrying the A allele had an empirical p-value of 0.002328 based on permutation analysis, and the corresponding recessive odds ratio is 1.469 (Table 30). These data further suggest that this marker, located within the LOC388927 gene, is associated with colorectal cancer risk and that the A allele at position 19207725 of chromosome 2 is associated with an increased risk of developing colorectal cancer.

TABLE 30

| | |
|---|---|
| rs no. | 11694107 |
| Chromosome; Position | 2; 19207725 |
| Gene Name | LOC388927 |
| SEQ ID NO; Position | 5631; 142426 |
| Genotype; Phenotype | n = A; increased risk |
| Hardy-Weinberg | 0.00418 |

| | | | | | | | Odds |
|---|---|---|---|---|---|---|---|
| Case Flag | Allele B | AA | AB | BB | Model | p-Value | Ratio |
| 0 | A | 364 | 521 | 126 | Recessive | 0.002328 | 1.469 |
| 1 | A | 383 | 444 | 173 | | | |

[0246] Table 30A indicates SNPs found to be in strong linkage disequilibrium with rs11694107. To generate this list, correlation coefficients (r²) were calculated between the index SNP and all neighboring SNPs cited in the June 2006 HapMap data set release. An r² cut off of 0.50 was selected for inclusion as evidence for strong genetic linkage, i.e., a “strong linkage disequilibrium.

TABLE 30A
Linked SNPs

| SNP | r² | Position on chr2 | SEQ ID NO |
|---|---|---|---|
| rs10495695 | 0.967 | 19192227 | 738 |
| rs4511684 | 0.967 | 19196921 | 739 |
| rs6715010 | 0.769 | 19199416 | 740 |
| rs6725361 | 0.818 | 19200437 | 741 |
| rs13027962 | 0.963 | 19200850 | 742 |
| rs12053016 | 0.553 | 19202694 | 743 |
| rs4666320 | 0.812 | 19206904 | 744 |
| rs11694107 | — | 19207725 | 745 |
| rs10207804 | 0.559 | 19208019 | 746 |
| rs4666451 | 1.0 | 19208571 | 747 |
| rs4426493 | 1.0 | 19209828 | 748 |
| rs4574071 | 1.0 | 19220355 | 749 |
| rs11694012 | 1.0 | 19220680 | 750 |
| rs4480951 | 0.642 | 19222754 | 751 |

### Example 31

[0247] For individuals with colorectal cancer, the distribution of polymorphic alleles at position 45108790 of chromosome 2 was different from those without colorectal cancer (Table 31). The dominant test for risk associated with carrying the A allele had an empirical p-value based on permutation analysis of 0.007796, and the corresponding dominant odds ratio is 1.274 (Table 31). These data further suggest that this marker is associated with colorectal cancer risk and that the A allele at position 45108790 of chromosome 2 is associated with an increased risk of developing colorectal cancer.

TABLE 31

| | |
|---|---|
| rs no. | 163503 |
| Chromosome; Position | 2; 45108790 |
| Gene Name | unknown |
| Genotype; Phenotype | n = A; increased risk |
| Hardy-Weinberg | 0.02776 |

| | | | | | | | Odds |
|---|---|---|---|---|---|---|---|
| Case Flag | Allele B | AA | AB | BB | Model | p-Value | Ratio |
| 0 | A | 465 | 437 | 139 | Dominant | 0.007796 | 1.274 |
| 1 | A | 365 | 440 | 136 | | | |

[0248] Table 31A indicates SNPs found to be in strong linkage disequilibrium with rs163503. To generate this list, correlation coefficients (r²) were calculated between the index SNP and all neighboring SNPs cited in the June 2006 HapMap data set release. An r² cut off of 0.50 was selected for inclusion as evidence for strong genetic linkage, i.e., a “strong linkage disequilibrium.

TABLE 31A
Linked SNPs

| SNP | r² | Position on chr2 | SEQ ID NO |
|---|---|---|---|
| rs163507 | 0.526 | 45105940 | 752 |
| rs163503 | — | 45108790 | 753 |

### Example 32

[0249] For individuals with colorectal cancer, the distribution of polymorphic alleles at position 49180455 of chromosome 2, found within the FSHR gene, was different from those without colorectal cancer (Table 32). The recessive test for risk associated with carrying the A allele had an empirical p-value of 0.000124 based on permutation analysis, and the corresponding recessive odds ratio is 1.609 (Table 32). These data further suggest that this marker, located within the FSHR gene, is associated with colorectal cancer risk and that the A allele at position 49180455 of chromosome 2 is associated with an increased risk of developing colorectal cancer.

TABLE 32

| | |
|---|---|
| rs no. | 10865238 |
| Chromosome; Position | 2; 49180455 |
| Gene Name | FSHR |
| SEQ ID NO; Position | 5632; 112827 |
| Genotype; Phenotype | n = A; increased risk |
| Hardy-Weinberg | 0.14666 |

| Case | | | | | | | Odds |
|---|---|---|---|---|---|---|---|
| Flag | Allele B | AA | AB | BB | Model | p-Value | Ratio |
| 0 | A | 409 | 515 | 133 | Recessive | 0.000124 | 1.609 |
| 1 | A | 332 | 441 | 179 | | | |

[0250] Table 32A indicates SNPs found to be in strong linkage disequilibrium with rs10865238. To generate this list, correlation coefficients (r²) were calculated between the index SNP and all neighboring SNPs cited in the June 2006 HapMap data set release. An r² cut off of 0.50 was selected for inclusion as evidence for strong genetic linkage, i.e., a “strong linkage disequilibrium.

TABLE 32A
Linked SNPs

| SNP | r² | Position on chr2 | SEQ ID NO |
|---|---|---|---|
| rs3788981 | 0.584 | 49157212 | 754 |
| rs2349415 | 0.686 | 49159483 | 755 |
| rs9807991 | 0.759 | 49163446 | 756 |
| rs10171892 | 0.925 | 49169518 | 757 |
| rs10865238 | — | 49180455 | 758 |
| rs12614817 | 0.695 | 49183068 | 759 |
| rs3850344 | 0.793 | 49184463 | 760 |
| rs6716567 | 0.626 | 49185265 | 761 |
| rs11125197 | 0.684 | 49186995 | 762 |
| rs11125198 | 0.564 | 49187101 | 763 |
| rs3913665 | 0.83 | 49187893 | 764 |
| rs1504175 | 0.626 | 49189474 | 765 |
| rs2134811 | 0.83 | 49190619 | 766 |
| rs13032266 | 0.626 | 49191171 | 767 |
| rs11689714 | 0.545 | 49204882 | 768 |
| rs12052611 | 0.564 | 49228799 | 769 |
| rs974894 | 0.545 | 49242409 | 770 |
| rs4510264 | 0.647 | 49244528 | 771 |
| rs924819 | 0.564 | 49244583 | 772 |
| rs1032838 | 0.56 | 49311997 | 773 |
| rs11125217 | 0.56 | 49319087 | 774 |
| rs11685850 | 0.56 | 49329514 | 775 |
| rs9309160 | 0.56 | 49329682 | 776 |
| rs4564810 | 0.53 | 49332761 | 777 |
| rs11125222 | 0.554 | 49335916 | 778 |

### Example 33

[0251] For individuals with colorectal cancer, the distribution of polymorphic alleles at position 51310020 of chromosome 2 was different from those without colorectal cancer (Table 33). The dominant test for risk associated with carrying the C allele had an empirical p-value based on permutation analysis of 0.002806, and the corresponding dominant odds ratio is 1.805 (Table 33). These data further suggest that this marker is associated with colorectal cancer risk and that the C allele at position 51310020 of chromosome 2 is associated with an increased risk of developing colorectal cancer.

TABLE 33

| | |
|---|---|
| rs no. | 10490155 |
| Chromosome; Position | 2; 51310020 |
| Gene Name | unknown |
| Genotype; Phenotype | n = C; increased risk |
| Hardy-Weinberg | 0.00576 |

| | | | | | | | Odds |
|---|---|---|---|---|---|---|---|
| Case Flag | Allele B | AA | AB | BB | Model | p-Value | Ratio |
| 0 | C | 71 | 308 | 535 | Dominant | 0.002806 | 1.805 |
| 1 | C | 42 | 358 | 542 | | | |

[0252] Table 33A indicates SNPs found to be in strong linkage disequilibrium with rs10490155. To generate this list, correlation coefficients (r²) were calculated between the index SNP and all neighboring SNPs cited in the June 2006 HapMap data set release. An r² cut off of 0.50 was selected for inclusion as evidence for strong genetic linkage, i.e., a “strong linkage disequilibrium.

TABLE 33A
Linked SNPs

| SNP | r² | Position on chr2 | SEQ ID NO |
|---|---|---|---|
| rs1876087 | 0.895 | 51253921 | 779 |
| rs17576609 | 1.0 | 51282582 | 780 |
| rs10490158 | 1.0 | 51283998 | 781 |
| rs17517594 | 1.0 | 51292542 | 782 |
| rs17576934 | 0.817 | 51292816 | 783 |
| rs17517741 | 1.0 | 51293152 | 784 |
| rs17517896 | 1.0 | 51295469 | 785 |
| rs17517917 | 1.0 | 51295990 | 786 |
| rs17577275 | 1.0 | 51296316 | 787 |
| rs17577359 | 1.0 | 51296923 | 788 |
| rs2353307 | 1.0 | 51299142 | 789 |
| rs888239 | 1.0 | 51299895 | 790 |
| rs17577575 | 1.0 | 51301729 | 791 |
| rs17577582 | 1.0 | 51302018 | 792 |
| rs17577659 | 1.0 | 51302766 | 793 |
| rs10490157 | 1.0 | 51308652 | 794 |
| rs10490156 | 1.0 | 51309069 | 795 |
| rs10490155 | — | 51310020 | 796 |
| rs17577847 | 1.0 | 51310044 | 797 |
| rs17577896 | 0.945 | 51310173 | 798 |
| rs17577972 | 1.0 | 51310771 | 799 |
| rs17518720 | 1.0 | 51311259 | 800 |
| rs17578056 | 1.0 | 51311482 | 801 |
| rs2883133 | 1.0 | 51312641 | 802 |
| rs4408757 | 1.0 | 51312847 | 803 |
| rs17518964 | 1.0 | 51312996 | 804 |
| rs17578308 | 1.0 | 51313386 | 805 |
| rs11903875 | 0.719 | 51314939 | 806 |
| rs4485597 | 1.0 | 51322555 | 807 |
| rs17519239 | 1.0 | 51336913 | 808 |
| rs6715400 | 1.0 | 51337143 | 809 |
| rs6715541 | 1.0 | 51337268 | 810 |
| rs1468895 | 0.943 | 51350473 | 811 |
| rs1468896 | 0.943 | 51350968 | 812 |
| rs17519819 | 0.943 | 51352442 | 813 |
| rs17520196 | 0.943 | 51359648 | 814 |
| rs7589574 | 0.942 | 51366391 | 815 |
| rs6719913 | 0.942 | 51368581 | 816 |
| rs6707439 | 0.943 | 51372576 | 817 |

### Example 34

[0253] For individuals with colorectal cancer, the distribution of polymorphic alleles at position 51663024 of chromosome 2 was different from those without colorectal cancer (Table 34). The recessive test for risk associated with carrying the T allele had an empirical p-value of 0.001612 based on permutation analysis, and the corresponding recessive odds ratio is 3.159 (Table 34). These data further suggest that this marker is associated with colorectal cancer risk and that the T allele at position 51663024 of chromosome 2 is associated with an increased risk of developing colorectal cancer.

TABLE 34

| | |
|---|---|
| rs no. | 1406421 |
| Chromosome; Position | 2; 51663024 |
| Gene Name | unknown |
| Genotype; Phenotype | n = T; increased risk |
| Hardy-Weinberg | 0.07789 |

| Case | | | | | | | |
|---|---|---|---|---|---|---|---|
| Flag | Allele B | AA | AB | BB | Model | p-Value | Odds Ratio |
| 0 | T | 709 | 223 | 9 | Recessive | 0.001612 | 3.159 |
| 1 | T | 689 | 229 | 28 | | | |

[0254] Table 34A indicates SNPs found to be in strong linkage disequilibrium with rs1406421. To generate this list, correlation coefficients (r²) were calculated between the index SNP and all neighboring SNPs cited in the June 2006 HapMap data set release. An r² cut off of 0.50 was selected for inclusion as evidence for strong genetic linkage, i.e., a “strong linkage disequilibrium.

TABLE 34A
Linked SNPs

| SNP | r² | Position on chr2 | SEQ ID NO |
|---|---|---|---|
| rs13009036 | 0.568 | 51581044 | 818 |
| rs10199046 | 0.568 | 51581245 | 819 |
| rs11563100 | 0.568 | 51581381 | 820 |
| rs888107 | 0.568 | 51581793 | 821 |
| rs11563101 | 0.568 | 51582624 | 822 |
| rs11562989 | 0.568 | 51582698 | 823 |
| rs11563024 | 0.568 | 51582708 | 824 |
| rs11563122 | 0.568 | 51583049 | 825 |
| rs7578318 | 0.568 | 51583586 | 826 |
| rs11888857 | 0.568 | 51585227 | 827 |
| rs13012231 | 0.568 | 51585680 | 828 |
| rs13006383 | 0.568 | 51585798 | 829 |
| rs17862653 | 0.568 | 51586102 | 830 |
| rs6734029 | 0.568 | 51586672 | 831 |
| rs6721908 | 0.568 | 51586849 | 832 |
| rs6737158 | 0.568 | 51586986 | 833 |
| rs6737381 | 0.568 | 51587119 | 834 |
| rs13020816 | 0.568 | 51588006 | 835 |
| rs12995306 | 0.568 | 51588334 | 836 |
| rs7591147 | 0.568 | 51588675 | 837 |
| rs17868123 | 0.568 | 51588954 | 838 |
| rs10207943 | 0.568 | 51589200 | 839 |
| rs13001835 | 0.568 | 51589275 | 840 |
| rs13016411 | 0.56 | 51591307 | 841 |
| rs13017345 | 0.56 | 51591566 | 842 |
| rs13022923 | 0.56 | 51591990 | 843 |
| rs11563049 | 0.56 | 51592343 | 844 |
| rs10221925 | 0.56 | 51592536 | 845 |
| rs13023625 | 0.56 | 51592586 | 846 |
| rs13024366 | 0.56 | 51592716 | 847 |
| rs11563182 | 0.56 | 51592732 | 848 |
| rs10221616 | 0.559 | 51593258 | 849 |
| rs11563050 | 0.56 | 51593383 | 850 |
| rs13036132 | 0.56 | 51593808 | 851 |
| rs17864893 | 0.56 | 51593873 | 852 |
| rs11563183 | 0.56 | 51594068 | 853 |
| rs1528799 | 0.511 | 51594415 | 854 |
| rs12988318 | 0.56 | 51594505 | 855 |
| rs2091574 | 0.56 | 51595017 | 856 |
| rs6712493 | 0.56 | 51595132 | 857 |
| rs6754612 | 0.56 | 51595138 | 858 |
| rs2103316 | 0.56 | 51595162 | 859 |
| rs6754634 | 0.56 | 51595217 | 860 |
| rs13021773 | 0.56 | 51595686 | 861 |
| rs11562938 | 0.56 | 51596013 | 862 |
| rs11562962 | 0.56 | 51596427 | 863 |
| rs11563184 | 0.56 | 51596503 | 864 |
| rs6721305 | 0.56 | 51596924 | 865 |
| rs11563051 | 0.56 | 51598188 | 866 |
| rs11563048 | 0.619 | 51604192 | 867 |
| rs11563179 | 0.619 | 51604653 | 868 |
| rs11563178 | 0.527 | 51606466 | 869 |
| rs28958890 | 0.73 | 51612697 | 870 |
| rs12995489 | 0.73 | 51616113 | 871 |
| rs12996042 | 0.73 | 51616175 | 872 |
| rs7603902 | 0.73 | 51616622 | 873 |
| rs13010881 | 0.73 | 51618694 | 874 |
| rs7565729 | 0.73 | 51620262 | 875 |
| rs13030730 | 0.73 | 51621249 | 876 |
| rs13031889 | 0.729 | 51621558 | 877 |
| rs12995616 | 0.73 | 51623474 | 878 |
| rs13008379 | 0.73 | 51624825 | 879 |
| rs13035437 | 0.73 | 51627047 | 880 |
| rs17862679 | 0.73 | 51629369 | 881 |
| rs1919420 | 0.803 | 51629761 | 882 |
| rs13006788 | 1.0 | 51630099 | 883 |
| rs6545223 | 0.803 | 51630541 | 884 |
| rs13014691 | 1.0 | 51631175 | 885 |
| rs1528802 | 0.73 | 51631495 | 886 |
| rs1569193 | 0.568 | 51632351 | 887 |
| rs17869182 | 0.73 | 51634094 | 888 |
| rs13012225 | 0.729 | 51634284 | 889 |
| rs13035555 | 0.73 | 51634299 | 890 |
| rs17864517 | 0.73 | 51634564 | 891 |
| rs1919421 | 0.614 | 51639966 | 892 |
| rs1528803 | 0.614 | 51641156 | 893 |
| rs2715067 | 0.73 | 51641476 | 894 |
| rs13030120 | 0.73 | 51641840 | 895 |
| rs13003791 | 0.73 | 51641866 | 896 |
| rs17863608 | 0.587 | 51642637 | 897 |
| rs13408179 | 0.568 | 51642841 | 898 |
| rs2715070 | 0.73 | 51643067 | 899 |
| rs1609360 | 0.73 | 51643284 | 900 |
| rs13026025 | 0.667 | 51645247 | 901 |
| rs1528804 | 0.803 | 51646327 | 902 |
| rs1919424 | 0.803 | 51646730 | 903 |
| rs1919425 | 0.667 | 51646785 | 904 |
| rs1919426 | 0.667 | 51646789 | 905 |
| rs1919427 | 0.803 | 51647145 | 906 |
| rs1112550 | 0.667 | 51647506 | 907 |
| rs1406427 | 0.667 | 51648328 | 908 |
| rs1406428 | 0.667 | 51648645 | 909 |
| rs1534609 | 0.667 | 51649654 | 910 |
| rs1534610 | 0.667 | 51649807 | 911 |
| rs1528806 | 0.803 | 51650133 | 912 |
| rs13007045 | 0.803 | 51651094 | 913 |
| rs7569458 | 0.587 | 51651372 | 914 |
| rs13031161 | 0.614 | 51651532 | 915 |
| rs11125355 | 0.614 | 51651671 | 916 |
| rs11125359 | 0.614 | 51652648 | 917 |
| rs11901456 | 0.614 | 51652748 | 918 |
| rs11125360 | 0.667 | 51654053 | 919 |
| rs11125361 | 0.667 | 51654167 | 920 |
| rs11563044 | 0.667 | 51654512 | 921 |
| rs2141453 | 0.614 | 51654644 | 922 |
| rs13010068 | 0.667 | 51655509 | 923 |
| rs13027868 | 0.667 | 51655749 | 924 |
| rs11563170 | 0.667 | 51656169 | 925 |
| rs2698005 | 1.0 | 51656563 | 926 |
| rs13029605 | 0.803 | 51656610 | 927 |
| rs13029262 | 0.803 | 51656620 | 928 |
| rs1528794 | 0.667 | 51656944 | 929 |
| rs11562961 | 0.614 | 51657505 | 930 |
| rs17868162 | 0.557 | 51657783 | 931 |
| rs17863618 | 0.614 | 51657787 | 932 |
| rs11563000 | 0.667 | 51658048 | 933 |
| rs11895794 | 0.803 | 51658435 | 934 |
| rs2698004 | 0.803 | 51659770 | 935 |
| rs2715049 | 0.803 | 51662636 | 936 |
| rs1406421 | — | 51663024 | 937 |
| rs1406420 | 0.803 | 51663466 | 938 |
| rs1528791 | 0.803 | 51664734 | 939 |
| rs1528789 | 0.785 | 51666133 | 940 |
| rs13012007 | 0.803 | 51666155 | 941 |
| rs2698002 | 0.803 | 51667730 | 942 |
| rs7566493 | 0.803 | 51668201 | 943 |
| rs2698000 | 0.803 | 51668300 | 944 |
| rs17862700 | 0.803 | 51668763 | 945 |
| rs11884390 | 0.803 | 51670217 | 946 |
| rs12996896 | 0.803 | 51670971 | 947 |

### Example 35

[0255] For individuals with colorectal cancer, the distribution of polymorphic alleles at position 51848463 of chromosome 2 was different from those without colorectal cancer (Table 35). The trend test for risk associated with carrying the C allele had an empirical p-value of 0.011173 based on permutation analysis, and the corresponding Mantel-Haenszel odds ratio for trend is 1.235 (Table 35). These data further suggest that this marker is associated with colorectal cancer risk and that the C allele at position 51848463 of chromosome 2′ is associated with an increased risk of developing colorectal cancer.

TABLE 35

| | |
|---|---|
| rs no. | 9309219 |
| Chromosome; Position | 2; 51848463 |
| Gene Name | unknown |
| Genotype; Phenotype | n = C; increased risk |
| Hardy-Weinberg | 0.90323 |

| Case | | | | | | | |
|---|---|---|---|---|---|---|---|
| Flag | Allele B | AA | AB | BB | Model | p-Value | Odds Ratio |
| 0 | C | 806 | 276 | 22 | Trend | 0.011173 | 1.235 |
| 1 | C | 755 | 320 | 31 | | | |

[0256] Table 35A indicates SNPs found to be in strong linkage disequilibrium with rs9309219. To generate this list, correlation coefficients (r²) were calculated between the index SNP and all neighboring SNPs cited in the June 2006 HapMap data set release. An r² cut off of 0.50 was selected for inclusion as evidence for strong genetic linkage, i.e., a “strong linkage disequilibrium.

TABLE 35A
Linked SNPs

| SNP | r² | Position on chr2 | SEQ ID NO |
|---|---|---|---|
| rs9989877 | 0.505 | 51728639 | 948 |
| rs12616608 | 0.575 | 51733559 | 949 |
| rs13405904 | 0.589 | 51734157 | 950 |
| rs13010288 | 0.654 | 51736163 | 951 |
| rs12615199 | 0.872 | 51736904 | 952 |
| rs10181888 | 1.0 | 51737857 | 953 |
| rs17864557 | 0.533 | 51744922 | 954 |
| rs11125367 | 0.533 | 51745502 | 955 |
| rs10168197 | 0.818 | 51746490 | 956 |
| rs6708550 | 0.533 | 51749051 | 957 |
| rs1119247 | 0.872 | 51753451 | 958 |
| rs2465526 | 0.818 | 51761022 | 959 |
| rs2953298 | 0.872 | 51763530 | 960 |
| rs2953299 | 0.818 | 51763744 | 961 |
| rs2953300 | 0.818 | 51764024 | 962 |
| rs2675025 | 0.538 | 51764406 | 963 |
| rs1516172 | 0.725 | 51765606 | 964 |
| rs2675021 | 0.725 | 51772482 | 965 |
| rs11562967 | 0.872 | 51777123 | 966 |
| rs17862601 | 0.872 | 51778134 | 967 |
| rs10197898 | 0.533 | 51778197 | 968 |
| rs1159982 | 0.872 | 51778908 | 969 |
| rs2048846 | 0.533 | 51779815 | 970 |
| rs4531963 | 0.872 | 51781192 | 971 |
| rs7571441 | 0.533 | 51782154 | 972 |
| rs1516174 | 0.872 | 51782992 | 973 |
| rs925801 | 0.533 | 51783172 | 974 |
| rs17864568 | 0.872 | 51783597 | 975 |
| rs1606974 | 0.636 | 51785250 | 976 |
| rs7580286 | 0.913 | 51785797 | 977 |
| rs4029458 | 0.533 | 51785854 | 978 |
| rs2102766 | 0.533 | 51785974 | 979 |
| rs2090337 | 0.533 | 51786209 | 980 |
| rs4998483 | 0.872 | 51786351 | 981 |
| rs6545227 | 0.872 | 51786438 | 982 |
| rs13423007 | 0.533 | 51788047 | 983 |
| rs12713143 | 0.533 | 51788314 | 984 |
| rs1878135 | 0.801 | 51789376 | 985 |
| rs1516173 | 0.872 | 51789672 | 986 |
| rs13423880 | 0.872 | 51791905 | 987 |
| rs10206043 | 0.818 | 51796180 | 988 |
| rs1516197 | 0.533 | 51799588 | 989 |
| rs11563020 | 0.857 | 51800143 | 990 |
| rs17864571 | 0.872 | 51800330 | 991 |
| rs1516198 | 0.533 | 51800670 | 992 |
| rs966733 | 0.818 | 51801927 | 993 |
| rs966734 | 0.533 | 51802093 | 994 |
| rs1516177 | 0.593 | 51805779 | 995 |
| rs1516178 | 0.818 | 51805870 | 996 |
| rs1516181 | 0.818 | 51810856 | 997 |
| rs1400103 | 0.818 | 51811445 | 998 |
| rs4971756 | 0.818 | 51811704 | 999 |
| rs1516182 | 0.685 | 51812416 | 1000 |
| rs6758434 | 0.685 | 51812487 | 1001 |
| rs1400104 | 0.673 | 51812736 | 1002 |
| rs10200986 | 0.872 | 51814002 | 1003 |
| rs9309217 | 0.818 | 51814655 | 1004 |
| rs1400106 | 0.818 | 51814894 | 1005 |
| rs10166893 | 0.818 | 51816235 | 1006 |
| rs10190410 | 0.818 | 51816249 | 1007 |
| rs12713144 | 0.818 | 51816496 | 1008 |
| rs1400107 | 0.818 | 51816919 | 1009 |
| rs1400108 | 0.818 | 51817159 | 1010 |
| rs7569104 | 0.818 | 51817748 | 1011 |
| rs4146702 | 0.533 | 51820864 | 1012 |
| rs4146703 | 0.685 | 51821404 | 1013 |
| rs17863669 | 0.685 | 51821994 | 1014 |
| rs6720129 | 0.818 | 51822333 | 1015 |
| rs1400111 | 0.818 | 51822667 | 1016 |
| rs1400112 | 0.818 | 51822862 | 1017 |
| rs6714353 | 0.818 | 51825960 | 1018 |
| rs6729695 | 0.818 | 51826065 | 1019 |
| rs6753905 | 0.533 | 51832068 | 1020 |
| rs6739137 | 0.533 | 51832308 | 1021 |
| rs12691185 | 0.872 | 51832588 | 1022 |
| rs11694738 | 0.685 | 51833854 | 1023 |
| rs1878136 | 0.769 | 51836275 | 1024 |
| rs1516185 | 1.0 | 51838112 | 1025 |
| rs9309218 | 1.0 | 51839346 | 1026 |
| rs1028146 | 0.932 | 51839857 | 1027 |
| rs9973524 | 1.0 | 51841311 | 1028 |
| rs1516186 | 1.0 | 51841526 | 1029 |
| rs1516187 | 0.656 | 51841815 | 1030 |
| rs1356213 | 0.589 | 51842300 | 1031 |
| rs7609540 | 1.0 | 51843180 | 1032 |
| rs1516179 | 0.656 | 51843615 | 1033 |
| rs1516180 | 0.656 | 51843781 | 1034 |
| rs10201408 | 1.0 | 51844459 | 1035 |
| rs10865257 | 1.0 | 51844998 | 1036 |
| rs1516184 | 1.0 | 51845560 | 1037 |
| rs4971757 | 0.589 | 51846399 | 1038 |
| rs4353689 | 0.656 | 51846977 | 1039 |
| rs4316974 | 1.0 | 51847151 | 1040 |
| rs10182761 | 0.656 | 51847495 | 1041 |
| rs9309219 | — | 51848463 | 1042 |
| rs11125373 | 0.556 | 51857814 | 1043 |
| rs11563094 | 0.505 | 51860363 | 1044 |
| rs2048848 | 0.615 | 51860492 | 1045 |

### Example 36

[0257] For individuals with colorectal cancer, the distribution of polymorphic alleles at position 54634922 of chromosome 2, found within the LOC442016 gene, was different from those without colorectal cancer (Table 36). The dominant test for risk associated with carrying the T allele had an empirical p-value based on permutation analysis of 0.000238, and the corresponding dominant odds ratio is 2.414 (Table 36). These data further suggest that this marker, located within the LOC442016 gene, is associated with colorectal cancer risk and that the T allele at position 54634922 of chromosome 2 is associated with an increased risk of developing colorectal cancer.

TABLE 36

| | |
|---|---|
| rs no. | 10496032 |
| Chromosome; Position | 2; 54634922 |
| Gene Name | LOC442016 |
| SEQ ID NO; Position | 5633; 70940 |
| Genotype; Phenotype | n = T; increased risk |
| Hardy-Weinberg | 0.03546 |

| | | | | | | | Odds |
|---|---|---|---|---|---|---|---|
| Case Flag | Allele B | AA | AB | BB | Model | p-Value | Ratio |
| 0 | T | 56 | 296 | 574 | Dominant | 0.000238 | 2.414 |
| 1 | T | 24 | 304 | 596 | | | |

[0258] Table 36A indicates SNPs found to be in strong linkage disequilibrium with rs10496032. To generate this list, correlation coefficients (r²) were calculated between the index SNP and all neighboring SNPs cited in the June 2006 HapMap data set release. An r² cut off of 0.50 was selected for inclusion as evidence for strong genetic linkage, i.e., a “strong linkage disequilibrium.

TABLE 36A
Linked SNPs

| SNP | r² | Position on chr2 | SEQ ID NO |
|---|---|---|---|
| rs13034739 | 0.891 | 54600331 | 1046 |
| rs7593062 | 0.891 | 54602615 | 1047 |
| rs6710809 | 0.891 | 54610296 | 1048 |
| rs4129261 | 1.0 | 54617743 | 1049 |
| rs13390258 | 0.945 | 54620579 | 1050 |
| rs17343815 | 0.838 | 54625770 | 1051 |
| rs17415725 | 0.838 | 54626013 | 1052 |
| rs13021031 | 0.584 | 54628472 | 1053 |
| rs12713259 | 1.0 | 54629673 | 1054 |
| rs7600596 | 0.849 | 54630772 | 1055 |
| rs10496032 | — | 54634922 | 1056 |
| rs6740698 | 1.0 | 54635392 | 1057 |
| rs12990732 | 0.775 | 54636684 | 1058 |
| rs11883910 | 0.682 | 54642867 | 1059 |
| rs17045939 | 0.786 | 54649884 | 1060 |
| rs3796022 | 0.735 | 54666880 | 1061 |
| rs4319969 | 0.735 | 54667529 | 1062 |
| rs11904679 | 0.735 | 54677809 | 1063 |
| rs4261758 | 0.786 | 54681294 | 1064 |
| rs13021615 | 0.734 | 54682974 | 1065 |
| rs6545430 | 0.733 | 54699927 | 1066 |
| rs6734536 | 0.722 | 54709360 | 1067 |
| rs6734445 | 0.733 | 54709449 | 1068 |
| rs13391803 | 0.722 | 54711779 | 1069 |
| rs4455200 | 0.517 | 54713242 | 1070 |
| rs7599241 | 0.517 | 54713507 | 1071 |
| rs4346422 | 0.517 | 54713857 | 1072 |
| rs13386146 | 0.517 | 54714165 | 1073 |
| rs13399656 | 0.516 | 54714347 | 1074 |
| rs7340302 | 0.533 | 54715322 | 1075 |
| rs10184128 | 0.517 | 54715467 | 1076 |
| rs12713264 | 0.533 | 54716869 | 1077 |
| rs12713265 | 0.517 | 54717060 | 1078 |
| rs11902987 | 0.517 | 54717238 | 1079 |
| rs13403284 | 0.517 | 54717400 | 1080 |
| rs11892443 | 0.509 | 54717427 | 1081 |
| rs13391522 | 0.517 | 54717505 | 1082 |
| rs3796019 | 0.533 | 54718930 | 1083 |
| rs1137645 | 0.533 | 54719243 | 1084 |
| rs3287 | 0.516 | 54719308 | 1085 |
| rs10170355 | 0.501 | 54719973 | 1086 |
| rs10193692 | 0.517 | 54719991 | 1087 |
| rs10182836 | 0.517 | 54720155 | 1088 |
| rs12713268 | 0.516 | 54720496 | 1089 |
| rs12713269 | 0.517 | 54720805 | 1090 |
| rs7586066 | 0.672 | 54722143 | 1091 |
| rs7586311 | 0.502 | 54722413 | 1092 |
| rs4641979 | 0.533 | 54723568 | 1093 |
| rs10183867 | 0.516 | 54724373 | 1094 |
| rs13432302 | 0.517 | 54725589 | 1095 |
| rs6706263 | 0.548 | 54726891 | 1096 |
| rs10206143 | 0.516 | 54729104 | 1097 |
| rs7584223 | 0.733 | 54730546 | 1098 |
| rs6749802 | 0.511 | 54735797 | 1099 |
| rs6721612 | 0.679 | 54736000 | 1100 |
| rs4577321 | 0.722 | 54736047 | 1101 |
| rs4519566 | 0.733 | 54736466 | 1102 |
| rs6730876 | 0.682 | 54738652 | 1103 |
| rs7591231 | 0.549 | 54741247 | 1104 |
| rs4358162 | 0.654 | 54742322 | 1105 |
| rs10188545 | 0.501 | 54743526 | 1106 |
| rs12713270 | 0.631 | 54744402 | 1107 |
| rs12713271 | 0.635 | 54744731 | 1108 |
| rs6724136 | 0.642 | 54749028 | 1109 |
| rs10183043 | 0.642 | 54750510 | 1110 |
| rs6741053 | 0.668 | 54753715 | 1111 |
| rs12713272 | 0.668 | 54753953 | 1112 |
| rs11902659 | 0.668 | 54753968 | 1113 |
| rs7569127 | 0.668 | 54756577 | 1114 |
| rs12713273 | 0.721 | 54756768 | 1115 |
| rs10176359 | 0.668 | 54757349 | 1116 |
| rs12713274 | 0.502 | 54760379 | 1117 |
| rs13408295 | 0.75 | 54766556 | 1118 |
| rs17046036 | 0.682 | 54767105 | 1119 |
| rs2229503 | 0.733 | 54770315 | 1120 |
| rs6545435 | 0.683 | 54771054 | 1121 |
| rs17046061 | 0.682 | 54775681 | 1122 |
| rs11892236 | 0.756 | 54777211 | 1123 |
| rs17046067 | 0.67 | 54779147 | 1124 |
| rs13004944 | 0.632 | 54780932 | 1125 |
| rs3739109 | 0.604 | 54788797 | 1126 |
| rs17046077 | 0.672 | 54793127 | 1127 |
| rs2271329 | 0.635 | 54794032 | 1128 |
| rs2048370 | 0.591 | 54798256 | 1129 |
| rs10528 | 0.682 | 54800800 | 1130 |
| rs17046108 | 0.634 | 54802668 | 1131 |
| rs3850350 | 0.591 | 54810284 | 1132 |
| rs17046149 | 0.552 | 54822523 | 1133 |
| rs10188185 | 0.571 | 54830810 | 1134 |
| rs9309258 | 0.542 | 54855293 | 1135 |
| rs17046257 | 0.542 | 54861436 | 1136 |
| rs6732751 | 0.639 | 54869067 | 1137 |
| rs7582640 | 0.575 | 54869424 | 1138 |
| rs6708082 | 0.575 | 54870481 | 1139 |
| rs6740110 | 0.576 | 54870743 | 1140 |
| rs10169439 | 0.648 | 54871341 | 1141 |
| rs6545440 | 0.591 | 54871513 | 1142 |
| rs13428703 | 0.575 | 54872331 | 1143 |
| rs6752720 | 0.575 | 54874003 | 1144 |
| rs6753004 | 0.575 | 54874374 | 1145 |
| rs10194108 | 0.549 | 54875672 | 1146 |

### Example 37

[0259] For individuals with colorectal cancer, the distribution of polymorphic alleles at position 57735950 of chromosome 2 was different from those without colorectal cancer (Table 37). The recessive test for risk associated with carrying the G allele had an empirical p-value of 0.005533 based on permutation analysis, and the corresponding recessive odds ratio is 1.316 (Table 37). These data further suggest that this marker is associated with colorectal cancer risk and that the G allele at position 57735950 of chromosome 2 is associated with an increased risk of developing colorectal cancer.

TABLE 37

| | |
|---|---|
| rs no. | 13014264 |
| Chromosome; Position | 2; 57735950 |
| Gene Name | unknown |
| Genotype; Phenotype | n = G; increased risk |
| Hardy-Weinberg | 0.19526 |

| | | | | | | | Odds |
|---|---|---|---|---|---|---|---|
| Case Flag | Allele B | AA | AB | BB | Model | p-Value | Ratio |
| 0 | G | 25 | 313 | 713 | Recessive | 0.005533 | 1.316 |
| 1 | G | 20 | 230 | 694 | | | |

[0260] Table 37A indicates SNPs found to be in strong linkage disequilibrium with rs13014264. To generate this list, correlation coefficients (r²) were calculated between the index SNP and all neighboring SNPs cited in the June 2006 HapMap data set release. An r² cut off of 0.50 was selected for inclusion as evidence for strong genetic linkage, i.e., a “strong linkage disequilibrium.

TABLE 37A
Linked SNPs

| SNP | r² | Position on chr2 | SEQ ID NO |
|---|---|---|---|
| rs12614711 | 0.611 | 57681639 | 1147 |
| rs17809625 | 0.579 | 57687588 | 1148 |
| rs17048907 | 0.611 | 57688449 | 1149 |
| rs17048911 | 0.785 | 57691658 | 1150 |
| rs6747684 | 0.611 | 57693363 | 1151 |
| rs17048930 | 1.0 | 57709282 | 1152 |
| rs1918454 | 1.0 | 57732596 | 1153 |
| rs13014264 | — | 57735950 | 1154 |
| rs13008711 | 1.0 | 57760058 | 1155 |
| rs7569160 | 1.0 | 57763417 | 1156 |
| rs11899467 | 0.818 | 57777936 | 1157 |
| rs1460256 | 0.818 | 57808407 | 1158 |
| rs10469877 | 0.818 | 57817557 | 1159 |
| rs1471256 | 0.818 | 57818569 | 1160 |

### Example 38

[0261] For individuals with colorectal cancer, the distribution of polymorphic alleles at position 59457067 of chromosome 2 was different from those without colorectal cancer (Table 38). The dominant test for risk associated with carrying the T allele had an empirical p-value based on permutation analysis of 0.002361, and the corresponding dominant odds ratio is 1.540 (Table 38). These data further suggest that this marker is associated with colorectal cancer risk and that the T allele at position 59457067 of chromosome 2 is associated with an increased risk of developing colorectal cancer.

TABLE 38

| | |
|---|---|
| rs no. | 17643867 |
| Chromosome; Position | 2; 59457067 |
| Gene Name | unknown |
| Genotype; Phenotype | n = T; increased risk |
| Hardy-Weinberg | 0.89422 |

| | | | | | | | Odds |
|---|---|---|---|---|---|---|---|
| Case Flag | Allele B | AA | AB | BB | Model | p-Value | Ratio |
| 0 | T | 144 | 482 | 411 | Dominant | 0.002361 | 1.540 |
| 1 | T | 89 | 459 | 391 | | | |

[0262] Table 38A indicates SNPs found to be in strong linkage disequilibrium with rs17643867. To generate this list, correlation coefficients (r²) were calculated between the index SNP and all neighboring SNPs cited in the June 2006 HapMap data set release. An r² cut off of 0.50 was selected for inclusion as evidence for strong genetic linkage, i.e., a “strong linkage disequilibrium.

TABLE 38A
Linked SNPs

| SNP | r² | Position on chr2 | SEQ ID NO |
|---|---|---|---|
| rs11125778 | 0.961 | 59392191 | 1161 |
| rs17050031 | 0.554 | 59399670 | 1162 |
| rs13017760 | 0.961 | 59400093 | 1163 |
| rs2110529 | 0.578 | 59408778 | 1164 |
| rs4325734 | 0.554 | 59414243 | 1165 |
| rs7586283 | 0.56 | 59415406 | 1166 |
| rs1558596 | 0.516 | 59416427 | 1167 |
| rs7588177 | 0.532 | 59420806 | 1168 |
| rs6713914 | 0.584 | 59434692 | 1169 |
| rs17643867 | — | 59457067 | 1170 |
| rs13420083 | 0.56 | 59515351 | 1171 |

### Example 39

[0263] For individuals with colorectal cancer, the distribution of polymorphic alleles at position 66217596 of chromosome 2, found within the LOC440867 gene, was different from those without colorectal cancer (Table 39). The dominant test for risk associated with carrying the G allele had an empirical p-value based on permutation analysis of 0.002887, and the corresponding dominant odds ratio is 1.426 (Table 39). These data further suggest that this marker, located within the LOC440867 gene, is associated with colorectal cancer risk and that the G allele at position 66217596 of chromosome 2 is associated with an increased risk of developing colorectal cancer.

TABLE 39

| | |
|---|---|
| rs no. | 13409331 |
| Chromosome; Position | 2; 66217596 |
| Gene Name | LOC440867 |
| SEQ ID NO; Position | 5634; 642101 |
| Genotype; Phenotype | n = G; increased risk |
| Hardy-Weinberg | 0.38696 |

| Case | | | | | | | |
|---|---|---|---|---|---|---|---|
| Flag | Allele B | AA | AB | BB | Model | p-Value | Odds Ratio |
| 0 | G | 889 | 145 | 8 | Dominant | 0.002887 | 1.426 |
| 1 | G | 758 | 178 | 8 | | | |

[0264] Table 39A indicates SNPs found to be in strong linkage disequilibrium with rs13409331. To generate this list, correlation coefficients (r²) were calculated between the index SNP and all neighboring SNPs cited in the June 2006 HapMap data set release. An r² cut off of 0.50 was selected for inclusion as evidence for strong genetic linkage, i.e., a “strong linkage disequilibrium.

TABLE 39A
Linked SNPs

| SNP | r² | Position on chr2 | SEQ ID NO |
|---|---|---|---|
| rs13429325 | 0.576 | 66140052 | 1172 |
| rs13429266 | 0.575 | 66140190 | 1173 |
| rs13409331 | — | 66217596 | 1174 |

### Example 40

[0265] For individuals with colorectal cancer, the distribution of polymorphic alleles at position 76605013 of chromosome 2 was different from those without colorectal cancer (Table 40). The trend test for risk associated with carrying the C allele had an empirical p-value of 0.002652 based on permutation analysis, and the corresponding Mantel-Haenszel odds ratio for trend is 1.304 (Table 40). These data further suggest that this marker is associated with colorectal cancer risk and that the C allele at position 76605013 of chromosome 2 is associated with an increased risk of developing colorectal cancer.

TABLE 40

| | |
|---|---|
| rs no. | 17012735 |
| Chromosome; Position | 2; 76605013 |
| Gene Name | unknown |
| Genotype; Phenotype | n = C; increased risk |
| Hardy-Weinberg | 0.68431 |

| Case | | | | | | | |
|---|---|---|---|---|---|---|---|
| Flag | Allele B | AA | AB | BB | Model | p-Value | Odds Ratio |
| 0 | C | 20 | 222 | 686 | Trend | 0.002652 | 1.304 |
| 1 | C | 4 | 191 | 720 | | | |

[0266] Table 40A indicates SNPs found to be in strong linkage disequilibrium with rs17012735. To generate this list, correlation coefficients (r²) were calculated between the index SNP and all neighboring SNPs cited in the June 2006 HapMap data set release. An r² cut off of 0.50 was selected for inclusion as evidence for strong genetic linkage, i.e., a “strong linkage disequilibrium.

TABLE 40A
Linked SNPs

| SNP | r² | Position on chr2 | SEQ ID NO |
|---|---|---|---|
| rs12988562 | 0.892 | 76569557 | 1175 |
| rs13019286 | 1.0 | 76591689 | 1176 |
| rs17012714 | 1.0 | 76598770 | 1177 |
| rs1882237 | 1.0 | 76599140 | 1178 |
| rs17012735 | — | 76605013 | 1179 |
| rs10519331 | 1.0 | 76618308 | 1180 |
| rs17012771 | 1.0 | 76626555 | 1181 |
| rs17012786 | 1.0 | 76631872 | 1182 |
| rs17012795 | 1.0 | 76642367 | 1183 |
| rs17012813 | 1.0 | 76646916 | 1184 |
| rs17040477 | 1.0 | 76656753 | 1185 |
| rs1921231 | 1.0 | 76657927 | 1186 |

### Example 41

[0267] For individuals with colorectal cancer, the distribution of polymorphic alleles at position 79514895 of chromosome 2 was different from those without colorectal cancer (Table 41). The recessive test for risk associated with carrying the C allele had an empirical p-value of 0.007206 based on permutation analysis, and the corresponding recessive odds ratio is 1.275 (Table 41). These data further suggest that this marker is associated with colorectal cancer risk and that the C allele at position 79514895 of chromosome 2 is associated with an increased risk of developing colorectal cancer.

TABLE 41

| | |
|---|---|
| rs no. | 7595284 |
| Chromosome; Position | 2; 79514895 |
| Gene Name | unknown |
| Genotype; Phenotype | n = C; increased risk |
| Hardy-Weinberg | 0.75256 |

| | | | | | | | Odds |
|---|---|---|---|---|---|---|---|
| Case Flag | Allele B | AA | AB | BB | Model | p-Value | Ratio |
| 0 | C | 72 | 417 | 569 | Recessive | 0.007206 | 1.275 |
| 1 | C | 67 | 316 | 568 | | | |

[0268] Table 41A indicates SNPs found to be in strong linkage disequilibrium with rs7595284. To generate this list, correlation coefficients (r²) were calculated between the index SNP and all neighboring SNPs cited in the June 2006 HapMap data set release. An r² cut off of 0.50 was selected for inclusion as evidence for strong genetic linkage, i.e., a “strong linkage disequilibrium.

TABLE 41A
Linked SNPs

| SNP | r² | Position on chr2 | SEQ ID NO |
|---|---|---|---|
| rs4296451 | 0.781 | 79509214 | 1187 |
| rs1159180 | 0.781 | 79510568 | 1188 |
| rs6547232 | 0.781 | 79510789 | 1189 |
| rs4852145 | 0.887 | 79511670 | 1190 |
| rs9309549 | 0.887 | 79511757 | 1191 |
| rs2861785 | 0.887 | 79512105 | 1192 |
| rs1901339 | 0.887 | 79512569 | 1193 |
| rs1901338 | 0.887 | 79512603 | 1194 |
| rs1901337 | 0.887 | 79512655 | 1195 |
| rs4852480 | 0.887 | 79512928 | 1196 |
| rs4852481 | 0.887 | 79512978 | 1197 |
| rs4852482 | 0.887 | 79512993 | 1198 |
| rs4852483 | 0.887 | 79513076 | 1199 |
| rs4852484 | 0.887 | 79513154 | 1200 |
| rs2167390 | 1.0 | 79513396 | 1201 |
| rs960601 | 1.0 | 79513965 | 1202 |
| rs987318 | 1.0 | 79514583 | 1203 |
| rs12622864 | 1.0 | 79514706 | 1204 |
| rs7595284 | — | 79514895 | 1205 |
| rs4491745 | 0.887 | 79515184 | 1206 |
| rs6720349 | 1.0 | 79517131 | 1207 |
| rs11126720 | 1.0 | 79517413 | 1208 |
| rs11691007 | 0.884 | 79517850 | 1209 |
| rs11126721 | 1.0 | 79518056 | 1210 |
| rs6741335 | 1.0 | 79518922 | 1211 |
| rs6713159 | 1.0 | 79519021 | 1212 |
| rs6728857 | 1.0 | 79519484 | 1213 |
| rs6547234 | 0.961 | 79520546 | 1214 |
| rs6547235 | 0.961 | 79520657 | 1215 |
| rs6547236 | 0.961 | 79521051 | 1216 |
| rs1376618 | 0.641 | 79534569 | 1217 |
| rs6547237 | 0.641 | 79534859 | 1218 |
| rs1901336 | 0.626 | 79535220 | 1219 |
| rs1901335 | 0.61 | 79535301 | 1220 |
| rs1451540 | 0.549 | 79536353 | 1221 |
| rs7606450 | 0.61 | 79537326 | 1222 |
| rs1584667 | 0.61 | 79538240 | 1223 |
| rs1584666 | 0.61 | 79538284 | 1224 |
| rs7573401 | 0.61 | 79539437 | 1225 |
| rs7369541 | 0.579 | 79539489 | 1226 |
| rs2198159 | 0.61 | 79539540 | 1227 |
| rs1584665 | 0.61 | 79539593 | 1228 |
| rs1451539 | 0.61 | 79539826 | 1229 |
| rs1947309 | 0.579 | 79541573 | 1230 |
| rs4852148 | 0.579 | 79543059 | 1231 |
| rs9679249 | 0.579 | 79543363 | 1232 |
| rs4467296 | 0.579 | 79543671 | 1233 |

### Example 42

[0269] For individuals with colorectal cancer, the distribution of polymorphic alleles at position 101444879 of chromosome 2, found within the CREG2 gene, was different from those without colorectal cancer (Table 42). The dominant test for risk associated with carrying the G allele had an empirical p-value based on permutation analysis of 0.001748, and the corresponding dominant odds ratio is 1.629 (Table 42). These data further suggest that this marker, located within the CREG2 gene, is associated with colorectal cancer risk and that the G allele at position 101444879 of chromosome 2 is associated with an increased risk of developing colorectal cancer.

TABLE 42

| | |
|---|---|
| rs no. | 3923053 |
| Chromosome; Position | 2; 101444879 |
| Gene Name | CREG2 |
| SEQ ID NO; Position | 5635; 17697 |
| Genotype; Phenotype | n = G; increased risk |
| Hardy-Weinberg | 0.28197 |

| | | | | | | | Odds |
|---|---|---|---|---|---|---|---|
| Case Flag | Allele B | AA | AB | BB | Model | p-Value | Ratio |
| 0 | G | 114 | 428 | 469 | Dominant | 0.001748 | 1.629 |
| 1 | G | 72 | 415 | 508 | | | |

[0270] Table 42A indicates SNPs found to be in strong linkage disequilibrium with rs3923053. To generate this list, correlation coefficients (r²) were calculated between the index SNP and all neighboring SNPs cited in the June 2006 HapMap data set release. An r² cut off of 0.50 was selected for inclusion as evidence for strong genetic linkage, i.e., a “strong linkage disequilibrium.

TABLE 42A
Linked SNPs

| SNP | r² | Position on chr2 | SEQ ID NO |
|---|---|---|---|
| rs1201512 | 0.546 | 101306757 | 1234 |
| rs1660694 | 0.546 | 101341564 | 1235 |
| rs1660711 | 0.546 | 101346009 | 1236 |
| rs12617343 | 0.562 | 101375883 | 1237 |
| rs11677690 | 1.0 | 101424556 | 1238 |
| rs6754354 | 1.0 | 101430850 | 1239 |
| rs3923053 | — | 101444879 | 1240 |
| rs4405786 | 1.0 | 101450992 | 1241 |
| rs908123 | 0.665 | 101476330 | 1242 |
| rs11123876 | 0.656 | 101477396 | 1243 |
| rs10865041 | 0.665 | 101478319 | 1244 |
| rs11686870 | 0.608 | 101487446 | 1245 |
| rs11689348 | 0.662 | 101487791 | 1246 |
| rs1554070 | 0.646 | 101488066 | 1247 |
| rs7565429 | 0.6 | 101494973 | 1248 |
| rs2280124 | 0.604 | 101496373 | 1249 |

### Example 43

[0271] For individuals with colorectal cancer, the distribution of polymorphic alleles at position 102001205 of chromosome 2 was different from those without colorectal cancer (Table 43). The dominant test for risk associated with carrying the G allele had an empirical p-value based on permutation analysis of 0.00342, and the corresponding dominant odds ratio is 1.667 (Table 43). These data further suggest that this marker is associated with colorectal cancer risk and that the G allele at position 102001205 of chromosome 2 is associated with an increased risk of developing colorectal cancer.

TABLE 43

| | |
|---|---|
| rs no. | 2214890 |
| Chromosome; Position | 2; 102001205 |
| Gene Name | unknown |
| Genotype; Phenotype | n = G; increased risk |
| Hardy-Weinberg | 0.01276 |

| Case | | | | | | | |
|---|---|---|---|---|---|---|---|
| Flag | Allele B | AA | AB | BB | Model | p-Value | Odds Ratio |
| 0 | G | 90 | 358 | 529 | Dominant | 0.00342 | 1.667 |
| 1 | G | 56 | 365 | 555 | | | |

[0272] Table 43A indicates SNPs found to be in strong linkage disequilibrium with rs2214890. To generate this list, correlation coefficients (r²) were calculated between the index SNP and all neighboring SNPs cited in the June 2006 HapMap data set release. An r² cut off of 0.50 was selected for inclusion as evidence for strong genetic linkage, i.e., a “strong linkage disequilibrium.

TABLE 43A
Linked SNPs

| SNP | r² | Position on chr2 | SEQ ID NO |
|---|---|---|---|
| rs6543094 | 0.697 | 101830649 | 1250 |
| rs13003883 | 0.63 | 101841611 | 1251 |
| rs2236935 | 0.696 | 101902560 | 1252 |
| rs2066942 | 0.678 | 101904245 | 1253 |
| rs7603475 | 1.0 | 101992400 | 1254 |
| rs7568226 | 1.0 | 101992755 | 1255 |
| rs6543104 | 1.0 | 101999859 | 1256 |
| rs2214890 | — | 102001205 | 1257 |
| rs2190364 | 0.954 | 102016032 | 1258 |

### Example 44

[0273] For individuals with colorectal cancer, the distribution of polymorphic alleles at position 117009893 of chromosome 2 was different from those without colorectal cancer (Table 44). The trend test for risk associated with carrying the T allele had an empirical p-value of 0.002858 based on permutation analysis, and the corresponding Mantel-Haenszel odds ratio for trend is 1.347 (Table 44). These data further suggest that this marker is associated with colorectal cancer risk and that the T allele at position 117009893 of chromosome 2 is associated with an increased risk of developing colorectal cancer.

TABLE 44

| | |
|---|---|
| rs no. | 10496519 |
| Chromosome; Position | 2; 117009893 |
| Gene Name | unknown |
| Genotype; Phenotype | n = T; increased risk |
| Hardy-Weinberg | 0.74738 |

| Case | | | | | | | |
|---|---|---|---|---|---|---|---|
| Flag | Allele B | AA | AB | BB | Model | p-Value | Odds Ratio |
| 0 | T | 712 | 185 | 13 | Trend | 0.002858 | 1.347 |
| 1 | T | 675 | 239 | 20 | | | |

[0274] Table 44A indicates SNPs found to be in strong linkage disequilibrium with rs10496519. To generate this list, correlation coefficients (r²) were calculated between the index SNP and all neighboring SNPs cited in the June 2006 HapMap data set release. An r² cut off of 0.50 was selected for inclusion as evidence for strong genetic linkage, i.e., a “strong linkage disequilibrium.

TABLE 44A
Linked SNPs

| SNP | r² | Position on chr2 | SEQ ID NO |
|---|---|---|---|
| rs1388405 | 0.908 | 116932933 | 1259 |
| rs4848420 | 0.908 | 116933474 | 1260 |
| rs4848421 | 0.908 | 116933613 | 1261 |
| rs12711852 | 0.83 | 116937194 | 1262 |
| rs6742479 | 0.818 | 116940960 | 1263 |
| rs4849482 | 0.908 | 116942210 | 1264 |
| rs7425551 | 0.891 | 116944233 | 1265 |
| rs7560629 | 0.83 | 116946663 | 1266 |
| rs10496519 | — | 117009893 | 1267 |
| rs17552702 | 1.0 | 117010156 | 1268 |
| rs12467737 | 1.0 | 117037549 | 1269 |
| rs12467804 | 1.0 | 117037756 | 1270 |
| rs12464274 | 1.0 | 117037869 | 1271 |
| rs17553549 | 0.536 | 117052785 | 1272 |
| rs17553584 | 0.536 | 117052962 | 1273 |
| rs10496522 | 0.536 | 117058333 | 1274 |
| rs10496523 | 0.571 | 117058442 | 1275 |
| rs17618786 | 0.536 | 117063781 | 1276 |
| rs12478026 | 0.571 | 117065974 | 1277 |
| rs12473914 | 0.536 | 117066033 | 1278 |
| rs12475949 | 0.536 | 117073189 | 1279 |
| rs4328646 | 0.571 | 117073629 | 1280 |
| rs11123386 | 0.504 | 117076708 | 1281 |
| rs17554213 | 0.536 | 117080977 | 1282 |
| rs12619631 | 0.536 | 117089137 | 1283 |

### Example 45

[0275] For individuals with colorectal cancer, the distribution of polymorphic alleles at position 136925001 of chromosome 2 was different from those without colorectal cancer (Table 45). The trend test for risk associated with carrying the C allele had an empirical p-value of 0.006875 based on permutation analysis, and the corresponding Mantel-Haenszel odds ratio for trend is 1.220 (Table 45). These data further suggest that this marker is associated with colorectal cancer risk and that the C allele at position 136925001 of chromosome 2 is associated with an increased risk of developing colorectal cancer.

TABLE 45

| | |
|---|---|
| rs no. | 12614381 |
| Chromosome; Position | 2; 136925001 |
| Gene Name | unknown |
| Genotype; Phenotype | n = C; increased risk |
| Hardy-Weinberg | 0.73029 |

| Case | | | | | | | |
|---|---|---|---|---|---|---|---|
| Flag | Allele B | AA | AB | BB | Model | p-Value | Odds Ratio |
| 0 | C | 705 | 281 | 25 | Trend | 0.006875 | 1.220 |
| 1 | C | 653 | 302 | 46 | | | |

[0276] Table 45A indicates SNPs found to be in strong linkage disequilibrium with rs12614381. To generate this list, correlation coefficients (r²) were calculated between the index SNP and all neighboring SNPs cited in the June 2006 HapMap data set release. An r² cut off of 0.50 was selected for inclusion as evidence for strong genetic linkage, i.e., a “strong linkage disequilibrium.

TABLE 45A
Linked SNPs

| SNP | r² | Position on chr2 | SEQ ID NO |
|---|---|---|---|
| rs4954603 | 0.597 | 136894809 | 1284 |
| rs12615726 | 0.597 | 136895491 | 1285 |
| rs6430623 | 0.597 | 136899042 | 1286 |
| rs6708702 | 0.514 | 136907864 | 1287 |
| rs7594034 | 1.0 | 136914881 | 1288 |
| rs7570134 | 1.0 | 136919330 | 1289 |
| rs7577801 | 0.704 | 136921389 | 1290 |
| rs12614381 | — | 136925001 | 1291 |
| rs4588245 | 0.597 | 136933309 | 1292 |
| rs6706755 | 0.597 | 136995795 | 1293 |

### Example 46

[0277] For individuals with colorectal cancer, the distribution of polymorphic alleles at position 148316634 of chromosome 2 was different from those without colorectal cancer (Table 46). The recessive test for risk associated with carrying the A allele had an empirical p-value of 0.004417 based on permutation analysis, and the corresponding recessive odds ratio is 1.294 (Table 46). These data further suggest that this marker is associated with colorectal cancer risk and that the A allele at position 148316634 of chromosome 2 is associated with an increased risk of developing colorectal cancer.

TABLE 46

| | rs no. | | | | 1881569 | | |
|---|---|---|---|---|---|---|---|
| | Chromosome; Position | | | | 2; 148316634 | | |
| | Gene Name | | | | unknown | | |
| | Genotype; Phenotype | | | | n = A; increased risk | | |
| | Hardy-Weinberg | | | | 0.12600 | | |
| Case | | | | | | | Odds |
| Flag | Allele B | AA | AB | BB | Model | p-Value | Ratio |
| 0 | A | 60 | 424 | 574 | Recessive | 0.004417 | 1.294 |
| 1 | A | 56 | 320 | 577 | | | |

[0278] Table 46A indicates SNPs found to be in strong linkage disequilibrium with rs1881569. To generate this list, correlation coefficients (r²) were calculated between the index SNP and all neighboring SNPs cited in the June 2006 HapMap data set release. An r² cut off of 0.50 was selected for inclusion as evidence for strong genetic linkage, i.e., a “strong linkage disequilibrium.

TABLE 46A
Linked SNPs

| SNP | r² | Position on chr2 | SEQ ID NO |
|---|---|---|---|
| rs10497017 | 0.526 | 148275544 | 1294 |
| rs1528842 | 1.0 | 148291308 | 1295 |
| rs6733995 | 1.0 | 148294679 | 1296 |
| rs1919447 | 1.0 | 148296596 | 1297 |
| rs1406444 | 1.0 | 148306979 | 1298 |
| rs1112809 | 1.0 | 148314459 | 1299 |
| rs1881571 | 1.0 | 148315182 | 1300 |
| rs1881569 | — | 148316634 | 1301 |
| rs1581669 | 1.0 | 148317180 | 1302 |
| rs12151490 | 1.0 | 148317795 | 1303 |
| rs4361062 | 1.0 | 148324588 | 1304 |
| rs1609365 | 1.0 | 148326077 | 1305 |
| rs2049740 | 0.948 | 148331075 | 1306 |
| rs2382108 | 0.948 | 148337515 | 1307 |
| rs1919442 | 0.948 | 148338194 | 1308 |
| rs7607970 | 0.948 | 148339660 | 1309 |
| rs7581569 | 0.948 | 148339727 | 1310 |
| rs1528844 | 0.848 | 148341027 | 1311 |
| rs12611679 | 0.948 | 148343988 | 1312 |
| rs1528843 | 0.948 | 148344362 | 1313 |
| rs4662550 | 0.802 | 148346096 | 1314 |
| rs6430240 | 0.898 | 148354462 | 1315 |
| rs730356 | 0.848 | 148370793 | 1316 |
| rs7595052 | 0.836 | 148378520 | 1317 |
| rs721344 | 0.75 | 148408061 | 1318 |
| rs6747792 | 0.75 | 148445260 | 1319 |
| rs17742134 | 0.75 | 148461128 | 1320 |
| rs17742246 | 0.75 | 148461782 | 1321 |
| rs17742342 | 0.781 | 148467668 | 1322 |
| rs7560502 | 0.749 | 148471194 | 1323 |
| rs1424941 | 0.75 | 148476850 | 1324 |
| rs3754541 | 0.75 | 148492327 | 1325 |
| rs1469211 | 0.75 | 148500567 | 1326 |
| rs17743157 | 0.728 | 148509460 | 1327 |
| rs17692648 | 0.61 | 148521463 | 1328 |
| rs17692696 | 0.61 | 148524988 | 1329 |
| rs3820715 | 0.61 | 148547339 | 1330 |

### Example 47

[0279] For individuals with colorectal cancer, the distribution of polymorphic alleles at position 166084924 of chromosome 2 was different from those without colorectal cancer (Table 47). The trend test for risk associated with carrying the G allele had an empirical p-value of 0.00117 based on permutation analysis, and the corresponding Mantel-Haenszel odds ratio for trend is 1.249 (Table 47). These data further suggest that this marker is associated with colorectal cancer risk and that the G allele at position 166084924 of chromosome 2 is associated with an increased risk of developing colorectal cancer.

TABLE 47

| | rs no. | | | | 2082366 | | |
|---|---|---|---|---|---|---|---|
| | Chromosome; Position | | | | 2; 166084924 | | |
| | Gene Name | | | | unknown | | |
| | Genotype; Phenotype | | | | n = G; increased risk | | |
| | Hardy-Weinberg | | | | 0.42605 | | |
| Case | | | | | | | |
| Flag | Allele B | AA | AB | BB | Model | p-Value | Odds Ratio |
| 0 | G | 134 | 502 | 421 | Trend | 0.00117 | 1.249 |
| 1 | G | 94 | 413 | 444 | | | |

[0280] Table 47A indicates SNPs found to be in strong linkage disequilibrium with rs2082366. To generate this list, correlation coefficients (r²) were calculated between the index SNP and all neighboring SNPs cited in the June 2006 HapMap data set release. An r² cut off of 0.50 was selected for inclusion as evidence for strong genetic linkage, i.e., a “strong linkage disequilibrium.

TABLE 47A
Linked SNPs

| SNP | r² | Position on chr2 | SEQ ID NO |
|---|---|---|---|
| rs6731083 | 0.508 | 166017910 | 1331 |
| rs2082366 | — | 166084924 | 1332 |
| rs1991775 | 1.0 | 166089262 | 1333 |
| rs16850592 | 0.617 | 166090523 | 1334 |
| rs16850602 | 0.617 | 166092398 | 1335 |
| rs12475216 | 0.617 | 166093832 | 1336 |
| rs12619374 | 0.617 | 166097172 | 1337 |
| rs1816393 | 1.0 | 166098152 | 1338 |
| rs2390259 | 1.0 | 166098465 | 1339 |
| rs2163709 | 0.617 | 166104522 | 1340 |
| rs7573855 | 0.55 | 166105514 | 1341 |
| rs1984632 | 0.55 | 166110486 | 1342 |
| rs11893357 | 0.681 | 166142208 | 1343 |
| rs4667823 | 0.688 | 166144081 | 1344 |
| rs4667825 | 0.688 | 166144295 | 1345 |
| rs7601930 | 0.688 | 166144830 | 1346 |
| rs12470466 | 0.688 | 166145243 | 1347 |
| rs4542865 | 0.503 | 166147508 | 1348 |
| rs10497261 | 0.72 | 166152395 | 1349 |
| rs1464087 | 0.688 | 166157163 | 1350 |
| rs4435467 | 0.688 | 166158108 | 1351 |
| rs4625921 | 0.688 | 166158192 | 1352 |
| rs4332939 | 0.688 | 166158291 | 1353 |
| rs16850755 | 0.506 | 166166091 | 1354 |
| rs10930169 | 0.509 | 166180918 | 1355 |

### Example 48

[0281] For individuals with colorectal cancer, the distribution of polymorphic alleles at position 166402463 of chromosome 2 was different from those without colorectal cancer (Table 48). The recessive test for risk associated with carrying the C allele had an empirical p-value of 0.000712 based on permutation analysis, and the corresponding recessive odds ratio is 1.418 (Table 48). These data further suggest that this marker is associated with colorectal cancer risk and that the C allele at position 166402463 of chromosome 2 is associated with an increased risk of developing colorectal cancer.

TABLE 48

| | rs no. | | | | 12185748 | | |
|---|---|---|---|---|---|---|---|
| | Chromosome; Position | | | | 2; 166402463 | | |
| | Gene Name | | | | unknown | | |
| | Genotype; Phenotype | | | | n = C; increased risk | | |
| | Hardy-Weinberg | | | | 0.15285 | | |
| Case | | | | | | | Odds |
| Flag | Allele B | AA | AB | BB | Model | p-Value | Ratio |
| 0 | C | 260 | 540 | 234 | Recessive | 0.000712 | 1.418 |
| 1 | C | 208 | 448 | 272 | | | |

[0282] Table 48A indicates SNPs found to be in strong linkage disequilibrium with rs12185748. To generate this list, correlation coefficients (r²) were calculated between the index SNP and all neighboring SNPs cited in the June 2006 HapMap data set release. An r² cut off of 0.50 was selected for inclusion as evidence for strong genetic linkage, i.e., a “strong linkage disequilibrium.

TABLE 48A
Linked SNPs

| SNP | r² | Position on chr2 | SEQ ID NO |
|---|---|---|---|
| rs729869 | 0.51 | 166311863 | 1356 |
| rs6753778 | 0.51 | 166329442 | 1357 |
| rs10165242 | 0.51 | 166331473 | 1358 |
| rs10167482 | 0.524 | 166335348 | 1359 |
| rs2054026 | 0.51 | 166338881 | 1360 |
| rs10180814 | 0.571 | 166341227 | 1361 |
| rs17265654 | 0.537 | 166343885 | 1362 |
| rs10497266 | 0.522 | 166346767 | 1363 |
| rs2194754 | 0.871 | 166364549 | 1364 |
| rs777355 | 1.0 | 166379544 | 1365 |
| rs1863196 | 0.934 | 166383017 | 1366 |
| rs12185748 | — | 166402463 | 1367 |
| rs7586085 | 1.0 | 166402996 | 1368 |
| rs6726821 | 1.0 | 166403621 | 1369 |
| rs6710388 | 1.0 | 166408648 | 1370 |
| rs6710518 | 1.0 | 166408751 | 1371 |
| rs1346003 | 0.935 | 166422864 | 1372 |
| rs1346004 | 0.934 | 166426553 | 1373 |
| rs1895701 | 0.904 | 166428594 | 1374 |
| rs13429321 | 0.846 | 166430517 | 1375 |
| rs2303393 | 0.846 | 166431307 | 1376 |
| rs2303394 | 0.841 | 166431434 | 1377 |
| rs13427924 | 0.846 | 166433253 | 1378 |
| rs3791848 | 0.841 | 166438750 | 1379 |
| rs13431319 | 0.897 | 166440084 | 1380 |
| rs3762552 | 0.844 | 166440286 | 1381 |
| rs4667835 | 0.899 | 166441062 | 1382 |
| rs1968294 | 0.904 | 166443769 | 1383 |
| rs13422985 | 0.846 | 166446143 | 1384 |
| rs13430211 | 0.904 | 166448105 | 1385 |
| rs744158 | 0.53 | 166466082 | 1386 |

### Example 49

[0283] For individuals with colorectal cancer, the distribution of polymorphic alleles at position 182938657 of chromosome 2, found within the PDE1A gene, was different from those without colorectal cancer (Table 49). The trend test for risk associated with carrying the G allele had an empirical p-value of 0.002501 based on permutation analysis, and the corresponding Mantel-Haenszel odds ratio for trend is 1.271 (Table 49). These data further suggest that this marker, located within the PDE1A gene, is associated with colorectal cancer risk and that the G allele at position 182938657 of chromosome 2 is associated with an increased risk of developing colorectal cancer.

TABLE 49

| | |
|---|---|
| rs no. | 4666828 |
| Chromosome; Position | 2; 182938657 |
| Gene Name | PDE1A |
| SEQ ID NO; Position | 5636; 274154 |
| Genotype; Phenotype | n = G; increased risk |
| Hardy-Weinberg | 0.47433 |

| Case | | | | | | | |
|---|---|---|---|---|---|---|---|
| Flag | Allele B | AA | AB | BB | Model | p-Value | Odds Ratio |
| 0 | G | 40 | 307 | 683 | Trend | 0.002501 | 1.271 |
| 1 | G | 18 | 246 | 667 | | | |

[0284] Table 49A indicates SNPs found to be in strong linkage disequilibrium with rs4666828. To generate this list, correlation coefficients (r²) were calculated between the index SNP and all neighboring SNPs cited in the June 2006 HapMap data set release. An r² cut off of 0.50 was selected for inclusion as evidence for strong genetic linkage, i.e., a “strong linkage disequilibrium.

TABLE 49A
Linked SNPs

| SNP | r² | Position on chr2 | SEQ ID NO |
|---|---|---|---|
| rs10197337 | 0.557 | 182829393 | 1387 |
| rs7370295 | 1.0 | 182855824 | 1388 |
| rs13420620 | 1.0 | 182856997 | 1389 |
| rs2195878 | 1.0 | 182860054 | 1390 |
| rs3769803 | 1.0 | 182868726 | 1391 |
| rs3820963 | 1.0 | 182869042 | 1392 |
| rs3769800 | 1.0 | 182869069 | 1393 |
| rs13400054 | 1.0 | 182870183 | 1394 |
| rs9653242 | 1.0 | 182872106 | 1395 |
| rs7583421 | 0.924 | 182874475 | 1396 |
| rs13388034 | 1.0 | 182888394 | 1397 |
| rs12475647 | 1.0 | 182890477 | 1398 |
| rs724851 | 0.929 | 182894958 | 1399 |
| rs16822886 | 0.929 | 182911506 | 1400 |
| rs7567112 | 0.924 | 182912900 | 1401 |
| rs16822889 | 1.0 | 182915858 | 1402 |
| rs9784041 | 0.92 | 182919107 | 1403 |
| rs2623438 | 0.924 | 182922252 | 1404 |
| rs10930995 | 0.913 | 182927388 | 1405 |
| rs10930997 | 0.92 | 182932776 | 1406 |
| rs2568675 | 1.0 | 182933991 | 1407 |
| rs1594615 | 1.0 | 182935866 | 1408 |
| rs11681840 | 1.0 | 182935924 | 1409 |
| rs4666828 | — | 182938657 | 1410 |
| rs10930999 | 0.571 | 182954748 | 1411 |
| rs12474371 | 0.543 | 182977270 | 1412 |

### Example 50

[0285] For individuals with colorectal cancer, the distribution of polymorphic alleles at position 186817077 of chromosome 2 was different from those without colorectal cancer (Table 50).

[0286] The recessive test for risk associated with carrying the C allele had an empirical p-value of 0.003843 based on permutation analysis, and the corresponding recessive odds ratio is 2.152 (Table 50). These data further suggest that this marker is associated with colorectal cancer risk and that the C allele at position 186817077 of chromosome 2 is associated with an increased risk of developing colorectal cancer.

TABLE 50

| | |
|---|---|
| rs no. | 4264536 |
| Chromosome; Position | 2; 186817077 |
| Gene Name | unknown |
| Genotype; Phenotype | n = C; increased risk |
| Hardy-Weinberg | 0.54538 |

| Case | | | | | | | |
|---|---|---|---|---|---|---|---|
| Flag | Allele B | AA | AB | BB | Model | p-Value | Odds Ratio |
| 0 | C | 692 | 265 | 21 | Recessive | 0.003843 | 2.152 |
| 1 | C | 615 | 232 | 40 | | | |

[0287] Table 50A indicates SNPs found to be in strong linkage disequilibrium with rs4264536. To generate this list, correlation coefficients (r²) were calculated between the index SNP and all neighboring SNPs cited in the June 2006 HapMap data set release. An r² cut off of 0.50 was selected for inclusion as evidence for strong genetic linkage, i.e., a “strong linkage disequilibrium.

TABLE 50A
Linked SNPs

| SNP | r² | Position on chr2 | SEQ ID NO |
|---|---|---|---|
| rs10931217 | 0.567 | 186710420 | 1413 |
| rs10804001 | 0.53 | 186711372 | 1414 |
| rs875162 | 0.567 | 186722263 | 1415 |
| rs6715226 | 0.525 | 186724122 | 1416 |
| rs7582258 | 0.668 | 186729521 | 1417 |
| rs6434159 | 0.525 | 186740943 | 1418 |
| rs7605905 | 0.525 | 186746224 | 1419 |
| rs11689385 | 0.525 | 186746951 | 1420 |
| rs12615770 | 0.654 | 186748482 | 1421 |
| rs1021281 | 0.525 | 186749691 | 1422 |
| rs12998383 | 0.654 | 186752544 | 1423 |
| rs16827480 | 0.668 | 186753368 | 1424 |
| rs7566161 | 0.525 | 186754123 | 1425 |
| rs10165461 | 1.0 | 186754244 | 1426 |
| rs12990062 | 1.0 | 186754964 | 1427 |
| rs2029233 | 1.0 | 186756686 | 1428 |
| rs12614513 | 0.557 | 186759677 | 1429 |
| rs2029234 | 0.525 | 186762379 | 1430 |
| rs1487351 | 0.525 | 186762957 | 1431 |
| rs2887769 | 1.0 | 186763380 | 1432 |
| rs10184559 | 1.0 | 186765243 | 1433 |
| rs3919953 | 0.514 | 186767243 | 1434 |
| rs10931222 | 0.668 | 186771130 | 1435 |
| rs991084 | 0.668 | 186774634 | 1436 |
| rs9630989 | 1.0 | 186779933 | 1437 |
| rs1386516 | 1.0 | 186782889 | 1438 |
| rs13005466 | 0.668 | 186783677 | 1439 |
| rs1386517 | 1.0 | 186783723 | 1440 |
| rs10189482 | 1.0 | 186786323 | 1441 |
| rs1386519 | 0.325 | 186786345 | 1442 |
| rs7424484 | 0.525 | 186787592 | 1443 |
| rs12619867 | 0.525 | 186788152 | 1444 |
| rs6750636 | 0.653 | 186788675 | 1445 |
| rs12693431 | 1.0 | 186790815 | 1446 |
| rs7586293 | 0.525 | 186795703 | 1447 |
| rs13003934 | 0.604 | 186795981 | 1448 |
| rs12999989 | 0.667 | 186797056 | 1449 |
| rs13028175 | 0.64 | 186797101 | 1450 |
| rs13429778 | 1.0 | 186797572 | 1451 |
| rs12693432 | 1.0 | 186799104 | 1452 |
| rs12328015 | 1.0 | 186799574 | 1453 |
| rs10931224 | 1.0 | 186801145 | 1454 |
| rs12693433 | 1.0 | 186802740 | 1455 |
| rs12999474 | 0.665 | 186804008 | 1456 |
| rs10197403 | 1.0 | 186804743 | 1457 |
| rs12615701 | 0.525 | 186808518 | 1458 |
| rs12693434 | 0.94 | 186811816 | 1459 |
| rs4386289 | 1.0 | 186814495 | 1460 |
| rs4552153 | 1.0 | 186816642 | 1461 |
| rs4264536 | — | 186817077 | 1462 |
| rs4493221 | 1.0 | 186817164 | 1463 |
| rs4591311 | 1.0 | 186817449 | 1464 |
| rs4442964 | 1.0 | 186818961 | 1465 |
| rs4420679 | 1.0 | 186820366 | 1466 |
| rs13383401 | 1.0 | 186821302 | 1467 |
| rs10189831 | 1.0 | 186821580 | 1468 |
| rs10189763 | 1.0 | 186821687 | 1469 |
| rs10189985 | 0.944 | 186821697 | 1470 |
| rs10189845 | 1.0 | 186821729 | 1471 |
| rs10205061 | 1.0 | 186822277 | 1472 |
| rs10205148 | 1.0 | 186822318 | 1473 |
| rs10205245 | 1.0 | 186822413 | 1474 |
| rs10205253 | 1.0 | 186822456 | 1475 |
| rs12373738 | 0.668 | 186822924 | 1476 |
| rs13416226 | 1.0 | 186823239 | 1477 |
| rs12693436 | 1.0 | 186826582 | 1478 |
| rs13422495 | 1.0 | 186830554 | 1479 |
| rs13403908 | 1.0 | 186832300 | 1480 |
| rs10931227 | 0.943 | 186835982 | 1481 |
| rs13017923 | 0.523 | 186839354 | 1482 |
| rs10193729 | 0.525 | 186840321 | 1483 |
| rs10186498 | 0.72 | 186841731 | 1484 |
| rs13419562 | 0.72 | 186854278 | 1485 |
| rs13394207 | 0.72 | 186854406 | 1486 |
| rs13421172 | 0.72 | 186856196 | 1487 |
| rs2887816 | 0.72 | 186869233 | 1488 |
| rs13388196 | 0.72 | 186870116 | 1489 |
| rs2370681 | 0.72 | 186873391 | 1490 |
| rs12233005 | 0.72 | 186873805 | 1491 |
| rs13416578 | 0.72 | 186876760 | 1492 |
| rs10195099 | 0.663 | 186944471 | 1493 |

### Example 51

[0288] For individuals with colorectal cancer, the distribution of polymorphic alleles at position 190205948 of chromosome 2 was different from those without colorectal cancer (Table 51). The recessive test for risk associated with carrying the T allele had an empirical p-value of 0.001635 based on permutation analysis, and the corresponding recessive odds ratio is 1.501 (Table 51). These data further suggest that this marker is associated with colorectal cancer risk and that the T allele at position 190205948 of chromosome 2 is associated with an increased risk of developing colorectal cancer.

TABLE 51

| | |
|---|---|
| rs no. | 1371469 |
| Chromosome; Position | 2; 190205948 |
| Gene Name | unknown |
| Genotype; Phenotype | n = T; increased risk |
| Hardy-Weinberg | 0.00077 |

| | | | | | | | Odds |
|---|---|---|---|---|---|---|---|
| Case Flag | Allele B | AA | AB | BB | Model | p-Value | Ratio |
| 0 | T | 322 | 497 | 119 | Recessive | 0.001635 | 1.501 |
| 1 | T | 345 | 430 | 169 | | | |

[0289] Table 51A indicates SNPs found to be in strong linkage disequilibrium with rs1371469. To generate this list, correlation coefficients (r²) were calculated between the index SNP and all neighboring SNPs cited in the June 2006 HapMap data set release. An r² cut off of 0.50 was selected for inclusion as evidence for strong genetic linkage, i.e., a “strong linkage disequilibrium.

TABLE 51A
Linked SNPs

| SNP | r² | Position on chr2 | SEQ ID NO |
|---|---|---|---|
| rs4277558 | 0.595 | 190190056 | 1494 |
| rs11685775 | 0.568 | 190192330 | 1495 |
| rs11674773 | 0.568 | 190192563 | 1496 |
| rs12465339 | 0.595 | 190193864 | 1497 |
| rs4667285 | 0.595 | 190194497 | 1498 |
| rs920266 | 0.595 | 190196792 | 1499 |
| rs10189190 | 0.53 | 190197228 | 1500 |
| rs2119070 | 0.597 | 190198425 | 1501 |
| rs751664 | 0.816 | 190201274 | 1502 |
| rs751663 | 0.816 | 190201295 | 1503 |
| rs11680808 | 0.615 | 190201999 | 1504 |
| rs10206543 | 0.816 | 190202876 | 1505 |
| rs11694976 | 0.631 | 190203400 | 1506 |
| rs1371468 | 1.0 | 190203827 | 1507 |
| rs17198934 | 0.621 | 190203877 | 1508 |
| rs17198941 | 1.0 | 190204668 | 1509 |
| rs1371469 | — | 190205948 | 1510 |
| rs7608796 | 1.0 | 190207286 | 1511 |
| rs12622601 | 1.0 | 190207749 | 1512 |
| rs12616162 | 1.0 | 190207999 | 1513 |
| rs11677198 | 0.621 | 190212085 | 1514 |
| rs17198955 | 0.621 | 190212749 | 1515 |
| rs13008704 | 0.624 | 190212993 | 1516 |
| rs11691332 | 0.621 | 190213950 | 1517 |
| rs13027987 | 0.646 | 190215226 | 1518 |
| rs17271134 | 0.646 | 190215309 | 1519 |
| rs13018571 | 0.621 | 190220632 | 1520 |
| rs726093 | 0.621 | 190222165 | 1521 |
| rs11682165 | 0.621 | 190227029 | 1522 |
| rs11677494 | 0.621 | 190227235 | 1523 |
| rs1469967 | 0.615 | 190229743 | 1524 |
| rs11685197 | 0.504 | 190237883 | 1525 |
| rs12466217 | 0.751 | 190248653 | 1526 |
| rs2352262 | 0.805 | 190249291 | 1527 |
| rs2304704 | 0.711 | 190255683 | 1528 |
| rs4145237 | 0.711 | 190257783 | 1529 |

### Example 52

[0290] For individuals with colorectal cancer, the distribution of polymorphic alleles at position 192530205 of chromosome 2, found within the SDPR gene, was different from those without colorectal cancer (Table 52). The dominant test for risk associated with carrying the G allele had an empirical p-value based on permutation analysis of 0.00171, and the corresponding dominant odds ratio is 2.017 (Table 52). These data further suggest that this marker, located within the SDPR gene, is associated with colorectal cancer risk and that the G allele at position 192530205 of chromosome 2 is associated with an increased risk of developing colorectal cancer.

TABLE 52

| | |
|---|---|
| rs no. | 4280394 |
| Chromosome; Position | 2; 192530205 |
| Gene Name | SDPR |
| SEQ ID NO; Position | 5637; 7092 |
| Genotype; Phenotype | n = G; increased risk |
| Hardy-Weinberg | 0.07556 |

| Case | | | | | | | |
|---|---|---|---|---|---|---|---|
| Flag | Allele B | AA | AB | BB | Model | p-Value | Odds Ratio |
| 0 | G | 63 | 346 | 649 | Dominant | 0.00171 | 2.017 |
| 1 | G | 29 | 339 | 585 | | | |

[0291] Table 52A indicates SNPs found to be in strong linkage disequilibrium with rs4280394. To generate this list, correlation coefficients (r²) were calculated between the index SNP and all neighboring SNPs cited in the June 2006 HapMap data set release. An r² cut off of 0.50 was selected for inclusion as evidence for strong genetic linkage, i.e., a “strong linkage disequilibrium.

TABLE 52A
Linked SNPs

| SNP | r² | Position on chr2 | SEQ ID NO |
|---|---|---|---|
| rs4280394 | — | 192530205 | 1530 |

### Example 53

[0292] For individuals with colorectal cancer, the distribution of polymorphic alleles at position 201062851 of chromosome 2, found within the DNAPTP6 gene, was different from those without colorectal cancer (Table 53). The dominant test for risk associated with carrying the G allele had an empirical p-value based on permutation analysis of 0.017416, and the corresponding dominant odds ratio is 1.356 (Table 53). These data further suggest that this marker, located within the DNAPTP6 gene, is associated with colorectal cancer risk and that the G allele at position 201062851 of chromosome 2 is associated with an increased risk of developing colorectal cancer.

TABLE 53

| | |
|---|---|
| rs no. | 10497857 |
| Chromosome; Position | 2; 201062851 |
| Gene Name | DNAPTP6 |
| SEQ ID NO; Position | 5638; 66550 |
| Genotype; Phenotype | n = G; increased risk |
| Hardy-Weinberg | 0.02611 |

| | | | | | | | Odds |
|---|---|---|---|---|---|---|---|
| Case Flag | Allele B | AA | AB | BB | Model | p-Value | Ratio |
| 0 | G | 158 | 475 | 477 | Dominant | 0.017416 | 1.356 |
| 1 | G | 122 | 510 | 487 | | | |

[0293] Table 53A indicates SNPs found to be in strong linkage disequilibrium with rs10497857. To generate this list, correlation coefficients (r²) were calculated between the index SNP and all neighboring SNPs cited in the June 2006 HapMap data set release. An r² cut off of 0.50 was selected for inclusion as evidence for strong genetic linkage, i.e., a “strong linkage disequilibrium.

TABLE 53A
Linked SNPs

| SNP | r² | Position on chr2 | SEQ ID NO |
|---|---|---|---|
| rs295134 | 0.506 | 200935729 | 1531 |
| rs17531061 | 0.587 | 200938958 | 1532 |
| rs842830 | 0.549 | 200956630 | 1533 |
| rs4673855 | 0.508 | 200961649 | 1534 |
| rs4145969 | 0.528 | 200965467 | 1535 |
| rs295136 | 0.57 | 200966508 | 1536 |
| rs295137 | 0.506 | 200975546 | 1537 |
| rs295139 | 0.579 | 200985494 | 1538 |
| rs295114 | 0.537 | 201021108 | 1539 |
| rs295142 | 0.628 | 201037222 | 1540 |
| rs17447186 | 0.899 | 201038297 | 1541 |
| rs1900706 | 0.582 | 201039577 | 1542 |
| rs17531631 | 0.931 | 201050143 | 1543 |
| rs10497857 | — | 201062851 | 1544 |
| rs3754798 | 1.0 | 201065463 | 1545 |
| rs3769454 | 0.864 | 201071056 | 1546 |
| rs7598349 | 0.551 | 201072985 | 1547 |
| rs1020111 | 0.546 | 201073286 | 1548 |
| rs3739118 | 0.74 | 201079275 | 1549 |
| rs842823 | 0.794 | 201079462 | 1550 |

### Example 54

[0294] For individuals with colorectal cancer, the distribution of polymorphic alleles at position 201393474 of chromosome 2 was different from those without colorectal cancer (Table 54). The dominant test for risk associated with carrying the G allele had an empirical p-value based on permutation analysis of 0.009524, and the corresponding dominant odds ratio is 1.348 (Table 54). These data further suggest that this marker is associated with colorectal cancer risk and that the G allele at position 201393474 of chromosome 2 is associated with an increased risk of developing colorectal cancer.

TABLE 54

| | |
|---|---|
| rs no. | 2540053 |
| Chromosome; Position | 2; 201393474 |
| Gene Name | unknown |
| Genotype; Phenotype | n = G; increased risk |
| Hardy-Weinberg | 0.24214 |

| Case | | | | | | | |
|---|---|---|---|---|---|---|---|
| Flag | Allele B | AA | AB | BB | Model | p-Value | Odds Ratio |
| 0 | G | 877 | 161 | 11 | Dominant | 0.009524 | 1.348 |
| 1 | G | 749 | 191 | 7 | | | |

[0295] Table 54A indicates SNPs found to be in strong linkage disequilibrium with rs2540053. To generate this list, correlation coefficients (r²) were calculated between the index SNP and all neighboring SNPs cited in the June 2006 HapMap data set release. An r² cut off of 0.50 was selected for inclusion as evidence for strong genetic linkage, i.e., a “strong linkage disequilibrium.

TABLE 54A
Linked SNPs

| SNP | r² | Position on chr2 | SEQ ID NO |
|---|---|---|---|
| rs2540053 | — | 201393474 | 1551 |
| rs2348113 | 0.55 | 201393875 | 1552 |
| rs2253612 | 0.932 | 201393939 | 1553 |
| rs2540052 | 0.55 | 201394505 | 1554 |

### Example 55

[0296] For individuals with colorectal cancer, the distribution of polymorphic alleles at position 15985480 of chromosome 3 was different from those without colorectal cancer (Table 55). The dominant test for risk associated with carrying the T allele had an empirical p-value based on permutation analysis of 0.066835, and the corresponding dominant odds ratio is 1.199 (Table 55). These data further suggest that this marker is associated with colorectal cancer risk and that the T allele at position 15985480 of chromosome 3 is associated with an increased risk of developing colorectal cancer.

TABLE 55

| | |
|---|---|
| rs no. | 10510444 |
| Chromosome; Position | 3; 15985480 |
| Gene Name | unknown |
| Genotype; Phenotype | n = T; increased risk |
| Hardy-Weinberg | 0.01911 |

| | | | | | | | Odds |
|---|---|---|---|---|---|---|---|
| Case Flag | Allele B | AA | AB | BB | Model | p-Value | Ratio |
| 0 | T | 292 | 515 | 302 | Dominant | 0.066835 | 1.199 |
| 1 | T | 257 | 560 | 302 | | | |

[0297] Table 55A indicates SNPs found to be in strong linkage disequilibrium with rs10510444. To generate this list, correlation coefficients (r²) were calculated between the index SNP and all neighboring SNPs cited in the June 2006 HapMap data set release. An r² cut off of 0.50 was selected for inclusion as evidence for strong genetic linkage, i.e., a “strong linkage disequilibrium.

TABLE 55A
Linked SNPs

| SNP | r² | Position on chr3 | SEQ ID NO |
|---|---|---|---|
| rs723247 | 0.781 | 15972853 | 1555 |
| rs1869627 | 0.663 | 15979492 | 1556 |
| rs7639184 | 1.0 | 15981630 | 1557 |
| rs1454776 | 1.0 | 15984048 | 1558 |
| rs9811682 | 1.0 | 15984372 | 1559 |
| rs4685286 | 1.0 | 15984808 | 1560 |
| rs10510444 | — | 15985480 | 1561 |
| rs13079584 | 1.0 | 15985719 | 1562 |
| rs1563229 | 1.0 | 15986206 | 1563 |
| rs9869915 | 1.0 | 15986712 | 1564 |
| rs2085149 | 1.0 | 15987135 | 1565 |
| rs2085151 | 1.0 | 15987195 | 1566 |
| rs1902115 | 1.0 | 15989624 | 1567 |
| rs1902116 | 1.0 | 15989740 | 1568 |
| rs1902117 | 1.0 | 15989773 | 1569 |
| rs6442563 | 1.0 | 15989863 | 1570 |
| rs11717117 | 1.0 | 15992669 | 1571 |
| rs4685294 | 1.0 | 15992909 | 1572 |
| rs985969 | 0.755 | 16003374 | 1573 |
| rs7653290 | 0.763 | 16003757 | 1574 |
| rs6442570 | 0.868 | 16037627 | 1575 |
| rs4685304 | 0.87 | 16041215 | 1576 |
| rs9815997 | 0.87 | 16043358 | 1577 |
| rs9874065 | 0.819 | 16045510 | 1578 |

### Example 56

[0298] For individuals with colorectal cancer, the distribution of polymorphic alleles at position 25139810 of chromosome 3 was different from those without colorectal cancer (Table 56). The trend test for risk associated with carrying the G allele had an empirical p-value of 0.01185 based on permutation analysis, and the corresponding Mantel-Haenszel odds ratio for trend is 1.247 (Table 56). These data further suggest that this marker is associated with colorectal cancer risk and that the G allele at position 25139810 of chromosome 3 is associated with an increased risk of developing colorectal cancer.

TABLE 56

| | |
|---|---|
| rs no. | 17516853 |
| Chromosome; Position | 3; 25139810 |
| Gene Name | unknown |
| Genotype; Phenotype | n = G; increased risk |
| Hardy-Weinberg | 0.67723 |

| Case | | | | | | | |
|---|---|---|---|---|---|---|---|
| Flag | Allele B | AA | AB | BB | Model | p-Value | Odds Ratio |
| 0 | G | 32 | 314 | 691 | Trend | 0.01185 | 1.247 |
| 1 | G | 21 | 242 | 669 | | | |

[0299] Table 56A indicates SNPs found to be in strong linkage disequilibrium with rs17516853. To generate this list, correlation coefficients (r²) were calculated between the index SNP and all neighboring SNPs cited in the June 2006 HapMap data set release. An r² cut off of 0.50 was selected for inclusion as evidence for strong genetic linkage, i.e., a “strong linkage disequilibrium.

TABLE 56A
Linked SNPs

| SNP | r² | Position on chr3 | SEQ ID NO |
|---|---|---|---|
| rs6550949 | 0.708 | 25124423 | 1579 |
| rs1603983 | 0.702 | 25124551 | 1580 |
| rs1587426 | 0.741 | 25124975 | 1581 |
| rs17576064 | 1.0 | 25139227 | 1582 |
| rs17516853 | — | 25139810 | 1583 |
| rs11129181 | 0.51 | 25143644 | 1584 |
| rs17517019 | 1.0 | 25146657 | 1585 |
| rs6804869 | 1.0 | 25155292 | 1586 |
| rs9812604 | 1.0 | 25157766 | 1587 |
| rs321519 | 0.521 | 25182177 | 1590 |

### Example 57

[0300] For individuals with colorectal cancer, the distribution of polymorphic alleles at position 25170688 of chromosome 3 was different from those without colorectal cancer (Table 57). The trend test for risk associated with carrying the G allele had an empirical p-value of 0.00084 based on permutation analysis, and the corresponding Mantel-Haenszel odds ratio for trend is 1.384 (Table 57). These data further suggest that this marker is associated with colorectal cancer risk and that the G allele at position 25170688 of chromosome 3 is associated with an increased risk of developing colorectal cancer.

TABLE 57

| | |
|---|---|
| rs no. | 17517792 |
| Chromosome; Position | 3; 25170688 |
| Gene Name | unknown |
| Genotype; Phenotype | n = G; increased risk |
| Hardy-Weinberg | 0.80170 |

| Case | | | | | | | |
|---|---|---|---|---|---|---|---|
| Flag | Allele B | AA | AB | BB | Model | p-Value | Odds Ratio |
| 0 | G | 20 | 261 | 777 | Trend | 0.00084 | 1.384 |
| 1 | G | 11 | 183 | 759 | | | |

[0301] Table 57A indicates SNPs found to be in strong linkage disequilibrium with rs17517792. To generate this list, correlation coefficients (r²) were calculated between the index SNP and all neighboring SNPs cited in the June 2006 HapMap data set release. An r² cut off of 0.50 was selected for inclusion as evidence for strong genetic linkage, i.e., a “strong linkage disequilibrium.

TABLE 57A
Linked SNPs

| SNP | r² | Position on chr3 | SEQ ID NO |
|---|---|---|---|
| rs13060347 | 1.0 | 25169305 | 1588 |
| rs17517792 | — | 25170688 | 1589 |
| rs17517931 | 1.0 | 25184366 | 1591 |
| rs13068891 | 0.924 | 25188663 | 1592 |
| rs13061437 | 1.0 | 25194200 | 1593 |
| rs17578042 | 1.0 | 25205423 | 1594 |
| rs17578259 | 1.0 | 25207827 | 1595 |
| rs13100362 | 0.81 | 25211158 | 1596 |
| rs2068130 | 0.759 | 25211837 | 1597 |
| rs1561115 | 0.866 | 25235457 | 1598 |
| rs17015971 | 0.865 | 25238040 | 1599 |
| rs13096074 | 0.765 | 25239011 | 1600 |
| rs17015978 | 0.924 | 25239845 | 1601 |
| rs7432016 | 0.929 | 25243914 | 1602 |
| rs10510558 | 0.929 | 25244762 | 1603 |
| rs10510559 | 0.929 | 25244932 | 1604 |
| rs10510560 | 0.929 | 25245547 | 1605 |
| rs13092896 | 0.734 | 25250478 | 1606 |
| rs7427426 | 0.919 | 25264520 | 1607 |
| rs1601161 | 0.928 | 25265009 | 1608 |
| rs1992060 | 0.84 | 25269521 | 1609 |
| rs1992059 | 0.866 | 25273091 | 1610 |
| rs13082318 | 0.866 | 25273425 | 1611 |
| rs13087573 | 0.866 | 25274083 | 1612 |
| rs17016060 | 0.866 | 25275052 | 1613 |
| rs13074533 | 0.866 | 25277488 | 1614 |
| rs10510561 | 0.866 | 25279386 | 1615 |
| rs17016078 | 0.866 | 25280012 | 1616 |
| rs13093059 | 0.866 | 25280571 | 1617 |
| rs13068143 | 0.866 | 25283486 | 1618 |
| rs13091754 | 0.866 | 25283965 | 1619 |
| rs17016117 | 0.866 | 25284812 | 1620 |
| rs17016120 | 0.866 | 25285067 | 1621 |
| rs13059799 | 0.866 | 25287098 | 1622 |
| rs13082440 | 0.858 | 25287161 | 1623 |
| rs17016133 | 0.866 | 25288171 | 1624 |
| rs13084418 | 0.866 | 25291318 | 1625 |
| rs13084608 | 0.866 | 25291410 | 1626 |
| rs17016141 | 0.791 | 25295964 | 1627 |
| rs1436239 | 0.791 | 25300483 | 1628 |

### Example 58

[0302] For individuals with colorectal cancer, the distribution of polymorphic alleles at position 32134166 of chromosome 3, found within the KIAA0089 gene, was different from those without colorectal cancer (Table 58). The trend test for risk associated with carrying the C allele had an empirical p-value of 0.000558 based on permutation analysis, and the corresponding Mantel-Haenszel odds ratio for trend is 1.254 (Table 58). These data further suggest that this marker, located within the KIAA0089 gene, is associated with colorectal cancer risk and that the C allele at position 32134166 of chromosome 3 is associated with an increased risk of developing colorectal cancer.

TABLE 58

| | |
|---|---|
| rs no. | 6762236 |
| Chromosome; Position | 3; 32134166 |
| Gene Name | KIAA0089 |
| SEQ ID NO; Position | 5639; 11019 |
| Genotype; Phenotype | n = C; increased risk |
| Hardy-Weinberg | 0.21427 |

| Case | | | | | | | |
|---|---|---|---|---|---|---|---|
| Flag | Allele B | AA | AB | BB | Model | p-Value | Odds Ratio |
| 0 | C | 215 | 542 | 291 | Trend | 0.000558 | 1.254 |
| 1 | C | 158 | 459 | 328 | | | |

[0303] Table 58A indicates SNPs found to be in strong linkage disequilibrium with rs6762236. To generate this list, correlation coefficients (r²) were calculated between the index SNP and all neighboring SNPs cited in the June 2006 HapMap data set release. An r² cut off of 0.50 was selected for inclusion as evidence for strong genetic linkage, i.e., a “strong linkage disequilibrium.

TABLE 58A
Linked SNPs

| SNP | r² | Position on chr3 | SEQ ID NO |
|---|---|---|---|
| rs4955238 | 0.638 | 32100486 | 1629 |
| rs7632997 | 0.624 | 32103807 | 1630 |
| rs6798586 | 0.638 | 32107036 | 1631 |
| rs4955240 | 0.638 | 32107687 | 1632 |
| rs9874619 | 0.81 | 32116971 | 1633 |
| rs748607 | 0.514 | 32123720 | 1634 |
| rs901092 | 0.537 | 32126831 | 1635 |
| rs936787 | 0.532 | 32127741 | 1636 |
| rs2035548 | 0.574 | 32128616 | 1637 |
| rs13061945 | 0.537 | 32129426 | 1638 |
| rs12634660 | 0.537 | 32129512 | 1639 |
| rs9854295 | 0.506 | 32130347 | 1640 |
| rs9874858 | 0.537 | 32130743 | 1641 |
| rs9860131 | 0.532 | 32131531 | 1642 |
| rs11925962 | 0.537 | 32132631 | 1643 |
| rs11129490 | 0.551 | 32132792 | 1644 |
| rs9870851 | 0.549 | 32133557 | 1645 |
| rs6762236 | — | 32134166 | 1646 |
| rs9820854 | 0.559 | 32134835 | 1647 |
| rs12633891 | 0.679 | 32135918 | 1648 |
| rs11129494 | 0.517 | 32139992 | 1649 |
| rs9880900 | 0.613 | 32146121 | 1650 |
| rs11129496 | 0.534 | 32161901 | 1651 |
| rs9876851 | 0.508 | 32162884 | 1652 |
| rs9839669 | 0.526 | 32162947 | 1653 |
| rs9839702 | 0.517 | 32163010 | 1654 |

### Example 59

[0304] For individuals with colorectal cancer, the distribution of polymorphic alleles at position 36561025 of chromosome 3, found within the STAC gene, was different from those without colorectal cancer (Table 59). The recessive test for risk associated with carrying the G allele had an empirical p-value of 0.001917 based on permutation analysis, and the corresponding recessive odds ratio is 1.356 (Table 59). These data further suggest that this marker, located within the STAC gene, is associated with colorectal cancer risk and that the G allele at position 36561025 of chromosome 3 is associated with an increased risk of developing colorectal cancer.

TABLE 59

| | |
|---|---|
| rs no. | 6781630 |
| Chromosome; Position | 3; 36561025 |
| Gene Name | STAC |
| SEQ ID NO; Position | 5640; 163925 |
| Genotype; Phenotype | n = G; increased risk |
| Hardy-Weinberg | 1 |

| | | | | | | | Odds |
|---|---|---|---|---|---|---|---|
| Case Flag | Allele B | AA | AB | BB | Model | p-Value | Ratio |
| 0 | G | 34 | 302 | 673 | Recessive | 0.001917 | 1.356 |
| 1 | G | 27 | 241 | 728 | | | |

[0305] Table 59A indicates SNPs found to be in strong linkage disequilibrium with rs6781630. To generate this list, correlation coefficients (r²) were calculated between the index SNP and all neighboring SNPs cited in the June 2006 HapMap data set release. An r² cut off of 0.50 was selected for inclusion as evidence for strong genetic linkage, i.e., a “strong linkage disequilibrium.

TABLE 59A
Linked SNPs

| SNP | r² | Position on chr3 | SEQ ID NO |
|---|---|---|---|
| rs11710098 | 1.0 | 36532521 | 1655 |
| rs11711958 | 1.0 | 36539606 | 1656 |
| rs11714333 | 1.0 | 36542082 | 1657 |
| rs7644206 | 1.0 | 36546788 | 1658 |
| rs6777327 | 1.0 | 36556181 | 1659 |
| rs6781630 | — | 36561025 | 1660 |
| rs6781771 | 1.0 | 36561276 | 1661 |
| rs6808581 | 1.0 | 36561684 | 1662 |
| rs17188371 | 1.0 | 36563172 | 1663 |
| rs2176995 | 1.0 | 36563891 | 1664 |
| rs11716761 | 1.0 | 36566407 | 1665 |
| rs11716822 | 1.0 | 36566673 | 1666 |
| rs1357069 | 1.0 | 36567042 | 1667 |
| rs1357070 | 1.0 | 36567136 | 1668 |
| rs1357071 | 1.0 | 36567376 | 1669 |
| rs11710283 | 1.0 | 36567812 | 1670 |
| rs17188722 | 1.0 | 36568926 | 1671 |
| rs12152364 | 1.0 | 36571384 | 1672 |
| rs11129723 | 1.0 | 36572905 | 1673 |
| rs12152348 | 1.0 | 36575321 | 1674 |
| rs11716101 | 1.0 | 36583646 | 1675 |
| rs11712850 | 1.0 | 36588086 | 1676 |
| rs11714226 | 1.0 | 36597648 | 1677 |
| rs4491850 | 1.0 | 36598879 | 1678 |
| rs7430395 | 1.0 | 36599138 | 1679 |
| rs11706476 | 1.0 | 36599474 | 1680 |
| rs7619047 | 0.788 | 36603785 | 1681 |
| rs1521268 | 1.0 | 36609993 | 1682 |
| rs1521269 | 1.0 | 36610151 | 1683 |
| rs1402563 | 1.0 | 36611158 | 1684 |
| rs11714086 | 1.0 | 36612106 | 1685 |
| rs17248831 | 1.0 | 36618463 | 1686 |
| rs17248873 | 1.0 | 36618485 | 1687 |
| rs17248901 | 1.0 | 36622465 | 1688 |
| rs17195706 | 1.0 | 36622754 | 1689 |
| rs17195741 | 1.0 | 36623372 | 1690 |
| rs11705862 | 1.0 | 36624146 | 1691 |
| rs7621934 | 1.0 | 36625495 | 1692 |
| rs6780039 | 0.715 | 36630641 | 1693 |

### Example 60

[0306] For individuals with colorectal cancer, the distribution of polymorphic alleles at position 95541430 of chromosome 3 was different from those without colorectal cancer (Table 60). The dominant test for risk associated with carrying the T allele had an empirical p-value based on permutation analysis of 0.001442, and the corresponding dominant odds ratio is 2.019 (Table 60). These data further suggest that this marker is associated with colorectal cancer risk and that the T allele at position 95541430 of chromosome 3 is associated with an increased risk of developing colorectal cancer.

TABLE 60

| | |
|---|---|
| rs no. | 1907645 |
| Chromosome; Position | 3; 95541430 |
| Gene Name | unknown |
| Genotype; Phenotype | n = T; increased risk |
| Hardy-Weinberg | 0.00076 |

| | | | | | | | Odds |
|---|---|---|---|---|---|---|---|
| Case Flag | Allele B | AA | AB | BB | Model | p-Value | Ratio |
| 0 | T | 65 | 308 | 661 | Dominant | 0.001442 | 2.019 |
| 1 | T | 30 | 294 | 609 | | | |

[0307] Table 60A indicates SNPs found to be in strong linkage disequilibrium with rs1907645. To generate this list, correlation coefficients (r²) were calculated between the index SNP and all neighboring SNPs cited in the June 2006 HapMap data set release. An r² cut off of 0.50 was selected for inclusion as evidence for strong genetic linkage, i.e., a “strong linkage disequilibrium.

TABLE 60A
Linked SNPs

| SNP | r² | Position on chr3 | SEQ ID NO |
|---|---|---|---|
| rs3895901 | 0.943 | 95535589 | 1694 |
| rs6796852 | 1.0 | 95536563 | 1695 |
| rs4143023 | 1.0 | 95537539 | 1696 |
| rs6439850 | 1.0 | 95538497 | 1697 |
| rs4857377 | 1.0 | 95541066 | 1698 |
| rs4857378 | 1.0 | 95541356 | 1699 |
| rs1907645 | — | 95541430 | 1700 |
| rs2055024 | 1.0 | 95542046 | 1701 |
| rs2055025 | 1.0 | 95542127 | 1702 |
| rs1551423 | 1.0 | 95548256 | 1703 |
| rs1979676 | 1.0 | 95550760 | 1704 |
| rs9876599 | 0.778 | 95556822 | 1705 |
| rs9809636 | 0.777 | 95557275 | 1706 |
| rs4857398 | 0.756 | 95558516 | 1707 |
| rs9872499 | 0.778 | 95560239 | 1708 |
| rs9877810 | 0.777 | 95561173 | 1709 |
| rs9870816 | 0.777 | 95561492 | 1710 |
| rs9856020 | 0.768 | 95561508 | 1711 |
| rs9874681 | 0.778 | 95561574 | 1712 |
| rs9883602 | 0.767 | 95562468 | 1713 |
| rs9813037 | 0.777 | 95562542 | 1714 |
| rs9816795 | 0.777 | 95562592 | 1715 |
| rs6440046 | 0.699 | 95563503 | 1716 |
| rs9816169 | 0.778 | 95565070 | 1717 |
| rs6804969 | 0.55 | 95565527 | 1718 |
| rs6810367 | 0.778 | 95565570 | 1719 |
| rs2884903 | 0.565 | 95565633 | 1720 |
| rs921725 | 0.778 | 95566063 | 1721 |
| rs9826212 | 0.769 | 95566678 | 1722 |
| rs6440070 | 0.778 | 95566835 | 1723 |
| rs7644906 | 0.759 | 95568434 | 1724 |
| rs2087734 | 0.778 | 95569562 | 1725 |
| rs11713968 | 0.817 | 95575150 | 1726 |
| rs9853997 | 0.778 | 95576084 | 1727 |
| rs6768190 | 0.777 | 95578194 | 1728 |
| rs1492017 | 0.778 | 95579991 | 1729 |
| rs7637216 | 0.777 | 95580731 | 1730 |
| rs13322921 | 0.778 | 95581248 | 1731 |
| rs11714550 | 0.778 | 95585252 | 1732 |
| rs9867827 | 0.778 | 95594541 | 1733 |
| rs1388639 | 0.725 | 95595165 | 1734 |
| rs9855021 | 0.712 | 95595774 | 1735 |
| rs9855371 | 0.713 | 95595981 | 1736 |
| rs9855525 | 0.713 | 95596068 | 1737 |
| rs9870513 | 0.671 | 95596238 | 1738 |
| rs9859818 | 0.769 | 95597788 | 1739 |
| rs9864748 | 0.778 | 95598005 | 1740 |
| rs9860169 | 0.778 | 95598035 | 1741 |
| rs9858171 | 0.778 | 95599070 | 1742 |
| rs9865748 | 0.778 | 95599229 | 1743 |
| rs4088917 | 0.725 | 95599466 | 1744 |
| rs9875906 | 0.778 | 95600272 | 1745 |
| rs9853331 | 0.778 | 95600700 | 1746 |
| rs11719701 | 0.778 | 95601126 | 1747 |
| rs12630167 | 0.618 | 95604167 | 1748 |
| rs6771948 | 0.524 | 95609193 | 1749 |
| rs9824284 | 0.524 | 95612334 | 1750 |

### Example 61

[0308] For individuals with colorectal cancer, the distribution of polymorphic alleles at position 112941527 of chromosome 3, found within the FLJ31579 gene, was different from those without colorectal cancer (Table 61). The dominant test for risk associated with carrying the C allele had an empirical p-value based on permutation analysis of 0.010941, and the corresponding dominant odds ratio is 1.322 (Table 61). These data further suggest that this marker, located within the FLJ31579 gene, is associated with colorectal cancer risk and that the C allele at position 112941527 of chromosome 3 is associated with an increased risk of developing colorectal cancer.

TABLE 61

| | |
|---|---|
| rs no. | 6788543 |
| Chromosome; Position | 3; 112941527 |
| Gene Name | FLJ31579 |
| SEQ ID NO; Position | 5641; 65315 |
| Genotype; Phenotype | n = C; increased risk |
| Hardy-Weinberg | 0.6067 |

| | | | | | | | Odds |
|---|---|---|---|---|---|---|---|
| Case Flag | Allele B | AA | AB | BB | Model | p-Value | Ratio |
| 0 | C | 240 | 474 | 250 | Dominant | 0.010941 | 1.322 |
| 1 | C | 191 | 516 | 246 | | | |

[0309] Table 61A indicates SNPs found to be in strong linkage disequilibrium with rs6788543. To generate this list, correlation coefficients (r²) were calculated between the index SNP and all neighboring SNPs cited in the June 2006 HapMap data set release. An r² cut off of 0.50 was selected for inclusion as evidence for strong genetic linkage, i.e., a “strong linkage disequilibrium.

TABLE 61A
Linked SNPs

| SNP | r² | Position on chr3 | SEQ ID NO |
|---|---|---|---|
| rs4682054 | 0.501 | 112901691 | 1751 |
| rs4381908 | 0.51 | 112911217 | 1752 |
| rs4401340 | 0.757 | 112911456 | 1753 |
| rs4413291 | 0.932 | 112914281 | 1754 |
| rs2137595 | 0.93 | 112914508 | 1755 |
| rs9877859 | 0.636 | 112923379 | 1756 |
| rs4682298 | 0.754 | 112929749 | 1757 |
| rs4682299 | 0.967 | 112933794 | 1758 |
| rs11711533 | 0.931 | 112934718 | 1759 |
| rs11711582 | 0.934 | 112934733 | 1760 |
| rs6438003 | 0.621 | 112936579 | 1761 |
| rs9868909 | 0.965 | 112937535 | 1762 |
| rs6788543 | — | 112941527 | 1763 |
| rs6796087 | 1.0 | 112944650 | 1764 |
| rs12330761 | 0.967 | 112945600 | 1765 |
| rs4682303 | 0.967 | 112946224 | 1766 |
| rs13074817 | 0.74 | 112949845 | 1767 |
| rs4284954 | 0.901 | 112950789 | 1768 |
| rs9834030 | 0.74 | 112952064 | 1769 |
| rs10934106 | 0.706 | 112953158 | 1770 |
| rs13079085 | 0.706 | 112953907 | 1771 |
| rs10934107 | 0.706 | 112960326 | 1772 |
| rs6768713 | 0.702 | 112960464 | 1773 |
| rs6784753 | 0.934 | 112961319 | 1774 |
| rs11710738 | 0.897 | 112964465 | 1775 |
| rs7427201 | 0.658 | 112964757 | 1776 |
| rs12490166 | 0.673 | 112964847 | 1777 |
| rs6786386 | 0.612 | 112966546 | 1778 |
| rs6790072 | 0.673 | 112967692 | 1779 |
| rs6777540 | 0.673 | 112968039 | 1780 |
| rs9825915 | 0.664 | 112968240 | 1781 |
| rs4682305 | 0.903 | 112970271 | 1782 |
| rs6786612 | 0.903 | 112975773 | 1783 |
| rs9818574 | 0.903 | 112977534 | 1784 |
| rs9870656 | 0.795 | 112978250 | 1785 |
| rs10470303 | 0.903 | 112979487 | 1786 |
| rs9823974 | 0.903 | 112980486 | 1787 |
| rs4682312 | 0.803 | 112983462 | 1788 |
| rs4682314 | 0.806 | 112988303 | 1789 |

### Example 62

[0310] For individuals with colorectal cancer, the distribution of polymorphic alleles at position 115129347 of chromosome 3, found within the DKFZp434C0328 gene, was different from those without colorectal cancer (Table 62). The dominant test for risk associated with carrying the C allele had an empirical p-value based on permutation analysis of 0.001539, and the corresponding dominant odds ratio is 1.669 (Table 62). These data further suggest that this marker, located within the DKFZp434C0328 gene, is associated with colorectal cancer risk and that the C allele at position 115129347 of chromosome 3 is associated with an increased risk of developing colorectal cancer.

TABLE 62

| | |
|---|---|
| rs no. | 4422272 |
| Chromosome; Position | 3; 115129347 |
| Gene Name | DKFZp434C0328 |
| SEQ ID NO; Position | 5642; 13353 |
| Genotype; Phenotype | n = C; increased risk |
| Hardy-Weinberg | 0.61152 |

| | | | | | | | Odds |
|---|---|---|---|---|---|---|---|
| Case Flag | Allele B | AA | AB | BB | Model | p-Value | Ratio |
| 0 | C | 107 | 426 | 456 | Dominant | 0.001539 | 1.669 |
| 1 | C | 66 | 444 | 464 | | | |

[0311] Table 62A indicates SNPs found to be in strong linkage disequilibrium with rs4422272. To generate this list, correlation coefficients (r²) were calculated between the index SNP and all neighboring SNPs cited in the June 2006 HapMap data set release. An r² cut off of 0.50 was selected for inclusion as evidence for strong genetic linkage, i.e., a “strong linkage disequilibrium.

TABLE 62A
Linked SNPs

| SNP | r² | Position on chr3 | SEQ ID NO |
|---|---|---|---|
| rs3936551 | 0.787 | 115100733 | 1790 |
| rs3846047 | 0.751 | 115101297 | 1791 |
| rs4682146 | 0.947 | 115109335 | 1792 |
| rs6798319 | 0.518 | 115114470 | 1793 |
| rs4422272 | — | 115129347 | 1794 |

### Example 63

[0312] For individuals with colorectal cancer, the distribution of polymorphic alleles at position 119908152 of chromosome 3 was different from those without colorectal cancer (Table 63). The dominant test for risk associated with carrying the T allele had an empirical p-value based on permutation analysis of 0.002706, and the corresponding dominant odds ratio is 1.356 (Table 63). These data further suggest that this marker is associated with colorectal cancer risk and that the T allele at position 119908152 of chromosome 3 is associated with an increased risk of developing colorectal cancer.

TABLE 63

| | |
|---|---|
| rs no. | 1566414 |
| Chromosome; Position | 3; 119908152 |
| Gene Name | unknown |
| Genotype; Phenotype | n = T; increased risk |
| Hardy-Weinberg | 0.19194 |

| | | | | | | | Odds |
|---|---|---|---|---|---|---|---|
| Case Flag | Allele B | AA | AB | BB | Model | p-Value | Ratio |
| 0 | T | 317 | 500 | 233 | Dominant | 0.002706 | 1.356 |
| 1 | T | 227 | 483 | 229 | | | |

[0313] Table 63A indicates SNPs found to be in strong linkage disequilibrium with rs1566414. To generate this list, correlation coefficients (r²) were calculated between the index SNP and all neighboring SNPs cited in the June 2006 HapMap data set release. An r² cut off of 0.50 was selected for inclusion as evidence for strong genetic linkage, i.e., a “strong linkage disequilibrium.

TABLE 63A
Linked SNPs

| SNP | r² | Position on chr3 | SEQ ID NO |
|---|---|---|---|
| rs1566414 | — | 119908152 | 1795 |
| rs10934459 | 0.657 | 119908174 | 1796 |
| rs10934460 | 0.647 | 119911858 | 1797 |
| rs7372043 | 0.647 | 119913615 | 1798 |
| rs1500079 | 0.665 | 119915026 | 1799 |
| rs1500080 | 0.642 | 119915448 | 1800 |
| rs12485708 | 0.647 | 119925257 | 1801 |
| rs1066152 | 0.716 | 119928987 | 1802 |
| rs1066153 | 0.716 | 119929073 | 1803 |
| rs1066155 | 0.716 | 119931670 | 1804 |
| rs705246 | 0.716 | 119934191 | 1805 |
| rs705236 | 0.656 | 119943730 | 1806 |
| rs10934463 | 0.642 | 119953482 | 1807 |
| rs7433532 | 0.647 | 119953633 | 1808 |
| rs798576 | 0.537 | 119983099 | 1809 |
| rs798580 | 0.537 | 119992658 | 1810 |
| rs798582 | 0.669 | 119993533 | 1811 |
| rs798583 | 0.537 | 119993770 | 1812 |
| rs798584 | 0.537 | 119993980 | 1813 |
| rs798602 | 0.513 | 119996400 | 1814 |
| rs798589 | 0.642 | 120003493 | 1815 |
| rs798590 | 0.505 | 120003649 | 1816 |

### Example 64

[0314] For individuals with colorectal cancer, the distribution of polymorphic alleles at position 135305323 of chromosome 3 was different from those without colorectal cancer (Table 64). The trend test for risk associated with carrying the C allele had an empirical p-value of 0.030773 based on permutation analysis, and the corresponding Mantel-Haenszel odds ratio for trend is 1.309 (Table 64). These data further suggest that this marker is associated with colorectal cancer risk and that the C allele at position 135305323 of chromosome 3 is associated with an increased risk of developing colorectal cancer.

TABLE 64

| | |
|---|---|
| rs no. | 13074310 |
| Chromosome; Position | 3; 135305323 |
| Gene Name | unknown |
| Genotype; Phenotype | n = C; increased risk |
| Hardy-Weinberg | 0.06823 |

| | | | | | | | Odds |
|---|---|---|---|---|---|---|---|
| Case Flag | Allele B | AA | AB | BB | Model | p-Value | Ratio |
| 0 | C | 10 | 136 | 908 | Trend | 0.030773 | 1.309 |
| 1 | C | 5 | 97 | 843 | | | |

[0315] Table 64A indicates SNPs found to be in strong linkage disequilibrium with rs13074310. To generate this list, correlation coefficients (r²) were calculated between the index SNP and all neighboring SNPs cited in the June 2006 HapMap data set release. An r² cut off of 0.50 was selected for inclusion as evidence for strong genetic linkage, i.e., a “strong linkage disequilibrium.

TABLE 64A
Linked SNPs

| SNP | r² | Position on chr3 | SEQ ID NO |
|---|---|---|---|
| rs9289460 | 0.901 | 135273298 | 1817 |
| rs4547696 | 0.867 | 135277326 | 1818 |
| rs7632556 | 1.0 | 135288644 | 1819 |
| rs7632489 | 1.0 | 135288700 | 1820 |
| rs7632691 | 1.0 | 135288916 | 1821 |
| rs4241373 | 1.0 | 135289731 | 1822 |
| rs12695601 | 1.0 | 135290724 | 1823 |
| rs4507252 | 1.0 | 135292254 | 1824 |
| rs4507253 | 1.0 | 135292422 | 1825 |
| rs4854811 | 1.0 | 135296364 | 1826 |
| rs4854812 | 1.0 | 135296455 | 1827 |
| rs4854611 | 1.0 | 135296818 | 1828 |
| rs6777817 | 1.0 | 135303500 | 1829 |
| rs13074310 | — | 135305323 | 1830 |
| rs9827105 | 1.0 | 135305589 | 1831 |
| rs7653175 | 1.0 | 135305973 | 1832 |
| rs7611109 | 1.0 | 135306205 | 1833 |
| rs13080570 | 1.0 | 135306463 | 1834 |
| rs9869613 | 0.792 | 135306633 | 1835 |
| rs4450812 | 0.783 | 135307476 | 1836 |
| rs4413311 | 1.0 | 135307512 | 1837 |
| rs4280634 | 1.0 | 135308026 | 1838 |
| rs9869195 | 1.0 | 135312328 | 1839 |
| rs4854818 | 1.0 | 135313451 | 1840 |
| rs13059653 | 1.0 | 135315131 | 1841 |
| rs4552343 | 1.0 | 135324810 | 1842 |
| rs4854825 | 1.0 | 135334692 | 1843 |
| rs10804625 | 0.908 | 135337322 | 1844 |
| rs4241374 | 1.0 | 135339567 | 1845 |
| rs7626852 | 1.0 | 135341358 | 1846 |
| rs9857486 | 1.0 | 135346670 | 1847 |
| rs4077107 | 1.0 | 135347977 | 1848 |
| rs9878348 | 1.0 | 135349426 | 1849 |
| rs4072180 | 0.571 | 135351177 | 1850 |
| rs6776592 | 1.0 | 135352909 | 1851 |
| rs9283588 | 0.9 | 135357264 | 1852 |
| rs13096460 | 0.908 | 135357936 | 1853 |
| rs10935104 | 0.504 | 135365759 | 1854 |
| rs6762690 | 0.536 | 135378819 | 1855 |
| rs6439466 | 0.536 | 135379339 | 1856 |
| rs9853568 | 0.509 | 135388075 | 1857 |
| rs9858450 | 0.536 | 135388784 | 1858 |
| rs13080318 | 0.908 | 135394123 | 1859 |
| rs4682664 | 0.536 | 135402607 | 1860 |
| rs3890774 | 0.535 | 135408504 | 1861 |
| rs9823873 | 0.504 | 135410561 | 1862 |
| rs9839819 | 0.536 | 135413833 | 1863 |
| rs9856792 | 0.536 | 135417147 | 1864 |
| rs1131262 | 0.536 | 135424018 | 1865 |
| rs9832732 | 0.549 | 135425014 | 1866 |
| rs6808085 | 0.536 | 135426703 | 1867 |
| rs9858069 | 0.585 | 135427812 | 1868 |
| rs4682668 | 0.536 | 135431040 | 1869 |
| rs9856298 | 0.536 | 135439963 | 1870 |
| rs9818714 | 0.536 | 135439977 | 1871 |
| rs9289462 | 0.83 | 135473124 | 1872 |
| rs9990248 | 0.83 | 135473446 | 1873 |
| rs9289464 | 0.617 | 135475438 | 1874 |

### Example 65

[0316] For individuals with colorectal cancer, the distribution of polymorphic alleles at position 150158635 of chromosome 3 was different from those without colorectal cancer (Table 65). The trend test for risk associated with carrying the A allele had an empirical p-value of 0.003457 based on permutation analysis, and the corresponding Mantel-Haenszel odds ratio for trend is 1.355 (Table 65). These data further suggest that this marker is associated with colorectal cancer risk and that the A allele at position 150158635 of chromosome 3 is associated with an increased risk of developing colorectal cancer.

TABLE 65

| | |
|---|---|
| rs no. | 12492507 |
| Chromosome; Position | 3; 150158635 |
| Gene Name | unknown |
| Genotype; Phenotype | n = A; increased risk |
| Hardy-Weinberg | 1 |

| Case Flag | Allele B | AA | AB | BB | Model | p-Value | Odds Ratio |
|---|---|---|---|---|---|---|---|
| 0 | A | 919 | 85 | 2 | Trend | 0.003457 | 1.355 |
| 1 | A | 882 | 97 | 18 | | | |

[0317] Table 65A indicates SNPs found to be in strong linkage disequilibrium with rs12492507. To generate this list, correlation coefficients (r²) were calculated between the index SNP and all neighboring SNPs cited in the June 2006 HapMap data set release. An r² cut off of 0.50 was selected for inclusion as evidence for strong genetic linkage, i.e., a “strong linkage disequilibrium.

TABLE 65A
Linked SNPs

| SNP | r² | Position on chr3 | SEQ ID NO |
|---|---|---|---|
| rs12492507 | — | 150158635 | 1875 |
| rs12495888 | 1.0 | 150158710 | 1876 |
| rs17784037 | 1.0 | 150160849 | 1877 |
| rs10513344 | 1.0 | 150161057 | 1878 |
| rs17716800 | 1.0 | 150161649 | 1879 |
| rs17716806 | 1.0 | 150161751 | 1880 |

### Example 66

[0318] For individuals with colorectal cancer, the distribution of polymorphic alleles at position 171033461 of chromosome 3, found within the LOC344657 gene, was different from those without colorectal cancer (Table 66). The dominant test for risk associated with carrying the G allele had an empirical p-value based on permutation analysis of 0.00833, and the corresponding dominant odds ratio is 1.397 (Table 66). These data further suggest that this marker, located within the LOC344657 gene, is associated with colorectal cancer risk and that the G allele at position 171033461 of chromosome 3 is associated with an increased risk of developing colorectal cancer.

TABLE 66

| | |
|---|---|
| rs no. | 12486767 |
| Chromosome; Position | 3; 171033461 |
| Gene Name | LOC344657 |
| SEQ ID NO; Position | 5643; 13650 |
| Genotype; Phenotype | n = G; increased risk |
| Hardy-Weinberg | 0.16753 |

| Case | | | | | | | |
|---|---|---|---|---|---|---|---|
| Flag | Allele B | AA | AB | BB | Model | p-Value | Odds Ratio |
| 0 | G | 170 | 462 | 377 | Dominant | 0.00833 | 1.397 |
| 1 | G | 126 | 469 | 400 | | | |

[0319] Table 66A indicates SNPs found to be in strong linkage disequilibrium with rs12486767. To generate this list, correlation coefficients (r²) were calculated between the index SNP and all neighboring SNPs cited in the June 2006 HapMap data set release. An r² cut off of 0.50 was selected for inclusion as evidence for strong genetic linkage, i.e., a “strong linkage disequilibrium.

TABLE 66A
Linked SNPs

| SNP | r² | Position on chr3 | SEQ ID NO |
|---|---|---|---|
| rs9841443 | 0.691 | 171012778 | 1881 |
| rs6793160 | 0.901 | 171017968 | 1882 |
| rs10936602 | 0.636 | 171019339 | 1883 |
| rs7632991 | 0.636 | 171021314 | 1884 |
| rs1920119 | 0.899 | 171023099 | 1885 |
| rs10936603 | 0.636 | 171028354 | 1886 |
| rs12486767 | — | 171033461 | 1887 |
| rs7647824 | 0.61 | 171035083 | 1888 |
| rs9833035 | 0.61 | 171036200 | 1889 |
| rs4352416 | 0.61 | 171036786 | 1890 |
| rs2421830 | 0.61 | 171036831 | 1891 |
| rs2421829 | 0.61 | 171036966 | 1892 |
| rs3732451 | 1.0 | 171040727 | 1893 |
| rs9831336 | 0.61 | 171041075 | 1894 |
| rs12492588 | 0.623 | 171041413 | 1895 |
| rs12489230 | 0.61 | 171041523 | 1896 |
| rs16854453 | 0.61 | 171041936 | 1897 |
| rs6785618 | 0.619 | 171045499 | 1898 |
| rs11928433 | 0.61 | 171046152 | 1899 |
| rs10049456 | 0.965 | 171046225 | 1900 |
| rs13074500 | 0.608 | 171048273 | 1901 |
| rs9290375 | 1.0 | 171048792 | 1902 |
| rs11717389 | 0.608 | 171048949 | 1903 |
| rs12485940 | 0.61 | 171049943 | 1904 |
| rs16847897 | 0.51 | 171050818 | 1905 |
| rs4955676 | 0.51 | 171051194 | 1906 |
| rs4955677 | 0.502 | 171051212 | 1907 |
| rs6764267 | 0.901 | 171051372 | 1908 |
| rs11709840 | 0.51 | 171052943 | 1909 |
| rs11919269 | 0.534 | 171057167 | 1910 |
| rs1920116 | 0.51 | 171062673 | 1911 |
| rs7647589 | 0.87 | 171064925 | 1912 |
| rs7652654 | 0.615 | 171076328 | 1913 |
| rs7653134 | 0.566 | 171076812 | 1914 |
| rs7614694 | 0.615 | 171078187 | 1915 |
| rs7650849 | 0.615 | 171079610 | 1916 |

### Example 67

[0320] For individuals with colorectal cancer, the distribution of polymorphic alleles at position 185078886 of chromosome 3, found within the PSARL gene, was different from those without colorectal cancer (Table 67). The recessive test for risk associated with carrying the T allele had an empirical p-value of 0.000417 based on permutation analysis, and the corresponding recessive odds ratio is 1.472 (Table 67). These data further suggest that this marker, located within the PSARL gene, is associated with colorectal cancer risk and that the T allele at position 185078886 of chromosome 3 is associated with an increased risk of developing colorectal cancer.

TABLE 67

| | |
|---|---|
| rs no. | 7644746 |
| Chromosome; Position | 3; 185078886 |
| Gene Name | PSARL |
| SEQ ID NO; Position | 5644; 6476 |
| Genotype; Phenotype | n = T; increased risk |
| Hardy-Weinberg | 0.00143 |

| Case | | | | | | | Odds |
|---|---|---|---|---|---|---|---|
| Flag | Allele B | AA | AB | BB | Model | p-Value | Ratio |
| 0 | T | 275 | 547 | 180 | Recessive | 0.000417 | 1.472 |
| 1 | T | 290 | 467 | 244 | | | |

[0321] Table 67A indicates SNPs found to be in strong linkage disequilibrium with rs7644746. To generate this list, correlation coefficients (r²) were calculated between the index SNP and all neighboring SNPs cited in the June 2006 HapMap data set release. An r² cut off of 0.50 was selected for inclusion as evidence for strong genetic linkage, i.e., a “strong linkage disequilibrium.

TABLE 67A
Linked SNPs

| SNP | r² | Position on chr3 | SEQ ID NO |
|---|---|---|---|
| rs9844162 | 0.577 | 185023187 | 1917 |
| rs262998 | 0.535 | 185033825 | 1918 |
| rs9866941 | 0.651 | 185037776 | 1919 |
| rs3732581 | 0.715 | 185041104 | 1920 |
| rs3811725 | 0.687 | 185044978 | 1921 |
| rs3811724 | 0.658 | 185045230 | 1922 |
| rs9844777 | 0.535 | 185049644 | 1923 |
| rs6808482 | 0.691 | 185050091 | 1924 |
| rs7640729 | 0.66 | 185051283 | 1925 |
| rs6443911 | 0.691 | 185052327 | 1926 |
| rs13317769 | 0.521 | 185054365 | 1927 |
| rs6775202 | 0.691 | 185059302 | 1928 |
| rs6809370 | 0.688 | 185060606 | 1929 |
| rs1554397 | 0.535 | 185063452 | 1930 |
| rs7648408 | 0.756 | 185076469 | 1931 |
| rs7644746 | — | 185078886 | 1932 |
| rs9290776 | 0.691 | 185080700 | 1933 |
| rs2056332 | 0.691 | 185084200 | 1934 |
| rs9844684 | 0.669 | 185090462 | 1935 |
| rs2176827 | 0.635 | 185095158 | 1936 |
| rs1317772 | 0.669 | 185098798 | 1937 |
| rs9847536 | 0.669 | 185103116 | 1938 |
| rs9848311 | 0.669 | 185103429 | 1939 |
| rs1464323 | 0.515 | 185107149 | 1940 |

### Example 68

[0322] For individuals with colorectal cancer, the distribution of polymorphic alleles at position 189622331 of chromosome 3, found within the LPP gene, was different from those without colorectal cancer (Table 68). The trend test for risk associated with carrying the G allele had an empirical p-value of 0.016373 based on permutation analysis, and the corresponding Mantel-Haenszel odds ratio for trend is 1.174 (Table 68). These data further suggest that this marker, located within the LPP gene, is associated with colorectal cancer risk and that the G allele at position 189622331 of chromosome 3 is associated with an increased risk of developing colorectal cancer.

TABLE 68

| | |
|---|---|
| rs no. | 6789800 |
| Chromosome; Position | 3; 189622331 |
| Gene Name | LPP |
| SEQ ID NO; Position | 5645; 208909 |
| Genotype; Phenotype | n = G; increased risk |
| Hardy-Weinberg | 0.45338 |

| Case | | | | | | | |
|---|---|---|---|---|---|---|---|
| Flag | Allele B | AA | AB | BB | Model | p-Value | Odds Ratio |
| 0 | G | 542 | 423 | 92 | Trend | 0.016373 | 1.174 |
| 1 | G | 444 | 402 | 106 | | | |

[0323] Table 68A indicates SNPs found to be in strong linkage disequilibrium with rs6789800. To generate this list, correlation coefficients (r²) were calculated between the index SNP and all neighboring SNPs cited in the June 2006 HapMap data set release. An r² cut off of 0.50 was selected for inclusion as evidence for strong genetic linkage, i.e., a “strong linkage disequilibrium.

TABLE 68A
Linked SNPs

| SNP | r² | Position on chr3 | SEQ ID NO |
|---|---|---|---|
| rs6789800 | — | 189622331 | 1941 |
| rs4122385 | 0.959 | 189623355 | 1942 |
| rs6765695 | 0.959 | 189629883 | 1943 |
| rs9862474 | 0.918 | 189629976 | 1944 |
| rs7624965 | 0.959 | 189631928 | 1945 |
| rs7649407 | 0.918 | 189632288 | 1946 |
| rs13080560 | 0.957 | 189633762 | 1947 |
| rs9851525 | 0.957 | 189635008 | 1948 |
| rs9882818 | 0.918 | 189639419 | 1949 |
| rs2162259 | 0.959 | 189644408 | 1950 |
| rs9865055 | 0.959 | 189648322 | 1951 |
| rs7609720 | 0.959 | 189651406 | 1952 |
| rs7621433 | 0.959 | 189651573 | 1953 |

### Example 69

[0324] For individuals with colorectal cancer, the distribution of polymorphic alleles at position 17011072 of chromosome 4 was different from those without colorectal cancer (Table 69). The trend test for risk associated with carrying the C allele had an empirical p-value of 0.004052 based on permutation analysis, and the corresponding Mantel-Haenszel odds ratio for trend is 1.227 (Table 69). These data further suggest that this marker is associated with colorectal cancer risk and that the C allele at position 17011072 of chromosome 4 is associated with an increased risk of developing colorectal cancer.

TABLE 69

| | |
|---|---|
| rs no. | 16894896 |
| Chromosome; Position | 4; 17011072 |
| Gene Name | unknown |
| Genotype; Phenotype | n = C; increased risk |
| Hardy-Weinberg | 0.18458 |

| Case | | | | | | | |
|---|---|---|---|---|---|---|---|
| Flag | Allele B | AA | AB | BB | Model | p-Value | Odds Ratio |
| 0 | C | 62 | 344 | 603 | Trend | 0.004052 | 1.227 |
| 1 | C | 37 | 314 | 647 | | | |

[0325] Table 69A indicates SNPs found to be in strong linkage disequilibrium with rs16894896. To generate this list, correlation coefficients (r²) were calculated between the index SNP and all neighboring SNPs cited in the June 2006 HapMap data set release. An r² cut off of 0.50 was selected for inclusion as evidence for strong genetic linkage, i.e., a “strong linkage disequilibrium.

TABLE 69A
Linked SNPs

| SNP | r² | Position on chr4 | SEQ ID NO |
|---|---|---|---|
| rs16894896 | — | 17011072 | 1954 |
| rs16894897 | 0.895 | 17011296 | 1955 |
| rs7442366 | 0.876 | 17011857 | 1956 |
| rs1830381 | 0.895 | 17012061 | 1957 |
| rs12642427 | 1.0 | 17012868 | 1958 |
| rs10003191 | 0.608 | 17013194 | 1959 |
| rs16894917 | 0.832 | 17020761 | 1960 |
| rs1830374 | 0.832 | 17028536 | 1961 |
| rs12649443 | 0.809 | 17029094 | 1962 |
| rs16894937 | 0.832 | 17031066 | 1963 |
| rs12650437 | 0.832 | 17032854 | 1964 |
| rs12651615 | 0.696 | 17036401 | 1965 |
| rs10516309 | 0.696 | 17036875 | 1966 |
| rs16894953 | 0.696 | 17037383 | 1967 |
| rs2314958 | 0.696 | 17038178 | 1968 |
| rs4235386 | 0.696 | 17038456 | 1969 |
| rs10516310 | 0.696 | 17040989 | 1970 |
| rs12651322 | 0.623 | 17041183 | 1971 |
| rs16894976 | 0.696 | 17042057 | 1972 |
| rs921371 | 0.623 | 17049030 | 1973 |
| rs16895007 | 0.832 | 17051325 | 1974 |
| rs12643829 | 0.592 | 17056406 | 1975 |
| rs4698581 | 0.592 | 17057986 | 1976 |
| rs4698184 | 0.592 | 17058442 | 1977 |

### Example 70

[0326] For individuals with colorectal cancer, the distribution of polymorphic alleles at position 84526533 of chromosome 4, found within the LOC391674 gene, was different from those without colorectal cancer (Table 70). The dominant test for risk associated with carrying the A allele had an empirical p-value based on permutation analysis of 0.007788, and the corresponding dominant odds ratio is 1.998 (Table 70). These data further suggest that this marker, located within the LOC391674 gene, is associated with colorectal cancer risk and that the A allele at position 84526533 of chromosome 4 is associated with an increased risk of developing colorectal cancer.

TABLE 70

| | rs no. | | | | 10031382 | | |
|---|---|---|---|---|---|---|---|
| | Chromosome; Position | | | | 4; 84526533 | | |
| | Gene Name | | | | LOC391674 | | |
| | SEQ ID NO; Position | | | | 5646; 1023 | | |
| | Genotype; Phenotype | | | | n = A; increased risk | | |
| | Hardy-Weinberg | | | | 0.84824 | | |
| Case | | | | | | | Odds |
| Flag | Allele B | AA | AB | BB | Model | p-Value | Ratio |
| 0 | A | 44 | 328 | 629 | Dominant | 0.007788 | 1.998 |
| 1 | A | 22 | 333 | 623 | | | |

[0327] Table 70A indicates SNPs found to be in strong linkage disequilibrium with rs10031382. To generate this list, correlation coefficients (r²) were calculated between the index SNP and all neighboring SNPs cited in the June 2006 HapMap data set release. An r² cut off of 0.50 was selected for inclusion as evidence for strong genetic linkage, i.e., a “strong linkage disequilibrium.

TABLE 70A
Linked SNPs

| SNP | r² | Position on chr4 | SEQ ID NO |
|---|---|---|---|
| rs11099581 | 0.522 | 84499813 | 1978 |
| rs6856697 | 0.522 | 84500768 | 1979 |
| rs6852031 | 0.522 | 84500972 | 1980 |
| rs4693594 | 0.522 | 84501804 | 1981 |
| rs11099583 | 0.528 | 84503554 | 1982 |
| rs6535445 | 0.576 | 84508606 | 1983 |
| rs13122305 | 0.572 | 84510152 | 1984 |
| rs7684212 | 0.572 | 84511612 | 1985 |
| rs6816988 | 1.0 | 84519523 | 1986 |
| rs4290885 | 1.0 | 84519694 | 1987 |
| rs4637393 | 0.951 | 84525763 | 1988 |
| rs4396979 | 1.0 | 84525832 | 1989 |
| rs10031382 | — | 84526533 | 1990 |
| rs6848459 | 0.948 | 84527258 | 1991 |
| rs6847179 | 1.0 | 84527315 | 1992 |
| rs11944281 | 0.942 | 84528586 | 1993 |
| rs10026779 | 1.0 | 84529026 | 1994 |
| rs10004019 | 1.0 | 84529399 | 1995 |
| rs10027145 | 1.0 | 84529437 | 1996 |
| rs10029426 | 1.0 | 84529578 | 1997 |
| rs7356196 | 0.651 | 84530283 | 1998 |
| rs7356201 | 0.95 | 84530423 | 1999 |
| rs6825902 | 0.677 | 84531290 | 2000 |
| rs10002954 | 1.0 | 84534358 | 2001 |
| rs7667017 | 0.666 | 84536250 | 2002 |
| rs6535450 | 1.0 | 84536659 | 2003 |
| rs6535451 | 0.666 | 84536797 | 2004 |
| rs6813311 | 1.0 | 84536876 | 2005 |
| rs9999909 | 0.601 | 84539894 | 2006 |
| rs4515150 | 0.639 | 84541948 | 2007 |
| rs4693596 | 0.507 | 84547048 | 2008 |
| rs4693597 | 0.618 | 84547093 | 2009 |
| rs6535454 | 0.713 | 84548210 | 2010 |
| rs4693075 | 0.507 | 84549347 | 2011 |
| rs4693602 | 0.568 | 84570798 | 2012 |
| rs10025120 | 0.535 | 84574120 | 2013 |
| rs12503843 | 0.563 | 84578598 | 2014 |

### Example 71

[0328] For individuals with colorectal cancer, the distribution of polymorphic alleles at position 96582519 of chromosome 4, found within the UNC5C gene, was different from those without colorectal cancer (Table 71). The dominant test for risk associated with carrying the G allele had an empirical p-value based on permutation analysis of 0.007659, and the corresponding dominant odds ratio is 1.407 (Table 71). These data further suggest that this marker, located within the UNC5C gene, is associated with colorectal cancer risk and that the G allele at position 96582519 of chromosome 4 is associated with an increased risk of developing colorectal cancer.

TABLE 71

| | rs no. | | | | 10049501 | | |
|---|---|---|---|---|---|---|---|
| | Chromosome; Position | | | | 4; 96582519 | | |
| | Gene Name | | | | UNC5C | | |
| | SEQ ID NO; Position | | | | 5647; 244822 | | |
| | Genotype; Phenotype | | | | n = G; increased risk | | |
| | Hardy-Weinberg | | | | 0.12799 | | |
| Case | | | | | | | Odds |
| Flag | Allele B | AA | AB | BB | Model | p-Value | Ratio |
| 0 | G | 165 | 457 | 389 | Dominant | 0.007659 | 1.407 |
| 1 | G | 122 | 496 | 384 | | | |

[0329] Table 71A indicates SNPs found to be in strong linkage disequilibrium with rs10049501. To generate this list, correlation coefficients (r²) were calculated between the index SNP and all neighboring SNPs cited in the June 2006 HapMap data set release. An r² cut off of 0.50 was selected for inclusion as evidence for strong genetic linkage, i.e., a “strong linkage disequilibrium.

TABLE 71A
Linked SNPs

| SNP | r² | Position on chr4 | SEQ ID NO |
|---|---|---|---|
| rs4699847 | 0.892 | 96577385 | 2015 |
| rs1531866 | 1.0 | 96582377 | 2016 |
| rs10049501 | — | 96582519 | 2017 |
| rs4699850 | 0.854 | 96583132 | 2018 |
| rs6848737 | 1.0 | 96584178 | 2019 |
| rs1483735 | 0.926 | 96592699 | 2020 |
| rs2626033 | 0.922 | 96599702 | 2021 |
| rs2621459 | 0.591 | 96651424 | 2022 |

### Example 72

[0330] For individuals with colorectal cancer, the distribution of polymorphic alleles at position 99867911 of chromosome 4, found within the TM4SF9 gene, was different from those without colorectal cancer (Table 72). The trend test for risk associated with carrying the G allele had an empirical p-value of 0.008867 based on permutation analysis, and the corresponding Mantel-Haenszel odds ratio for trend is 1.204 (Table 72). These data further suggest that this marker, located within the TM4SF9 gene, is associated with colorectal cancer risk and that the G allele at position 99867911 of chromosome 4 is associated with an increased risk of developing colorectal cancer.

TABLE 72

| | |
|---|---|
| rs no. | 4699354 |
| Chromosome; Position | 4; 99867911 |
| Gene Name | TM4SF9 |
| SEQ ID NO; Position | 5648; 68995 |
| Genotype; Phenotype | n = G; increased risk |
| Hardy-Weinberg | 0.04589 |

| Case | | | | | | | |
|---|---|---|---|---|---|---|---|
| Flag | Allele B | AA | AB | BB | Model | p-Value | Odds Ratio |
| 0 | G | 111 | 491 | 409 | Trend | 0.008867 | 1.204 |
| 1 | G | 91 | 446 | 461 | | | |

[0331] Table 72A indicates SNPs found to be in strong linkage disequilibrium with rs4699354. To generate this list, correlation coefficients (r²) were calculated between the index SNP and all neighboring SNPs cited in the June 2006 HapMap data set release. An r² cut off of 0.50 was selected for inclusion as evidence for strong genetic linkage, i.e., a “strong linkage disequilibrium.

TABLE 72A
Linked SNPs

| SNP | r² | Position on chr4 | SEQ ID NO |
|---|---|---|---|
| rs13108940 | 0.584 | 99799667 | 2023 |
| rs4699639 | 0.584 | 99801210 | 2024 |
| rs4699640 | 0.584 | 99801320 | 2025 |
| rs4699343 | 0.613 | 99803666 | 2026 |
| rs10002696 | 0.584 | 99807848 | 2027 |
| rs10025051 | 0.584 | 99807964 | 2028 |
| rs10006366 | 0.584 | 99809387 | 2029 |
| rs4699644 | 0.581 | 99814723 | 2030 |
| rs2037832 | 0.584 | 99816706 | 2031 |
| rs6532742 | 0.526 | 99819712 | 2032 |
| rs1919211 | 0.641 | 99821167 | 2033 |
| rs4699650 | 0.614 | 99823508 | 2034 |
| rs4699345 | 0.671 | 99823684 | 2035 |
| rs6532748 | 0.641 | 99825745 | 2036 |
| rs6831643 | 0.541 | 99833465 | 2037 |
| rs4699348 | 0.563 | 99833656 | 2038 |
| rs6837359 | 0.553 | 99833736 | 2039 |
| rs11730384 | 0.72 | 99834522 | 2040 |
| rs13134231 | 0.641 | 99834590 | 2041 |
| rs13141997 | 0.526 | 99835934 | 2042 |
| rs10018825 | 0.552 | 99836081 | 2043 |
| rs13149070 | 0.582 | 99836862 | 2044 |
| rs2866017 | 0.532 | 99837966 | 2045 |
| rs7672134 | 0.551 | 99839510 | 2046 |
| rs10021296 | 0.565 | 99840416 | 2047 |
| rs4699349 | 0.578 | 99844135 | 2048 |
| rs1534555 | 0.611 | 99845490 | 2049 |
| rs1573478 | 0.629 | 99845547 | 2050 |
| rs7678323 | 0.732 | 99846346 | 2051 |
| rs2156504 | 0.541 | 99847490 | 2052 |
| rs7691465 | 0.719 | 99848365 | 2053 |
| rs7669964 | 0.533 | 99851756 | 2054 |
| rs6532751 | 0.736 | 99854723 | 2055 |
| rs6844261 | 0.58 | 99855858 | 2056 |
| rs2866016 | 0.772 | 99861413 | 2057 |
| rs1358548 | 0.663 | 99861813 | 2058 |
| rs4699353 | 0.859 | 99866311 | 2059 |
| rs1893714 | 0.84 | 99867457 | 2060 |
| rs4699354 | — | 99867911 | 2061 |
| rs11943162 | 0.735 | 99878073 | 2062 |
| rs846011 | 0.555 | 99884270 | 2063 |

### Example 73

[0332] For individuals with colorectal cancer, the distribution of polymorphic alleles at position 126409942 of chromosome 4 was different from those without colorectal cancer (Table 73). The dominant test for risk associated with carrying the T allele had an empirical p-value based on permutation analysis of 0.011165, and the corresponding dominant odds ratio is 1.263 (Table 73). These data further suggest that this marker is associated with colorectal cancer risk and that the T allele at position 126409942 of chromosome 4 is associated with an increased risk of developing colorectal cancer.

TABLE 73

| | |
|---|---|
| rs no. | 4602510 |
| Chromosome; Position | 4; 126409942 |
| Gene Name | unknown |
| Genotype; Phenotype | n = T; increased risk |
| Hardy-Weinberg | 0.50016 |

| Case | | | | | | | |
|---|---|---|---|---|---|---|---|
| Flag | Allele B | AA | AB | BB | Model | p-Value | Odds Ratio |
| 0 | T | 616 | 334 | 39 | Dominant | 0.011165 | 1.263 |
| 1 | T | 552 | 377 | 45 | | | |

[0333] Table 73A indicates SNPs found to be in strong linkage disequilibrium with rs4602510. To generate this list, correlation coefficients (r²) were calculated between the index SNP and all neighboring SNPs cited in the June 2006 HapMap data set release. An r² cut off of 0.50 was selected for inclusion as evidence for strong genetic linkage, i.e., a “strong linkage disequilibrium.

TABLE 73A
Linked SNPs

| SNP | r² | Position on chr4 | SEQ ID NO |
|---|---|---|---|
| rs11727262 | 0.505 | 126362489 | 2064 |
| rs7671598 | 0.744 | 126379394 | 2065 |
| rs3956574 | 1.0 | 126396940 | 2066 |
| rs7663176 | 1.0 | 126407660 | 2067 |
| rs4602510 | — | 126409942 | 2068 |
| rs12506923 | 0.557 | 126416826 | 2069 |
| rs6827948 | 1.0 | 126418374 | 2070 |
| rs7436951 | 0.532 | 126430383 | 2071 |
| rs4323122 | 0.504 | 126487544 | 2072 |
| rs4130331 | 0.504 | 126490716 | 2073 |
| rs12504284 | 0.504 | 126493527 | 2074 |
| rs7685639 | 0.504 | 126495757 | 2075 |

### Example 74

[0334] For individuals with colorectal cancer, the distribution of polymorphic alleles at position 136887132 of chromosome 4 was different from those without colorectal cancer (Table 74). The trend test for risk associated with carrying the A allele had an empirical p-value of 0.001659 based on permutation analysis, and the corresponding Mantel-Haenszel odds ratio for trend is 1.368 (Table 74). These data further suggest that this marker is associated with colorectal cancer risk and that the A allele at position 136887132 of chromosome 4 is associated with an increased risk of developing colorectal cancer.

TABLE 74

| | |
|---|---|
| rs no. | 13119704 |
| Chromosome; Position | 4; 136887132 |
| Gene Name | unknown |
| Genotype; Phenotype | n = A; increased risk |
| Hardy-Weinberg | 0.49262 |

| Case | | | | | | | Odds |
|---|---|---|---|---|---|---|---|
| Flag | Allele B | AA | AB | BB | Model | p-Value | Ratio |
| 0 | A | 825 | 192 | 8 | Trend | 0.001659 | 1.368 |
| 1 | A | 687 | 217 | 14 | | | |

[0335] Table 74A indicates SNPs found to be in strong linkage disequilibrium with rs13119704. To generate this list, correlation coefficients (r²) were calculated between the index SNP and all neighboring SNPs cited in the June 2006 HapMap data set release. An r² cut off of 0.50 was selected for inclusion as evidence for strong genetic linkage, i.e., a “strong linkage disequilibrium.

TABLE 74A
Linked SNPs

| SNP | r² | Position on chr4 | SEQ ID NO |
|---|---|---|---|
| rs13112718 | 1.0 | 136880552 | 2076 |
| rs13121021 | 0.866 | 136881968 | 2077 |
| rs13123737 | 0.679 | 136883623 | 2078 |
| rs13105113 | 1.0 | 136885451 | 2079 |
| rs13112384 | 1.0 | 136886076 | 2080 |
| rs13119704 | — | 136887132 | 2081 |
| rs13109435 | 1.0 | 136889055 | 2082 |
| rs13135110 | 1.0 | 136889443 | 2083 |
| rs13116984 | 1.0 | 136890103 | 2084 |
| rs1847587 | 1.0 | 136890876 | 2085 |
| rs7655912 | 1.0 | 136893449 | 2086 |
| rs16998224 | 1.0 | 136897722 | 2087 |
| rs13124412 | 0.867 | 136900288 | 2088 |
| rs7685332 | 0.762 | 136900741 | 2089 |
| rs905772 | 1.0 | 136901146 | 2090 |
| rs17047996 | 1.0 | 136902550 | 2091 |

### Example 75

[0336] For individuals with colorectal cancer, the distribution of polymorphic alleles at position 141745922 of chromosome 4, found within the LOC152586 gene, was different from those without colorectal cancer (Table 75). The recessive test for risk associated with carrying the C allele had an empirical p-value of 0.000871 based on permutation analysis, and the corresponding recessive odds ratio is 1.457 (Table 75). These data further suggest that this marker, located within the LOC152586 gene, is associated with colorectal cancer risk and that the C allele at position 141745922 of chromosome 4 is associated with an increased risk of developing colorectal cancer.

TABLE 75

| | |
|---|---|
| rs no. | 1431346 |
| Chromosome; Position | 4; 141745922 |
| Gene Name | LOC152586 |
| SEQ ID NO; Position | 5649; 31208 |
| Genotype; Phenotype | n = C; increased risk |
| Hardy-Weinberg | 0.10984 |

| Case | | | | | | | Odds |
|---|---|---|---|---|---|---|---|
| Flag | Allele B | AA | AB | BB | Model | p-Value | Ratio |
| 0 | C | 10 | 218 | 670 | Recessive | 0.000871 | 1.457 |
| 1 | C | 10 | 167 | 758 | | | |

[0337] Table 75A indicates SNPs found to be in strong linkage disequilibrium with rs1431346. To generate this list, correlation coefficients (r²) were calculated between the index SNP and all neighboring SNPs cited in the June 2006 HapMap data set release. An r² cut off of 0.50 was selected for inclusion as evidence for strong genetic linkage, i.e., a “strong linkage disequilibrium.

TABLE 75A
Linked SNPs

| SNP | r² | Position on chr4 | SEQ ID NO |
|---|---|---|---|
| rs6844879 | 0.565 | 141738039 | 2092 |
| rs17005968 | 0.549 | 141743060 | 2093 |
| rs1431346 | — | 141745922 | 2094 |
| rs7662837 | 0.901 | 141757671 | 2095 |
| rs1431336 | 0.891 | 141759797 | 2096 |
| rs6851261 | 0.901 | 141760063 | 2097 |
| rs2321267 | 0.879 | 141761604 | 2098 |
| rs2321268 | 0.9 | 141761653 | 2099 |
| rs7681722 | 0.891 | 141762517 | 2100 |
| rs10519560 | 0.901 | 141766929 | 2101 |
| rs10519561 | 0.901 | 141767297 | 2102 |
| rs10519562 | 0.901 | 141767342 | 2103 |
| rs7670320 | 0.901 | 141767856 | 2104 |
| rs10857384 | 0.521 | 141769735 | 2105 |
| rs7688115 | 0.901 | 141775917 | 2106 |
| rs2270564 | 0.901 | 141776879 | 2107 |
| rs16998469 | 0.891 | 141818775 | 2108 |
| rs6818701 | 0.901 | 141826174 | 2109 |
| rs3811790 | 0.504 | 141849181 | 2110 |

### Example 76

[0338] For individuals with colorectal cancer, the distribution of polymorphic alleles at position 174207198 of chromosome 4, found within the LOC442117 gene, was different from those without colorectal cancer (Table 76). The recessive test for risk associated with carrying the G allele had an empirical p-value of 0.006454 based on permutation analysis, and the corresponding recessive odds ratio is 1.298 (Table 76). These data further suggest that this marker, located within the LOC442117 gene, is associated with colorectal cancer risk and that the G allele at position 174207198 of chromosome 4 is associated with an increased risk of developing colorectal cancer.

TABLE 76

| | |
|---|---|
| rs no. | 2610201 |
| Chromosome; Position | 4; 174207198 |
| Gene Name | LOC442117 |
| SEQ ID NO; Position | 5650; 102084 |
| Genotype; Phenotype | n = G; increased risk |
| Hardy-Weinberg | 0.20446 |

| Case | | | | | | | Odds |
|---|---|---|---|---|---|---|---|
| Flag | Allele B | AA | AB | BB | Model | p-Value | Ratio |
| 0 | G | 35 | 332 | 597 | Recessive | 0.006454 | 1.298 |
| 1 | G | 32 | 275 | 648 | | | |

[0339] Table 76A indicates SNPs found to be in strong linkage disequilibrium with rs2610201. To generate this list, correlation coefficients (r²) were calculated between the index SNP and all neighboring SNPs cited in the June 2006 HapMap data set release. An r² cut off of 0.50 was selected for inclusion as evidence for strong genetic linkage, i.e., a “strong linkage disequilibrium.

TABLE 76A
Linked SNPs

| SNP | r² | Position on chr4 | SEQ ID NO |
|---|---|---|---|
| rs13348095 | 0.725 | 174180260 | 2111 |
| rs2653824 | 0.955 | 174197301 | 2112 |
| rs2653825 | 0.955 | 174197751 | 2113 |
| rs17319267 | 0.864 | 174198513 | 2114 |
| rs2610204 | 1.0 | 174199345 | 2115 |
| rs2610201 | — | 174207198 | 2116 |
| rs1459153 | 1.0 | 174216579 | 2117 |
| rs17319595 | 0.657 | 174218180 | 2118 |
| rs7678191 | 0.538 | 174223753 | 2119 |
| rs2653831 | 0.652 | 174224227 | 2120 |
| rs10520249 | 0.618 | 174225158 | 2121 |
| rs2610188 | 0.607 | 174232525 | 2122 |
| rs12641678 | 0.58 | 174234640 | 2123 |
| rs6852770 | 0.573 | 174238245 | 2124 |
| rs2653844 | 0.618 | 174239858 | 2125 |
| rs17254079 | 0.607 | 174243021 | 2126 |

### Example 77

[0340] For individuals with colorectal cancer, the distribution of polymorphic alleles at position 33086350 of chromosome 5 was different from those without colorectal cancer (Table 77). The dominant test for risk associated with carrying the G allele had an empirical p-value based on permutation analysis of 0.008186, and the corresponding dominant odds ratio is 1.332 (Table 77). These data further suggest that this marker is associated with colorectal cancer risk and that the G allele at position 33086350 of chromosome 5 is associated with an increased risk of developing colorectal cancer.

TABLE 77

| | |
|---|---|
| rs no. | 3909867 |
| Chromosome; Position | 5; 33086350 |
| Gene Name | unknown |
| Genotype; Phenotype | n = G; increased risk |
| Hardy-Weinberg | 0.01967 |

| Case | | | | | | | Odds |
|---|---|---|---|---|---|---|---|
| Flag | Allele B | AA | AB | BB | Model | p-Value | Ratio |
| 0 | G | 814 | 178 | 19 | Dominant | 0.008186 | 1.332 |
| 1 | G | 757 | 222 | 22 | | | |

[0341] Table 77A indicates SNPs found to be in strong linkage disequilibrium with rs3909867. To generate this list, correlation coefficients (r²) were calculated between the index SNP and all neighboring SNPs cited in the June 2006 HapMap data set release. An r² cut off of 0.50 was selected for inclusion as evidence for strong genetic linkage, i.e., a “strong linkage disequilibrium.

TABLE 77A
Linked SNPs

| SNP | r² | Position on chr5 | SEQ ID NO |
|---|---|---|---|
| rs17449766 | 0.518 | 33068424 | 2127 |
| rs3849702 | 0.527 | 33073250 | 2128 |
| rs7717608 | 0.526 | 33074880 | 2129 |
| rs7736123 | 0.527 | 33075144 | 2130 |
| rs1896648 | 0.54 | 33079303 | 2131 |
| rs1366265 | 0.527 | 33079972 | 2132 |
| rs9292479 | 0.559 | 33085376 | 2133 |
| rs9885222 | 0.527 | 33085473 | 2134 |
| rs13362102 | 1.0 | 33085951 | 2135 |
| rs13357779 | 1.0 | 33086064 | 2136 |
| rs3909867 | — | 33086350 | 2137 |
| rs13361251 | 1.0 | 33087719 | 2138 |
| rs13354580 | 1.0 | 33088172 | 2139 |
| rs13359120 | 1.0 | 33088550 | 2140 |
| rs1582920 | 1.0 | 33089676 | 2141 |
| rs13360237 | 1.0 | 33089910 | 2142 |
| rs10074444 | 1.0 | 33091405 | 2143 |
| rs10074451 | 1.0 | 33091437 | 2144 |
| rs10074513 | 1.0 | 33091499 | 2145 |
| rs6870782 | 0.546 | 33114163 | 2146 |
| rs1813207 | 0.546 | 33115099 | 2147 |
| rs1319324 | 0.546 | 33115311 | 2148 |
| rs6871174 | 0.546 | 33117602 | 2149 |
| rs6872810 | 0.521 | 33118498 | 2150 |
| rs6859404 | 0.546 | 33121271 | 2151 |
| rs767344 | 0.546 | 33122149 | 2152 |
| rs4568374 | 0.546 | 33142786 | 2153 |
| rs6886558 | 0.524 | 33155568 | 2154 |
| rs6886601 | 0.546 | 33155668 | 2155 |
| rs4397140 | 0.546 | 33174152 | 2156 |
| rs10043142 | 0.52 | 33180167 | 2157 |
| rs9292484 | 0.546 | 33189004 | 2158 |
| rs6889270 | 0.524 | 33204171 | 2159 |
| rs6859917 | 0.596 | 33205864 | 2160 |
| rs10044411 | 0.679 | 33212781 | 2161 |
| rs10041597 | 0.679 | 33213163 | 2162 |
| rs10060905 | 0.679 | 33214982 | 2163 |
| rs10073022 | 0.513 | 33226224 | 2164 |
| rs10057997 | 0.628 | 33226311 | 2165 |
| rs13436219 | 0.569 | 33230214 | 2166 |

### Example 78

[0342] For individuals with colorectal cancer, the distribution of polymorphic alleles at position 34830429 of chromosome 5, found within the RAI14 gene, was different from those without colorectal cancer (Table 78). The recessive test for risk associated with carrying the A allele had an empirical p-value of 0.001639 based on permutation analysis, and the corresponding recessive odds ratio is 3.515 (Table 78). These data further suggest that this marker, located within the RAI14 gene, is associated with colorectal cancer risk and that the A allele at position 34830429 of chromosome 5 is associated with an increased risk of developing colorectal cancer.

TABLE 78

| | |
|---|---|
| rs no. | 10045171 |
| Chromosome; Position | 5; 34830429 |
| Gene Name | RAI14 |
| SEQ ID NO; Position | 5651; 138155 |
| Genotype; Phenotype | n = A; increased risk |
| Hardy-Weinberg | 0.00072 |

| Case | | | | | | | Odds |
|---|---|---|---|---|---|---|---|
| Flag | Allele B | AA | AB | BB | Model | p-Value | Ratio |
| 0 | A | 685 | 254 | 7 | Recessive | 0.001639 | 3.515 |
| 1 | A | 675 | 241 | 24 | | | |

[0343] Table 78A indicates SNPs found to be in strong linkage disequilibrium with rs10045171. To generate this list, correlation coefficients (r²) were calculated between the index SNP and all neighboring SNPs cited in the June 2006 HapMap data set release. An r² cut off of 0.50 was selected for inclusion as evidence for strong genetic linkage, i.e., a “strong linkage disequilibrium.

TABLE 78A
Linked SNPs

| SNP | r² | Position on chr5 | SEQ ID NO |
|---|---|---|---|
| rs10056835 | 0.539 | 34794058 | 2167 |
| rs10045449 | 0.555 | 34797450 | 2168 |
| rs6874651 | 0.646 | 34807222 | 2169 |
| rs10045171 | — | 34830429 | 2170 |

### Example 79

[0344] For individuals with colorectal cancer, the distribution of polymorphic alleles at position 53419665 of chromosome 5, found within the ARFRP2 gene, was different from those without colorectal cancer (Table 79). The dominant test for risk associated with carrying the A allele had an empirical p-value based on permutation analysis of 0.00013, and the corresponding dominant odds ratio is 1.663 (Table 79). These data further suggest that this marker, located within the ARFRP2 gene, is associated with colorectal cancer risk and that the A allele at position 53419665 of chromosome 5 is associated with an increased risk of developing colorectal cancer.

TABLE 79

| | |
|---|---|
| rs no. | 448666 |
| Chromosome; Position | 5; 53419665 |
| Gene Name | ARFRP2 |
| SEQ ID NO; Position | 5652; 222496 |
| Genotype; Phenotype | n = A; increased risk |
| Hardy-Weinberg | 0.56413 |

| Case | | | | | | | Odds |
|---|---|---|---|---|---|---|---|
| Flag | Allele B | AA | AB | BB | Model | p-Value | Ratio |
| 0 | A | 821 | 103 | 4 | Dominant | 0.00013 | 1.663 |
| 1 | A | 752 | 160 | 3 | | | |

[0345] Table 79A indicates SNPs found to be in strong linkage disequilibrium with rs448666. To generate this list, correlation coefficients (r²) were calculated between the index SNP and all neighboring SNPs cited in the June 2006 HapMap data set release. An r² cut off of 0.50 was selected for inclusion as evidence for strong genetic linkage, i.e., a “strong linkage disequilibrium.

TABLE 79A
Linked SNPs

| SNP | r² | Position on chr5 | SEQ ID NO |
|---|---|---|---|
| rs6875937 | 0.867 | 53410335 | 2171 |
| rs6896454 | 0.867 | 53410896 | 2172 |
| rs9686938 | 0.867 | 53415059 | 2173 |
| rs7709659 | 0.867 | 53418196 | 2174 |
| rs448666 | — | 53419665 | 2175 |
| rs440325 | 1.0 | 53420578 | 2176 |

### Example 80

[0346] For individuals with colorectal cancer, the distribution of polymorphic alleles at position 53708606 of chromosome 5 was different from those without colorectal cancer (Table 80). The dominant test for risk associated with carrying the C allele had an empirical p-value based on permutation analysis of 0.011736, and the corresponding dominant odds ratio is 1.271 (Table 80). These data further suggest that this marker is associated with colorectal cancer risk and that the C allele at position 53708606 of chromosome 5 is associated with an increased risk of developing colorectal cancer.

TABLE 80

| | |
|---|---|
| rs no. | 12515791 |
| Chromosome; Position | 5; 53708606 |
| Gene Name | unknown |
| Genotype; Phenotype | n = C; increased risk |
| Hardy-Weinberg | 0.05730 |

| Case | | | | | | | Odds |
|---|---|---|---|---|---|---|---|
| Flag | Allele B | AA | AB | BB | Model | p-Value | Ratio |
| 0 | C | 378 | 483 | 197 | Dominant | 0.011736 | 1.271 |
| 1 | C | 290 | 479 | 184 | | | |

[0347] Table 80A indicates SNPs found to be in strong linkage disequilibrium with rs12515791. To generate this list, correlation coefficients (r²) were calculated between the index SNP and all neighboring SNPs cited in the June 2006 HapMap data set release. An r² cut off of 0.50 was selected for inclusion as evidence for strong genetic linkage, i.e., a “strong linkage disequilibrium.

TABLE 80A
Linked SNPs

| SNP | r² | Position on chr5 | SEQ ID NO |
|---|---|---|---|
| rs2194236 | 0.934 | 53646736 | 2177 |
| rs6864386 | 0.901 | 53648433 | 2178 |
| rs1900164 | 0.934 | 53650336 | 2179 |
| rs4865565 | 0.902 | 53652843 | 2180 |
| rs7701690 | 0.569 | 53655784 | 2181 |
| rs4141522 | 0.902 | 53656359 | 2182 |
| rs1445829 | 0.507 | 53663936 | 2183 |
| rs2032874 | 0.519 | 53665145 | 2184 |
| rs6886606 | 0.638 | 53665388 | 2185 |
| rs1373985 | 0.638 | 53667813 | 2186 |
| rs1823050 | 0.627 | 53667954 | 2187 |
| rs2407507 | 0.635 | 53672705 | 2188 |
| rs2407508 | 0.638 | 53672811 | 2189 |
| rs2113004 | 0.638 | 53674961 | 2190 |
| rs17513501 | 0.507 | 53675669 | 2191 |
| rs10038818 | 0.638 | 53675732 | 2192 |
| rs10940380 | 0.65 | 53676101 | 2193 |
| rs6887141 | 0.638 | 53676619 | 2194 |
| rs6891736 | 0.635 | 53676736 | 2195 |
| rs6450188 | 0.638 | 53677045 | 2196 |
| rs6450189 | 0.638 | 53677338 | 2197 |
| rs10940382 | 0.638 | 53678841 | 2198 |
| rs7703956 | 0.605 | 53679109 | 2199 |
| rs2407510 | 0.594 | 53680093 | 2200 |
| rs10940384 | 0.675 | 53681052 | 2201 |
| rs7701628 | 0.635 | 53683397 | 2202 |
| rs968813 | 0.638 | 53690381 | 2203 |
| rs12515078 | 1.0 | 53695238 | 2204 |
| rs2194235 | 1.0 | 53695715 | 2205 |
| rs6870110 | 1.0 | 53707299 | 2206 |
| rs12515791 | — | 53708606 | 2207 |

### Example 81

[0348] For individuals with colorectal cancer, the distribution of polymorphic alleles at position 88045349 of chromosome 5 was different from those without colorectal cancer (Table 81). The dominant test for risk associated with carrying the G allele had an empirical p-value based on permutation analysis of 0.000934, and the corresponding dominant odds ratio is 1.355 (Table 81). These data further suggest that this marker is associated with colorectal cancer risk and that the G allele at position 88045349 of chromosome 5 is associated with an increased risk of developing colorectal cancer.

TABLE 81

| | |
|---|---|
| rs no. | 254778 |
| Chromosome; Position | 5; 88045349 |
| Gene Name | unknown |
| Genotype; Phenotype | n = G; increased risk |
| Hardy-Weinberg | 0.48445 |

| Case | | | | | | | Odds |
|---|---|---|---|---|---|---|---|
| Flag | Allele B | AA | AB | BB | Model | p-Value | Ratio |
| 0 | G | 522 | 399 | 85 | Dominant | 0.000934 | 1.355 |
| 1 | G | 398 | 420 | 80 | | | |

[0349] Table 81A indicates SNPs found to be in strong linkage disequilibrium with rs254778. To generate this list, correlation coefficients (r²) were calculated between the index SNP and all neighboring SNPs cited in the June 2006 HapMap data set release. An r² cut off of 0.50 was selected for inclusion as evidence for strong genetic linkage, i.e., a “strong linkage disequilibrium.

TABLE 81A
Linked SNPs

| SNP | r² | Position on chr5 | SEQ ID NO |
|---|---|---|---|
| rs26579 | 0.607 | 88021051 | 2208 |
| rs27732 | 0.662 | 88028332 | 2209 |
| rs410671 | 0.637 | 88028954 | 2210 |
| rs34959 | 1.0 | 88031926 | 2211 |
| rs639725 | 0.705 | 88037725 | 2212 |
| rs454214 | 0.705 | 88039159 | 2213 |
| rs410216 | 0.96 | 88039857 | 2214 |
| rs1659074 | 0.705 | 88040372 | 2215 |
| rs254776 | 1.0 | 88042649 | 2216 |
| rs254778 | — | 88045349 | 2217 |
| rs40504 | 0.705 | 88046895 | 2218 |
| rs34316 | 0.695 | 88051301 | 2219 |
| rs254780 | 0.705 | 88055503 | 2220 |
| rs34321 | 0.705 | 88056075 | 2221 |
| rs34320 | 0.705 | 88057283 | 2222 |
| rs187270 | 0.73 | 88062626 | 2223 |
| rs190438 | 0.844 | 88062658 | 2224 |
| rs34318 | 0.705 | 88062905 | 2225 |
| rs13158247 | 0.714 | 88066426 | 2226 |
| rs618298 | 0.705 | 88074146 | 2227 |
| rs616391 | 0.725 | 88074601 | 2228 |
| rs625970 | 0.705 | 88078052 | 2229 |
| rs599402 | 0.705 | 88079412 | 2230 |
| rs2431391 | 0.703 | 88082346 | 2231 |
| rs2247885 | 0.705 | 88083755 | 2232 |
| rs647983 | 0.712 | 88083827 | 2233 |
| rs1705565 | 0.703 | 88084213 | 2234 |
| rs651666 | 0.705 | 88084523 | 2235 |
| rs681446 | 0.705 | 88090048 | 2236 |
| rs679232 | 0.705 | 88090519 | 2237 |
| rs664366 | 0.843 | 88091517 | 2238 |
| rs618741 | 0.68 | 88099768 | 2239 |
| rs700588 | 0.551 | 88144330 | 2240 |
| rs165945 | 0.52 | 88146094 | 2241 |
| rs160044 | 0.52 | 88150232 | 2242 |
| rs167345 | 0.52 | 88154614 | 2243 |
| rs304153 | 0.52 | 88156944 | 2244 |
| rs304161 | 0.52 | 88170066 | 2245 |
| rs304160 | 0.52 | 88171218 | 2246 |
| rs304159 | 0.52 | 88173798 | 2247 |
| rs244754 | 0.52 | 88179782 | 2248 |

### Example 82

[0350] For individuals with colorectal cancer, the distribution of polymorphic alleles at position 94655931 of chromosome 5 was different from those without colorectal cancer (Table 82). The dominant test for risk associated with carrying the T allele had an empirical p-value based on permutation analysis of 0.000386, and the corresponding dominant odds ratio is 2.342 (Table 82). These data further suggest that this marker is associated with colorectal cancer risk and that the T allele at position 94655931 of chromosome 5 is associated with an increased risk of developing colorectal cancer

TABLE 82

| | rs no. | | | | 26396 | | |
|---|---|---|---|---|---|---|---|
| | Chromosome; Position | | | | 5; 94655931 | | |
| | Gene Name | | | | unknown | | |
| | Genotype; Phenotype | | | | n = T; increased risk | | |
| | Hardy-Weinberg | | | | 0.02692 | | |
| Case | | | | | | | Odds |
| Flag | Allele B | AA | AB | BB | Model | p-Value | Ratio |
| 0 | T | 55 | 307 | 645 | Dominant | 0.000386 | 2.342 |
| 1 | T | 24 | 329 | 644 | | | |

[0351] Table 82A indicates SNPs found to be in strong linkage disequilibrium with rs26396. To generate this list, correlation coefficients (r²) were calculated between the index SNP and all neighboring SNPs cited in the June 2006 HapMap data set release. An r² cut off of 0.50 was selected for inclusion as evidence for strong genetic linkage, i.e., a “strong linkage disequilibrium.

TABLE 82A
Linked SNPs

| SNP | r² | Position on chr5 | SEQ ID NO |
|---|---|---|---|
| rs10067492 | 0.545 | 94538098 | 2249 |
| rs9314132 | 0.643 | 94550044 | 2250 |
| rs9314133 | 0.665 | 94552156 | 2251 |
| rs10072003 | 0.654 | 94553824 | 2252 |
| rs10070790 | 0.665 | 94557181 | 2253 |
| rs10044143 | 0.702 | 94558969 | 2254 |
| rs10037505 | 0.741 | 94560801 | 2255 |
| rs12186368 | 0.641 | 94567006 | 2256 |
| rs10066762 | 0.665 | 94570526 | 2257 |
| rs10058958 | 0.718 | 94576732 | 2258 |
| rs10069998 | 0.69 | 94576925 | 2259 |
| rs10075123 | 0.654 | 94577064 | 2260 |
| rs10079049 | 0.883 | 94584565 | 2261 |
| rs10050382 | 0.883 | 94587700 | 2262 |
| rs10043529 | 0.865 | 94588747 | 2263 |
| rs10058143 | 0.883 | 94596642 | 2264 |
| rs10050581 | 0.748 | 94597032 | 2265 |
| rs10064420 | 0.836 | 94599413 | 2266 |
| rs10066492 | 0.883 | 94600202 | 2267 |
| rs10057040 | 0.873 | 94600278 | 2268 |
| rs17349336 | 0.928 | 94602702 | 2269 |
| rs10515223 | 0.883 | 94605148 | 2270 |
| rs13356273 | 0.883 | 94606353 | 2271 |
| rs3104738 | 0.883 | 94611677 | 2272 |
| rs154064 | 0.883 | 94612551 | 2273 |
| rs255991 | 0.935 | 94613368 | 2274 |
| rs154065 | 0.94 | 94614685 | 2275 |
| rs464242 | 0.878 | 94618904 | 2276 |
| rs466024 | 0.941 | 94618955 | 2277 |
| rs686420 | 0.883 | 94619294 | 2278 |
| rs154062 | 0.941 | 94622424 | 2279 |
| rs154063 | 0.883 | 94623398 | 2280 |
| rs27768 | 0.913 | 94626513 | 2281 |
| rs460363 | 0.941 | 94628342 | 2282 |
| rs459730 | 0.883 | 94629140 | 2283 |
| rs461059 | 0.883 | 94629619 | 2284 |
| rs458978 | 0.883 | 94629816 | 2285 |
| rs467144 | 0.94 | 94631128 | 2286 |
| rs460102 | 0.883 | 94631232 | 2287 |
| rs462526 | 0.935 | 94631493 | 2288 |
| rs448433 | 0.935 | 94632003 | 2289 |
| rs465847 | 0.883 | 94632116 | 2290 |
| rs397826 | 0.927 | 94632425 | 2291 |
| rs3095925 | 0.843 | 94632936 | 2292 |
| rs462862 | 0.938 | 94633120 | 2293 |
| rs464971 | 0.94 | 94633445 | 2294 |
| rs464001 | 0.859 | 94634399 | 2295 |
| rs463961 | 0.938 | 94634443 | 2296 |
| rs458663 | 0.935 | 94634456 | 2297 |
| rs463261 | 0.938 | 94634684 | 2298 |
| rs463587 | 0.883 | 94635668 | 2299 |
| rs443272 | 0.741 | 94636517 | 2300 |
| rs457568 | 0.927 | 94636785 | 2301 |
| rs27688 | 0.94 | 94641576 | 2302 |
| rs26393 | 1.0 | 94649002 | 2303 |
| rs27767 | 0.938 | 94649379 | 2304 |
| rs26394 | 1.0 | 94651147 | 2305 |
| rs26395 | 0.876 | 94651360 | 2306 |
| rs26396 | — | 94655931 | 2307 |
| rs154058 | 0.891 | 94657922 | 2308 |
| rs154060 | 0.891 | 94659495 | 2309 |
| rs252941 | 1.0 | 94659853 | 2310 |
| rs153289 | 0.938 | 94660088 | 2311 |
| rs153290 | 0.891 | 94660336 | 2312 |
| rs154055 | 0.886 | 94662854 | 2313 |
| rs255950 | 0.886 | 94663216 | 2314 |
| rs255951 | 0.943 | 94663373 | 2315 |
| rs2937098 | 0.891 | 94663538 | 2316 |
| rs255952 | 0.919 | 94663672 | 2317 |
| rs255954 | 0.891 | 94664367 | 2318 |
| rs255955 | 1.0 | 94665060 | 2319 |
| rs255956 | 0.89 | 94666072 | 2320 |
| rs255957 | 1.0 | 94666129 | 2321 |
| rs255958 | 0.891 | 94666213 | 2322 |
| rs1543898 | 0.891 | 94666924 | 2323 |
| rs187652 | 0.942 | 94667001 | 2324 |
| rs255959 | 0.752 | 94668029 | 2325 |
| rs255960 | 1.0 | 94668309 | 2326 |
| rs395031 | 0.943 | 94670433 | 2327 |
| rs440044 | 0.928 | 94671181 | 2328 |
| rs429877 | 0.89 | 94671416 | 2329 |
| rs383223 | 0.943 | 94672434 | 2330 |
| rs417558 | 0.943 | 94672474 | 2331 |
| rs371175 | 0.943 | 94672558 | 2332 |
| rs584592 | 0.943 | 94672606 | 2333 |
| rs441595 | 0.864 | 94673344 | 2334 |
| rs255969 | 0.943 | 94675660 | 2335 |
| rs255970 | 1.0 | 94676060 | 2336 |
| rs255971 | 0.943 | 94676295 | 2337 |
| rs255972 | 0.745 | 94676914 | 2338 |
| rs255973 | 0.942 | 94677635 | 2339 |
| rs255977 | 0.891 | 94678233 | 2340 |
| rs385186 | 0.742 | 94678458 | 2341 |
| rs255978 | 0.942 | 94678505 | 2342 |
| rs255979 | 0.877 | 94678894 | 2343 |
| rs255980 | 0.943 | 94679052 | 2344 |
| rs255981 | 0.943 | 94679562 | 2345 |
| rs255983 | 0.751 | 94679943 | 2346 |
| rs255984 | 0.759 | 94680414 | 2347 |
| rs255985 | 0.785 | 94680899 | 2348 |
| rs255986 | 0.767 | 94681136 | 2349 |
| rs255987 | 0.76 | 94681313 | 2350 |
| rs255988 | 1.0 | 94681983 | 2351 |
| rs255990 | 0.657 | 94685578 | 2352 |
| rs154053 | 0.571 | 94705236 | 2353 |
| rs1162861 | 0.573 | 94712319 | 2354 |
| rs2434250 | 0.573 | 94713792 | 2355 |
| rs253710 | 0.656 | 94715934 | 2356 |
| rs2548653 | 0.574 | 94719045 | 2357 |
| rs1895248 | 0.655 | 94724163 | 2358 |
| rs7700635 | 0.532 | 94724943 | 2359 |
| rs1363429 | 0.501 | 94733999 | 2360 |
| rs1363428 | 0.657 | 94734306 | 2361 |
| rs2560278 | 0.577 | 94740898 | 2362 |
| rs2731835 | 0.722 | 94745024 | 2363 |
| rs253708 | 0.713 | 94745037 | 2364 |
| rs2731834 | 0.723 | 94746001 | 2365 |
| rs181880 | 0.723 | 94750979 | 2366 |
| rs33892 | 0.714 | 94753834 | 2367 |
| rs41121 | 0.723 | 94756096 | 2368 |

### Example 83

[0352] For individuals with colorectal cancer, the distribution of polymorphic alleles at position 98722748 of chromosome 5 was different from those without colorectal cancer (Table 83). The recessive test for risk associated with carrying the A allele had an empirical p-value of 0.005064 based on permutation analysis, and the corresponding recessive odds ratio is 1.313 (Table 83). These data further suggest that this marker is associated with colorectal cancer risk and that the A allele at position 98722748 of chromosome 5 is associated with an increased risk of developing colorectal cancer.

TABLE 83

| | |
|---|---|
| rs no. | 6892901 |
| Chromosome; Position | 5; 98722748 |
| Gene Name | unknown |
| Genotype; Phenotype | n = A; increased risk |
| Hardy-Weinberg | 0.23946 |

| Case | | | | | | | Odds |
|---|---|---|---|---|---|---|---|
| Flag | Allele B | AA | AB | BB | Model | p-Value | Ratio |
| 0 | A | 217 | 545 | 293 | Recessive | 0.005064 | 1.313 |
| 1 | A | 206 | 424 | 318 | | | |

[0353] Table 83A indicates SNPs found to be in strong linkage disequilibrium with rs6892901. To generate this list, correlation coefficients (r²) were calculated between the index SNP and all neighboring SNPs cited in the June 2006 HapMap data set release. An r² cut off of 0.50 was selected for inclusion as evidence for strong genetic linkage, i.e., a “strong linkage disequilibrium.

TABLE 83A
Linked SNPs

| SNP | r² | Position on chr5 | SEQ ID NO |
|---|---|---|---|
| rs4631207 | 0.768 | 98670568 | 2369 |
| rs4702966 | 0.819 | 98672074 | 2370 |
| rs7701153 | 0.779 | 98672967 | 2371 |
| rs6872713 | 1.0 | 98696360 | 2372 |
| rs2948736 | 1.0 | 98699369 | 2373 |
| rs6866261 | 1.0 | 98702111 | 2374 |
| rs12177005 | 1.0 | 98702589 | 2375 |
| rs2968332 | 1.0 | 98709592 | 2376 |
| rs1523379 | 1.0 | 98716622 | 2377 |
| rs2968341 | 1.0 | 98721832 | 2378 |
| rs6892901 | — | 98722748 | 2379 |
| rs2968342 | 1.0 | 98723571 | 2380 |
| rs2948765 | 1.0 | 98728423 | 2381 |
| rs2963624 | 1.0 | 98729312 | 2382 |
| rs1464636 | 0.548 | 98738383 | 2383 |
| rs2511925 | 0.519 | 98749771 | 2384 |
| rs2968352 | 0.526 | 98752890 | 2385 |
| rs2948756 | 0.623 | 98754788 | 2386 |
| rs1818865 | 0.636 | 98763319 | 2387 |
| rs2963602 | 0.54 | 98770275 | 2388 |
| rs2617343 | 0.623 | 98771905 | 2389 |
| rs2682154 | 0.675 | 98952846 | 2390 |
| rs3867077 | 0.586 | 98953245 | 2391 |
| rs2682153 | 0.669 | 98953580 | 2392 |
| rs586247 | 0.665 | 98958585 | 2393 |
| rs583142 | 0.675 | 98958615 | 2394 |
| rs664978 | 0.675 | 98960421 | 2395 |
| rs6594536 | 0.586 | 98965980 | 2396 |
| rs3862292 | 0.675 | 98970968 | 2397 |
| rs4400164 | 0.611 | 98971488 | 2398 |

### Example 84

[0354] For individuals with colorectal cancer, the distribution of polymorphic alleles at position 100014052 of chromosome 5 was different from those without colorectal cancer (Table 84). The dominant test for risk associated with carrying the C allele had an empirical p-value based on permutation analysis of 0.005392, and the corresponding dominant odds ratio is 1.328 (Table 84). These data further suggest that this marker is associated with colorectal cancer risk and that the C allele at position 100014052 of chromosome 5 is associated with an increased risk of developing colorectal cancer.

TABLE 84

| | |
|---|---|
| rs no. | 6880868 |
| Chromosome; Position | 5; 100014052 |
| Gene Name | unknown |
| Genotype; Phenotype | n = C; increased risk |
| Hardy-Weinberg | 0.22705 |

| Case | | | | | | | Odds |
|---|---|---|---|---|---|---|---|
| Flag | Allele B | AA | AB | BB | Model | p-Value | Ratio |
| 0 | C | 298 | 432 | 184 | Dominant | 0.005392 | 1.328 |
| 1 | C | 251 | 478 | 211 | | | |

[0355] Table 84A indicates SNPs found to be in strong linkage disequilibrium with rs6880868. To generate this list, correlation coefficients (r²) were calculated between the index SNP and all neighboring SNPs cited in the June 2006 HapMap data set release. An r² cut off of 0.50 was selected for inclusion as evidence for strong genetic linkage, i.e., a “strong linkage disequilibrium.

TABLE 84A
Linked SNPs

| SNP | r² | Position on chr5 | SEQ ID NO |
|---|---|---|---|
| rs10059478 | 0.665 | 100010191 | 2399 |
| rs7736625 | 1.0 | 100010673 | 2400 |
| rs6861241 | 0.669 | 100013867 | 2401 |
| rs6880868 | — | 100014052 | 2402 |
| rs6866306 | 0.681 | 100014436 | 2403 |
| rs7718146 | 1.0 | 100016776 | 2404 |
| rs6879808 | 1.0 | 100017865 | 2405 |
| rs6888825 | 1.0 | 100018294 | 2406 |
| rs905829 | 0.605 | 100020010 | 2407 |
| rs13188041 | 0.595 | 100020379 | 2408 |
| rs10900756 | 0.585 | 100021853 | 2409 |
| rs7738040 | 0.716 | 100025750 | 2410 |
| rs10053332 | 0.567 | 100027357 | 2411 |
| rs1445173 | 0.585 | 100028226 | 2412 |
| rs6896126 | 0.605 | 100029865 | 2413 |
| rs6595366 | 0.718 | 100030250 | 2414 |
| rs12519913 | 0.585 | 100033114 | 2415 |
| rs12514914 | 0.585 | 100033220 | 2416 |
| rs6595367 | 0.902 | 100034262 | 2417 |
| rs7702043 | 0.874 | 100043746 | 2418 |
| rs6595380 | 0.688 | 100047287 | 2419 |
| rs2590411 | 0.69 | 100048359 | 2420 |
| rs2590413 | 0.688 | 100050177 | 2421 |
| rs2725112 | 0.546 | 100053551 | 2422 |
| rs10515269 | 0.585 | 100053597 | 2423 |
| rs2590421 | 0.628 | 100055142 | 2424 |
| rs2590422 | 0.6 | 100056049 | 2425 |
| rs2590424 | 0.607 | 100057119 | 2426 |
| rs2725110 | 0.607 | 100057973 | 2427 |
| rs12517897 | 0.503 | 100058783 | 2428 |
| rs2725107 | 0.607 | 100059543 | 2429 |
| rs2725106 | 0.558 | 100060234 | 2430 |
| rs2725105 | 0.582 | 100060833 | 2431 |
| rs6873910 | 0.607 | 100073261 | 2432 |
| rs6595414 | 0.607 | 100073357 | 2433 |
| rs1445170 | 0.607 | 100073717 | 2434 |
| rs1445172 | 0.607 | 100074002 | 2435 |
| rs11241664 | 0.588 | 100080943 | 2436 |
| rs13163793 | 0.593 | 100088049 | 2437 |
| rs12515114 | 0.593 | 100088312 | 2438 |
| rs13162330 | 0.593 | 100090637 | 2439 |
| rs10751461 | 0.593 | 100095967 | 2440 |
| rs157178 | 0.582 | 100099693 | 2441 |
| rs279106 | 0.512 | 100111425 | 2442 |

### Example 85

[0356] For individuals with colorectal cancer, the distribution of polymorphic alleles at position 106741517 of chromosome 5 was different from those without colorectal cancer (Table 85). The dominant test for risk associated with carrying the G allele had an empirical p-value based on permutation analysis of 0.027033, and the corresponding dominant odds ratio is 1.211 (Table 85). These data further suggest that this marker is associated with colorectal cancer risk and that the G allele at position 106741517 of chromosome 5 is associated with an increased risk of developing colorectal cancer.

TABLE 85

| | |
|---|---|
| rs no. | 365807 |
| Chromosome; Position | 5; 106741517 |
| Gene Name | unknown |
| Genotype; Phenotype | n = G; increased risk |
| Hardy-Weinberg | 0.26204 |

| Case | | | | | | | Odds |
|---|---|---|---|---|---|---|---|
| Flag | Allele B | AA | AB | BB | Model | p-Value | Ratio |
| 0 | G | 665 | 371 | 63 | Dominant | 0.027033 | 1.211 |
| 1 | G | 611 | 425 | 58 | | | |

[0357] Table 85A indicates SNPs found to be in strong linkage disequilibrium with rs365807. To generate this list, correlation coefficients (r²) were calculated between the index SNP and all neighboring SNPs cited in the June 2006 HapMap data set release. An r² cut off of 0.50 was selected for inclusion as evidence for strong genetic linkage, i.e., a “strong linkage disequilibrium.

TABLE 85A
Linked SNPs

| SNP | r² | Position on chr5 | SEQ ID NO |
|---|---|---|---|
| rs173756 | 0.525 | 106697845 | 2443 |
| rs365807 | — | 106741517 | 2444 |
| rs3797510 | 0.531 | 106753230 | 2445 |
| rs3797513 | 0.531 | 106757891 | 2446 |
| rs3797516 | 0.545 | 106765747 | 2447 |
| rs3756544 | 0.531 | 106765944 | 2448 |
| rs3797517 | 0.531 | 106766858 | 2449 |
| rs13178242 | 0.516 | 106773421 | 2450 |
| rs6868410 | 0.517 | 106777589 | 2451 |
| rs7703776 | 0.53 | 106780213 | 2452 |
| rs3797527 | 0.519 | 106782654 | 2453 |
| rs13182976 | 0.531 | 106786583 | 2454 |
| rs11956440 | 0.556 | 106790074 | 2455 |
| rs3873122 | 0.517 | 106791596 | 2456 |
| rs11242636 | 0.531 | 106792191 | 2457 |
| rs3901010 | 0.519 | 106793738 | 2458 |

### Example 86

[0358] For individuals with colorectal cancer, the distribution of polymorphic alleles at position 113516722 of chromosome 5 was different from those without colorectal cancer (Table 86). The recessive test for risk associated with carrying the G allele had an empirical p-value of 0.002529 based on permutation analysis, and the corresponding recessive odds ratio is 1.384 (Table 86). These data further suggest that this marker is associated with colorectal cancer risk and that the G allele at position 113516722 of chromosome 5 is associated with an increased risk of developing colorectal cancer.

TABLE 86

| | |
|---|---|
| rs no. | 17350454 |
| Chromosome; Position | 5; 113516722 |
| Gene Name | unknown |
| Genotype; Phenotype | n = G; increased risk |
| Hardy-Weinberg | 0.00174 |

| Case | | | | | | | Odds |
|---|---|---|---|---|---|---|---|
| Flag | Allele B | AA | AB | BB | Model | p-Value | Ratio |
| 0 | G | 6 | 247 | 750 | Recessive | 0.002529 | 1.384 |
| 1 | G | 10 | 186 | 804 | | | |

[0359] Table 86A indicates SNPs found to be in strong linkage disequilibrium with rs17350454. To generate this list, correlation coefficients (r²) were calculated between the index SNP and all neighboring SNPs cited in the June 2006 HapMap data set release. An r² cut off of 0.50 was selected for inclusion as evidence for strong genetic linkage, i.e., a “strong linkage disequilibrium.

TABLE 86A
Linked SNPs

| SNP | r² | Position on chr5 | SEQ ID NO |
|---|---|---|---|
| rs2974468 | 0.557 | 113500176 | 2459 |
| rs2974469 | 0.688 | 113502800 | 2460 |
| rs7724546 | 0.666 | 113506634 | 2461 |
| rs4368718 | 0.925 | 113511198 | 2462 |
| rs6873190 | 0.924 | 113511406 | 2463 |
| rs4705487 | 0.891 | 113511998 | 2464 |
| rs4705626 | 0.856 | 113512057 | 2465 |
| rs10078772 | 0.924 | 113512451 | 2466 |
| rs4616883 | 1.0 | 113514918 | 2467 |
| rs4314389 | 1.0 | 113515203 | 2468 |
| rs17350454 | — | 113516722 | 2469 |
| rs4365834 | 1.0 | 113516744 | 2470 |
| rs10062393 | 0.924 | 113526961 | 2471 |
| rs10036987 | 0.829 | 113527088 | 2472 |
| rs7720919 | 0.92 | 113528435 | 2473 |
| rs7721332 | 0.925 | 113528450 | 2474 |
| rs7721339 | 0.924 | 113528466 | 2475 |
| rs11747036 | 1.0 | 113531301 | 2476 |
| rs6879669 | 1.0 | 113531506 | 2477 |
| rs9326911 | 1.0 | 113535625 | 2478 |
| rs10066191 | 1.0 | 113541152 | 2479 |
| rs6594791 | 0.85 | 113550101 | 2480 |
| rs17429055 | 0.925 | 113550750 | 2481 |
| rs6594793 | 0.925 | 113553376 | 2482 |
| rs4272124 | 0.925 | 113566741 | 2483 |
| rs10045738 | 0.924 | 113570824 | 2484 |
| rs4519916 | 0.924 | 113572234 | 2485 |
| rs6891961 | 0.92 | 113581019 | 2486 |
| rs4521461 | 0.748 | 113582603 | 2487 |
| rs4537054 | 0.748 | 113583525 | 2488 |
| rs4451040 | 0.748 | 113584197 | 2489 |
| rs6863368 | 0.748 | 113585159 | 2490 |
| rs4072690 | 0.748 | 113585933 | 2491 |
| rs3935351 | 0.736 | 113586234 | 2492 |
| rs4288107 | 0.748 | 113586796 | 2493 |
| rs4460131 | 0.747 | 113587246 | 2494 |
| rs3890748 | 0.735 | 113589665 | 2495 |
| rs4705640 | 0.721 | 113590586 | 2496 |
| rs6594802 | 0.748 | 113591021 | 2497 |
| rs6898328 | 0.748 | 113591649 | 2498 |
| rs6883917 | 0.748 | 113591904 | 2499 |
| rs10037472 | 0.714 | 113592887 | 2500 |
| rs10053690 | 0.748 | 113595823 | 2501 |
| rs12719177 | 0.72 | 113596126 | 2502 |
| rs6594803 | 0.789 | 113597745 | 2503 |
| rs7708130 | 0.8 | 113598192 | 2504 |
| rs4440350 | 0.748 | 113601411 | 2505 |
| rs4376257 | 0.748 | 113602505 | 2506 |
| rs4705643 | 0.736 | 113604903 | 2507 |
| rs10065369 | 0.748 | 113606206 | 2508 |
| rs4299732 | 0.748 | 113606361 | 2509 |
| rs7712075 | 0.748 | 113611679 | 2510 |
| rs10044702 | 0.748 | 113611816 | 2511 |
| rs4597957 | 0.748 | 113612491 | 2512 |
| rs10056135 | 0.748 | 113612556 | 2513 |
| rs10053242 | 0.748 | 113614669 | 2514 |
| rs4484417 | 0.789 | 113617288 | 2515 |
| rs4235757 | 0.664 | 113618525 | 2516 |
| rs4323225 | 0.576 | 113623513 | 2517 |
| rs4496701 | 0.597 | 113623601 | 2518 |
| rs4478312 | 0.598 | 113624557 | 2519 |
| rs4330454 | 0.596 | 113624918 | 2520 |
| rs4566781 | 0.575 | 113625176 | 2521 |
| rs4489054 | 0.598 | 113626407 | 2522 |
| rs4235760 | 0.596 | 113626740 | 2523 |
| rs6594805 | 0.597 | 113626945 | 2524 |
| rs4519914 | 0.597 | 113627153 | 2525 |
| rs4597958 | 0.598 | 113627251 | 2526 |
| rs4618418 | 0.598 | 113627646 | 2527 |
| rs4368719 | 0.598 | 113628416 | 2528 |
| rs6594807 | 0.598 | 113630061 | 2529 |
| rs4426906 | 0.597 | 113631575 | 2530 |
| rs4274972 | 0.598 | 113631667 | 2531 |

### Example 87

[0360] For individuals with colorectal cancer, the distribution of polymorphic alleles at position 114745898 of chromosome 5 was different from those without colorectal cancer (Table 87). The recessive test for risk associated with carrying the G allele had an empirical p-value of 0.001657 based on permutation analysis, and the corresponding recessive odds ratio is 1.829 (Table 87). These data further suggest that this marker is associated with colorectal cancer risk and that the G allele at position 114745898 of chromosome 5 is associated with an increased risk of developing colorectal cancer.

TABLE 87

| | |
|---|---|
| rs no. | 1455850 |
| Chromosome; Position | 5; 114745898 |
| Gene Name | unknown |
| Genotype; Phenotype | n = G; increased risk |
| Hardy-Weinberg | 0.15232 |

| Case | | | | | | | Odds |
|---|---|---|---|---|---|---|---|
| Flag | Allele B | AA | AB | BB | Model | p-Value | Ratio |
| 0 | G | 595 | 372 | 44 | Recessive | 0.001657 | 1.829 |
| 1 | G | 571 | 354 | 77 | | | |

[0361] Table 87A indicates SNPs found to be in strong linkage disequilibrium with rs1455850. To generate this list, correlation coefficients (r²) were calculated between the index SNP and all neighboring SNPs cited in the June 2006 HapMap data set release. An r² cut off of 0.50 was selected for inclusion as evidence for strong genetic linkage, i.e., a “strong linkage disequilibrium.

TABLE 87A
Linked SNPs

| SNP | r² | Position on chr5 | SEQ ID NO |
|---|---|---|---|
| rs269504 | 0.608 | 114713355 | 2532 |
| rs269505 | 0.632 | 114713440 | 2533 |
| rs269506 | 0.632 | 114713519 | 2534 |
| rs12654556 | 0.527 | 114718052 | 2535 |
| rs12654590 | 0.726 | 114718222 | 2536 |
| rs11241320 | 0.668 | 114718659 | 2537 |
| rs10519405 | 0.743 | 114719100 | 2538 |
| rs10519406 | 0.743 | 114719186 | 2539 |
| rs269503 | 0.743 | 114724952 | 2540 |
| rs10463669 | 0.717 | 114727927 | 2541 |
| rs12657417 | 0.743 | 114728598 | 2542 |
| rs4705733 | 0.823 | 114729838 | 2543 |
| rs11241323 | 0.797 | 114731087 | 2544 |
| rs2605179 | 0.798 | 114736973 | 2545 |
| rs2591258 | 0.797 | 114737036 | 2546 |
| rs4705524 | 0.798 | 114737437 | 2547 |
| rs10447263 | 0.798 | 114738244 | 2548 |
| rs7715232 | 0.822 | 114739954 | 2549 |
| rs12519220 | 0.79 | 114742587 | 2550 |
| rs12516512 | 0.794 | 114742608 | 2551 |
| rs17137700 | 0.825 | 114742827 | 2552 |
| rs7703838 | 0.787 | 114743461 | 2553 |
| rs7721559 | 0.798 | 114743518 | 2554 |
| rs7703997 | 0.637 | 114743558 | 2555 |
| rs7704303 | 0.798 | 114743695 | 2556 |
| rs2416401 | 0.786 | 114743979 | 2557 |
| rs2416402 | 0.798 | 114743998 | 2558 |
| rs2416403 | 0.833 | 114744008 | 2559 |
| rs2416406 | 0.798 | 114744237 | 2560 |
| rs2605178 | 0.783 | 114744809 | 2561 |
| rs1445697 | 0.797 | 114745180 | 2562 |
| rs1455850 | — | 114745898 | 2563 |
| rs1455849 | 1.0 | 114745943 | 2564 |
| rs1809211 | 0.64 | 114752244 | 2565 |
| rs269500 | 0.534 | 114773293 | 2566 |

### Example 88

[0362] For individuals with colorectal cancer, the distribution of polymorphic alleles at position 128997514 of chromosome 5, found within the ADAMTS19 gene, was different from those without colorectal cancer (Table 88). The recessive test for risk associated with carrying the G allele had an empirical p-value of 0.009425 based on permutation analysis, and the corresponding recessive odds ratio is 1.364 (Table 88). These data further suggest that this marker, located within the ADAMTS19 gene, is associated with colorectal cancer risk and that the G allele at position 128997514 of chromosome 5 is associated with an increased risk of developing colorectal cancer.

TABLE 88

| | |
|---|---|
| rs no. | 3909548 |
| Chromosome; Position | 5; 128997514 |
| Gene Name | ADAMTS19 |
| SEQ ID NO; Position | 5653; 173513 |
| Genotype; Phenotype | n = G; increased risk |
| Hardy-Weinberg | 0.03496 |

| Case | | | | | | | Odds |
|---|---|---|---|---|---|---|---|
| Flag | Allele B | AA | AB | BB | Model | p-Value | Ratio |
| 0 | G | 19 | 178 | 757 | Recessive | 0.009425 | 1.364 |
| 1 | G | 14 | 136 | 786 | | | |

[0363] Table 88A indicates SNPs found to be in strong linkage disequilibrium with rs3909548. To generate this list, correlation coefficients (r²) were calculated between the index SNP and all neighboring SNPs cited in the June 2006 HapMap data set release. An r² cut off of 0.50 was selected for inclusion as evidence for strong genetic linkage, i.e., a “strong linkage disequilibrium.

TABLE 88A
Linked SNPs

| SNP | r² | Position on chr5 | SEQ ID NO |
|---|---|---|---|
| rs7707606 | 1.0 | 128919467 | 2567 |
| rs7446814 | 1.0 | 128922333 | 2568 |
| rs11742295 | 1.0 | 128985111 | 2569 |
| rs30708 | 0.605 | 128987981 | 2570 |
| rs17617039 | 1.0 | 128988214 | 2571 |
| rs17673487 | 1.0 | 128989963 | 2572 |
| rs3909548 | — | 128997514 | 2573 |
| rs17438080 | 1.0 | 129005875 | 2574 |
| rs17673664 | 1.0 | 129005908 | 2575 |
| rs11740723 | 1.0 | 129008002 | 2576 |
| rs17617398 | 1.0 | 129010670 | 2577 |
| rs11744022 | 1.0 | 129027429 | 2578 |
| rs11951112 | 1.0 | 129031240 | 2579 |
| rs2902316 | 1.0 | 129031881 | 2580 |
| rs17680717 | 1.0 | 129050355 | 2581 |
| rs30303 | 0.644 | 129072554 | 2582 |
| rs32816 | 0.644 | 129075353 | 2583 |
| rs32817 | 0.67 | 129075899 | 2584 |

### Example 89

[0364] For individuals with colorectal cancer, the distribution of polymorphic alleles at position 145262302 of chromosome 5 was different from those without colorectal cancer (Table 89). The trend test for risk associated with carrying the A allele had an empirical p-value of 0.002925 based on permutation analysis, and the corresponding Mantel-Haenszel odds ratio for trend is 1.41 (Table 89). These data further suggest that this marker is associated with colorectal cancer risk and that the A allele at position 145262302 of chromosome 5 is associated with an increased risk of developing colorectal cancer.

TABLE 89

| | |
|---|---|
| rs no. | 4913050 |
| Chromosome; Position | 5; 145262302 |
| Gene Name | unknown |
| Genotype; Phenotype | n = A; increased risk |
| Hardy-Weinberg | 0.17199 |

| Case | | | | | | | Odds |
|---|---|---|---|---|---|---|---|
| Flag | Allele B | AA | AB | BB | Model | p-Value | Ratio |
| 0 | A | 927 | 126 | 1 | Trend | 0.002925 | 1.41 |
| 1 | A | 794 | 147 | 7 | | | |

[0365] Table 89A indicates SNPs found to be in strong linkage disequilibrium with rs4913050. To generate this list, correlation coefficients (r²) were calculated between the index SNP and all neighboring SNPs cited in the June 2006 HapMap data set release. An r² cut off of 0.50 was selected for inclusion as evidence for strong genetic linkage, i.e., a “strong linkage disequilibrium.

TABLE 89A
Linked SNPs

| SNP | r² | Position on chr5 | SEQ ID NO |
|---|---|---|---|
| rs4913050 | — | 145262302 | 2585 |
| rs4913051 | 1.0 | 145263992 | 2586 |
| rs10044918 | 1.0 | 145265351 | 2587 |
| rs2569011 | 0.881 | 145265645 | 2588 |
| rs10077374 | 0.881 | 145266116 | 2589 |
| rs10064587 | 0.881 | 145266325 | 2590 |
| rs6580390 | 0.785 | 145272216 | 2591 |
| rs1387911 | 1.0 | 145274560 | 2592 |
| rs2400203 | 0.881 | 145280161 | 2593 |
| rs6873171 | 0.584 | 145285959 | 2594 |

### Example 90

[0366] For individuals with colorectal cancer, the distribution of polymorphic alleles at position 153344333 of chromosome 5 was different from those without colorectal cancer (Table 90). The dominant test for risk associated with carrying the G allele had an empirical p-value based on permutation analysis of 0.003318, and the corresponding dominant odds ratio is 1.497 (Table 90). These data further suggest that this marker is associated with colorectal cancer risk and that the G allele at position 153344333 of chromosome 5 is associated with an increased risk of developing colorectal cancer.

TABLE 90

| | |
|---|---|
| rs no. | 375232 |
| Chromosome; Position | 5; 153344333 |
| Gene Name | unknown |
| Genotype; Phenotype | n = G; increased risk |
| Hardy-Weinberg | 0.18175 |

| Case | | | | | | | Odds |
|---|---|---|---|---|---|---|---|
| Flag | Allele B | AA | AB | BB | Model | p-Value | Ratio |
| 0 | G | 154 | 457 | 405 | Dominant | 0.003318 | 1.497 |
| 1 | G | 98 | 415 | 406 | | | |

[0367] Table 90A indicates SNPs found to be in strong linkage disequilibrium with rs375232. To generate this list, correlation coefficients (r²) were calculated between the index SNP and all neighboring SNPs cited in the June 2006 HapMap data set release. An r² cut off of 0.50 was selected for inclusion as evidence for strong genetic linkage, i.e., a “strong linkage disequilibrium.

TABLE 90A
Linked SNPs

| SNP | r² | Position on chr5 | SEQ ID NO |
|---|---|---|---|
| rs17115481 | 0.697 | 153338419 | 2595 |
| rs286965 | 0.963 | 153340423 | 2596 |
| rs390299 | 0.963 | 153343527 | 2597 |
| rs375232 | — | 153344333 | 2598 |
| rs4295437 | 1.0 | 153345557 | 2599 |
| rs4354102 | 1.0 | 153345621 | 2600 |
| rs386841 | 0.963 | 153346796 | 2601 |
| rs425263 | 1.0 | 153346998 | 2602 |
| rs378267 | 1.0 | 153347489 | 2603 |
| rs453034 | 1.0 | 153348358 | 2604 |
| rs2053310 | 1.0 | 153350759 | 2605 |
| rs707179 | 0.963 | 153351656 | 2606 |
| rs1057772 | 1.0 | 153352718 | 2607 |
| rs1438591 | 1.0 | 153353811 | 2608 |
| rs7727981 | 0.962 | 153356765 | 2609 |
| rs4594908 | 0.962 | 153357791 | 2610 |
| rs869737 | 0.963 | 153365426 | 2611 |
| rs11167652 | 0.96 | 153369105 | 2612 |
| rs6862861 | 0.96 | 153369974 | 2613 |
| rs1978855 | 0.963 | 153370547 | 2614 |
| rs1978856 | 1.0 | 153370609 | 2615 |
| rs497503 | 0.963 | 153371902 | 2616 |
| rs2578373 | 0.963 | 153385278 | 2617 |
| rs2560047 | 0.51 | 153385607 | 2618 |
| rs2560048 | 0.963 | 153385847 | 2619 |
| rs9324764 | 1.0 | 153386769 | 2620 |
| rs9324765 | 0.963 | 153386837 | 2621 |
| rs6889563 | 0.963 | 153387180 | 2622 |
| rs7704562 | 0.51 | 153387590 | 2623 |
| rs2578376 | 1.0 | 153390413 | 2624 |
| rs2560059 | 1.0 | 153391127 | 2625 |
| rs7731081 | 0.927 | 153392378 | 2626 |
| rs720985 | 0.79 | 153392722 | 2627 |
| rs720987 | 1.0 | 153393038 | 2628 |
| rs2578377 | 0.963 | 153393583 | 2629 |
| rs11167654 | 0.961 | 153395675 | 2630 |
| rs10039286 | 1.0 | 153395890 | 2631 |
| rs10055534 | 1.0 | 153396325 | 2632 |
| rs4594909 | 0.963 | 153396559 | 2633 |
| rs920309 | 0.963 | 153397914 | 2634 |
| rs2560062 | 0.96 | 153399535 | 2635 |
| rs567749 | 1.0 | 153400001 | 2636 |
| rs816041 | 1.0 | 153400926 | 2637 |
| rs816039 | 0.962 | 153402128 | 2638 |
| rs544908 | 1.0 | 153403791 | 2639 |
| rs816037 | 1.0 | 153405274 | 2640 |
| rs816036 | 1.0 | 153405394 | 2641 |
| rs411245 | 1.0 | 153406146 | 2642 |
| rs816035 | 0.51 | 153407489 | 2643 |
| rs478020 | 1.0 | 153409362 | 2644 |
| rs689715 | 1.0 | 153409380 | 2645 |
| rs690542 | 0.963 | 153410180 | 2646 |
| rs2578369 | 0.905 | 153411651 | 2647 |
| rs2578368 | 0.963 | 153411662 | 2648 |
| rs2447715 | 0.962 | 153412323 | 2649 |
| rs2255493 | 0.958 | 153413163 | 2650 |
| rs1382278 | 1.0 | 153414600 | 2651 |
| rs1382277 | 0.96 | 153414636 | 2652 |
| rs1046621 | 0.963 | 153415931 | 2653 |
| rs816025 | 1.0 | 153419001 | 2654 |
| rs816024 | 1.0 | 153419234 | 2655 |
| rs1438588 | 0.963 | 153425143 | 2656 |
| rs816034 | 1.0 | 153426527 | 2657 |
| rs2351022 | 1.0 | 153427018 | 2658 |
| rs816030 | 1.0 | 153430830 | 2659 |
| rs816029 | 1.0 | 153431481 | 2660 |
| rs816028 | 1.0 | 153432195 | 2661 |
| rs816026 | 1.0 | 153434373 | 2662 |
| rs13155109 | 0.808 | 153435197 | 2663 |
| rs7709154 | 0.823 | 153436129 | 2664 |
| rs1478350 | 0.962 | 153436445 | 2665 |
| rs4958693 | 0.814 | 153436517 | 2666 |
| rs1871157 | 0.82 | 153437000 | 2667 |
| rs816005 | 1.0 | 153437979 | 2668 |
| rs816006 | 1.0 | 153438869 | 2669 |
| rs12523627 | 0.809 | 153439598 | 2670 |
| rs4958354 | 0.789 | 153440236 | 2671 |
| rs11167658 | 0.82 | 153441242 | 2672 |
| rs12515633 | 0.82 | 153442726 | 2673 |
| rs816010 | 1.0 | 153442901 | 2674 |
| rs816012 | 1.0 | 153444620 | 2675 |
| rs707181 | 1.0 | 153445645 | 2676 |
| rs11954307 | 0.817 | 153446433 | 2677 |
| rs816016 | 1.0 | 153448388 | 2678 |
| rs13173253 | 0.822 | 153449213 | 2679 |
| rs707183 | 0.774 | 153451930 | 2680 |
| rs7705478 | 0.823 | 153452902 | 2681 |
| rs7705235 | 0.823 | 153452947 | 2682 |
| rs863639 | 1.0 | 153453656 | 2683 |
| rs3822710 | 0.823 | 153453887 | 2684 |
| rs4312933 | 0.817 | 153456852 | 2685 |
| rs2882468 | 0.817 | 153457015 | 2686 |
| rs6580052 | 0.823 | 153458370 | 2687 |
| rs815633 | 1.0 | 153462976 | 2688 |
| rs4958695 | 0.921 | 153464693 | 2689 |
| rs815631 | 1.0 | 153464854 | 2690 |
| rs707184 | 1.0 | 153466019 | 2691 |
| rs707185 | 1.0 | 153470369 | 2692 |
| rs1428122 | 0.823 | 153470551 | 2693 |
| rs11948898 | 0.51 | 153470971 | 2694 |
| rs4958697 | 0.807 | 153472870 | 2695 |
| rs8115624 | 0.892 | 153474121 | 2696 |

### Example 91

[0368] For individuals with colorectal cancer, the distribution of polymorphic alleles at position 155797045 of chromosome 5, found within the SGCD gene, was different from those without colorectal cancer (Table 91). The dominant test for risk associated with carrying the C allele had an empirical p-value based on permutation analysis of 0.000968, and the corresponding dominant odds ratio is 3.556 (Table 91). These data further suggest that this marker, located within the SGCD gene, is associated with colorectal cancer risk and that the C allele at position 155797045 of chromosome 5 is associated with an increased risk of developing colorectal cancer.

TABLE 91

| | |
|---|---|
| rs no. | 17053557 |
| Chromosome; Position | 5; 155797045 |
| Gene Name | SGCD |
| SEQ ID NO; Position | 5654; 110701 |
| Genotype; Phenotype | n = C; increased risk |
| Hardy-Weinberg | 0.04576 |

| Case | | | | | | | Odds |
|---|---|---|---|---|---|---|---|
| Flag | Allele B | AA | AB | BB | Model | p-Value | Ratio |
| 0 | C | 27 | 229 | 794 | Dominant | 0.000968 | 3.556 |
| 1 | C | 7 | 214 | 729 | | | |

[0369] Table 91A indicates SNPs found to be in strong linkage disequilibrium with rs17053557. To generate this list, correlation coefficients (r²) were calculated between the index SNP and all neighboring SNPs cited in the June 2006 HapMap data set release. An r² cut off of 0.50 was selected for inclusion as evidence for strong genetic linkage, i.e., a “strong linkage disequilibrium.

TABLE 91A
Linked SNPs

| SNP | r² | Position on chr5 | SEQ ID NO |
|---|---|---|---|
| rs4438860 | 0.68 | 155746109 | 2697 |
| rs6862189 | 0.524 | 155751856 | 2698 |
| rs17053531 | 0.915 | 155752850 | 2699 |
| rs6869537 | 0.655 | 155755167 | 2700 |
| rs2135028 | 0.764 | 155759118 | 2701 |
| rs7731517 | 0.673 | 155767497 | 2702 |
| rs7731883 | 0.673 | 155767700 | 2703 |
| rs6879264 | 1.0 | 155769361 | 2704 |
| rs6879407 | 1.0 | 155769420 | 2705 |
| rs905788 | 0.915 | 155794803 | 2706 |
| rs17053557 | — | 155797045 | 2707 |
| rs17052633 | 0.522 | 155811196 | 2708 |

### Example 92

[0370] For individuals with colorectal cancer, the distribution of polymorphic alleles at position 166726668 of chromosome 5, found within the LOC134541 gene, was different from those without colorectal cancer (Table 92). The dominant test for risk associated with carrying the A allele had an empirical p-value based on permutation analysis of 0.000473, and the corresponding dominant odds ratio is 12.493 (Table 92). These data further suggest that this marker, located within the LOC134541 gene, is associated with colorectal cancer risk and that the A allele at position 166726668 of chromosome 5 is associated with an increased risk of developing colorectal cancer.

TABLE 92

| | |
|---|---|
| rs no. | 10516032 |
| Chromosome; Position | 5; 166726668 |
| Gene Name | LOC134541 |
| SEQ ID NO; Position | 5655; 82248 |
| Genotype; Phenotype | n = A; increased risk |
| Hardy-Weinberg | 0.18633 |

| Case | | | | | | | Odds |
|---|---|---|---|---|---|---|---|
| Flag | Allele B | AA | AB | BB | Model | p-Value | Ratio |
| 0 | A | 12 | 153 | 748 | Dominant | 0.000473 | 12.493 |
| 1 | A | 1 | 162 | 776 | | | |

[0371] Table 92A indicates SNPs found to be in strong linkage disequilibrium with rs10516032. To generate this list, correlation coefficients (r²) were calculated between the index SNP and all neighboring SNPs cited in the June 2006 HapMap data set release. An r² cut off of 0.50 was selected for inclusion as evidence for strong genetic linkage, i.e., a “strong linkage disequilibrium.

TABLE 92A
Linked SNPs

| SNP | r² | Position on chr5 | SEQ ID NO |
|---|---|---|---|
| rs10516032 | — | 166726668 | 2709 |

### Example 93

[0372] For individuals with colorectal cancer, the distribution of polymorphic alleles at position 172412942 of chromosome 5 was different from those without colorectal cancer (Table 93). The dominant test for risk associated with carrying the C allele had an empirical p-value based on permutation analysis of 0.000974, and the corresponding dominant odds ratio is 1.353 (Table 93). These data further suggest that this marker is associated with colorectal cancer risk and that the C allele at position 172412942 of chromosome 5 is associated with an increased risk of developing colorectal cancer.

TABLE 93

| | |
|---|---|
| rs no. | 251253 |
| Chromosome; Position | 5; 172412942 |
| Gene Name | unknown |
| Genotype; Phenotype | n = C; increased risk |
| Hardy-Weinberg | 0.05595 |

| Case | | | | | | | Odds |
|---|---|---|---|---|---|---|---|
| Flag | Allele B | AA | AB | BB | Model | p-Value | Ratio |
| 0 | C | 429 | 437 | 144 | Dominant | 0.000974 | 1.353 |
| 1 | C | 353 | 503 | 144 | | | |

[0373] Table 93A indicates SNPs found to be in strong linkage disequilibrium with rs251253. To generate this list, correlation coefficients (r²) were calculated between the index SNP and all neighboring SNPs cited in the June 2006 HapMap data set release. An r² cut off of 0.50 was selected for inclusion as evidence for strong genetic linkage, i.e., a “strong linkage disequilibrium.

TABLE 93A
Linked SNPs

| SNP | r² | Position on chr5 | SEQ ID NO |
|---|---|---|---|
| rs251253 | — | 172412942 | 2710 |
| rs29776 | 0.927 | 172414424 | 2711 |
| rs251248 | 0.708 | 172419724 | 2712 |
| rs427684 | 0.708 | 172425055 | 2713 |
| rs251243 | 0.707 | 172433181 | 2714 |
| rs3097320 | 0.708 | 172434579 | 2715 |
| rs3095842 | 0.708 | 172434592 | 2716 |
| rs2560325 | 0.708 | 172436070 | 2717 |
| rs1002620 | 0.708 | 172443943 | 2718 |
| rs370164 | 0.708 | 172448249 | 2719 |
| rs807428 | 0.697 | 172463083 | 2720 |
| rs793356 | 0.748 | 172463167 | 2721 |
| rs251236 | 0.703 | 172467286 | 2722 |
| rs251237 | 0.708 | 172476423 | 2723 |
| rs166122 | 0.674 | 172481315 | 2724 |
| rs3131913 | 0.708 | 172490802 | 2725 |
| rs29795 | 0.64 | 172510009 | 2726 |
| rs255292 | 0.64 | 172513472 | 2727 |

### Example 94

[0374] For individuals with colorectal cancer, the distribution of polymorphic alleles at position 3445838 of chromosome 6 was different from those without colorectal cancer (Table 94). The dominant test for risk associated with carrying the A allele had an empirical p-value based on permutation analysis of 0.002472, and the corresponding dominant odds ratio is 1.326 (Table 94). These data further suggest that this marker is associated with colorectal cancer risk and that the A allele at position 3445838 of chromosome 6 is associated with an increased risk of developing colorectal cancer.

TABLE 94

| | |
|---|---|
| rs no. | 6938454 |
| Chromosome; Position | 6; 3445838 |
| Gene Name | unknown |
| Genotype; Phenotype | n = A; increased risk |
| Hardy-Weinberg | 0.03603 |

| Case | | | | | | | Odds |
|---|---|---|---|---|---|---|---|
| Flag | Allele B | AA | AB | BB | Model | p-Value | Ratio |
| 0 | A | 680 | 283 | 45 | Dominant | 0.002472 | 1.326 |
| 1 | A | 605 | 336 | 51 | | | |

[0375] Table 94A indicates SNPs found to be in strong linkage disequilibrium with rs6938454. To generate this list, correlation coefficients (r²) were calculated between the index SNP and all neighboring SNPs cited in the June 2006 HapMap data set release. An r² cut off of 0.50 was selected for inclusion as evidence for strong genetic linkage, i.e., a “strong linkage disequilibrium.

TABLE 94A
Linked SNPs

| SNP | r² | Position on chr6 | SEQ ID NO |
|---|---|---|---|
| rs9392499 | 0.795 | 3421102 | 2728 |
| rs9378801 | 0.774 | 3422474 | 2729 |
| rs913534 | 0.887 | 3426661 | 2730 |
| rs4959843 | 0.887 | 3427976 | 2731 |
| rs4959244 | 0.887 | 3428061 | 2732 |
| rs7761353 | 0.887 | 3428441 | 2733 |
| rs2770306 | 0.887 | 3428863 | 2734 |
| rs6596979 | 0.887 | 3432929 | 2735 |
| rs7763703 | 0.884 | 3433624 | 2736 |
| rs7750549 | 0.871 | 3433664 | 2737 |
| rs1205040 | 0.718 | 3435785 | 2738 |
| rs978700 | 0.96 | 3437612 | 2739 |
| rs748270 | 0.958 | 3438187 | 2740 |
| rs4959245 | 0.92 | 3439001 | 2741 |
| rs1831194 | 1.0 | 3439774 | 2742 |
| rs9392500 | 1.0 | 3440198 | 2743 |
| rs6938454 | — | 3445838 | 2744 |

### Example 95

[0376] For individuals with colorectal cancer, the distribution of polymorphic alleles at position 8944645 of chromosome 6 was different from those without colorectal cancer (Table 95). The recessive test for risk associated with carrying the G allele had an empirical p-value of 0.004674 based on permutation analysis, and the corresponding recessive odds ratio is 1.348 (Table 95). These data further suggest that this marker is associated with colorectal cancer risk and that the G allele at position 8944645 of chromosome 6 is associated with an increased risk of developing colorectal cancer.

TABLE 95

| | |
|---|---|
| rs no. | 2327112 |
| Chromosome; Position | 6; 8944645 |
| Gene Name | unknown |
| Genotype; Phenotype | n = G; increased risk |
| Hardy-Weinberg | 0.00757 |

| Case | | | | | | | Odds |
|---|---|---|---|---|---|---|---|
| Flag | Allele B | AA | AB | BB | Model | p-Value | Ratio |
| 0 | G | 254 | 562 | 222 | Recessive | 0.004674 | 1.348 |
| 1 | G | 215 | 464 | 249 | | | |

[0377] Table 95A indicates SNPs found to be in strong linkage disequilibrium with rs2327112. To generate this list, correlation coefficients (r²) were calculated between the index SNP and all neighboring SNPs cited in the June 2006 HapMap data set release. An r² cut off of 0.50 was selected for inclusion as evidence for strong genetic linkage, i.e., a “strong linkage disequilibrium.

TABLE 95A
Linked SNPs

| SNP | r² | Position on chr6 | SEQ ID NO |
|---|---|---|---|
| rs4960473 | 0.511 | 8930286 | 2745 |
| rs9405431 | 0.509 | 8932904 | 2746 |
| rs9406229 | 0.577 | 8934563 | 2747 |
| rs9379274 | 0.593 | 8935206 | 2748 |
| rs6597377 | 0.764 | 8936885 | 2749 |
| rs9505582 | 0.778 | 8939853 | 2750 |
| rs2327112 | — | 8944645 | 2751 |

### Example 96

[0378] For individuals with colorectal cancer, the distribution of polymorphic alleles at position 10970876 of chromosome 6 was different from those without colorectal cancer (Table 96). The dominant test for risk associated with carrying the G allele had an empirical p-value based on permutation analysis of 0.00059, and the corresponding dominant odds ratio is 1.512 (Table 96). These data further suggest that this marker is associated with colorectal cancer risk and that the G allele at position 10970876 of chromosome 6 is associated with an increased risk of developing colorectal cancer.

TABLE 96

| | |
|---|---|
| rs no. | 1233846 |
| Chromosome; Position | 6; 10970876 |
| Gene Name | unknown |
| Genotype; Phenotype | n = G; increased risk |
| Hardy-Weinberg | 0.01982 |

| Case | | | | | | | Odds |
|---|---|---|---|---|---|---|---|
| Flag | Allele B | AA | AB | BB | Model | p-Value | Ratio |
| 0 | G | 210 | 479 | 368 | Dominant | 0.00059 | 1.512 |
| 1 | G | 134 | 448 | 369 | | | |

[0379] Table 96A indicates SNPs found to be in strong linkage disequilibrium with rs1233846. To generate this list, correlation coefficients (r²) were calculated between the index SNP and all neighboring SNPs cited in the June 2006 HapMap data set release. An r² cut off of 0.50 was selected for inclusion as evidence for strong genetic linkage, i.e., a “strong linkage disequilibrium.

TABLE 96A
Linked SNPs

| SNP | r² | Position on chr6 | SEQ ID NO |
|---|---|---|---|
| rs578785 | 0.964 | 10955923 | 2752 |
| rs1767771 | 1.0 | 10965632 | 2753 |
| rs1233846 | — | 10970876 | 2754 |
| rs6456719 | 1.0 | 10971311 | 2755 |
| rs3843519 | 1.0 | 10973858 | 2756 |
| rs9379881 | 0.692 | 10985853 | 2757 |
| rs3756957 | 0.632 | 10987982 | 2758 |
| rs12211124 | 0.604 | 10994571 | 2759 |

### Example 97

[0380] For individuals with colorectal cancer, the distribution of polymorphic alleles at position 12403489 of chromosome 6, found within the EDN1 gene, was different from those without colorectal cancer (Table 97). The trend test for risk associated with carrying the G allele had an empirical p-value of 0.000746 based on permutation analysis, and the corresponding Mantel-Haenszel odds ratio for trend is 1.269 (Table 97). These data further suggest that this marker, located within the EDN1 gene, is associated with colorectal cancer risk and that the G allele at position 12403489 of chromosome 6 is associated with an increased risk of developing colorectal cancer.

TABLE 97

| | |
|---|---|
| rs no. | 1626492 |
| Chromosome; Position | 6; 12403489 |
| Gene Name | EDN1 |
| SEQ ID NO; Position | 5656; 4845 |
| Genotype; Phenotype | n = G; increased risk |
| Hardy-Weinberg | 0.65688 |

| Case | | | | | | | Odds |
|---|---|---|---|---|---|---|---|
| Flag | Allele B | AA | AB | BB | Model | p-Value | Ratio |
| 0 | G | 95 | 432 | 526 | Trend | 0.000746 | 1.269 |
| 1 | G | 60 | 350 | 539 | | | |

[0381] Table 97A indicates SNPs found to be in strong linkage disequilibrium with rs1626492. To generate this list, correlation coefficients (r²) were calculated between the index SNP and all neighboring SNPs cited in the June 2006 HapMap data set release. An r² cut off of 0.50 was selected for inclusion as evidence for strong genetic linkage, i.e., a “strong linkage disequilibrium.

TABLE 97A
Linked SNPs

| SNP | r² | Position on chr6 | SEQ ID NO |
|---|---|---|---|
| rs1626492 | — | 12403489 | 2760 |

### Example 98

[0382] For individuals with colorectal cancer, the distribution of polymorphic alleles at position 12517402 of chromosome 6 was different from those without colorectal cancer (Table 98). The recessive test for risk associated with carrying the C allele had an empirical p-value of 0.000928 based on permutation analysis, and the corresponding recessive odds ratio is 1.353 (Table 98). These data further suggest that this marker is associated with colorectal cancer risk and that the C allele at position 12517402 of chromosome 6 is associated with an increased risk of developing colorectal cancer.

TABLE 98

| | |
|---|---|
| rs no. | 12216318 |
| Chromosome; Position | 6; 12517402 |
| Gene Name | unknown |
| Genotype; Phenotype | n = C; increased risk |
| Hardy-Weinberg | 0.00999 |

| Case | | | | | | | Odds |
|---|---|---|---|---|---|---|---|
| Flag | Allele B | AA | AB | BB | Model | p-Value | Ratio |
| 0 | C | 124 | 532 | 402 | Recessive | 0.000928 | 1.353 |
| 1 | C | 132 | 389 | 432 | | | |

[0383] Table 98A indicates SNPs found to be in strong linkage disequilibrium with rs12216318. To generate this list, correlation coefficients (r²) were calculated between the index SNP and all neighboring SNPs cited in the June 2006 HapMap data set release. An r² cut off of 0.50 was selected for inclusion as evidence for strong genetic linkage, i.e., a “strong linkage disequilibrium.

TABLE 98A
Linked SNPs

| SNP | r² | Position on chr6 | SEQ ID NO |
|---|---|---|---|
| rs12194574 | 0.963 | 12512974 | 2761 |
| rs7739575 | 0.583 | 12513387 | 2762 |
| rs9471684 | 1.0 | 12514506 | 2763 |
| rs12216318 | — | 12517402 | 2764 |
| rs12197800 | 1.0 | 12517609 | 2765 |
| rs12199302 | 1.0 | 12517893 | 2766 |
| rs9471691 | 1.0 | 12519141 | 2767 |
| rs7744631 | 0.931 | 12520304 | 2768 |
| rs9462757 | 1.0 | 12522290 | 2769 |
| rs9471712 | 0.966 | 12525249 | 2770 |
| rs12528246 | 0.966 | 12532953 | 2771 |

### Example 99

[0384] For individuals with colorectal cancer, the distribution of polymorphic alleles at position 20099425 of chromosome 6, found within the LOC442165 gene, was different from those without colorectal cancer (Table 99). The dominant test for risk associated with carrying the T allele had an empirical p-value based on permutation analysis of 0.007512, and the corresponding dominant odds ratio is 1.861 (Table 99). These data further suggest that this marker, located within the LOC442165 gene, is associated with colorectal cancer risk and that the T allele at position 20099425 of chromosome 6 is associated with an increased risk of developing colorectal cancer.

TABLE 99

| | rs no. | | | | 9295456 | | |
|---|---|---|---|---|---|---|---|
| | Chromosome; Position | | | | 6; 20099425 | | |
| | Gene Name | | | | LOC442165 | | |
| | SEQ ID NO; Position | | | | 5657; 51726 | | |
| | Genotype; Phenotype | | | | n = T; increased risk | | |
| | Hardy-Weinberg | | | | 0.19360 | | |
| Case | | | | | | | Odds |
| Flag | Allele B | AA | AB | BB | Model | p-Value | Ratio |
| 0 | T | 53 | 343 | 703 | Dominant | 0.007512 | 1.861 |
| 1 | T | 29 | 371 | 694 | | | |

[0385] Table 99A indicates SNPs found to be in strong linkage disequilibrium with rs9295456. To generate this list, correlation coefficients (r²) were calculated between the index SNP and all neighboring SNPs cited in the June 2006 HapMap data set release. An r² cut off of 0.50 was selected for inclusion as evidence for strong genetic linkage, i.e., a “strong linkage disequilibrium.

TABLE 99A
Linked SNPs

| SNP | r² | Position on chr6 | SEQ ID NO |
|---|---|---|---|
| rs9358290 | 0.945 | 20091192 | 2772 |
| rs12194143 | 1.0 | 20095790 | 2773 |
| rs9358291 | 1.0 | 20096424 | 2774 |
| rs9348404 | 1.0 | 20096632 | 2775 |
| rs9295456 | — | 20099425 | 2776 |
| rs7749252 | 0.945 | 20100741 | 2777 |
| rs9358292 | 1.0 | 20103710 | 2778 |
| rs9350204 | 0.945 | 20104787 | 2779 |
| rs9358294 | 1.0 | 20107101 | 2780 |
| rs9358295 | 0.928 | 20107989 | 2781 |
| rs7755724 | 1.0 | 20109678 | 2782 |
| rs10946358 | 1.0 | 20109906 | 2783 |
| rs10806911 | 1.0 | 20110042 | 2784 |
| rs7775315 | 1.0 | 20111136 | 2785 |
| rs9366325 | 1.0 | 20111283 | 2786 |
| rs9366326 | 1.0 | 20111445 | 2787 |

### Example 100

[0386] For individuals with colorectal cancer, the distribution of polymorphic alleles at position 23527622 of chromosome 6 was different from those without colorectal cancer (Table 100). The dominant test for risk associated with carrying the A allele had an empirical p-value based on permutation analysis of 0.001047, and the corresponding dominant odds ratio is 2.585 (Table 100). These data further suggest that this marker is associated with colorectal cancer risk and that the A allele at position 23527622 of chromosome 6 is associated with an increased risk of developing colorectal cancer.

TABLE 100

| | |
|---|---|
| rs no. | 943068 |
| Chromosome; Position | 6; 23527622 |
| Gene Name | unknown |
| Genotype; Phenotype | n = A; increased risk |
| Hardy-Weinberg | 0.84535 |

| Case | | | | | | | Odds |
|---|---|---|---|---|---|---|---|
| Flag | Allele B | AA | AB | BB | Model | p-Value | Ratio |
| 0 | A | 42 | 331 | 683 | Dominant | 0.001047 | 2.585 |
| 1 | A | 15 | 330 | 606 | | | |

[0387] Table 100A indicates SNPs found to be in strong linkage disequilibrium with rs943068. To generate this list, correlation coefficients (r²) were calculated between the index SNP and all neighboring SNPs cited in the June 2006 HapMap data set release. An r² cut off of 0.50 was selected for inclusion as evidence for strong genetic linkage, i.e., a “strong linkage disequilibrium.

TABLE 100A
Linked SNPs

| SNP | r² | Position on chr6 | SEQ ID NO |
|---|---|---|---|
| rs1291386 | 0.722 | 23519068 | 2788 |
| rs11964874 | 0.61 | 23520173 | 2789 |
| rs1291389 | 1.0 | 23521765 | 2790 |
| rs1291390 | 0.919 | 23521908 | 2791 |
| rs1291393 | 1.0 | 23524354 | 2792 |
| rs943068 | — | 23527622 | 2793 |
| rs1291401 | 1.0 | 23528304 | 2794 |
| rs1291402 | 1.0 | 23528945 | 2795 |
| rs2022326 | 0.722 | 23529348 | 2796 |
| rs1291404 | 1.0 | 23531094 | 2797 |
| rs1291405 | 1.0 | 23531190 | 2798 |
| rs1291409 | 1.0 | 23533945 | 2799 |
| rs9356864 | 0.722 | 23544837 | 2800 |
| rs6936349 | 0.722 | 23545252 | 2801 |

### Example 101

[0388] For individuals with colorectal cancer, the distribution of polymorphic alleles at position 39396512 of chromosome 6, found within the KCNK16 gene, was different from those without colorectal cancer (Table 101). The recessive test for risk associated with carrying the A allele had an empirical p-value of 0.004541 based on permutation analysis, and the corresponding recessive odds ratio is 1.418 (Table 101). These data further suggest that this marker, located within the KCNK16 gene, is associated with colorectal cancer risk and that the A allele at position 39396512 of chromosome 6 is associated with an increased risk of developing colorectal cancer.

TABLE 101

| | |
|---|---|
| rs no. | 4714237 |
| Chromosome; Position | 6; 39396512 |
| Gene Name | KCNK16 |
| SEQ ID NO; Position | 5658; 1783 |
| Genotype; Phenotype | n = A; increased risk |
| Hardy-Weinberg | 0.05388 |

| Case | | | | | | | Odds |
|---|---|---|---|---|---|---|---|
| Flag | Allele B | AA | AB | BB | Model | p-Value | Ratio |
| 0 | A | 366 | 508 | 135 | Recessive | 0.004541 | 1.418 |
| 1 | A | 351 | 466 | 179 | | | |

[0389] Table 101A indicates SNPs found to be in strong linkage disequilibrium with rs4714237. To generate this list, correlation coefficients (r²) were calculated between the index SNP and all neighboring SNPs cited in the June 2006 HapMap data set release. An r² cut off of 0.50 was selected for inclusion as evidence for strong genetic linkage, i.e., a “strong linkage disequilibrium.

TABLE 101A
Linked SNPs

| SNP | r² | Position on chr6 | SEQ ID NO |
|---|---|---|---|
| rs4714237 | — | 39396512 | 2802 |
| rs1885622 | 0.963 | 39396865 | 2803 |
| rs1109773 | 0.963 | 39397142 | 2804 |
| rs2894423 | 0.962 | 39397439 | 2805 |
| rs4714238 | 0.963 | 39397492 | 2806 |
| rs9462529 | 0.891 | 39397628 | 2807 |
| rs1109798 | 0.859 | 39397853 | 2808 |
| rs3734619 | 0.961 | 39398178 | 2809 |
| rs3807045 | 0.963 | 39398631 | 2810 |
| rs12333231 | 0.962 | 39399085 | 2811 |
| rs12332819 | 0.962 | 39399130 | 2812 |
| rs11758408 | 0.928 | 39399396 | 2813 |
| rs1328385 | 0.928 | 39399587 | 2814 |
| rs5006081 | 0.63 | 39399731 | 2815 |
| rs1328384 | 0.61 | 39399785 | 2816 |

### Example 102

[0390] For individuals with colorectal cancer, the distribution of polymorphic alleles at position 50379448 of chromosome 6 was different from those without colorectal cancer (Table 102). The trend test for risk associated with carrying the A allele had an empirical p-value of 0.001558 based on permutation analysis, and the corresponding Mantel-Haenszel odds ratio for trend is 1.228 (Table 102). These data further suggest that this marker is associated with colorectal cancer risk and that the A allele at position 50379448 of chromosome 6 is associated with an increased risk of developing colorectal cancer.

TABLE 102

| | |
|---|---|
| rs no. | 7766954 |
| Chromosome; Position | 6; 50379448 |
| Gene Name | unknown |
| Genotype; Phenotype | n = A; increased risk |
| Hardy-Weinberg | 0.89812 |

| Case | | | | | | | Odds |
|---|---|---|---|---|---|---|---|
| Flag | Allele B | AA | AB | BB | Model | p-Value | Ratio |
| 0 | A | 189 | 500 | 322 | Trend | 0.001558 | 1.228 |
| 1 | A | 155 | 460 | 385 | | | |

[0391] Table 102A indicates SNPs found to be in strong linkage disequilibrium with rs7766954. To generate this list, correlation coefficients (r²) were calculated between the index SNP and all neighboring SNPs cited in the June 2006 HapMap data set release. An r² cut off of 0.50 was selected for inclusion as evidence for strong genetic linkage, i.e., a “strong linkage disequilibrium.

TABLE 102A
Linked SNPs

| SNP | r² | Position on chr6 | SEQ ID NO |
|---|---|---|---|
| rs993629 | 0.533 | 50369349 | 2817 |
| rs9349529 | 0.836 | 50369837 | 2818 |
| rs9369947 | 0.694 | 50370105 | 2819 |
| rs9395581 | 1.0 | 50371633 | 2820 |
| rs1492623 | 1.0 | 50371644 | 2821 |
| rs6911488 | 1.0 | 50372103 | 2822 |
| rs9367391 | 0.729 | 50374024 | 2823 |
| rs1873740 | 1.0 | 50374995 | 2824 |
| rs1126287 | 0.83 | 50375792 | 2825 |
| rs977831 | 1.0 | 50376777 | 2826 |
| rs977830 | 1.0 | 50377121 | 2827 |
| rs7766954 | — | 50379448 | 2828 |
| rs7749461 | 0.766 | 50379554 | 2829 |
| rs9367392 | 1.0 | 50383265 | 2830 |
| rs7771203 | 1.0 | 50385551 | 2831 |
| rs1994782 | 0.631 | 50385874 | 2832 |
| rs9357655 | 0.531 | 50387443 | 2833 |
| rs2397000 | 0.591 | 50402079 | 2834 |
| rs9349534 | 0.614 | 50402402 | 2835 |

### Example 103

[0392] For individuals with colorectal cancer, the distribution of polymorphic alleles at position 83067321 of chromosome 6 was different from those without colorectal cancer (Table 103). The dominant test for risk associated with carrying the C allele had an empirical p-value based on permutation analysis of 0.000387, and the corresponding dominant odds ratio is 1.381 (Table 103). These data further suggest that this marker is associated with colorectal cancer risk and that the C allele at position 83067321 of chromosome 6 is associated with an increased risk of developing colorectal cancer.

TABLE 103

| | |
|---|---|
| rs no. | 507500 |
| Chromosome; Position | 6; 83067321 |
| Gene Name | unknown |
| Genotype; Phenotype | n = C; increased risk |
| Hardy-Weinberg | 0.43210 |

| Case | | | | | | | Odds |
|---|---|---|---|---|---|---|---|
| Flag | Allele B | AA | AB | BB | Model | p-Value | Ratio |
| 0 | C | 505 | 444 | 109 | Dominant | 0.000387 | 1.381 |
| 1 | C | 379 | 467 | 106 | | | |

[0393] Table 103A indicates SNPs found to be in strong linkage disequilibrium with rs507500. To generate this list, correlation coefficients (r²) were calculated between the index SNP and all neighboring SNPs cited in the June 2006 HapMap data set release. An r² cut off of 0.50 was selected for inclusion as evidence for strong genetic linkage, i.e., a “strong linkage disequilibrium.

TABLE 103A
Linked SNPs

| SNP | r² | Position on chr6 | SEQ ID NO |
|---|---|---|---|
| rs2323642 | 0.56 | 82950808 | 2836 |
| rs540814 | 0.581 | 83037702 | 2837 |
| rs2753211 | 0.632 | 83052756 | 2838 |
| rs2753212 | 0.63 | 83052893 | 2839 |
| rs9344267 | 0.875 | 83059529 | 2840 |
| rs62953 | 0.698 | 83059811 | 2841 |
| rs529833 | 0.715 | 83063355 | 2842 |
| rs544734 | 0.882 | 83065585 | 2843 |
| rs554594 | 0.882 | 83065715 | 2844 |
| rs511002 | 0.914 | 83066965 | 2845 |
| rs507500 | — | 83067321 | 2846 |
| rs532219 | 0.921 | 83079412 | 2847 |
| rs577767 | 0.882 | 83086171 | 2848 |
| rs526833 | 0.882 | 83086772 | 2849 |
| rs7756828 | 0.917 | 83087733 | 2850 |
| rs508106 | 0.919 | 83088471 | 2851 |
| rs555844 | 1.0 | 83089659 | 2852 |
| rs1923137 | 0.917 | 83092525 | 2853 |
| rs1923138 | 0.882 | 83092537 | 2854 |
| rs723142 | 0.921 | 83094274 | 2855 |
| rs2180742 | 0.92 | 83094499 | 2856 |
| rs1547614 | 0.882 | 83094576 | 2857 |
| rs2145368 | 0.921 | 83095347 | 2858 |
| rs2180743 | 0.921 | 83095565 | 2859 |
| rs7762072 | 0.877 | 83095939 | 2860 |
| rs13191698 | 1.0 | 83096974 | 2861 |
| rs13207433 | 0.882 | 83097004 | 2862 |
| rs1321622 | 0.804 | 83097222 | 2863 |
| rs9353066 | 1.0 | 83098262 | 2864 |
| rs6907015 | 0.882 | 83098329 | 2865 |
| rs6930014 | 0.882 | 83098352 | 2866 |
| rs9353067 | 0.96 | 83100260 | 2867 |
| rs9353068 | 1.0 | 83101000 | 2868 |
| rs2024996 | 0.96 | 83103870 | 2869 |
| rs12527551 | 0.96 | 83104741 | 2870 |
| rs9344270 | 1.0 | 83105428 | 2871 |
| rs796398 | 0.882 | 83113039 | 2872 |
| rs770904 | 1.0 | 83114887 | 2873 |
| rs770897 | 0.853 | 83120523 | 2874 |
| rs770898 | 0.82 | 83122607 | 2875 |
| rs770894 | 0.706 | 83126442 | 2876 |
| rs770895 | 0.706 | 83127291 | 2877 |
| rs1570140 | 0.822 | 83129590 | 2878 |
| rs770911 | 0.822 | 83131084 | 2879 |
| rs1275806 | 0.723 | 83137358 | 2880 |
| rs2875128 | 0.507 | 83169297 | 2899 |
| rs9449475 | 0.501 | 83170215 | 2901 |

### Example 104

[0394] For individuals with colorectal cancer, the distribution of polymorphic alleles at position 83146661 of chromosome 6 was different from those without colorectal cancer (Table 104). The dominant test for risk associated with carrying the G allele had an empirical p-value based on permutation analysis of 0.000135, and the corresponding dominant odds ratio is 1.422 (Table 104). These data further suggest that this marker is associated with colorectal cancer risk and that the G allele at position 83146661 of chromosome 6 is associated with an increased risk of developing colorectal cancer.

TABLE 104

| | |
|---|---|
| rs no. | 932614 |
| Chromosome; Position | 6; 83146661 |
| Gene Name | unknown |
| Genotype; Phenotype | n = G; increased risk |
| Hardy-Weinberg | 0.32881 |

| Case | | | | | | | Odds |
|---|---|---|---|---|---|---|---|
| Flag | Allele B | AA | AB | BB | Model | p-Value | Ratio |
| 0 | G | 461 | 446 | 124 | Dominant | 0.000135 | 1.422 |
| 1 | G | 339 | 466 | 130 | | | |

[0395] Table 104A indicates SNPs found to be in strong linkage disequilibrium with rs932614. To generate this list, correlation coefficients (r²) were calculated between the index SNP and all neighboring SNPs cited in the June 2006 HapMap data set release. An r² cut off of 0.50 was selected for inclusion as evidence for strong genetic linkage, i.e., a “strong linkage disequilibrium.

TABLE 104A
Linked SNPs

| SNP | r² | Position on chr6 | SEQ ID NO |
|---|---|---|---|
| rs2323642 | 0.521 | 82950808 | 2836 |
| rs511002 | 0.513 | 83066965 | 2845 |
| rs532219 | 0.525 | 83079412 | 2847 |
| rs7756828 | 0.507 | 83087733 | 2850 |
| rs508106 | 0.517 | 83088471 | 2851 |
| rs1923137 | 0.509 | 83092525 | 2853 |
| rs723142 | 0.525 | 83094274 | 2855 |
| rs2180742 | 0.525 | 83094499 | 2856 |
| rs2145368 | 0.525 | 83095347 | 2858 |
| rs2180743 | 0.525 | 83095565 | 2859 |
| rs7762072 | 0.538 | 83095939 | 2860 |
| rs770897 | 0.591 | 83120523 | 2874 |
| rs770898 | 0.618 | 83122607 | 2875 |
| rs770894 | 0.65 | 83126442 | 2876 |
| rs770895 | 0.65 | 83127291 | 2877 |
| rs1570140 | 0.624 | 83129590 | 2878 |
| rs770911 | 0.624 | 83131084 | 2879 |
| rs1275806 | 0.538 | 83137358 | 2880 |
| rs770906 | 1.0 | 83140060 | 2881 |
| rs6454268 | 0.889 | 83144954 | 2882 |
| rs6911109 | 0.918 | 83146375 | 2883 |
| rs932614 | — | 83146661 | 2884 |
| rs9344274 | 0.925 | 83147795 | 2885 |
| rs1951006 | 1.0 | 83150543 | 2886 |
| rs1321795 | 0.91 | 83150571 | 2887 |
| rs9449462 | 0.925 | 83153296 | 2888 |
| rs9361914 | 0.925 | 83155501 | 2889 |
| rs714133 | 1.0 | 83162032 | 2890 |
| rs1998204 | 0.925 | 83163350 | 2891 |
| rs1853143 | 0.925 | 83165082 | 2892 |
| rs4706945 | 1.0 | 83165771 | 2893 |
| rs12211231 | 0.923 | 83166290 | 2894 |
| rs9449469 | 1.0 | 83167427 | 2895 |
| rs9449470 | 0.962 | 83167802 | 2896 |
| rs4706948 | 0.925 | 83168404 | 2897 |
| rs6454271 | 0.824 | 83169083 | 2898 |
| rs2875128 | 0.881 | 83169297 | 2899 |
| rs6912008 | 0.925 | 83169493 | 2900 |
| rs9449475 | 0.96 | 83170215 | 2901 |
| rs967730 | 0.96 | 83170490 | 2902 |
| rs967731 | 0.962 | 83170598 | 2903 |
| rs9361923 | 0.925 | 83172329 | 2904 |

### Example 105

[0396] For individuals with colorectal cancer, the distribution of polymorphic alleles at position 93587421 of chromosome 6 was different from those without colorectal cancer (Table 105). The dominant test for risk associated with carrying the C allele had an empirical p-value based on permutation analysis of 0.003475, and the corresponding dominant odds ratio is 1.317 (Table 105). These data further suggest that this marker is associated with colorectal cancer risk and that the C allele at position 93587421 of chromosome 6 is associated with an increased risk of developing colorectal cancer.

TABLE 105

| | |
|---|---|
| rs no. | 9452134 |
| Chromosome; Position | 6; 93587421 |
| Gene Name | unknown |
| Genotype; Phenotype | n = C; increased risk |
| Hardy-Weinberg | 0.04500 |

| Case | | | | | | | Odds |
|---|---|---|---|---|---|---|---|
| Flag | Allele B | AA | AB | BB | Model | p-Value | Ratio |
| 0 | C | 684 | 300 | 48 | Dominant | 0.003475 | 1.317 |
| 1 | C | 552 | 328 | 42 | | | |

[0397] Table 105A indicates SNPs found to be in strong linkage disequilibrium with rs9452134. To generate this list, correlation coefficients (r²) were calculated between the index SNP and all neighboring SNPs cited in the June 2006 HapMap data set release. An r² cut off of 0.50 was selected for inclusion as evidence for strong genetic linkage, i.e., a “strong linkage disequilibrium.

TABLE 105A
Linked SNPs

| SNP | r² | Position on chr6 | SEQ ID NO |
|---|---|---|---|
| rs9452113 | 1.0 | 93549999 | 2905 |
| rs9452114 | 0.928 | 93550988 | 2906 |
| rs13213089 | 0.775 | 93574060 | 2907 |
| rs11962323 | 0.608 | 93574522 | 2908 |
| rs11964555 | 0.552 | 93574540 | 2909 |
| rs11970040 | 0.598 | 93574573 | 2910 |
| rs6899693 | 0.609 | 93575648 | 2911 |
| rs10806462 | 0.608 | 93576176 | 2912 |
| rs9452121 | 1.0 | 93576560 | 2913 |
| rs9294536 | 0.609 | 93576978 | 2914 |
| rs1515788 | 0.559 | 93577084 | 2915 |
| rs9294537 | 0.72 | 93577313 | 2916 |
| rs1399941 | 0.731 | 93577607 | 2917 |
| rs6902337 | 0.73 | 93577840 | 2918 |
| rs6922656 | 0.73 | 93577997 | 2919 |
| rs6922978 | 0.73 | 93578092 | 2920 |
| rs9452123 | 0.731 | 93578445 | 2921 |
| rs9445023 | 0.89 | 93578855 | 2922 |
| rs9294538 | 1.0 | 93579206 | 2923 |
| rs9452124 | 0.886 | 93579392 | 2924 |
| rs9452125 | 0.89 | 93579470 | 2925 |
| rs13215884 | 0.848 | 93579873 | 2926 |
| rs9452127 | 0.848 | 93580591 | 2927 |
| rs13205868 | 0.889 | 93581103 | 2928 |
| rs13193833 | 1.0 | 93581640 | 2929 |
| rs13202541 | 0.74 | 93583843 | 2930 |
| rs13203186 | 0.863 | 93584500 | 2931 |
| rs9452134 | — | 93587421 | 2932 |
| rs9445025 | 0.841 | 93587478 | 2933 |
| rs9452135 | 0.889 | 93587745 | 2934 |
| rs9445026 | 1.0 | 93588743 | 2935 |
| rs9452138 | 1.0 | 93588760 | 2936 |
| rs6454913 | 0.87 | 93611698 | 2937 |
| rs1554155 | 0.635 | 93614915 | 2938 |
| rs7741495 | 0.895 | 93617324 | 2939 |
| rs9359995 | 0.894 | 93617727 | 2940 |
| rs1040155 | 0.636 | 93617871 | 2941 |
| rs2325466 | 0.886 | 93618465 | 2942 |
| rs1606923 | 0.636 | 93618592 | 2943 |
| rs1606922 | 0.636 | 93618621 | 2944 |
| rs12194329 | 0.639 | 93618956 | 2945 |
| rs1546613 | 0.616 | 93619679 | 2946 |
| rs4269341 | 0.636 | 93619875 | 2947 |
| rs4599596 | 0.663 | 93619969 | 2948 |
| rs9345286 | 0.688 | 93620707 | 2949 |
| rs9294541 | 0.697 | 93620981 | 2950 |
| rs1515800 | 0.697 | 93621417 | 2951 |
| rs2325467 | 0.697 | 93621503 | 2952 |
| rs7767505 | 0.688 | 93621875 | 2953 |
| rs9351333 | 0.697 | 93622542 | 2954 |
| rs9294548 | 0.722 | 93623082 | 2955 |
| rs1515782 | 0.676 | 93626943 | 2956 |
| rs981156 | 0.643 | 93627153 | 2957 |
| rs9345289 | 0.555 | 93631417 | 2958 |
| rs874423 | 0.553 | 93632051 | 2959 |
| rs9353952 | 0.554 | 93633298 | 2960 |
| rs4707763 | 0.674 | 93633564 | 2961 |
| rs9353955 | 0.557 | 93639815 | 2962 |
| rs9360000 | 0.581 | 93641321 | 2963 |
| rs9351339 | 0.557 | 93641611 | 2964 |
| rs9353957 | 0.534 | 93643621 | 2965 |
| rs1591740 | 0.643 | 93644555 | 2966 |
| rs6934758 | 0.581 | 93644941 | 2967 |
| rs2506952 | 0.676 | 93647163 | 2968 |
| rs6927725 | 0.557 | 93649192 | 2969 |
| rs10944628 | 0.676 | 93650622 | 2970 |
| rs2485815 | 0.676 | 93653196 | 2971 |
| rs1002219 | 0.643 | 93655110 | 2972 |

### Example 106

[0398] For individuals with colorectal cancer, the distribution of polymorphic alleles at position 129880427 of chromosome 6 was different from those without colorectal cancer (Table 106). The trend test for risk associated with carrying the A allele had an empirical p-value of 0.002908 based on permutation analysis, and the corresponding Mantel-Haenszel odds ratio for trend is 1.363 (Table 106). These data further suggest that this marker is associated with colorectal cancer risk and that the A allele at position 129880427 of chromosome 6 is associated with an increased risk of developing colorectal cancer.

TABLE 106

| | |
|---|---|
| rs no. | 17753229 |
| Chromosome; Position | 6; 129880427 |
| Gene Name | unknown |
| Genotype; Phenotype | n = A; increased risk |
| Hardy-Weinberg | 0.17441 |

| Case | | | | | | | Odds |
|---|---|---|---|---|---|---|---|
| Flag | Allele B | AA | AB | BB | Model | p-Value | Ratio |
| 0 | A | 12 | 158 | 840 | Trend | 0.002908 | 1.363 |
| 1 | A | 1 | 128 | 872 | | | |

[0399] Table 106A indicates SNPs found to be in strong linkage disequilibrium with rs17753229. To generate this list, correlation coefficients (r²) were calculated between the index SNP and all neighboring SNPs cited in the June 2006 HapMap data set release. An r² cut off of 0.50 was selected for inclusion as evidence for strong genetic linkage, i.e., a “strong linkage disequilibrium.

TABLE 106A
Linked SNPs

| SNP | r² | Position on chr6 | SEQ ID NO |
|---|---|---|---|
| rs12203042 | 0.574 | 129859646 | 2973 |
| rs17753229 | — | 129880427 | 2974 |

### Example 107

[0400] For individuals with colorectal cancer, the distribution of polymorphic alleles at position 131751505 of chromosome 6 was different from those without colorectal cancer (Table 107). The dominant test for risk associated with carrying the C allele had an empirical p-value based on permutation analysis of 0.000155, and the corresponding dominant odds ratio is 1.423 (Table 107). These data further suggest that this marker is associated with colorectal cancer risk and that the C allele at position 131751505 of chromosome 6 is associated with an increased risk of developing colorectal cancer.

TABLE 107

| | |
|---|---|
| rs no. | 6933778 |
| Chromosome; Position | 6; 131751505 |
| Gene Name | unknown |
| Genotype; Phenotype | n = C; increased risk |
| Hardy-Weinberg | 1.00000 |

| Case | | | | | | | Odds |
|---|---|---|---|---|---|---|---|
| Flag | Allele B | AA | AB | BB | Model | p-Value | Ratio |
| 0 | C | 432 | 487 | 137 | Dominant | 0.000155 | 1.423 |
| 1 | C | 310 | 497 | 140 | | | |

[0401] Table 107A indicates SNPs found to be in strong linkage disequilibrium with rs6933778. To generate this list, correlation coefficients (r²) were calculated between the index SNP and all neighboring SNPs cited in the June 2006 HapMap data set release. An r² cut off of 0.50 was selected for inclusion as evidence for strong genetic linkage, i.e., a “strong linkage disequilibrium.

TABLE 107A
Linked SNPs

| SNP | r² | Position on chr6 | SEQ ID NO |
|---|---|---|---|
| rs11154635 | 0.792 | 131737411 | 2975 |
| rs11154636 | 0.79 | 131738018 | 2976 |
| rs12211067 | 0.788 | 131738569 | 2977 |
| rs11965227 | 0.792 | 131740637 | 2978 |
| rs7738227 | 0.792 | 131740693 | 2979 |
| rs6929522 | 0.53 | 131747407 | 2980 |
| rs6916044 | 0.53 | 131748781 | 2981 |
| rs2327146 | 0.861 | 131749219 | 2982 |
| rs10782246 | 1.0 | 131749871 | 2983 |
| rs9483268 | 0.606 | 131749981 | 2984 |
| rs6927775 | 1.0 | 131750606 | 2985 |
| rs12210559 | 0.852 | 131750761 | 2986 |
| rs6905977 | 1.0 | 131751136 | 2987 |
| rs6910834 | 1.0 | 131751408 | 2988 |
| rs6933778 | — | 131751505 | 2989 |
| rs2327147 | 1.0 | 131752090 | 2990 |
| rs9321285 | 1.0 | 131752582 | 2991 |
| rs2024599 | 1.0 | 131753351 | 2992 |
| rs2024600 | 1.0 | 131753446 | 2993 |
| rs2143774 | 0.925 | 131753744 | 2994 |
| rs2206980 | 0.649 | 131754312 | 2995 |
| rs2206981 | 0.962 | 131754361 | 2996 |
| rs4897513 | 0.956 | 131755156 | 2997 |
| rs4897514 | 0.951 | 131755195 | 2998 |
| rs2327148 | 0.958 | 131755663 | 2999 |
| rs7452300 | 0.962 | 131756431 | 3000 |
| rs2143778 | 0.962 | 131756778 | 3001 |
| rs2143782 | 0.955 | 131756962 | 3002 |
| rs7382142 | 0.961 | 131757296 | 3003 |
| rs2143783 | 0.962 | 131757526 | 3004 |
| rs7753432 | 0.961 | 131758263 | 3005 |
| rs7757400 | 0.861 | 131758274 | 3006 |
| rs2092601 | 0.649 | 131759702 | 3007 |
| rs6569738 | 0.745 | 131762896 | 3008 |
| rs6569739 | 0.877 | 131762912 | 3009 |
| rs2143776 | 0.745 | 131772200 | 3010 |

### Example 108

[0402] For individuals with colorectal cancer, the distribution of polymorphic alleles at position 133771457 of chromosome 6, found within the EYA4 gene, was different from those without colorectal cancer (Table 108). The trend test for risk associated with carrying the T allele had an empirical p-value of 0.004718 based on permutation analysis, and the corresponding Mantel-Haenszel odds ratio for trend is 1.28 (Table 108). These data further suggest that this marker, located within the EYA4 gene, is associated with colorectal cancer risk and that the T allele at position 133771457 of chromosome 6 is associated with an increased risk of developing colorectal cancer.

TABLE 108

| | rs no. | | | | 1336533 | | |
|---|---|---|---|---|---|---|---|
| | Chromosome; Position | | | | 6; 133771457 | | |
| | Gene Name | | | | EYA4 | | |
| | SEQ ID NO; Position | | | | 5659; 167252 | | |
| | Genotype; Phenotype | | | | n = T; increased risk | | |
| | Hardy-Weinberg | | | | 0.72024 | | |
| Case | | | | | | | Odds |
| Flag | Allele B | AA | AB | BB | Model | p-Value | Ratio |
| 0 | T | 635 | 250 | 27 | Trend | 0.004718 | 1.28 |
| 1 | T | 596 | 305 | 38 | | | |

[0403] Table 108A indicates SNPs found to be in strong linkage disequilibrium with rs1336533. To generate this list, correlation coefficients (r²) were calculated between the index SNP and all neighboring SNPs cited in the June 2006 HapMap data set release. An r² cut off of 0.50 was selected for inclusion as evidence for strong genetic linkage, i.e., a “strong linkage disequilibrium.

TABLE 108A
Linked SNPs

| SNP | r² | Position on chr6 | SEQ ID NO |
|---|---|---|---|
| rs1336533 | — | 133771457 | 3011 |
| rs9389077 | 0.957 | 133782576 | 3012 |
| rs9402510 | 0.951 | 133786144 | 3013 |
| rs3777849 | 0.917 | 133788718 | 3014 |
| rs1336534 | 0.597 | 133795518 | 3015 |
| rs9375963 | 0.914 | 133796900 | 3016 |
| rs10782249 | 0.745 | 133797315 | 3017 |
| rs9373053 | 0.612 | 133798398 | 3018 |
| rs1012605 | 0.631 | 133799240 | 3019 |
| rs760861 | 0.597 | 133803356 | 3020 |
| rs6907872 | 0.553 | 133805598 | 3021 |
| rs9375964 | 0.913 | 133806056 | 3022 |
| rs9389078 | 0.914 | 133808124 | 3023 |
| rs10872405 | 0.719 | 133810497 | 3024 |
| rs6912844 | 0.914 | 133812159 | 3025 |
| rs9399065 | 0.909 | 133817050 | 3026 |
| rs9373054 | 0.917 | 133817187 | 3027 |
| rs10872406 | 0.719 | 133817805 | 3028 |
| rs11154727 | 0.917 | 133817815 | 3029 |
| rs3777864 | 0.917 | 133820602 | 3030 |
| rs2025705 | 0.917 | 133820854 | 3031 |
| rs12211899 | 0.917 | 133823646 | 3032 |
| rs9373055 | 0.914 | 133824778 | 3033 |
| rs766541 | 0.917 | 133828176 | 3034 |

### Example 109

[0404] For individuals with colorectal cancer, the distribution of polymorphic alleles at position 158382054 of chromosome 6, found within the SYNJ2 gene, was different from those without colorectal cancer (Table 109). The dominant test for risk associated with carrying the A allele had an empirical p-value based on permutation analysis of 2.8e-05, and the corresponding dominant odds ratio is 1.636 (Table 109). These data further suggest that this marker, located within the SYNJ2 gene, is associated with colorectal cancer risk and that the A allele at position 158382054 of chromosome 6 is associated with an increased risk of developing colorectal cancer.

TABLE 109

| | |
|---|---|
| rs no. | 9459057 |
| Chromosome; Position | 6; 158382054 |
| Gene Name | SYNJ2 |
| SEQ ID NO; Position | 5660; 8732 |
| Genotype; Phenotype | n = A; increased risk |
| Hardy-Weinberg | 0.00085 |

| Case | | | | | | | Odds |
|---|---|---|---|---|---|---|---|
| Flag | Allele B | AA | AB | BB | Model | p-Value | Ratio |
| 0 | A | 231 | 457 | 344 | Dominant | 2.8e−05 | 1.636 |
| 1 | A | 138 | 493 | 290 | | | |

[0405] Table 109A indicates SNPs found to be in strong linkage disequilibrium with rs9459057. To generate this list, correlation coefficients (r²) were calculated between the index SNP and all neighboring SNPs cited in the June 2006 HapMap data set release. An r² cut off of 0.50 was selected for inclusion as evidence for strong genetic linkage, i.e., a “strong linkage disequilibrium.

TABLE 109A
Linked SNPs

| SNP | r² | Position on chr6 | SEQ ID NO |
|---|---|---|---|
| rs2025641 | 0.654 | 158369411 | 3035 |
| rs11752586 | 0.873 | 158371127 | 3036 |
| rs6455937 | 0.756 | 158375718 | 3037 |
| rs9459056 | 0.621 | 158381773 | 3038 |
| rs9459057 | — | 158382054 | 3039 |
| rs10455934 | 1.0 | 158382593 | 3040 |
| rs10455935 | 1.0 | 158382907 | 3041 |
| rs10455939 | 1.0 | 158382973 | 3042 |
| rs10806791 | 0.9 | 158383089 | 3043 |
| rs10945973 | 0.702 | 158383241 | 3044 |

### Example 110

[0406] For individuals with colorectal cancer, the distribution of polymorphic alleles at position 158644585 of chromosome 6 was different from those without colorectal cancer (Table 110). The dominant test for risk associated with carrying the A allele had an empirical p-value based on permutation analysis of 0.002295, and the corresponding dominant odds ratio is 2.451 (Table 110). These data further suggest that this marker is associated with colorectal cancer risk and that the A allele at position 158644585 of chromosome 6 is associated with an increased risk of developing colorectal cancer.

TABLE 110

| | |
|---|---|
| rs no. | 9364885 |
| Chromosome; Position | 6; 158644585 |
| Gene Name | unknown |
| Genotype; Phenotype | n = A; increased risk |
| Hardy-Weinberg | 0.01859 |

| Case | | | | | | | Odds |
|---|---|---|---|---|---|---|---|
| Flag | Allele B | AA | AB | BB | Model | p-Value | Ratio |
| 0 | A | 40 | 269 | 745 | Dominant | 0.002295 | 2.451 |
| 1 | A | 15 | 258 | 674 | | | |

[0407] Table 110A indicates SNPs found to be in strong linkage disequilibrium with rs9364885. To generate this list, correlation coefficients (r²) were calculated between the index SNP and all neighboring SNPs cited in the June 2006 HapMap data set release. An r² cut off of 0.50 was selected for inclusion as evidence for strong genetic linkage, i.e., a “strong linkage disequilibrium.

TABLE 110A
Linked SNPs

| SNP | r² | Position on chr6 | SEQ ID NO |
|---|---|---|---|
| rs4710078 | 1.0 | 158619762 | 3045 |
| rs9366052 | 1.0 | 158629271 | 3046 |
| rs9364885 | — | 158644585 | 3047 |
| rs9348215 | 1.0 | 158656118 | 3048 |
| rs4710186 | 1.0 | 158664938 | 3049 |
| rs9347176 | 0.928 | 158666456 | 3050 |
| rs4710222 | 1.0 | 158678327 | 3051 |
| rs9348250 | 1.0 | 158679231 | 3052 |
| rs9355631 | 1.0 | 158684979 | 3053 |
| rs9347227 | 1.0 | 158705285 | 3054 |
| rs9355648 | 1.0 | 158707220 | 3055 |
| rs9347231 | 1.0 | 158714406 | 3056 |
| rs9364953 | 1.0 | 158725711 | 3057 |
| rs9355652 | 1.0 | 158751844 | 3058 |

### Example 111

[0408] For individuals with colorectal cancer, the distribution of polymorphic alleles at position 158841582 of chromosome 6, found within the TULP4 gene, was different from those without colorectal cancer (Table 111). The dominant test for risk associated with carrying the C allele had an empirical p-value based on permutation analysis of 0.003497, and the corresponding dominant odds ratio is 1.286 (Table 111). These data further suggest that this marker, located within the TULP4 gene, is associated with colorectal cancer risk and that the C allele at position 158841582 of chromosome 6 is associated with an increased risk of developing colorectal cancer.

TABLE 111

| | |
|---|---|
| rs no. | 341138 |
| Chromosome; Position | 6; 158841582 |
| Gene Name | TULP4 |
| SEQ ID NO; Position | 5661; 137482 |
| Genotype; Phenotype | n = C; increased risk |
| Hardy-Weinberg | 0.25441 |

| Case | | | | | | | Odds |
|---|---|---|---|---|---|---|---|
| Flag | Allele B | AA | AB | BB | Model | p-Value | Ratio |
| 0 | C | 544 | 450 | 110 | Dominant | 0.003497 | 1.286 |
| 1 | C | 470 | 504 | 118 | | | |

[0409] Table 111A indicates SNPs found to be in strong linkage disequilibrium with rs341138. To generate this list, correlation coefficients (r²) were calculated between the index SNP and all neighboring SNPs cited in the June 2006 HapMap data set release. An r² cut off of 0.50 was selected for inclusion as evidence for strong genetic linkage, i.e., a “strong linkage disequilibrium.

TABLE 111A
Linked SNPs

| SNP | r² | Position on chr6 | SEQ ID NO |
|---|---|---|---|
| rs341128 | 1.0 | 158836596 | 3059 |
| rs341130 | 1.0 | 158837583 | 3060 |
| rs341131 | 1.0 | 158838606 | 3061 |
| rs341134 | 1.0 | 158839027 | 3062 |
| rs341135 | 1.0 | 158839757 | 3063 |
| rs341138 | — | 158841582 | 3064 |
| rs827958 | 1.0 | 158843785 | 3065 |
| rs636334 | 1.0 | 158847544 | 3066 |
| rs1754416 | 1.0 | 158848341 | 3067 |
| rs650803 | 1.0 | 158848475 | 3068 |
| rs662079 | 1.0 | 158849467 | 3069 |
| rs2362576 | 1.0 | 158850042 | 3070 |
| rs588580 | 1.0 | 158850353 | 3071 |
| rs602698 | 1.0 | 158852173 | 3072 |
| rs683219 | 1.0 | 158853638 | 3073 |
| rs675453 | 1.0 | 158855871 | 3074 |
| rs652297 | 1.0 | 158855941 | 3075 |
| rs651333 | 1.0 | 158856167 | 3076 |
| rs678116 | 1.0 | 158856424 | 3077 |
| rs2225281 | 1.0 | 158856437 | 3078 |
| rs635995 | 1.0 | 158857267 | 3079 |
| rs585078 | 1.0 | 158857400 | 3080 |
| rs597765 | 1.0 | 158857924 | 3081 |
| rs598665 | 1.0 | 158858138 | 3082 |
| rs631222 | 0.958 | 158859464 | 3083 |
| rs643677 | 1.0 | 158859975 | 3084 |
| rs590841 | 1.0 | 158860490 | 3085 |
| rs659813 | 1.0 | 158861234 | 3086 |
| rs660213 | 1.0 | 158861301 | 3087 |
| rs675053 | 1.0 | 158862362 | 3088 |
| rs595378 | 1.0 | 158863997 | 3089 |
| rs612557 | 0.956 | 158865566 | 3090 |
| rs629389 | 1.0 | 158866045 | 3091 |
| rs629364 | 1.0 | 158866068 | 3092 |
| rs627967 | 1.0 | 158866415 | 3093 |
| rs628203 | 1.0 | 158866736 | 3094 |
| rs2771425 | 0.813 | 158867185 | 3095 |
| rs1571962 | 0.552 | 158873590 | 3096 |
| rs6928393 | 0.521 | 158880182 | 3097 |

### Example 112

[0410] For individuals with colorectal cancer, the distribution of polymorphic alleles at position 167066688 of chromosome 6 was different from those without colorectal cancer (Table 112). The recessive test for risk associated with carrying the T allele had an empirical p-value of 0.007959 based on permutation analysis, and the corresponding recessive odds ratio is 1.793 (Table 112). These data further suggest that this marker is associated with colorectal cancer risk and that the T allele at position 167066688 of chromosome 6 is associated with an increased risk of developing colorectal cancer.

TABLE 112

| | rs no. | | | | 10484524 | | |
|---|---|---|---|---|---|---|---|
| | Chromosome; Position | | | | 6; 167066688 | | |
| | Gene Name | | | | unknown | | |
| | Genotype; Phenotype | | | | n = T; increased risk | | |
| | Hardy-Weinberg | | | | 0.02003 | | |
| Case | | | | | | | Odds |
| Flag | Allele B | AA | AB | BB | Model | p-Value | Ratio |
| 0 | T | 688 | 384 | 33 | Recessive | 0.007959 | 1.793 |
| 1 | T | 716 | 335 | 58 | | | |

[0411] Table 112A indicates SNPs found to be in strong linkage disequilibrium with rs10484524. To generate this list, correlation coefficients (r²) were calculated between the index SNP and all neighboring SNPs cited in the June 2006 HapMap data set release. An r² cut off of 0.50 was selected for inclusion as evidence for strong genetic linkage, i.e., a “strong linkage disequilibrium.

TABLE 112A
Linked SNPs

| SNP | r² | Position on chr6 | SEQ ID NO |
|---|---|---|---|
| rs7752989 | 0.753 | 167053307 | 3098 |
| rs9356509 | 0.752 | 167054179 | 3099 |
| rs9348169 | 0.789 | 167054274 | 3100 |
| rs9348171 | 0.898 | 167059431 | 3101 |
| rs2281143 | 1.0 | 167066262 | 3102 |
| rs10484524 | — | 167066688 | 3103 |

### Example 113

[0412] For individuals with colorectal cancer, the distribution of polymorphic alleles at position 2993500 of chromosome 7 was different from those without colorectal cancer (Table 113). The trend test for risk associated with carrying the C allele had an empirical p-value of 0.003906 based on permutation analysis, and the corresponding Mantel-Haenszel odds ratio for trend is 1.197 (Table 113). These data further suggest that this marker is associated with colorectal cancer risk and that the C allele at position 2993500 of chromosome 7 is associated with an increased risk of developing colorectal cancer.

TABLE 113

| | |
|---|---|
| rs no. | 10241890 |
| Chromosome; Position | 7; 2993500 |
| Gene Name | unknown |
| Genotype; Phenotype | n = C; increased risk |
| Hardy-Weinberg | 0.85242 |

| Case | | | | | | | Odds |
|---|---|---|---|---|---|---|---|
| Flag | Allele B | AA | AB | BB | Model | p-Value | Ratio |
| 0 | C | 379 | 532 | 192 | Trend | 0.003906 | 1.197 |
| 1 | C | 313 | 556 | 222 | | | |

[0413] Table 113A indicates SNPs found to be in strong linkage disequilibrium with rs10241890. To generate this list, correlation coefficients (r²) were calculated between the index SNP and all neighboring SNPs cited in the June 2006 HapMap data set release. An r² cut off of 0.50 was selected for inclusion as evidence for strong genetic linkage, i.e., a “strong linkage disequilibrium.

TABLE 113A
Linked SNPs

| SNP | r² | Position on chr7 | SEQ ID NO |
|---|---|---|---|
| rs10755848 | 0.601 | 2977418 | 3104 |
| rs10807829 | 0.601 | 2977464 | 3105 |
| rs7812211 | 0.601 | 2977762 | 3106 |
| rs10951110 | 0.966 | 2991128 | 3107 |
| rs10241890 | — | 2993500 | 3108 |
| rs10252183 | 0.624 | 2993528 | 3109 |
| rs4534049 | 0.636 | 2994231 | 3110 |
| rs868990 | 1.0 | 2994650 | 3111 |
| rs11768094 | 0.707 | 2997087 | 3112 |
| rs4719830 | 0.507 | 2997243 | 3113 |
| rs4722532 | 0.646 | 2998042 | 3114 |
| rs2334123 | 0.524 | 3001408 | 3115 |
| rs2334122 | 0.532 | 3001529 | 3116 |
| rs17133145 | 0.618 | 3001814 | 3117 |
| rs4719835 | 0.508 | 3002285 | 3118 |
| rs4719837 | 0.513 | 3002516 | 3119 |
| rs6969544 | 0.502 | 3003589 | 3120 |
| rs10499325 | 0.516 | 3006048 | 3121 |
| rs12666681 | 0.516 | 3007382 | 3122 |
| rs12673364 | 0.516 | 3007489 | 3123 |
| rs2280650 | 0.539 | 3009317 | 3124 |

### Example 114

[0414] For individuals with colorectal cancer, the distribution of polymorphic alleles at position 13938981 of chromosome 7 was different from those without colorectal cancer (Table 114). The dominant test for risk associated with carrying the T allele had an empirical p-value based on permutation analysis of 0.088324, and the corresponding dominant odds ratio is 1.432 (Table 114). These data further suggest that this marker is associated with colorectal cancer risk and that the T allele at position 13938981 of chromosome 7 is associated with an increased risk of developing colorectal cancer.

TABLE 114

| | rs no. | | | | 10486058 | | |
|---|---|---|---|---|---|---|---|
| | Chromosome; Position | | | | 7; 13938981 | | |
| | Gene Name | | | | unknown | | |
| | Genotype; Phenotype | | | | n = T; increased risk | | |
| | Hardy-Weinberg | | | | 0.11868 | | |
| Case | | | | | | | Odds |
| Flag | Allele B | AA | AB | BB | Model | p-Value | Ratio |
| 0 | T | 56 | 346 | 708 | Dominant | 0.088324 | 1.432 |
| 1 | T | 40 | 340 | 738 | | | |

[0415] Table 114A indicates SNPs found to be in strong linkage disequilibrium with rs10486058. To generate this list, correlation coefficients (r²) were calculated between the index SNP and all neighboring SNPs cited in the June 2006 HapMap data set release. An r² cut off of 0.50 was selected for inclusion as evidence for strong genetic linkage, i.e., a “strong linkage disequilibrium.

TABLE 114A
Linked SNPs

| SNP | r² | Position on chr7 | SEQ ID NO |
|---|---|---|---|
| rs17167883 | 0.901 | 13931478 | 3125 |
| rs17167884 | 1.0 | 13932104 | 3126 |
| rs17167885 | 1.0 | 13932169 | 3127 |
| rs17167886 | 0.948 | 13932242 | 3128 |
| rs9639178 | 0.948 | 13934583 | 3129 |
| rs4445122 | 0.948 | 13934671 | 3130 |
| rs4321890 | 0.532 | 13934737 | 3131 |
| rs9639181 | 0.948 | 13935047 | 3132 |
| rs4721304 | 0.948 | 13935765 | 3133 |
| rs17167896 | 1.0 | 13937514 | 3134 |
| rs17167898 | 1.0 | 13938132 | 3135 |
| rs10486058 | — | 13938981 | 3136 |
| rs17167901 | 1.0 | 13940664 | 3137 |
| rs17167905 | 1.0 | 13942792 | 3138 |
| rs10486057 | 1.0 | 13942872 | 3139 |
| rs10486056 | 1.0 | 13942919 | 3140 |
| rs17167907 | 0.895 | 13944165 | 3141 |
| rs6964584 | 0.804 | 13945372 | 3142 |
| rs6964360 | 0.763 | 13945465 | 3143 |
| rs7789750 | 0.676 | 13946973 | 3144 |
| rs17167915 | 0.796 | 13947845 | 3145 |

### Example 115

[0416] For individuals with colorectal cancer, the distribution of polymorphic alleles at position 20613496 of chromosome 7 was different from those without colorectal cancer (Table 115). The trend test for risk associated with carrying the G allele had an empirical p-value of 0.005162 based on permutation analysis, and the corresponding Mantel-Haenszel odds ratio for trend is 1.27 (Table 115). These data further suggest that this marker is associated with colorectal cancer risk and that the G allele at position 20613496 of chromosome 7 is associated with an increased risk of developing colorectal cancer.

TABLE 115

| | |
|---|---|
| rs no. | 2058076 |
| Chromosome; Position | 7; 20613496 |
| Gene Name | unknown |
| Genotype; Phenotype | n = G; increased risk |
| Hardy-Weinberg | 0.60893 |

| Case | | | | | | | Odds |
|---|---|---|---|---|---|---|---|
| Flag | Allele B | AA | AB | BB | Model | p-Value | Ratio |
| 0 | G | 39 | 304 | 657 | Trend | 0.005162 | 1.27 |
| 1 | G | 28 | 254 | 706 | | | |

[0417] Table 115A indicates SNPs found to be in strong linkage disequilibrium with rs2058076. To generate this list, correlation coefficients (r²) were calculated between the index SNP and all neighboring SNPs cited in the June 2006 HapMap data set release. An r² cut off of 0.50 was selected for inclusion as evidence for strong genetic linkage, i.e., a “strong linkage disequilibrium.

TABLE 115A
Linked SNPs

| SNP | r² | Position on chr7 | SEQ ID NO |
|---|---|---|---|
| rs2058076 | — | 20613496 | 3146 |

### Example 116

[0418] For individuals with colorectal cancer, the distribution of polymorphic alleles at position 21799066 of chromosome 7 was different from those without colorectal cancer (Table 116). The recessive test for risk associated with carrying the A allele had an empirical p-value of 0.002002 based on permutation analysis, and the corresponding recessive odds ratio is 1.435 (Table 116). These data further suggest that this marker is associated with colorectal cancer risk and that the A allele at position 21799066 of chromosome 7 is associated with an increased risk of developing colorectal cancer.

TABLE 116

| | |
|---|---|
| rs no. | 1015818 |
| Chromosome; Position | 7; 21799066 |
| Gene Name | unknown |
| Genotype; Phenotype | n = A; increased risk |
| Hardy-Weinberg | 0.59891 |

| Case | | | | | | | Odds |
|---|---|---|---|---|---|---|---|
| Flag | Allele B | AA | AB | BB | Model | p-Value | Ratio |
| 0 | A | 361 | 492 | 155 | Recessive | 0.002002 | 1.435 |
| 1 | A | 332 | 462 | 207 | | | |

[0419] Table 116A indicates SNPs found to be in strong linkage disequilibrium with rs1015818. To generate this list, correlation coefficients (r²) were calculated between the index SNP and all neighboring SNPs cited in the June 2006 HapMap data set release. An r² cut off of 0.50 was selected for inclusion as evidence for strong genetic linkage, i.e., a “strong linkage disequilibrium.

TABLE 116A
Linked SNPs

| SNP | r² | Position on chr7 | SEQ ID NO |
|---|---|---|---|
| rs4722076 | 0.502 | 21780211 | 3147 |
| rs1859797 | 0.534 | 21780543 | 3148 |
| rs17748936 | 0.597 | 21784331 | 3149 |
| rs4722077 | 0.597 | 21784532 | 3150 |
| rs1636305 | 0.54 | 21786289 | 3151 |
| rs7784865 | 0.568 | 21788166 | 3152 |
| rs4719679 | 0.807 | 21790652 | 3153 |
| rs11761561 | 0.925 | 21791661 | 3154 |
| rs12532440 | 0.51 | 21793018 | 3155 |
| rs2527698 | 0.64 | 21793279 | 3156 |
| rs12155362 | 0.742 | 21795827 | 3158 |
| rs1015818 | — | 21799066 | 3159 |
| rs2107973 | 0.814 | 21802722 | 3163 |
| rs2107972 | 0.814 | 21802782 | 3164 |
| rs6461627 | 0.963 | 21803073 | 3165 |
| rs6461628 | 0.797 | 21803300 | 3166 |
| rs2527700 | 0.733 | 21804191 | 3167 |
| rs2527701 | 0.755 | 21804531 | 3168 |
| rs2699462 | 0.761 | 21804566 | 3169 |
| rs954717 | 0.966 | 21805889 | 3170 |

### Example 117

[0420] For individuals with colorectal cancer, the distribution of polymorphic alleles at position 21799157 of chromosome 7 was different from those without colorectal cancer (Table 117). The trend test for risk associated with carrying the T allele had an empirical p-value of 0.000316 based on permutation analysis, and the corresponding Mantel-Haenszel odds ratio for trend is 1.318 (Table 117). These data further suggest that this marker is associated with colorectal cancer risk and that the T allele at position 21799157 of chromosome 7 is associated with an increased risk of developing colorectal cancer.

TABLE 117

| | rs no. | | | | 1174995 | | |
|---|---|---|---|---|---|---|---|
| | Chromosome; Position | | | | 7; 21799157 | | |
| | Gene Name | | | | unknown | | |
| | Genotype; Phenotype | | | | n = T; increased risk | | |
| | Hardy-Weinberg | | | | 0.54112 | | |
| Case | | | | | | | Odds |
| Flag | Allele B | AA | AB | BB | Model | p-Value | Ratio |
| 0 | T | 664 | 306 | 40 | Trend | 0.000316 | 1.318 |
| 1 | T | 585 | 357 | 60 | | | |

[0421] Table 117A indicates SNPs found to be in strong linkage disequilibrium with rs1174995. To generate this list, correlation coefficients (r²) were calculated between the index SNP and all neighboring SNPs cited in the June 2006 HapMap data set release. An r² cut off of 0.50 was selected for inclusion as evidence for strong genetic linkage, i.e., a “strong linkage disequilibrium.

TABLE 117A
Linked SNPs

| SNP | r² | Position on chr7 | SEQ ID NO |
|---|---|---|---|
| rs2527698 | 0.567 | 21793279 | 3156 |
| rs1175005 | 0.733 | 21794549 | 3157 |
| rs1174995 | — | 21799157 | 3160 |
| rs1174992 | 0.778 | 21800082 | 3161 |
| rs1730906 | 0.512 | 21807152 | 3171 |
| rs2527705 | 0.898 | 21810373 | 3172 |

### Example 118

[0422] For individuals with colorectal cancer, the distribution of polymorphic alleles at position 21800306 of chromosome 7 was different from those without colorectal cancer (Table 118). The dominant test for risk associated with carrying the T allele had an empirical p-value based on permutation analysis of 0.002277, and the corresponding dominant odds ratio is 1.322 (Table 118). These data further suggest that this matter is associated with colorectal cancer risk and that the T allele at position 21800306 of chromosome 7 is associated with an increased risk of developing colorectal cancer.

TABLE 118

| | rs no. | | | | 1174991 | | |
|---|---|---|---|---|---|---|---|
| | Chromosome; Position | | | | 7; 21800306 | | |
| | Gene Name | | | | unknown | | |
| | Genotype; Phenotype | | | | n = T; increased risk | | |
| | Hardy-Weinberg | | | | 0.50756 | | |
| Case | | | | | | | Odds |
| Flag | Allele B | AA | AB | BB | Model | p-Value | Ratio |
| 0 | T | 675 | 336 | 47 | Dominant | 0.002277 | 1.322 |
| 1 | T | 544 | 356 | 52 | | | |

[0423] Table 118A indicates SNPs found to be in strong linkage disequilibrium with rs1174991. To generate this list correlation coefficients (r²) were calculated between the index SNP and all neighboring SNPs cited in the June 2006 HapMap data set release. An r² cut off of 0.50 was selected for inclusion as evidence for strong genetic linkage, i.e., a “strong linkage disequilibrium.

TABLE 118A
Linked SNPs

| SNP | r² | Position on chr7 | SEQ ID NO |
|---|---|---|---|
| rs1175005 | 0.778 | 21794549 | 3157 |
| rs1174992 | 0.737 | 21800082 | 3161 |
| rs1174991 | — | 21800306 | 3162 |

### Example 119

[0424] For individuals with colorectal cancer, the distribution of polymorphic alleles at position 28279756 of chromosome 7, found within the CREB5 gene, was different from those without colorectal cancer (Table 119). The dominant test for risk associated with carrying the T allele had an empirical p-value based on permutation analysis of 0.013071, and the corresponding dominant odds ratio is 1.321 (Table 119). These data further suggest that this marker, located within the CREB5 gene, is associated with colorectal cancer risk and that the T allele at position 28279756 of chromosome 7 is associated with an increased risk of developing colorectal cancer.

TABLE 119

| | rs no. | | | | 6978323 | | |
|---|---|---|---|---|---|---|---|
| | Chromosome; Position | | | | 7; 28279756 | | |
| | Gene Name | | | | CREB5 | | |
| | SEQ ID NO; Position | | | | 5662; 167577 | | |
| | Genotype; Phenotype | | | | n = T; increased risk | | |
| | Hardy-Weinberg | | | | 0.34122 | | |
| Case | | | | | | | Odds |
| Flag | Allele B | AA | AB | BB | Model | p-Value | Ratio |
| 0 | T | 223 | 484 | 297 | Dominant | 0.013071 | 1.321 |
| 1 | T | 177 | 509 | 310 | | | |

[0425] Table 119A indicates SNPs found to be in strong linkage disequilibrium with rs6978323. To generate this list, correlation coefficients (r²) were calculated between the index SNP and all neighboring SNPs cited in the June 2006 HapMap data set release. An r² cut off of 0.50 was selected for inclusion as evidence for strong genetic linkage, i.e., a “strong linkage disequilibrium.

TABLE 119A
Linked SNPs

| SNP | r² | Position on chr7 | SEQ ID NO |
|---|---|---|---|
| rs6462088 | 1.0 | 28277806 | 3173 |
| rs2391666 | 1.0 | 28279391 | 3174 |
| rs6978323 | — | 28279756 | 3175 |
| rs1859020 | 0.565 | 28281476 | 3176 |
| rs217509 | 0.537 | 28290456 | 3177 |

### Example 120

[0426] For individuals with colorectal cancer, the distribution of polymorphic alleles at position 33016928 of chromosome 7, found within the B1 gene, was different from those without colorectal cancer (Table 120). The dominant test for risk associated with carrying the T allele had an empirical p-value based on permutation analysis of 0.000967, and the corresponding dominant odds ratio is 1.38 (Table 120). These data further suggest that this marker, located within the B1 gene, is associated with colorectal cancer risk and that the T allele at position 33016928 of chromosome 7 is associated with an increased risk of developing colorectal cancer.

TABLE 120

| | rs no. | | | | 17150810 | | |
|---|---|---|---|---|---|---|---|
| | Chromosome; Position | | | | 7; 33016928 | | |
| | Gene Name | | | | B1 | | |
| | SEQ ID NO; Position | | | | 5663; 74515 | | |
| | Genotype; Phenotype | | | | n = T; increased risk | | |
| | Hardy-Weinberg | | | | 0.40504 | | |
| Case | | | | | | | Odds |
| Flag | Allele B | AA | AB | BB | Model | p-Value | Ratio |
| 0 | T | 724 | 260 | 28 | Dominant | 0.000967 | 1.38 |
| 1 | T | 603 | 305 | 26 | | | |

[0427] Table 120A indicates SNPs found to be in strong linkage disequilibrium with rs17150810. To generate this list, correlation coefficients (r²) were calculated between the index SNP and all neighboring SNPs cited in the June 2006 HapMap data set release. An r² cut off of 0.50 was selected for inclusion as evidence for strong genetic linkage, i.e., a “strong linkage disequilibrium.

TABLE 120A
Linked SNPs

| SNP | r² | Position on chr7 | SEQ ID NO |
|---|---|---|---|
| rs13227275 | 1.0 | 32928625 | 3178 |
| rs12701273 | 1.0 | 32933759 | 3179 |
| rs4720103 | 0.923 | 32939310 | 3180 |
| rs13443222 | 0.918 | 32940969 | 3181 |
| rs1468797 | 1.0 | 32942900 | 3182 |
| rs1569239 | 1.0 | 32943344 | 3183 |
| rs1548879 | 1.0 | 32944087 | 3184 |
| rs10272253 | 1.0 | 32944960 | 3185 |
| rs12673026 | 1.0 | 32945212 | 3186 |
| rs10227739 | 1.0 | 32945390 | 3187 |
| rs12671396 | 1.0 | 32946130 | 3188 |
| rs12701274 | 1.0 | 32949114 | 3189 |
| rs7804742 | 1.0 | 32950845 | 3190 |
| rs6973757 | 1.0 | 32951429 | 3191 |
| rs10951376 | 1.0 | 32955379 | 3192 |
| rs10951377 | 1.0 | 32955441 | 3193 |
| rs11760829 | 1.0 | 32957280 | 3194 |
| rs4720104 | 1.0 | 32957798 | 3195 |
| rs4723255 | 1.0 | 32958023 | 3196 |
| rs4720105 | 1.0 | 32958251 | 3197 |
| rs4723256 | 1.0 | 32958275 | 3198 |
| rs13244450 | 1.0 | 32958849 | 3199 |
| rs17169835 | 1.0 | 32959593 | 3200 |
| rs4723257 | 1.0 | 32960134 | 3201 |
| rs4723258 | 1.0 | 32960166 | 3202 |
| rs4723259 | 1.0 | 32960433 | 3203 |
| rs4723260 | 1.0 | 32960455 | 3204 |
| rs4720106 | 1.0 | 32960519 | 3205 |
| rs4720107 | 1.0 | 32960597 | 3206 |
| rs17169847 | 1.0 | 32961789 | 3207 |
| rs764127 | 1.0 | 32962173 | 3208 |
| rs17169855 | 1.0 | 32963033 | 3209 |
| rs10261756 | 1.0 | 32963688 | 3210 |
| rs10232564 | 1.0 | 32963831 | 3211 |
| rs11763306 | 1.0 | 32965041 | 3212 |
| rs1406606 | 1.0 | 32965406 | 3213 |
| rs17169881 | 1.0 | 32965742 | 3214 |
| rs10241188 | 1.0 | 32965831 | 3215 |
| rs10270961 | 1.0 | 32966381 | 3216 |
| rs13240884 | 1.0 | 32967211 | 3217 |
| rs4723262 | 1.0 | 32967947 | 3218 |
| rs17169913 | 1.0 | 32969056 | 3219 |
| rs10269937 | 1.0 | 32969499 | 3220 |
| rs10224956 | 1.0 | 32969594 | 3221 |
| rs13236414 | 1.0 | 32969674 | 3222 |
| rs11766506 | 1.0 | 32969804 | 3223 |
| rs11766521 | 1.0 | 32969877 | 3224 |
| rs11769811 | 1.0 | 32970088 | 3225 |
| rs1362367 | 1.0 | 32970601 | 3226 |
| rs2160253 | 0.878 | 33004114 | 3227 |
| rs10240664 | 0.934 | 33006462 | 3228 |
| rs987501 | 0.94 | 33012764 | 3229 |
| rs986554 | 0.939 | 33016000 | 3230 |
| rs17150810 | — | 33016928 | 3231 |
| rs10278228 | 0.873 | 33021918 | 3232 |
| rs10951380 | 1.0 | 33024359 | 3233 |
| rs10951381 | 1.0 | 33024415 | 3234 |
| rs7777101 | 1.0 | 33035629 | 3235 |
| rs12666753 | 1.0 | 33045795 | 3236 |
| rs12701289 | 1.0 | 33048294 | 3237 |
| rs6952877 | 1.0 | 33057978 | 3238 |
| rs9638888 | 1.0 | 33063374 | 3239 |
| rs6953348 | 1.0 | 33067474 | 3240 |
| rs17170142 | 1.0 | 33069447 | 3241 |
| rs13236865 | 1.0 | 33074723 | 3242 |
| rs7810388 | 1.0 | 33077347 | 3243 |
| rs7793862 | 0.562 | 33077458 | 3244 |
| rs7783612 | 1.0 | 33082095 | 3245 |
| rs9638889 | 1.0 | 33095678 | 3246 |
| rs13224392 | 1.0 | 33098280 | 3247 |
| rs17170174 | 1.0 | 33110661 | 3248 |
| rs17170175 | 1.0 | 33119685 | 3249 |
| rs11976613 | 0.94 | 33126190 | 3250 |
| rs7384587 | 0.938 | 33137722 | 3251 |
| rs11771086 | 0.94 | 33141753 | 3252 |
| rs11978733 | 0.94 | 33145919 | 3253 |
| rs11764582 | 0.94 | 33159695 | 3254 |
| rs11773504 | 0.94 | 33161953 | 3255 |
| rs4270863 | 0.94 | 33162479 | 3256 |
| rs11769616 | 0.935 | 33165620 | 3257 |
| rs11763712 | 0.937 | 33166205 | 3258 |
| rs10951387 | 0.94 | 33166726 | 3259 |
| rs10486529 | 0.94 | 33169992 | 3260 |
| rs10486530 | 0.94 | 33171273 | 3261 |
| rs17170203 | 0.94 | 33172356 | 3262 |
| rs1419899 | 0.935 | 33182072 | 3263 |
| rs13234292 | 0.94 | 33190360 | 3264 |
| rs6968365 | 0.94 | 33191358 | 3265 |
| rs4723280 | 0.94 | 33202574 | 3266 |
| rs10464225 | 0.94 | 33211276 | 3267 |
| rs929524 | 0.94 | 33213259 | 3268 |
| rs13230868 | 0.94 | 33223131 | 3269 |
| rs13239022 | 0.94 | 33225242 | 3270 |
| rs17170220 | 0.94 | 33226384 | 3271 |
| rs11773450 | 0.94 | 33226951 | 3272 |
| rs961679 | 0.881 | 33231775 | 3273 |
| rs17170225 | 0.94 | 33232397 | 3274 |
| rs6965729 | 0.808 | 33232771 | 3275 |
| rs6966188 | 0.94 | 33233013 | 3276 |
| rs17170226 | 0.94 | 33233420 | 3277 |
| rs13236885 | 0.94 | 33233576 | 3278 |
| rs9639675 | 0.886 | 33239234 | 3279 |
| rs17170229 | 0.94 | 33241070 | 3280 |
| rs13234403 | 0.94 | 33250591 | 3281 |
| rs12056267 | 0.94 | 33256485 | 3282 |
| rs17170246 | 0.94 | 33258223 | 3283 |
| rs17170247 | 0.94 | 33260686 | 3284 |
| rs1419923 | 0.94 | 33261502 | 3285 |
| rs1419922 | 0.94 | 33262968 | 3286 |

### Example 121

[0428] For individuals with colorectal cancer, the distribution of polymorphic alleles at position 39297161 of chromosome 7 was different from those without colorectal cancer (Table 121). The trend test for risk associated with carrying the G allele had an empirical p-value of 0.000985 based on permutation analysis, and the corresponding Mantel-Haenszel odds ratio for trend is 1.363 (Table 121). These data further suggest that this marker is associated with colorectal cancer risk and that the G allele at position 39297161 of chromosome 7 is associated with an increased risk of developing colorectal cancer.

TABLE 121

| | |
|---|---|
| rs no. | 17770077 |
| Chromosome; Position | 7; 39297161 |
| Gene Name | unknown |
| Genotype; Phenotype | n = G; increased risk |
| Hardy-Weinberg | 0.04567 |

| Case | | | | | | | Odds |
|---|---|---|---|---|---|---|---|
| Flag | Allele B | AA | AB | BB | Model | p-Value | Ratio |
| 0 | G | 27 | 229 | 795 | Trend | 0.000985 | 1.363 |
| 1 | G | 12 | 165 | 767 | | | |

[0429] Table 121A indicates SNPs found to be in strong linkage disequilibrium with rs17770077. To generate this list, correlation coefficients (r²) were calculated between the index SNP and all neighboring SNPs cited in the June 2006 HapMap data set release. An r² cut off of 0.50 was selected for inclusion as evidence for strong genetic linkage, i.e., a “strong linkage disequilibrium.

TABLE 121A
Linked SNPs

| SNP | r² | Position on chr7 | SEQ ID NO |
|---|---|---|---|
| rs17712902 | 0.587 | 39239867 | 3287 |
| rs17713125 | 0.608 | 39278070 | 3288 |
| rs17713251 | 0.638 | 39287022 | 3289 |
| rs11980560 | 1.0 | 39295021 | 3290 |
| rs17770077 | — | 39297161 | 3291 |
| rs17770101 | 1.0 | 39299486 | 3292 |
| rs17713347 | 1.0 | 39299583 | 3293 |
| rs17770131 | 1.0 | 39299867 | 3294 |
| rs10486688 | 1.0 | 39301253 | 3295 |
| rs11982079 | 1.0 | 39301518 | 3296 |
| rs17713407 | 1.0 | 39305022 | 3297 |
| rs4273762 | 0.565 | 39310867 | 3298 |
| rs2876841 | 0.59 | 39310887 | 3299 |
| rs17687569 | 0.565 | 39311290 | 3300 |
| rs17620556 | 0.548 | 39373108 | 3301 |

### Example 122

[0430] For individuals with colorectal cancer, the distribution of polymorphic alleles at position 47694028 of chromosome 7, found within the PKD1L1 gene, was different from those without colorectal cancer (Table 122). The recessive test for risk associated with carrying the C allele had an empirical p-value of 0.00274 based on permutation analysis, and the corresponding recessive odds ratio is 1.325 (Table 122). These data further suggest that this marker, located within the PKD1L1 gene, is associated with colorectal cancer risk and that the C allele at position 47694028 of chromosome 7 is associated with an increased risk of developing colorectal cancer.

TABLE 122

| | |
|---|---|
| rs no. | 17131904 |
| Chromosome; Position | 7; 47694028 |
| Gene Name | PKD1L1 |
| SEQ ID NO; Position | 5664; 67250 |
| Genotype; Phenotype | n = C; increased risk |
| Hardy-Weinberg | 0.15851 |

| Case | | | | | | | Odds |
|---|---|---|---|---|---|---|---|
| Flag | Allele B | AA | AB | BB | Model | p-Value | Ratio |
| 0 | C | 37 | 361 | 659 | Recessive | 0.00274 | 1.325 |
| 1 | C | 26 | 272 | 654 | | | |

[0431] Table 122A indicates SNPs found to be in strong linkage disequilibrium with rs17131904. To generate this list, correlation coefficients (r²) were calculated between the index SNP and all neighboring SNPs cited in the June 2006 HapMap data set release. An r² cut off of 0.50 was selected for inclusion as evidence for strong genetic linkage, i.e., a “strong linkage disequilibrium.

TABLE 122A
Linked SNPs

| SNP | r² | Position on chr7 | SEQJD NO |
|---|---|---|---|
| rs6972918 | 0.55 | 47679607 | 3302 |
| rs2167877 | 0.588 | 47679905 | 3303 |
| rs10951933 | 1.0 | 47680454 | 3304 |
| rs6977363 | 0.601 | 47683435 | 3305 |
| rs6950006 | 0.571 | 47685516 | 3306 |
| rs11520726 | 0.55 | 47687238 | 3307 |
| rs6961473 | 0.527 | 47687910 | 3308 |
| rs6965759 | 0.55 | 47688210 | 3309 |
| rs4724654 | 0.55 | 47688891 | 3310 |
| rs2348660 | 0.573 | 47690190 | 3311 |
| rs2348661 | 0.548 | 47690200 | 3312 |
| rs10951934 | 1.0 | 47690735 | 3313 |
| rs10951935 | 0.657 | 47690849 | 3314 |
| rs4720619 | 0.562 | 47691497 | 3315 |
| rs17131904 | — | 47694028 | 3316 |

### Example 123

[0432] For individuals with colorectal cancer, the distribution of polymorphic alleles at position 52815674 of chromosome 7, found within the LOC392027 gene, was different from those without colorectal cancer (Table 123). The dominant test for risk associated with carrying the G allele had an empirical p-value based on permutation analysis of 0.00129, and the corresponding dominant odds ratio is 1.337 (Table 123). These data further suggest that this marker, located within the LOC392027 gene, is associated with colorectal cancer risk and that the G allele at position 52815674 of chromosome 7 is associated with an increased risk of developing colorectal cancer.

TABLE 123

| | |
|---|---|
| rs no. | 17556689 |
| Chromosome; Position | 7; 52815674 |
| Gene Name | LOC392027 |
| SEQ ID NO; Position | 5665; 304742 |
| Genotype; Phenotype | n = G; increased risk |
| Hardy-Weinberg | 0.46351 |

| Case | | | | | | | Odds |
|---|---|---|---|---|---|---|---|
| Flag | Allele B | AA | AB | BB | Model | p-Value | Ratio |
| 0 | G | 523 | 433 | 100 | Dominant | 0.00129 | 1.337 |
| 1 | G | 400 | 444 | 101 | | | |

[0433] Table 123A indicates SNPs found to be in strong linkage disequilibrium with rs17556689. To generate this list, correlation coefficients (r²) were calculated between the index SNP and all neighboring SNPs cited in the June 2006 HapMap data set release. An r² cut off of 0.50 was selected for inclusion as evidence for strong genetic linkage, i.e., a “strong linkage disequilibrium.

TABLE 123A
Linked SNPs

| SNP | r² | Position on chr7 | SEQ ID NO |
|---|---|---|---|
| rs11760600 | 0.604 | 52786119 | 3317 |
| rs11764198 | 0.534 | 52786434 | 3318 |
| rs11764976 | 0.542 | 52786490 | 3319 |
| rs7781160 | 0.51 | 52786506 | 3320 |
| rs7794784 | 0.534 | 52786523 | 3321 |
| rs7793897 | 0.553 | 52786586 | 3322 |
| rs7795100 | 0.655 | 52786722 | 3323 |
| rs7781636 | 0.515 | 52786809 | 3324 |
| rs7799263 | 0.524 | 52787074 | 3325 |
| rs4265141 | 0.54 | 52787829 | 3326 |
| rs1032428 | 0.535 | 52787880 | 3327 |
| rs12718727 | 0.515 | 52788089 | 3328 |
| rs1320888 | 1.0 | 52790199 | 3329 |
| rs13224899 | 1.0 | 52794025 | 3330 |
| rs7812171 | 1.0 | 52795336 | 3331 |
| rs10499706 | 1.0 | 52800574 | 3332 |
| rs2172510 | 0.769 | 52812096 | 3333 |
| rs17556689 | — | 52815674 | 3334 |
| rs12718733 | 0.602 | 52845865 | 3335 |
| rs6974165 | 0.509 | 52892643 | 3336 |

### Example 124

[0434] For individuals with colorectal cancer, the distribution of polymorphic alleles at position 52927067 of chromosome 7 was different from those without colorectal cancer (Table 124). The dominant test for risk associated with carrying the C allele had an empirical p-value based on permutation analysis of 0.00171, and the corresponding dominant odds ratio is 1.656 (Table 124). These data further suggest that this marker is associated with colorectal cancer risk and that the C allele at position 52927067 of chromosome 7 is associated with an increased risk of developing colorectal cancer.

TABLE 124

| | |
|---|---|
| rs no. | 10247706 |
| Chromosome; Position | 7; 52927067 |
| Gene Name | unknown |
| Genotype; Phenotype | n = C; increased risk |
| Hardy-Weinberg | 0.11619 |

| Case | | | | | | | Odds |
|---|---|---|---|---|---|---|---|
| Flag | Allele B | AA | AB | BB | Model | p-Value | Ratio |
| 0 | C | 115 | 432 | 506 | Dominant | 0.00171 | 1.656 |
| 1 | C | 65 | 402 | 476 | | | |

[0435] Table 124A indicates SNPs found to be in strong linkage disequilibrium with rs10247706. To generate this list, correlation coefficients (r²) were calculated between the index SNP and all neighboring SNPs cited in the June 2006 HapMap data set release. An r² cut off of 0.50 was selected for inclusion as evidence for strong genetic linkage, i.e., a “strong linkage disequilibrium.

TABLE 124A
Linked SNPs

| SNP | r² | Position on chr7 | SEQ ID NO |
|---|---|---|---|
| rs7781475 | 0.951 | 52912062 | 3337 |
| rs12535625 | 1.0 | 52916477 | 3338 |
| rs1116031 | 0.516 | 52923342 | 3339 |
| rs12536328 | 0.516 | 52923891 | 3340 |
| rs1021466 | 0.515 | 52924855 | 3341 |
| rs6966751 | 1.0 | 52926517 | 3342 |
| rs10247706 | — | 52927067 | 3343 |
| rs1404883 | 0.516 | 52927138 | 3344 |
| rs10276925 | 1.0 | 52927592 | 3345 |
| rs6976723 | 1.0 | 52927807 | 3346 |
| rs1464888 | 1.0 | 52929540 | 3347 |
| rs7797216 | 0.501 | 52932108 | 3348 |
| rs932587 | 0.516 | 52935372 | 3349 |
| rs6948918 | 0.516 | 52939229 | 3350 |
| rs6975256 | 0.514 | 52940292 | 3351 |

### Example 125

[0436] For individuals with colorectal cancer, the distribution of polymorphic alleles at position 75280891 of chromosome 7, found within the MK-STYX gene, was different from those without colorectal cancer (Table 125). The recessive test for risk associated with carrying the C allele had an empirical p-value of 0.007663 based on permutation analysis, and the corresponding recessive odds ratio is 1.272 (Table 125). These data further suggest that this marker, located within the MK-STYX gene, is associated with colorectal cancer risk and that the C allele at position 75280891 of chromosome 7 is associated with an increased risk of developing colorectal cancer.

TABLE 125

| | |
|---|---|
| rs no. | 6978677 |
| Chromosome; Position | 7; 75280891 |
| Gene Name | MK-STYX |
| SEQ ID NO; Position | 5666; 41082 |
| Genotype; Phenotype | n = C; increased risk |
| Hardy-Weinberg | 0.44425 |

| Case | | | | | | | Odds |
|---|---|---|---|---|---|---|---|
| Flag | Allele B | AA | AB | BB | Model | p-Value | Ratio |
| 0 | C | 77 | 432 | 535 | Recessive | 0.007663 | 1.272 |
| 1 | C | 56 | 347 | 539 | | | |

[0437] Table 125A indicates SNPs found to be in strong linkage disequilibrium with rs6978677. To generate this list, correlation coefficients (r²) were calculated between the index SNP and all neighboring SNPs cited in the June 2006 HapMap data set release. An r² cut off of 0.50 was selected for inclusion as evidence for strong genetic linkage, i.e., a “strong linkage disequilibrium.

TABLE 125A
Linked SNPs

| SNP | r² | Position on chr7 | SEQ ID NO |
|---|---|---|---|
| rs10954732 | 0.777 | 75255800 | 3352 |
| rs8565 | 1.0 | 75274925 | 3353 |
| rs12531559 | 0.851 | 75276348 | 3354 |
| rs6978677 | — | 75280891 | 3355 |
| rs7788763 | 0.828 | 75296316 | 3356 |
| rs1044483 | 0.851 | 75304466 | 3357 |
| rs4732542 | 0.851 | 75307854 | 3358 |
| rs2302437 | 0.851 | 75321667 | 3359 |
| rs6976532 | 0.786 | 75325745 | 3360 |
| rs1639609 | 0.851 | 75328232 | 3361 |
| rs1104879 | 0.844 | 75330219 | 3362 |
| rs869806 | 0.829 | 75333274 | 3363 |
| rs869804 | 0.851 | 75333605 | 3364 |
| rs2286830 | 0.851 | 75338614 | 3365 |
| rs11972240 | 0.848 | 75338730 | 3366 |
| rs10476 | 0.851 | 75341071 | 3367 |
| rs8200 | 0.914 | 75341257 | 3368 |
| rs1639617 | 0.88 | 75346379 | 3369 |
| rs1639620 | 0.78 | 75348741 | 3370 |
| rs11982200 | 0.851 | 75359534 | 3371 |
| rs4398845 | 0.851 | 75361432 | 3372 |
| rs4552844 | 0.876 | 75362746 | 3373 |
| rs1637051 | 0.851 | 75375310 | 3374 |
| rs2097948 | 0.645 | 75377930 | 3375 |
| rs10085567 | 0.851 | 75378857 | 3376 |
| rs6954569 | 0.851 | 75383536 | 3377 |
| rs10245584 | 0.851 | 75390517 | 3378 |
| rs10264760 | 0.851 | 75394345 | 3379 |
| rs10271413 | 0.911 | 75399509 | 3380 |
| rs4732595 | 0.851 | 75399790 | 3381 |
| rs11764129 | 0.878 | 75406541 | 3382 |
| rs11763076 | 0.851 | 75410614 | 3383 |
| rs6953665 | 0.851 | 75413700 | 3384 |
| rs10275521 | 0.87 | 75415623 | 3385 |
| rs10227345 | 0.882 | 75416043 | 3386 |
| rs10952840 | 0.913 | 75417529 | 3387 |
| rs10235738 | 0.81 | 75418111 | 3388 |
| rs7794454 | 0.81 | 75420661 | 3389 |
| rs2108274 | 0.851 | 75426287 | 3390 |
| rs6465000 | 0.851 | 75432068 | 3391 |
| rs10251863 | 0.851 | 75434843 | 3392 |
| rs9691174 | 0.851 | 75435056 | 3393 |
| rs4342518 | 0.851 | 75438056 | 3394 |
| rs4728580 | 0.808 | 75444284 | 3395 |
| rs9800948 | 0.777 | 75455124 | 3396 |
| rs2158867 | 0.777 | 75459792 | 3397 |
| rs1859793 | 0.737 | 75465934 | 3398 |
| rs10235086 | 0.737 | 75477789 | 3399 |

### Example 126

[0438] For individuals with colorectal cancer, the distribution of polymorphic alleles at position 80604131 of chromosome 7 was different from those without colorectal cancer (Table 126). The trend test for risk associated with carrying the C allele had an empirical p-value of 0.000752 based on permutation analysis, and the corresponding Mantel-Haenszel odds ratio for trend is 1.269 (Table 126). These data further suggest that this marker is associated with colorectal cancer risk and that the C allele at position 80604131 of chromosome 7 is associated with an increased risk of developing colorectal cancer.

TABLE 126

| | |
|---|---|
| rs no. | 2040901 |
| Chromosome; Position | 7; 80604131 |
| Gene Name | unknown |
| Genotype; Phenotype | n = C; increased risk |
| Hardy-Weinberg | 0.14814 |

| Case | | | | | | | Odds |
|---|---|---|---|---|---|---|---|
| Flag | Allele B | AA | AB | BB | Model | p-Value | Ratio |
| 0 | C | 109 | 493 | 453 | Trend | 0.000752 | 1.269 |
| 1 | C | 73 | 403 | 476 | | | |

[0439] Table 126A indicates SNPs found to be in strong linkage disequilibrium with rs2040901. To generate this list, correlation coefficients (r²) were calculated between the index SNP and all to neighboring SNPs cited in the June 2006 HapMap data set release. An r² cut off of 0.50 was selected for inclusion as evidence for strong genetic linkage, i.e., a “strong linkage disequilibrium.

TABLE 126A
Linked SNPs

| SNP | r² | Position on chr7 | SEQ ID NO |
|---|---|---|---|
| rs245433 | 0.706 | 80554980 | 3400 |
| rs245434 | 0.706 | 80555039 | 3401 |
| rs245436 | 0.741 | 80557066 | 3402 |
| rs245442 | 0.741 | 80561799 | 3403 |
| rs10954564 | 0.736 | 80565840 | 3404 |
| rs2886992 | 0.816 | 80576038 | 3405 |
| rs10235727 | 0.851 | 80576490 | 3406 |
| rs1012951 | 0.851 | 80581391 | 3407 |
| rs10486817 | 0.561 | 80581806 | 3408 |
| rs2189565 | 0.851 | 80582384 | 3409 |
| rs2107399 | 0.618 | 80588940 | 3410 |
| rs10215927 | 1.0 | 80590056 | 3411 |
| rs12534736 | 0.624 | 80591254 | 3412 |
| rs10486819 | 0.651 | 80591572 | 3413 |
| rs10486820 | 0.651 | 80592168 | 3414 |
| rs7794553 | 1.0 | 80592300 | 3415 |
| rs6969877 | 0.603 | 80598123 | 3416 |
| rs6960200 | 0.651 | 80598700 | 3417 |
| rs12707346 | 0.603 | 80599149 | 3418 |
| rs12707347 | 0.583 | 80599892 | 3419 |
| rs7790064 | 0.651 | 80600669 | 3420 |
| rs16887102 | 0.651 | 80602726 | 3421 |
| rs17155064 | 0.651 | 80603448 | 3422 |
| rs2040901 | — | 80604131 | 3423 |
| rs1014079 | 0.603 | 80607249 | 3424 |
| rs10230536 | 0.603 | 80610073 | 3425 |
| rs6467702 | 0.508 | 80611094 | 3426 |

### Example 127

[0440] For individuals with colorectal cancer, the distribution of polymorphic alleles at position 111946493 of chromosome 7 was different from those without colorectal cancer (Table 127). The dominant test for risk associated with carrying the A allele had an empirical p-value based on permutation analysis of 0.003908, and the corresponding dominant odds ratio is 2.432 (Table 127). These data further suggest that this marker is associated with colorectal cancer risk and that the A allele at position 111946493 of chromosome 7 is associated with an increased risk of developing colorectal cancer.

TABLE 127

| | |
|---|---|
| rs no. | 10244551 |
| Chromosome; Position | 7; 111946493 |
| Gene Name | unknown |
| Genotype; Phenotype | n = A; increased risk |
| Hardy-Weinberg | 0.34038 |

| Case | | | | | | | Odds |
|---|---|---|---|---|---|---|---|
| Flag | Allele B | AA | AB | BB | Model | p-Value | Ratio |
| 0 | A | 37 | 297 | 720 | Dominant | 0.003908 | 2.432 |
| 1 | A | 14 | 270 | 666 | | | |

[0441] Table 127A indicates SNPs found to be in strong linkage disequilibrium with rs10244551. To generate this list, correlation coefficients (r²) were calculated between the index SNP and oil neighboring SNPs cited in the June 2006 HapMap data set release. An r² cut off of 0.50 was selected for inclusion as evidence for strong genetic linkage, i.e., a “strong linkage disequilibrium.

TABLE 127A
Linked SNPs

| SNP | r² | Position on chr7 | SEQ ID NO |
|---|---|---|---|
| rs2285541 | 0.51 | 111854629 | 3427 |
| rs10249203 | 0.67 | 111882881 | 3428 |
| rs10278994 | 0.672 | 111883063 | 3429 |
| rs1989835 | 0.688 | 111889885 | 3430 |
| rs11761491 | 0.766 | 111900831 | 3431 |
| rs756867 | 0.672 | 111903611 | 3432 |
| rs756869 | 0.687 | 111904149 | 3433 |
| rs10232659 | 0.722 | 111907159 | 3434 |
| rs10269975 | 0.925 | 111915260 | 3435 |
| rs10270000 | 1.0 | 111915329 | 3436 |
| rs2905274 | 0.707 | 111925747 | 3437 |
| rs2966487 | 0.929 | 111928896 | 3438 |
| rs10244551 | — | 111946493 | 3439 |
| rs10216230 | 0.714 | 111947263 | 3440 |
| rs10215501 | 0.714 | 111947391 | 3441 |
| rs1922898 | 0.914 | 111954397 | 3442 |
| rs1922897 | 0.928 | 111954620 | 3443 |
| rs11773501 | 0.925 | 111960606 | 3444 |
| rs10234058 | 0.914 | 111961809 | 3445 |
| rs1614000 | 0.919 | 111967947 | 3446 |
| rs10273589 | 0.929 | 111973027 | 3447 |
| rs1227163 | 0.924 | 111975331 | 3448 |
| rs3734956 | 0.925 | 111978691 | 3449 |
| rs1227155 | 0.929 | 111980734 | 3450 |
| rs7780098 | 0.929 | 111987543 | 3451 |
| rs7806781 | 0.644 | 112014023 | 3452 |
| rs5020854 | 0.925 | 112037492 | 3453 |
| rs4329201 | 0.85 | 112038044 | 3454 |
| rs1044262 | 0.925 | 112053603 | 3455 |
| rs7781871 | 0.791 | 112063624 | 3456 |
| rs7808616 | 0.853 | 112086263 | 3457 |
| rs11768787 | 0.85 | 112104088 | 3458 |
| rs11762737 | 0.925 | 112132329 | 3459 |
| rs6944843 | 0.605 | 112145486 | 3460 |
| rs1530756 | 0.853 | 112146988 | 3461 |
| rs10249952 | 0.607 | 112148281 | 3462 |
| rs17405723 | 0.925 | 112158715 | 3463 |
| rs17160078 | 0.78 | 112178255 | 3464 |
| rs1992988 | 0.85 | 112181364 | 3465 |

### Example 128

[0442] For individuals with colorectal cancer, the distribution of polymorphic alleles at position 117246522 of chromosome 7 was different from those without colorectal cancer (Table 128). The trend test for risk associated with carrying the A allele had an empirical p-value of 0.004697 based on permutation analysis, and the corresponding Mantel-Haenszel odds ratio for trend is 1.204 (Table 128). These data further suggest that this marker is associated with colorectal cancer risk and that the A allele at position 117246522 of chromosome 7 is associated with an increased risk of developing colorectal cancer.

TABLE 128

| | |
|---|---|
| rs no. | 10249457 |
| Chromosome; Position | 7; 117246522 |
| Gene Name | unknown |
| Genotype; Phenotype | n = A; increased risk |
| Hardy-Weinberg | 0.40262 |

| Case | | | | | | | Odds |
|---|---|---|---|---|---|---|---|
| Flag | Allele B | AA | AB | BB | Model | p-Value | Ratio |
| 0 | A | 207 | 496 | 266 | Trend | 0.004697 | 1.204 |
| 1 | A | 168 | 486 | 313 | | | |

[0443] Table 128A indicates SNPs found to be in strong linkage disequilibrium with rs10249457. To generate this list, correlation coefficients (r²) were calculated between the index SNP and all neighboring SNPs cited in the June 2006 HapMap data set release. An r² cut off of 0.50 was selected for inclusion as evidence for strong genetic linkage, i.e., a “strong linkage disequilibrium.

TABLE 128A
Linked SNPs

| SNP | r² | Position on chr7 | SEQ ID NO |
|---|---|---|---|
| rs989996 | 1.0 | 117236203 | 3466 |
| rs13438629 | 1.0 | 117242170 | 3467 |
| rs10249457 | — | 117246522 | 3468 |
| rs17569137 | 1.0 | 117249531 | 3469 |
| rs739619 | 1.0 | 117250217 | 3470 |
| rs12706168 | 1.0 | 117254934 | 3471 |
| rs10240110 | 1.0 | 117256949 | 3472 |
| rs10255829 | 1.0 | 117257050 | 3473 |
| rs8180706 | 1.0 | 117262034 | 3474 |
| rs8180812 | 1.0 | 117262186 | 3475 |
| rs12537079 | 0.53 | 117298657 | 3476 |
| rs10487384 | 0.53 | 117299244 | 3477 |
| rs10258170 | 0.53 | 117301830 | 3478 |

### Example 129

[0444] For individuals with colorectal cancer, the distribution of polymorphic alleles at position 126787618 of chromosome 7 was different from those without colorectal cancer (Table 129). The dominant test for risk associated with carrying the G allele had an empirical p-value based on permutation analysis of 0.002724, and the corresponding dominant odds ratio is 1.401 (Table 129). These data further suggest that this marker is associated with colorectal cancer risk and that the G allele at position 126787618 of chromosome 7 is associated with an increased risk of developing colorectal cancer.

TABLE 129

| | |
|---|---|
| rs no. | 11761076 |
| Chromosome; Position | 7; 126787618 |
| Gene Name | unknown |
| Genotype; Phenotype | n = G; increased risk |
| Hardy-Weinberg | 0.52749 |

| Case | | | | | | | Odds |
|---|---|---|---|---|---|---|---|
| Flag | Allele B | AA | AB | BB | Model | p-Value | Ratio |
| 0 | G | 226 | 492 | 290 | Dominant | 0.002724 | 1.401 |
| 1 | G | 171 | 508 | 321 | | | |

[0445] Table 129A indicates SNPs found to be in strong linkage disequilibrium with rs11761076. To generate this list, correlation coefficients (r²) were calculated between the index SNP and all neighboring SNPs cited in the June 2006 HapMap data set release. An r² cut off of 0.50 was selected for inclusion as evidence for strong genetic linkage, i.e., a “strong linkage disequilibrium.

TABLE 129A
Linked SNPs

| SNP | r² | Position on chr7 | SEQ ID NO |
|---|---|---|---|
| rs10487490 | 0.855 | 126749490 | 3479 |
| rs10273635 | 0.855 | 126752308 | 3480 |
| rs4141409 | 0.852 | 126760821 | 3481 |
| rs11984364 | 0.652 | 126763848 | 3482 |
| rs17658206 | 0.855 | 126768699 | 3483 |
| rs4731367 | 0.855 | 126772113 | 3484 |
| rs6962882 | 0.591 | 126776259 | 3485 |
| rs2896394 | 0.526 | 126784188 | 3486 |
| rs11761076 | — | 126787618 | 3487 |
| rs1419429 | 1.0 | 126789189 | 3488 |
| rs10265603 | 0.591 | 126797202 | 3489 |
| rs6976685 | 0.591 | 126797527 | 3490 |
| rs10280804 | 1.0 | 126798589 | 3491 |
| rs10281056 | 0.591 | 126798795 | 3492 |
| rs10276671 | 1.0 | 126804970 | 3493 |
| rs11766383 | 1.0 | 126805362 | 3494 |
| rs10954161 | 0.552 | 126805426 | 3495 |

### Example 130

[0446] For individuals with colorectal cancer, the distribution of polymorphic alleles at position 6671547 of chromosome 8, found within the UNQ2754 gene, was different from those without colorectal cancer (Table 130). The recessive test for risk associated with carrying the T allele had an empirical p-value of 0.002645 based on permutation analysis, and the corresponding recessive odds ratio is 1.400 (Table 130). These data further suggest that this marker, located within the UNQ2754 gene, is associated with colorectal cancer risk and that the T allele at position 6671547 of chromosome 8 is associated with an increased risk of developing colorectal cancer.

TABLE 130

| | rs no. | | | | 2741083 | | |
|---|---|---|---|---|---|---|---|
| | Chromosome; Position | | | | 8; 6671547 | | |
| | Gene Name | | | | UNQ2754 | | |
| | SEQ ID NO; Position | | | | 5667; 8901 | | |
| | Genotype; Phenotype | | | | n = T; increased risk | | |
| | Hardy-Weinberg | | | | 0.11853 | | |
| Case | | | | | | | Odds |
| Flag | Allele B | AA | AB | BB | Model | p-Value | Ratio |
| 0 | T | 287 | 504 | 179 | Recessive | 0.002645 | 1.400 |
| 1 | T | 266 | 463 | 231 | | | |

[0447] Table 130A indicates SNPs found to be in strong linkage disequilibrium with rs2741083. To generate this list, correlation coefficients (r²) were calculated between the index SNP and all neighboring SNPs cited in the June 2006 HapMap data set release. An r² cut off of 0.50 was selected for inclusion as evidence for strong genetic linkage, i.e., a “strong linkage disequilibrium.

TABLE 130A
Linked SNPs

| SNP | r² | Position on chr8 | SEQ ID NO |
|---|---|---|---|
| rs2741083 | — | 6671547 | 3496 |

### Example 131

[0448] For individuals with colorectal cancer, the distribution of polymorphic alleles at position 18699074 of chromosome 8, found within the PSD3 gene, was different from those without colorectal cancer (Table 131). The dominant test for risk associated with carrying the T allele had an empirical p-value based on permutation analysis of 0.012359, and the corresponding dominant odds ratio is 1.283 (Table 131). These data further suggest that this marker, located within the PSD3 gene, is associated with colorectal cancer risk and that the T allele at position 18699074 of chromosome 8 is associated with an increased risk of developing colorectal cancer.

TABLE 131

| | rs no. | | | | 10503636 | | |
|---|---|---|---|---|---|---|---|
| | Chromosome; Position | | | | 8; 18699074 | | |
| | Gene Name | | | | PSD3 | | |
| | SEQ ID NO; Position | | | | 5668; 216403 | | |
| | Genotype; Phenotype | | | | n = T; increased risk | | |
| | Hardy-Weinberg | | | | 0.33518 | | |
| Case | | | | | | | Odds |
| Flag | Allele B | AA | AB | BB | Model | p-Value | Ratio |
| 0 | T | 295 | 535 | 273 | Dominant | 0.012359 | 1.283 |
| 1 | T | 241 | 546 | 301 | | | |

[0449] Table 131A indicates SNPs found to be in strong linkage disequilibrium with rs10503636. To generate this list, correlation coefficients (r²) were calculated between the index SNP and all neighboring SNPs cited in the June 2006 HapMap data set release. An r² cut off of 0.50 was selected for inclusion as evidence for strong genetic linkage, i.e., a “strong linkage disequilibrium.

TABLE 131A
Linked SNPs

| SNP | r² | Position on chr8 | SEQ ID NO |
|---|---|---|---|
| rs12549858 | 0.507 | 18698758 | 3497 |
| rs10503636 | — | 18699074 | 3498 |
| rs2069245 | 0.629 | 18701373 | 3499 |
| rs11997879 | 0.622 | 18701730 | 3500 |
| rs11986109 | 0.629 | 18701912 | 3501 |
| rs11993467 | 0.635 | 18701941 | 3502 |
| rs11786921 | 0.624 | 18702265 | 3503 |
| rs11786923 | 0.662 | 18702287 | 3504 |
| rs13276530 | 0.624 | 18702626 | 3505 |
| rs11774165 | 0.635 | 18703230 | 3506 |
| rs11775676 | 0.675 | 18709772 | 3507 |
| rs11775742 | 0.584 | 18709990 | 3508 |
| rs11780950 | 0.573 | 18712763 | 3509 |
| rs11778625 | 0.567 | 18712961 | 3510 |

### Example 132

[0450] For individuals with colorectal cancer, the distribution of polymorphic alleles at position 74428819 of chromosome 8 was different from those without colorectal cancer (Table 132).

[0451] The dominant test for risk associated with carrying the A allele had an empirical p-value based on permutation analysis of 0.003255, and the corresponding dominant odds ratio is 1.316 (Table 132). These data further suggest that this marker is associated with colorectal cancer risk and that the A allele at position 74428819 of chromosome 8 is associated with an increased risk of developing colorectal cancer.

TABLE 132

| | |
|---|---|
| rs no. | 10957657 |
| Chromosome; Position | 8; 74428819 |
| Gene Name | unknown |
| Genotype; Phenotype | n = A; increased risk |
| Hardy-Weinberg | 0.36018 |

| Case | | | | | | | Odds |
|---|---|---|---|---|---|---|---|
| Flag | Allele B | AA | AB | BB | Model | p-Value | Ratio |
| 0 | A | 448 | 415 | 83 | Dominant | 0.003255 | 1.316 |
| 1 | A | 376 | 453 | 97 | | | |

[0452] Table 132A indicates SNPs found to be in strong linkage disequilibrium with rs10957657. To generate this list, correlation coefficients (r²) were calculated between the index SNP and all neighboring SNPs cited in the June 2006 HapMap data set release. An r² cut off of 0.50 was selected for inclusion as evidence for strong genetic linkage, i.e., a “strong linkage disequilibrium.

TABLE 132A
Linked SNPs

| SNP | r² | Position on chr8 | SEQ ID NO |
|---|---|---|---|
| rs4738328 | 0.686 | 74427949 | 3511 |
| rs10957657 | — | 74428819 | 3512 |
| rs6987005 | 1.0 | 74432043 | 3513 |

### Example 133

[0453] For individuals with colorectal cancer, the distribution of polymorphic alleles at position 90213747 of chromosome 8 was different from those without colorectal cancer (Table 133). The recessive test for risk associated with carrying the G allele had an empirical p-value of 0.0328 based on permutation analysis, and the corresponding recessive odds ratio is 1.303 (Table 133). These data further suggest that this marker is associated with colorectal cancer risk and that the G allele at position 90213747 of chromosome 8 is associated with an increased risk of developing colorectal cancer.

TABLE 133

| | |
|---|---|
| rs no. | 1384747 |
| Chromosome; Position | 8; 90213747 |
| Gene Name | unknown |
| Genotype; Phenotype | n = G; increased risk |
| Hardy-Weinberg | 0.64495 |

| Case | | | | | | | Odds |
|---|---|---|---|---|---|---|---|
| Flag | Allele B | AA | AB | BB | Model | p-Value | Ratio |
| 0 | G | 440 | 509 | 137 | Recessive | 0.0328 | 1.303 |
| 1 | G | 442 | 462 | 170 | | | |

[0454] Table 133A indicates SNPs found to be in strong linkage disequilibrium with rs1384747. To generate this list, correlation coefficients (r²) were calculated between the index SNP and all neighboring SNPs cited in the June 2006 HapMap data set release. An r² cut off of 0.50 was selected for inclusion as evidence for strong genetic linkage, i.e., a “strong linkage disequilibrium.

TABLE 133A
Linked SNPs

| SNP | r² | Position on chr8 | SEQ ID NO |
|---|---|---|---|
| rs16889740 | 0.541 | 90069996 | 3514 |
| rs1922327 | 0.549 | 90082194 | 3515 |
| rs13257963 | 0.549 | 90093695 | 3516 |
| rs1014313 | 0.788 | 90096817 | 3517 |
| rs13261113 | 0.821 | 90102446 | 3518 |
| rs1240118 | 0.724 | 90116445 | 3519 |
| rs1240117 | 0.724 | 90116543 | 3520 |
| rs1240116 | 0.724 | 90116612 | 3521 |
| rs1240115 | 0.74 | 90116964 | 3522 |
| rs10955882 | 0.724 | 90117638 | 3523 |
| rs13254636 | 0.577 | 90117943 | 3524 |
| rs3886733 | 0.577 | 90118638 | 3525 |
| rs1240113 | 0.577 | 90118914 | 3526 |
| rs12171681 | 0.577 | 90119048 | 3527 |
| rs6990822 | 0.821 | 90119921 | 3528 |
| rs1922312 | 0.821 | 90121222 | 3529 |
| rs11998037 | 0.821 | 90121663 | 3530 |
| rs6469750 | 0.821 | 90122479 | 3531 |
| rs6469751 | 0.821 | 90122660 | 3532 |
| rs11988832 | 0.821 | 90123078 | 3533 |
| rs11986450 | 0.724 | 90123412 | 3534 |
| rs1922314 | 0.818 | 90123540 | 3535 |
| rs2222882 | 0.821 | 90123958 | 3536 |
| rs16890421 | 0.821 | 90124160 | 3537 |
| rs1922315 | 0.663 | 90125410 | 3538 |
| rs10447965 | 0.577 | 90125681 | 3539 |
| rs10088616 | 0.577 | 90126798 | 3540 |
| rs13270618 | 0.577 | 90128134 | 3541 |
| rs12155697 | 0.577 | 90128856 | 3542 |
| rs7462329 | 0.577 | 90129393 | 3543 |
| rs7463333 | 0.577 | 90130637 | 3544 |
| rs11992867 | 0.577 | 90130783 | 3545 |
| rs11989213 | 0.577 | 90130886 | 3546 |
| rs1483365 | 0.577 | 90131334 | 3547 |
| rs1240082 | 0.56 | 90132757 | 3548 |
| rs11780365 | 0.784 | 90133487 | 3549 |
| rs11782784 | 0.818 | 90133515 | 3550 |
| rs7827381 | 0.821 | 90134733 | 3551 |
| rs13254197 | 0.605 | 90135712 | 3552 |
| rs13254288 | 0.597 | 90135793 | 3553 |
| rs10504871 | 0.605 | 90136435 | 3554 |
| rs10504872 | 0.605 | 90136511 | 3555 |
| rs2952472 | 0.591 | 90136571 | 3556 |
| rs10107115 | 0.605 | 90136589 | 3557 |
| rs1240061 | 0.633 | 90139036 | 3558 |
| rs1483368 | 0.89 | 90139083 | 3559 |
| rs900541 | 0.89 | 90139731 | 3560 |
| rs1483367 | 0.855 | 90140123 | 3561 |
| rs1240058 | 0.821 | 90141269 | 3562 |
| rs1531846 | 0.927 | 90143122 | 3563 |
| rs10955896 | 0.662 | 90147313 | 3564 |
| rs6469763 | 0.927 | 90147560 | 3565 |
| rs10106118 | 0.755 | 90148953 | 3566 |
| rs2338664 | 0.656 | 90149005 | 3567 |
| rs13272739 | 0.919 | 90149411 | 3568 |
| rs7816905 | 0.662 | 90151810 | 3569 |
| rs11985034 | 0.692 | 90154883 | 3570 |
| rs1483363 | 0.766 | 90157643 | 3571 |
| rs1483362 | 0.662 | 90159452 | 3572 |
| rs1922306 | 0.925 | 90162703 | 3573 |
| rs16890894 | 0.758 | 90163700 | 3574 |
| rs16891021 | 0.662 | 90171355 | 3575 |
| rs1240073 | 0.927 | 90171916 | 3576 |
| rs13257605 | 0.925 | 90172229 | 3577 |
| rs1240071 | 0.927 | 90172384 | 3578 |
| rs13276945 | 0.695 | 90174078 | 3579 |
| rs13274815 | 0.695 | 90174091 | 3580 |
| rs1240069 | 0.963 | 90174273 | 3581 |
| rs13252970 | 0.701 | 90175501 | 3582 |
| rs1240064 | 0.963 | 90175512 | 3583 |
| rs2222883 | 0.858 | 90176580 | 3584 |
| rs1681450 | 0.963 | 90177417 | 3585 |
| rs6469807 | 0.963 | 90178513 | 3586 |
| rs13256692 | 0.755 | 90178626 | 3587 |
| rs6983350 | 0.962 | 90178888 | 3588 |
| rs1483382 | 0.829 | 90183461 | 3589 |
| rs1240088 | 1.0 | 90184062 | 3590 |
| rs7460547 | 0.962 | 90185119 | 3591 |
| rs1240091 | 0.826 | 90185254 | 3592 |
| rs1483383 | 1.0 | 90187149 | 3593 |
| rs16891240 | 1.0 | 90187573 | 3594 |
| rs13259001 | 0.759 | 90187807 | 3595 |
| rs17758172 | 0.787 | 90187901 | 3596 |
| rs2170706 | 0.964 | 90189629 | 3597 |
| rs7839675 | 0.701 | 90191813 | 3598 |
| rs7842356 | 0.858 | 90192035 | 3599 |
| rs2338668 | 1.0 | 90197641 | 3600 |
| rs2338669 | 1.0 | 90197668 | 3601 |
| rs1601090 | 0.757 | 90198621 | 3602 |
| rs7001521 | 0.796 | 90199925 | 3603 |
| rs7001519 | 0.963 | 90200120 | 3604 |
| rs7462065 | 1.0 | 90201518 | 3605 |
| rs9650077 | 0.759 | 90202503 | 3606 |
| rs7826720 | 1.0 | 90208095 | 3607 |
| rs10504874 | 0.761 | 90212847 | 3608 |
| rs13280094 | 1.0 | 90213345 | 3609 |
| rs1384747 | — | 90213747 | 3610 |
| rs13264194 | 0.964 | 90215450 | 3611 |
| rs13272639 | 0.723 | 90216613 | 3612 |
| rs2220084 | 0.81 | 90220298 | 3613 |
| rs7001583 | 1.0 | 90223006 | 3614 |
| rs12675133 | 0.825 | 90227167 | 3615 |
| rs13269854 | 0.963 | 90228222 | 3616 |
| rs4960963 | 0.702 | 90230508 | 3617 |
| rs4961118 | 0.89 | 90254539 | 3618 |
| rs10955936 | 0.855 | 90259357 | 3619 |
| rs13275246 | 0.552 | 90274542 | 3620 |

### Example 134

[0455] For individuals with colorectal cancer, the distribution of polymorphic alleles at position 104137053 of chromosome 8, found within the ATP6V1C1 gene, was different from those without colorectal cancer (Table 134). The dominant test for risk associated with carrying the A allele had an empirical p-value based on permutation analysis of 0.014254, and the corresponding dominant odds ratio is 1.273 (Table 134). These data further suggest that this marker, located within the ATP6V1C1 gene, is associated with colorectal cancer risk and that the A allele at position 104137053 of chromosome 8 is associated with an increased risk of developing colorectal cancer.

TABLE 134

| | |
|---|---|
| rs no. | 2253218 |
| Chromosome; Position | 8; 104137053 |
| Gene Name | ATP6V1C1 |
| SEQ ID NO; Position | 5669; 34567 |
| Genotype; Phenotype | n = A; increased risk |
| Hardy-Weinberg | 0.02377 |

| Case | | | | | | | Odds |
|---|---|---|---|---|---|---|---|
| Flag | Allele B | AA | AB | BB | Model | p-Value | Ratio |
| 0 | A | 326 | 451 | 210 | Dominant | 0.014254 | 1.273 |
| 1 | A | 272 | 501 | 201 | | | |

[0456] Table 134A indicates SNPs found to be in strong linkage disequilibrium with rs2253218. To generate this list, correlation coefficients (r²) were calculated between the index SNP and all neighboring SNPs cited in the June 2006 HapMap data set release. An r² cut off of 0.50 was selected for inclusion as evidence for strong genetic linkage, i.e., a “strong linkage disequilibrium.

TABLE 134A
Linked SNPs

| SNP | r² | Position on chr8 | SEQ ID NO |
|---|---|---|---|
| rs2515197 | 0.967 | 104118573 | 3621 |
| rs2515198 | 0.502 | 104120734 | 3622 |
| rs2458290 | 1.0 | 104131909 | 3623 |
| rs2253218 | — | 104137053 | 3624 |
| rs2454045 | 1.0 | 104137952 | 3625 |
| rs2515200 | 1.0 | 104139321 | 3626 |
| rs2454043 | 0.599 | 104139431 | 3627 |

### Example 135

[0457] For individuals with colorectal cancer, the distribution of polymorphic alleles at position 115951211 of chromosome 8 was different from those without colorectal cancer (Table 135). The trend test for risk associated with carrying the G allele had an empirical p-value of 0.000243 based on permutation analysis, and the corresponding Mantel-Haenszel odds ratio for trend is 1.389 (Table 135). These data further suggest that this marker is associated with colorectal cancer risk and that the G allele at position 115951211 of chromosome 8 is associated with an increased risk of developing colorectal cancer.

TABLE 135

| | |
|---|---|
| rs no. | 17667338 |
| Chromosome; Position | 8; 115951211 |
| Gene Name | unknown |
| Genotype; Phenotype | n = G; increased risk |
| Hardy-Weinberg | 0.36357 |

| Case | | | | | | | Odds |
|---|---|---|---|---|---|---|---|
| Flag | Allele B | AA | AB | BB | Model | p-Value | Ratio |
| 0 | G | 24 | 237 | 740 | Trend | 0.000243 | 1.389 |
| 1 | G | 7 | 192 | 791 | | | |

[0458] Table 135A indicates SNPs found to be in strong linkage disequilibrium with rs17667338. To generate this list, correlation coefficients (r²) were calculated between the index SNP and all neighboring SNPs cited in the June 2006 HapMap data set release. An r² cut off of 0.50 was selected for inclusion as evidence for strong genetic linkage, i.e., a “strong linkage disequilibrium.

TABLE 135A
Linked SNPs

| SNP | r² | Position on chr8 | SEQ ID NO |
|---|---|---|---|
| rs7013533 | 1.0 | 115941011 | 3628 |
| rs7820058 | 1.0 | 115947906 | 3629 |
| rs17729017 | 1.0 | 115950427 | 3630 |
| rs17667338 | — | 115951211 | 3631 |
| rs17729107 | 1.0 | 115951650 | 3632 |
| rs17667594 | 1.0 | 115953160 | 3633 |
| rs10505232 | 1.0 | 115959680 | 3634 |
| rs17729672 | 1.0 | 115960577 | 3635 |
| rs10505238 | 1.0 | 115961336 | 3636 |
| rs17729840 | 1.0 | 115961783 | 3637 |
| rs7816550 | 0.663 | 115962230 | 3638 |
| rs6986512 | 0.848 | 115962978 | 3639 |
| rs16886603 | 1.0 | 115963234 | 3640 |
| rs7015520 | 1.0 | 115980114 | 3641 |
| rs6980860 | 1.0 | 115986100 | 3642 |
| rs2357737 | 0.848 | 116020380 | 3643 |
| rs2357738 | 0.848 | 116020490 | 3644 |
| rs4484727 | 0.848 | 116020927 | 3645 |
| rs4270996 | 0.848 | 116020928 | 3646 |
| rs4300037 | 0.848 | 116021044 | 3647 |
| rs11987323 | 0.848 | 116021489 | 3648 |
| rs11987349 | 0.843 | 116021533 | 3649 |
| rs7005793 | 0.848 | 116022733 | 3650 |
| rs6989745 | 0.806 | 116023006 | 3651 |
| rs9632821 | 0.848 | 116025054 | 3652 |
| rs7835429 | 0.843 | 116031725 | 3653 |
| rs1872781 | 0.848 | 116033693 | 3654 |
| rs1872780 | 0.848 | 116033814 | 3655 |
| rs9297536 | 0.848 | 116034628 | 3656 |
| rs10109921 | 0.806 | 116042186 | 3657 |
| rs673380 | 0.848 | 116053060 | 3658 |
| rs6993960 | 0.573 | 116094281 | 3659 |

### Example 136

[0459] For individuals with colorectal cancer, the distribution of polymorphic alleles at position 128490967 of chromosome 8 was different from those without colorectal cancer (Table 136). The trend test for risk associated with carrying the G allele had an empirical p-value of 0.001000 based on permutation analysis, and the corresponding Mantel-Haenszel odds ratio for trend is 1.208 (Table 136). These data further suggest that this marker is associated with colorectal cancer risk and that the G allele at position 128490967 of chromosome 8 is associated with an increased risk of developing colorectal cancer.

TABLE 136

| | |
|---|---|
| rs no. | 4871788 |
| Chromosome; Position | 8; 128490967 |
| Gene Name | unknown |
| Genotype; Phenotype | n = G; increased risk |
| Hardy-Weinberg | 0.58554 |

| Case | | | | | | | Odds |
|---|---|---|---|---|---|---|---|
| Flag | Allele B | AA | AB | BB | Model | p-Value | Ratio |
| 0 | G | 421 | 578 | 184 | Trend | 0.001000 | 1.208 |
| 1 | G | 361 | 575 | 235 | | | |

[0460] Table 136A indicates SNPs found to be in strong linkage disequilibrium with rs4871788. To generate this list, correlation coefficients (r²) were calculated between the index SNP and all neighboring SNPs cited in the June 2006 HapMap data set release. An r² cut off of 0.50 was selected for inclusion as evidence for strong genetic linkage, i.e., a “strong linkage disequilibrium.

TABLE 136A
Linked SNPs

| SNP | r² | Position on chr8 | SEQ ID NO |
|---|---|---|---|
| rs3847136 | 0.553 | 128476372 | 3660 |
| rs10505477 | 0.609 | 128476625 | 3661 |
| rs10505476 | 0.601 | 128477298 | 3662 |
| rs10808556 | 0.955 | 128482329 | 3665 |
| rs6983267 | 0.569 | 128482487 | 3666 |
| rs3847137 | 0.928 | 128483680 | 3667 |
| rs7013278 | 0.64 | 128484074 | 3668 |
| rs10505474 | 0.963 | 128486686 | 3669 |
| rs2060776 | 1.0 | 128489299 | 3670 |
| rs4871788 | — | 128490967 | 3671 |
| rs7837328 | 1.0 | 128492309 | 3672 |
| rs7837626 | 1.0 | 128492523 | 3673 |
| rs7837644 | 1.0 | 128492580 | 3674 |
| rs10956368 | 0.962 | 128492832 | 3675 |
| rs10956369 | 1.0 | 128492999 | 3676 |
| rs7014346 | 0.755 | 128493974 | 3677 |
| rs871135 | 1.0 | 128495575 | 3678 |

### Example 137

[0461] For individuals with colorectal cancer, the distribution of polymorphic alleles at position 128493974 of chromosome 8 was different from those without colorectal cancer (Table 137). The recessive test for risk associated with carrying the A allele had an empirical p-value of 0.000300 based on permutation analysis, and the corresponding recessive odds ratio is 1.548 (Table 137). These data further suggest that this marker is associated with colorectal cancer risk and that the A allele at position 128493974 of chromosome 8 is associated with an increased risk of developing colorectal cancer.

TABLE 137

| | |
|---|---|
| rs no. | 7014346 |
| Chromosome; Position | 8; 128493974 |
| Gene Name | unknown |
| Genotype; Phenotype | n = A; increased risk |
| Hardy-Weinberg | 0.30839 |

| Case | | | | | | | Odds |
|---|---|---|---|---|---|---|---|
| Flag | Allele B | AA | AB | BB | Model | p-Value | Ratio |
| 0 | A | 486 | 557 | 139 | Recessive | 0.000300 | 1.548 |
| 1 | A | 428 | 546 | 201 | | | |

[0462] Table 137A indicates SNPs found to be in strong linkage disequilibrium with rs7014346. To generate this list, correlation coefficients (r²) were calculated between the index SNP and all neighboring SNPs cited in the June 2006 HapMap data set release. An r² cut off of 0.50 was selected for inclusion as evidence for strong genetic linkage, i.e., a “strong linkage disequilibrium.

TABLE 137A
Linked SNPs

| SNP | r² | Position on chr8 | SEQ ID NO |
|---|---|---|---|
| rs3847136 | 0.714 | 128476372 | 3660 |
| rs11985829 | 0.644 | 128478414 | 3663 |
| rs10808555 | 0.505 | 128478693 | 3664 |
| rs10808556 | 0.748 | 128482329 | 3665 |
| rs3847137 | 0.701 | 128483680 | 3667 |
| rs7013278 | 0.944 | 128484074 | 3668 |
| rs10505474 | 0.727 | 128486686 | 3669 |
| rs2060776 | 0.755 | 128489299 | 3670 |
| rs4871788 | 0.755 | 128490967 | 3671 |
| rs7837328 | 0.755 | 128492309 | 3672 |
| rs7837626 | 0.755 | 128492523 | 3673 |
| rs7837644 | 0.755 | 128492580 | 3674 |
| rs10956368 | 0.713 | 128492832 | 3675 |
| rs10956369 | 0.755 | 128492999 | 3676 |
| rs7014346 | — | 128493974 | 3677 |
| rs871135 | 0.755 | 128495575 | 3678 |
| rs7842552 | 0.642 | 128500876 | 3679 |

### Example 138

[0463] For individuals with colorectal cancer, the distribution of polymorphic alleles at position 128500876 of chromosome 8 was different from those without colorectal cancer (Table 138). The trend test for risk associated with carrying the G allele had an empirical p-value of 0.003906 based on permutation analysis, and the corresponding Mantel-Haenszel odds ratio for trend is 1.200 (Table 138). These data further suggest that this marker is associated with colorectal cancer risk and that the G allele at position 128500876 of chromosome 8 is associated with an increased risk of developing colorectal cancer.

TABLE 138

| | |
|---|---|
| rs no. | 7842552 |
| Chromosome; Position | 8; 128500876 |
| Gene Name | unknown |
| Genotype; Phenotype | n = G; increased risk |
| Hardy-Weinberg | 0.46216 |

| Case | | | | | | | Odds |
|---|---|---|---|---|---|---|---|
| Flag | Allele B | AA | AB | BB | Model | p-Value | Ratio |
| 0 | G | 562 | 465 | 85 | Trend | 0.003906 | 1.200 |
| 1 | G | 511 | 491 | 119 | | | |

[0464] Table 138A indicates SNPs found to be in strong linkage disequilibrium with rs7842552. To generate this list, correlation coefficients (r²) were calculated between the index SNP and all neighboring SNPs cited in the June 2006 HapMap data set release. An r² cut off of 0.50 was selected for inclusion as evidence for strong genetic linkage, i.e., a “strong linkage disequilibrium.

TABLE 138A
Linked SNPs

| SNP | r² | Position on chr8 | SEQ ID NO |
|---|---|---|---|
| rs7013278 | 0.53 | 128484074 | 3668 |
| rs7014346 | 0.642 | 128493974 | 3677 |
| rs7842552 | — | 128500876 | 3679 |

### Example 139

[0465] For individuals with colorectal cancer, the distribution of polymorphic alleles at position 134456489 of chromosome 8 was different from those without colorectal cancer (Table 139). The trend test for risk associated with carrying the G allele had an empirical p-value of 4.7e-05 based on permutation analysis, and the corresponding Mantel-Haenszel odds ratio for trend is 1.31 (Table 139). These data further suggest that this marker is associated with colorectal cancer risk and that the G allele at position 134456489 of chromosome 8 is associated with an increased risk of developing colorectal cancer.

TABLE 139

| | |
|---|---|
| rs no. | 6980682 |
| Chromosome; Position | 8; 134456489 |
| Gene Name | unknown |
| Genotype; Phenotype | n = G; increased risk |
| Hardy-Weinberg | 0.79647 |

| Case | | | | | | | Odds |
|---|---|---|---|---|---|---|---|
| Flag | Allele B | AA | AB | BB | Model | p-Value | Ratio |
| 0 | G | 164 | 500 | 394 | Trend | 4.7e−05 | 1.31 |
| 1 | G | 104 | 418 | 430 | | | |

[0466] Table 139A indicates SNPs found to be in strong linkage disequilibrium with rs6980682. To generate this list, correlation coefficients (r²) were calculated between the index SNP and all neighboring SNPs cited in the June 2006 HapMap data set release. An r² cut off of 0.50 was selected for inclusion as evidence for strong genetic linkage, i.e., a “strong linkage disequilibrium.

TABLE 139A
Linked SNPs

| SNP | r² | Position on chr8 | SEQ ID NO |
|---|---|---|---|
| rs2976593 | 0.553 | 134432616 | 3680 |
| rs2976594 | 0.553 | 134432757 | 3681 |
| rs2929955 | 0.557 | 134432928 | 3682 |
| rs2976536 | 0.524 | 134432990 | 3683 |
| rs2976537 | 0.51 | 134433076 | 3684 |
| rs2976538 | 0.553 | 134433095 | 3685 |
| rs2976539 | 0.614 | 134433727 | 3686 |
| rs2976540 | 0.614 | 134433749 | 3687 |
| rs2929956 | 0.68 | 134433831 | 3688 |
| rs2929957 | 0.614 | 134434340 | 3689 |
| rs2976541 | 0.614 | 134434438 | 3690 |
| rs2976543 | 0.614 | 134435278 | 3691 |
| rs2976544 | 0.614 | 134435857 | 3692 |
| rs734598 | 0.614 | 134436910 | 3693 |
| rs2976550 | 0.583 | 134437896 | 3694 |
| rs2976551 | 0.614 | 134438488 | 3695 |
| rs2976552 | 0.614 | 134438565 | 3696 |
| rs2976554 | 0.614 | 134439148 | 3697 |
| rs2976555 | 0.574 | 134439299 | 3698 |
| rs2976558 | 0.614 | 134439791 | 3699 |
| rs2929931 | 0.583 | 134443264 | 3700 |
| rs2976565 | 0.583 | 134444101 | 3701 |
| rs2976566 | 0.583 | 134446144 | 3702 |
| rs2976567 | 0.553 | 134448268 | 3703 |
| rs2929930 | 0.583 | 134448538 | 3704 |
| rs2929926 | 0.92 | 134450865 | 3705 |
| rs6980682 | — | 134456489 | 3706 |
| rs16904911 | 0.8 | 134458401 | 3707 |
| rs6999391 | 0.635 | 134470691 | 3708 |
| rs13265709 | 0.688 | 134471389 | 3709 |
| rs13268338 | 0.815 | 134471415 | 3710 |
| rs2736862 | 0.53 | 134497425 | 3711 |
| rs11998165 | 0.65 | 134502792 | 3712 |
| rs1018356 | 0.53 | 134504289 | 3713 |
| rs2736849 | 0.53 | 134505548 | 3714 |
| rs2736856 | 0.526 | 134514422 | 3715 |
| rs7836099 | 0.501 | 134519724 | 3716 |

### Example 140

[0467] For individuals with colorectal cancer, the distribution of polymorphic alleles at position 500862 of chromosome 9 was different from those without colorectal cancer (Table 140). The dominant test for risk associated with carrying the G allele had an empirical p-value based on permutation analysis of 0.004552, and the corresponding dominant odds ratio is 1.438 (Table 140). These data further suggest that this marker is associated with colorectal cancer risk and that the G allele at position 500862 of chromosome 9 is associated with an increased risk of developing colorectal cancer.

TABLE 140

| | |
|---|---|
| rs no. | 7874553 |
| Chromosome; Position | 9; 500862 |
| Gene Name | unknown |
| Genotype; Phenotype | n = G; increased risk |
| Hardy-Weinberg | 0.30009 |

| Case | | | | | | | Odds |
|---|---|---|---|---|---|---|---|
| Flag | Allele B | AA | AB | BB | Model | p-Value | Ratio |
| 0 | G | 880 | 118 | 6 | Dominant | 0.004552 | 1.438 |
| 1 | G | 824 | 163 | 4 | | | |

[0468] Table 140A indicates SNPs found to be in strong linkage disequilibrium with rs7874553. To generate this list, correlation coefficients (r²) were calculated between the index SNP and all neighboring SNPs cited in the June 2006 HapMap data set release. An r² cut off of 0.50 was selected for inclusion as evidence for strong genetic linkage, i.e., a “strong linkage disequilibrium.

TABLE 140A
Linked SNPs

| SNP | r² | Position on chr9 | SEQ ID NO |
|---|---|---|---|
| rs1007937 | 0.522 | 483247 | 3717 |
| rs6476918 | 0.737 | 485701 | 3718 |
| rs10974844 | 1.0 | 489516 | 3719 |
| rs7036591 | 1.0 | 490810 | 3720 |
| rs10118798 | 1.0 | 490979 | 3721 |
| rs12347628 | 1.0 | 499526 | 3722 |
| rs7850663 | 1.0 | 500546 | 3723 |
| rs7850873 | 1.0 | 500700 | 3724 |
| rs7874553 | — | 500862 | 3725 |
| rs1410968 | 1.0 | 502589 | 3726 |
| rs10974932 | 1.0 | 503222 | 3727 |
| rs7024942 | 0.68 | 519916 | 3728 |
| rs16919226 | 0.68 | 523804 | 3729 |
| rs7857873 | 0.514 | 536432 | 3730 |

### Example 141

[0469] For individuals with colorectal cancer, the distribution of polymorphic alleles at position 6685502 of chromosome 9 was different from those without colorectal cancer (Table 141). The dominant test for risk associated with carrying the T allele had an empirical p-value based on permutation analysis of 0.003846, and the corresponding dominant odds ratio is 2.08 (Table 141). These data further suggest that this marker is associated with colorectal cancer risk and that the T allele at position 6685502 of chromosome 9 is associated with an increased risk of developing colorectal cancer.

TABLE 141

| | rs no. | | | | 1094040 | | |
|---|---|---|---|---|---|---|---|
| | Chromosome; Position | | | | 9; 6685502 | | |
| | Gene Name | | | | unknown | | |
| | Genotype; Phenotype | | | | n = T; increased risk | | |
| | Hardy-Weinberg | | | | 0.01641 | | |
| Case | | | | | | | Odds |
| Flag | Allele B | AA | AB | BB | Model | p-Value | Ratio |
| 0 | T | 47 | 281 | 676 | Dominant | 0.003846 | 2.08 |
| 1 | T | 23 | 308 | 666 | | | |

[0470] Table 141A indicates SNPs found to be in strong linkage disequilibrium with rs1094040. To generate this list, correlation coefficients (r²) were calculated between the index SNP and all neighboring SNPs cited in the June 2006 HapMap data set release. An r² cut off of 0.50 was selected for inclusion as evidence for strong genetic linkage, i.e., a “strong linkage disequilibrium.

TABLE 141A
Linked SNPs

| SNP | r² | Position on chr9 | SEQ ID NO |
|---|---|---|---|
| rs1658973 | 0.542 | 6655097 | 3731 |
| rs820506 | 0.572 | 6660062 | 3732 |
| rs1658943 | 0.572 | 6666953 | 3733 |
| rs1759416 | 0.545 | 6667167 | 3734 |
| rs17592747 | 0.558 | 6667316 | 3735 |
| rs1094040 | — | 6685502 | 3736 |

### Example 142

[0471] For individuals with colorectal cancer, the distribution of polymorphic alleles at position 15338120 of chromosome 9 was different from those without colorectal cancer (Table 142). The trend test for risk associated with carrying the C allele had an empirical p-value of 0.000459 based on permutation analysis, and the corresponding Mantel-Haenszel odds ratio for trend is 1.291 (Table 142). These data further suggest that this marker is associated with colorectal cancer risk and that the C allele at position 15338120 of chromosome 9 is associated with an increased risk of developing colorectal cancer.

TABLE 142

| | |
|---|---|
| rs no. | 687381 |
| Chromosome; Position | 9; 15338120 |
| Gene Name | unknown |
| Genotype; Phenotype | n = C; increased risk |
| Hardy-Weinberg | 0.12000 |

| Case | | | | | | | Odds |
|---|---|---|---|---|---|---|---|
| Flag | Allele B | AA | AB | BB | Model | p-Value | Ratio |
| 0 | C | 423 | 438 | 89 | Trend | 0.000459 | 1.291 |
| 1 | C | 345 | 482 | 113 | | | |

[0472] Table 142A indicates SNPs found to be in strong linkage disequilibrium with rs687381. To generate this list, correlation coefficients (r²) were calculated between the index SNP and all neighboring SNPs cited in the June 2006 HapMap data set release. An r² cut off of 0.50 was selected for inclusion as evidence for strong genetic linkage, i.e., a “strong linkage disequilibrium.

TABLE 142A
Linked SNPs

| SNP | r² | Position on chr9 | SEQ ID NO |
|---|---|---|---|
| rs12003744 | 0.541 | 15332046 | 3737 |
| rs1215129 | 0.965 | 15333613 | 3738 |
| rs1215130 | 0.965 | 15333709 | 3739 |
| rs1215134 | 1.0 | 15337518 | 3740 |
| rs687381 | — | 15338120 | 3741 |
| rs1105191 | 0.6 | 15360575 | 3742 |

### Example 143

[0473] For individuals with colorectal cancer, the distribution of polymorphic alleles at position 16205744 of chromosome 9 was different from those without colorectal cancer (Table 143). The trend test for risk associated with carrying the C allele had an empirical p-value of 0.209228 based on permutation analysis, and the corresponding Mantel-Haenszel odds ratio for trend is 1.155 (Table 143). These data further suggest that this marker is associated with colorectal cancer risk and that the C allele at position 16205744 of chromosome 9 is associated with an increased risk of developing colorectal cancer.

TABLE 143

| | |
|---|---|
| rs no. | 16934264 |
| Chromosome; Position | 9; 16205744 |
| Gene Name | unknown |
| Genotype; Phenotype | n = C; increased risk |
| Hardy-Weinberg | 0.18922 |

| Case | | | | | | | Odds |
|---|---|---|---|---|---|---|---|
| Flag | Allele B | AA | AB | BB | Model | p-Value | Ratio |
| 0 | C | 5 | 94 | 873 | Trend | 0.209228 | 1.155 |
| 1 | C | 0 | 87 | 885 | | | |

[0474] Table 143A indicates SNPs found to be in strong linkage disequilibrium with rs16934264. To generate this list, correlation coefficients (r²) were calculated between the index SNP and all neighboring SNPs cited in the June 2006 HapMap data set release. An r² cut off of 0.50 was selected for inclusion as evidence for strong genetic linkage, i.e., a “strong linkage disequilibrium.

TABLE 143A
Linked SNPs

| SNP | r² | Position on chr9 | SEQ ID NO |
|---|---|---|---|
| rs16934264 | — | 16205744 | 3743 |
| rs12686718 | 0.514 | 16220898 | 3744 |

### Example 144

[0475] For individuals with colorectal cancer, the distribution of polymorphic alleles at position 80312169 of chromosome 9 was different from those without colorectal cancer (Table 144). The dominant test for risk associated with carrying the C allele had an empirical p-value based on permutation analysis of 0.002786, and the corresponding dominant odds ratio is 1.425 (Table 144). These data further suggest that this marker is associated with colorectal cancer risk and that the C allele at position 80312169 of chromosome 9 is associated with an increased risk of developing colorectal cancer.

TABLE 144

| | |
|---|---|
| rs no. | 979468 |
| Chromosome; Position | 9; 80312169 |
| Gene Name | unknown |
| Genotype; Phenotype | n = C; increased risk |
| Hardy-Weinberg | 0.14579 |

| Case | | | | | | | Odds |
|---|---|---|---|---|---|---|---|
| Flag | Allele B | AA | AB | BB | Model | p-Value | Ratio |
| 0 | C | 789 | 142 | 11 | Dominant | 0.002786 | 1.425 |
| 1 | C | 742 | 193 | 12 | | | |

[0476] Table 144A indicates SNPs found to be in strong linkage disequilibrium with rs979468. To generate this list, correlation coefficients (r²) were calculated between the index SNP and all neighboring SNPs cited in the June 2006 HapMap data set release. An r² cut off of 0.50 was selected for inclusion as evidence for strong genetic linkage, i.e., a “strong linkage disequilibrium.

TABLE 144A
Linked SNPs

| SNP | r² | Position on chr9 | SEQ ID NO |
|---|---|---|---|
| rs10746640 | 1.0 | 80306838 | 3745 |
| rs7039874 | 0.865 | 80307042 | 3746 |
| rs2196244 | 1.0 | 80311525 | 3747 |
| rs979468 | — | 80312169 | 3748 |
| rs10746643 | 0.901 | 80317346 | 3749 |
| rs10867547 | 0.901 | 80320677 | 3750 |
| rs10746646 | 1.0 | 80325743 | 3751 |
| rs1369185 | 1.0 | 80331697 | 3752 |
| rs10081667 | 1.0 | 80334157 | 3753 |
| rs10081668 | 1.0 | 80334175 | 3754 |
| rs1434835 | 1.0 | 80334382 | 3755 |
| rs978282 | 1.0 | 80334645 | 3756 |
| rs4877579 | 0.908 | 80338207 | 3757 |
| rs7032004 | 1.0 | 80342972 | 3758 |
| rs2378482 | 1.0 | 80349311 | 3759 |

### Example 145

[0477] For individuals with colorectal cancer, the distribution of polymorphic alleles at position 95620787 of chromosome 9 was different from those without colorectal cancer (Table 145).

[0478] The trend test for risk associated with carrying the C allele had an empirical p-value of 0.017887 based on permutation analysis, and the corresponding Mantel-Haenszel odds ratio for trend is 1.214 (Table 145). These data further suggest that this marker is associated with colorectal cancer risk and that the C allele at position 95620787 of chromosome 9 is associated with an increased risk of developing colorectal cancer.

TABLE 145

| | |
|---|---|
| rs no. | 7047415 |
| Chromosome; Position | 9; 95620787 |
| Gene Name | unknown |
| Genotype; Phenotype | n = C; increased risk |
| Hardy-Weinberg | 0.47271 |

| Case | | | | | | | Odds |
|---|---|---|---|---|---|---|---|
| Flag | Allele B | AA | AB | BB | Model | p-Value | Ratio |
| 0 | C | 18 | 216 | 777 | Trend | 0.017887 | 1.214 |
| 1 | C | 3 | 197 | 802 | | | |

[0479] Table 145A indicates SNPs found to be in strong linkage disequilibrium with rs7047415. To generate this list, correlation coefficients (r²) were calculated between the index SNP and all neighboring SNPs cited in the June 2006 HapMap data set release. An r² cut off of 0.50 was selected for inclusion as evidence for strong genetic linkage, i.e., a “strong linkage disequilibrium.

TABLE 145A
Linked SNPs

| SNP | r² | Position on chr9 | SEQ ID NO |
|---|---|---|---|
| rs7047415 | — | 95620787 | 3760 |
| rs7029315 | 1.0 | 95624467 | 3761 |
| rs16910240 | 1.0 | 95624530 | 3762 |

### Example 146

[0480] For individuals with colorectal cancer, the distribution of polymorphic alleles at position 108647178 of chromosome 9 was different from those without colorectal cancer (Table 146). The trend test for risk associated with carrying the C allele had an empirical p-value of 0.010603 based on permutation analysis, and the corresponding Mantel-Haenszel odds ratio for trend is 1.268 (Table 146). These data further suggest that this marker is associated with colorectal cancer risk and that the C allele at position 108647178 of chromosome 9 is associated with an increased risk of developing colorectal cancer.

TABLE 146

| | |
|---|---|
| rs no. | 957235 |
| Chromosome; Position | 9; 108647178 |
| Gene Name | unknown |
| Genotype; Phenotype | n = C; increased risk |
| Hardy-Weinberg | 1 |

| Case | | | | | | | Odds |
|---|---|---|---|---|---|---|---|
| Flag | Allele B | AA | AB | BB | Model | p-Value | Ratio |
| 0 | C | 26 | 261 | 651 | Trend | 0.010603 | 1.268 |
| 1 | C | 19 | 221 | 706 | | | |

[0481] Table 146A indicates SNPs found to be in strong linkage disequilibrium with rs957235. To generate this list, correlation coefficients (r²) were calculated between the index SNP and all neighboring SNPs cited in the June 2006 HapMap data set release. An r² cut off of 0.50 was selected for inclusion as evidence for strong genetic linkage, i.e., a “strong linkage disequilibrium.

TABLE 146A
Linked SNPs

| SNP | r² | Position on chr9 | SEQ ID NO |
|---|---|---|---|
| rs12115640 | 0.895 | 108607941 | 3763 |
| rs12380343 | 0.895 | 108608314 | 3764 |
| rs10979478 | 0.944 | 108614898 | 3765 |
| rs10979479 | 0.947 | 108622382 | 3766 |
| rs10448249 | 1.0 | 108624140 | 3767 |
| rs10816722 | 1.0 | 108625578 | 3768 |
| rs10979483 | 1.0 | 108626003 | 3769 |
| rs7870428 | 1.0 | 108629314 | 3770 |
| rs6477681 | 0.803 | 108629372 | 3771 |
| rs10118169 | 1.0 | 108630098 | 3772 |
| rs1339877 | 1.0 | 108630233 | 3773 |
| rs10979489 | 1.0 | 108630899 | 3774 |
| rs9299160 | 0.744 | 108631155 | 3775 |
| rs10979493 | 1.0 | 108632694 | 3776 |
| rs4490911 | 1.0 | 108632869 | 3777 |
| rs7869174 | 1.0 | 108634304 | 3778 |
| rs7470529 | 1.0 | 108635627 | 3779 |
| rs13366180 | 1.0 | 108637954 | 3780 |
| rs10979499 | 1.0 | 108640963 | 3781 |
| rs10759317 | 1.0 | 108641599 | 3782 |
| rs12335971 | 1.0 | 108641744 | 3783 |
| rs10979503 | 1.0 | 108642955 | 3784 |
| rs10979504 | 1.0 | 108643132 | 3785 |
| rs7027352 | 1.0 | 108643426 | 3786 |
| rs957235 | — | 108647178 | 3787 |
| rs7854712 | 0.683 | 108650142 | 3788 |
| rs16913557 | 0.929 | 108651401 | 3789 |
| rs4474093 | 1.0 | 108651424 | 3790 |
| rs3928854 | 1.0 | 108652066 | 3791 |
| rs3928855 | 1.0 | 108652126 | 3792 |
| rs10816729 | 0.895 | 108652441 | 3793 |
| rs7026291 | 0.857 | 108690689 | 3794 |
| rs3750466 | 0.527 | 108696373 | 3795 |
| rs7872727 | 0.692 | 108705645 | 3796 |

### Example 147

[0482] For individuals with colorectal cancer, the distribution of polymorphic alleles at position 110451236 of chromosome 9 was different from those without colorectal cancer (Table 147). The recessive test for risk associated with carrying the C allele had an empirical p-value of 0.000416 based on permutation analysis, and the corresponding recessive odds ratio is 2.441 (Table 147). These data further suggest that this marker is associated with colorectal cancer risk and that the C allele at position 110451236 of chromosome 9 is associated with an increased risk of developing colorectal cancer.

TABLE 147

| | |
|---|---|
| rs no. | 10817049 |
| Chromosome; Position | 9; 110451236 |
| Gene Name | unknown |
| Genotype; Phenotype | n = C; increased risk |
| Hardy-Weinberg | 0.80907 |

| Case | | | | | | | Odds |
|---|---|---|---|---|---|---|---|
| Flag | Allele B | AA | AB | BB | Model | p-Value | Ratio |
| 0 | C | 761 | 273 | 22 | Recessive | 0.000416 | 2.441 |
| 1 | C | 641 | 264 | 47 | | | |

[0483] Table 147A indicates SNPs found to be in strong linkage disequilibrium with rs10817049. To generate this list, correlation coefficients (r²) were calculated between the index SNP and all neighboring SNPs cited in the June 2006 HapMap data set release. An r² cut off of 0.50 was selected for inclusion as evidence for strong genetic linkage, i.e., a “strong linkage disequilibrium.

TABLE 147A
Linked SNPs

| SNP | r² | Position on chr9 | SEQ ID NO |
|---|---|---|---|
| rs10512406 | 1.0 | 110451147 | 3797 |
| rs10817049 | — | 110451236 | 3798 |
| rs10817051 | 1.0 | 110451582 | 3799 |
| rs4131385 | 1.0 | 110452183 | 3800 |
| rs10817052 | 1.0 | 110452978 | 3801 |
| rs10980486 | 1.0 | 110453857 | 3802 |
| rs10980487 | 0.928 | 110454978 | 3803 |
| rs10817054 | 1.0 | 110455578 | 3804 |
| rs10817056 | 1.0 | 110458344 | 3805 |
| rs10448267 | 1.0 | 110460448 | 3806 |
| rs10980495 | 1.0 | 110463553 | 3807 |
| rs11789078 | 1.0 | 110464331 | 3808 |
| rs10817062 | 1.0 | 110468467 | 3809 |
| rs10980498 | 1.0 | 110469102 | 3810 |
| rs12378245 | 1.0 | 110470498 | 3811 |
| rs10817063 | 1.0 | 110481490 | 3812 |
| rs10817068 | 0.935 | 110494530 | 3813 |
| rs10980508 | 0.935 | 110499314 | 3814 |

### Example 148

[0484] For individuals with colorectal cancer, the distribution of polymorphic alleles at position 114484743 of chromosome 9, found within the C9orf91 gene, was different from those without colorectal cancer (Table 148). The trend test for risk associated with carrying the C allele had an empirical p-value of 0.002689 based on permutation analysis, and the corresponding Mantel-Haenszel odds ratio for trend is 1.254 (Table 148). These data further suggest that this marker, located within the C9orf91 gene, is associated with colorectal cancer risk and that the C allele at position 114484743 of chromosome 9 is associated with an increased risk of developing colorectal cancer.

TABLE 148

| | |
|---|---|
| rs no. | 7027937 |
| Chromosome; Position | 9; 114484743 |
| Gene Name | C9orf91 |
| SEQ ID NO; Position | 5670; 31550 |
| Genotype; Phenotype | n = C; increased risk |
| Hardy-Weinberg | 0.13039 |

| Case | | | | | | | Odds |
|---|---|---|---|---|---|---|---|
| Flag | Allele B | AA | AB | BB | Model | p-Value | Ratio |
| 0 | C | 712 | 315 | 24 | Trend | 0.002689 | 1.254 |
| 1 | C | 592 | 315 | 41 | | | |

[0485] Table 148A indicates SNPs found to be in strong linkage disequilibrium with rs7027937. To generate this list, correlation coefficients (r²) were calculated between the index SNP and all neighboring SNPs cited in the June 2006 HapMap data set release. An r² cut off of 0.50 was selected for inclusion as evidence for strong genetic linkage, i.e., a “strong linkage disequilibrium.

TABLE 148A
Linked SNPs

| SNP | r² | Position on chr9 | SEQ ID NO |
|---|---|---|---|
| rs10982322 | 0.51 | 114439269 | 3815 |
| rs7046435 | 0.514 | 114469145 | 3816 |
| rs7031094 | 0.514 | 114469854 | 3817 |
| rs999009 | 0.785 | 114470231 | 3818 |
| rs7866831 | 0.514 | 114471776 | 3819 |
| rs7856554 | 0.514 | 114472191 | 3820 |
| rs13293886 | 0.514 | 114472320 | 3821 |
| rs7043865 | 0.513 | 114472639 | 3822 |
| rs7047560 | 0.553 | 114473222 | 3823 |
| rs4979448 | 0.687 | 114473288 | 3824 |
| rs4978602 | 0.687 | 114473290 | 3825 |
| rs4246902 | 0.514 | 114473459 | 3826 |
| rs2900587 | 0.513 | 114473613 | 3827 |
| rs2900588 | 0.514 | 114473646 | 3828 |
| rs12379659 | 0.687 | 114474149 | 3829 |
| rs10817647 | 0.687 | 114474377 | 3830 |
| rs756016 | 0.687 | 114474781 | 3831 |
| rs2418312 | 0.687 | 114474977 | 3832 |
| rs751780 | 0.635 | 114475435 | 3833 |
| rs3810935 | 1.0 | 114475791 | 3834 |
| rs10982342 | 0.686 | 114476128 | 3835 |
| rs10982343 | 1.0 | 114476211 | 3836 |
| rs10982345 | 1.0 | 114476301 | 3837 |
| rs12555934 | 0.687 | 114477754 | 3838 |
| rs2900590 | 0.687 | 114480873 | 3839 |
| rs10817652 | 1.0 | 114484105 | 3840 |
| rs7027937 | — | 114484743 | 3841 |
| rs2183018 | 1.0 | 114485935 | 3842 |
| rs1058278 | 1.0 | 114486155 | 3843 |
| rs1058280 | 1.0 | 114487477 | 3844 |
| rs2418315 | 0.892 | 114487655 | 3845 |
| rs10759729 | 1.0 | 114488549 | 3846 |
| rs10982351 | 1.0 | 114489090 | 3847 |
| rs10817653 | 1.0 | 114490069 | 3848 |
| rs10982355 | 1.0 | 114490974 | 3849 |
| rs10817654 | 1.0 | 114491201 | 3850 |
| rs10817655 | 0.687 | 114491308 | 3851 |
| rs4615654 | 1.0 | 114493381 | 3852 |
| rs7028121 | 1.0 | 114493913 | 3853 |
| rs752858 | 0.59 | 114494535 | 3854 |
| rs10982358 | 0.59 | 114495666 | 3855 |
| rs9775854 | 0.587 | 114496737 | 3856 |
| rs10817661 | 0.59 | 114496976 | 3857 |
| rs1055110 | 0.59 | 114498283 | 3858 |
| rs1887784 | 0.59 | 114500765 | 3859 |

### Example 149

[0486] For individuals with colorectal cancer, the distribution of polymorphic alleles at position 129128218 of chromosome 9 was different from those without colorectal cancer (Table 149). The dominant test for risk associated with carrying the A allele had an empirical p-value based on permutation analysis of 0.002176, and the corresponding dominant odds ratio is 1.322 (Table 149). These data further suggest that this marker is associated with colorectal cancer risk and that the A allele at position 129128218 of chromosome 9 is associated with an increased risk of developing colorectal cancer.

TABLE 149

| | |
|---|---|
| rs no. | 4836648 |
| Chromosome; Position | 9; 129128218 |
| Gene Name | unknown |
| Genotype; Phenotype | n = A; increased risk |
| Hardy-Weinberg | 0.11568 |

| Case | | | | | | | Odds |
|---|---|---|---|---|---|---|---|
| Flag | Allele B | AA | AB | BB | Model | p-Value | Ratio |
| 0 | A | 616 | 324 | 57 | Dominant | 0.002176 | 1.322 |
| 1 | A | 549 | 392 | 57 | | | |

[0487] Table 149A indicates SNPs found to be in strong linkage disequilibrium with rs4836648. To generate this list, correlation coefficients (r²) were calculated between the index SNP and all neighboring SNPs cited in the June 2006 HapMap data set release. An r² cut off of 0.50 was selected for inclusion as evidence for strong genetic linkage, i.e., a “strong linkage disequilibrium.

TABLE 149A
Linked SNPs

| SNP | r² | Position on chr9 | SEQ ID NO |
|---|---|---|---|
| rs1556146 | 0.574 | 129102032 | 3860 |
| rs1556144 | 0.704 | 129102320 | 3861 |
| rs1556143 | 0.704 | 129102342 | 3862 |
| rs10819481 | 0.738 | 129109422 | 3863 |
| rs10119824 | 0.736 | 129110241 | 3864 |
| rs7870137 | 0.738 | 129110692 | 3865 |
| rs10819483 | 0.738 | 129111391 | 3866 |
| rs10988289 | 0.737 | 129111978 | 3867 |
| rs10819484 | 0.738 | 129112191 | 3868 |
| rs10760602 | 0.738 | 129112271 | 3869 |
| rs913773 | 0.763 | 129113020 | 3870 |
| rs913774 | 0.773 | 129113208 | 3871 |
| rs17460119 | 0.773 | 129113258 | 3872 |
| rs883343 | 0.773 | 129113284 | 3873 |
| rs883342 | 0.773 | 129113314 | 3874 |
| rs10988290 | 0.736 | 129115006 | 3875 |
| rs7865327 | 0.736 | 129116578 | 3876 |
| rs7865568 | 0.738 | 129116733 | 3877 |
| rs10988292 | 0.736 | 129116849 | 3878 |
| rs17517009 | 0.701 | 129117885 | 3879 |
| rs10819485 | 0.772 | 129120723 | 3880 |
| rs12552872 | 0.772 | 129121160 | 3881 |
| rs10988297 | 0.772 | 129121539 | 3882 |
| rs10988298 | 0.735 | 129122056 | 3883 |
| rs10819487 | 0.772 | 129122431 | 3884 |
| rs7041313 | 0.809 | 129122712 | 3885 |
| rs7041309 | 0.809 | 129122745 | 3886 |
| rs913768 | 0.809 | 129123924 | 3887 |
| rs913769 | 0.772 | 129124138 | 3888 |
| rs11794563 | 0.772 | 129124492 | 3889 |
| rs3824537 | 0.772 | 129124887 | 3890 |
| rs17517139 | 0.772 | 129125597 | 3891 |
| rs4836647 | 0.684 | 129125755 | 3892 |
| rs17456931 | 0.809 | 129125927 | 3893 |
| rs17456938 | 0.809 | 129126045 | 3894 |
| rs17488294 | 0.772 | 129126179 | 3895 |
| rs10819488 | 0.884 | 129128058 | 3896 |
| rs4836648 | — | 129128218 | 3897 |
| rs4836651 | 1.0 | 129128883 | 3898 |
| rs4366175 | 1.0 | 129129396 | 3899 |
| rs7849421 | 0.857 | 129129994 | 3900 |
| rs7849964 | 0.961 | 129130142 | 3901 |
| rs10760603 | 0.884 | 129131288 | 3902 |

### Example 150

[0488] For individuals with colorectal cancer, the distribution of polymorphic alleles at position 135749356 of chromosome 9, found within the GLTDC1 gene, was different from those without colorectal cancer (Table 150). The dominant test for risk associated with carrying the T allele had an empirical p-value based on permutation analysis of 0.006619, and the corresponding dominant odds ratio is 1.593 (Table 150). These data further suggest that this marker, located within the GLTDC1 gene, is associated with colorectal cancer risk and that the T allele at position 135749356 of chromosome 9 is associated with an increased risk of developing colorectal cancer.

TABLE 150

| | rs no. | | | | 1333233 | | |
|---|---|---|---|---|---|---|---|
| | Chromosome; Position | | | | 9; 135749356 | | |
| | Gene Name | | | | GLTDC1 | | |
| | SEQ ID NO; Position | | | | 5671; 7976 | | |
| | Genotype; Phenotype | | | | n = T; increased risk | | |
| | Hardy-Weinberg | | | | 0.06181 | | |
| Case | | | | | | | Odds |
| Flag | Allele B | AA | AB | BB | Model | p-Value | Ratio |
| 0 | T | 93 | 382 | 524 | Dominant | 0.006619 | 1.593 |
| 1 | T | 60 | 398 | 533 | | | |

[0489] Table 150A indicates SNPs found to be in strong linkage disequilibrium with rs1333233. To generate this list, correlation coefficients (r²) were calculated between the index SNP and all neighboring SNPs cited in the June 2006 HapMap data set release. An r² cut off of 0.50 was selected for inclusion as evidence for strong genetic linkage, i.e., a “strong linkage disequilibrium.

TABLE 150A
Linked SNPs

| SNP | r² | Position on chr9 | SEQ ID NO |
|---|---|---|---|
| rs1333241 | 0.959 | 135743798 | 3903 |
| rs7037835 | 0.844 | 135745305 | 3904 |
| rs1333237 | 1.0 | 135748752 | 3905 |
| rs1333236 | 1.0 | 135748820 | 3906 |
| rs1333234 | 1.0 | 135749277 | 3907 |
| rs1333233 | — | 135749356 | 3908 |
| rs11103109 | 1.0 | 135749712 | 3909 |
| rs6537908 | 1.0 | 135749845 | 3910 |
| rs11103113 | 0.958 | 135753036 | 3911 |
| rs11103114 | 0.959 | 135753175 | 3912 |
| rs11103116 | 0.954 | 135753601 | 3913 |

### Example 151

[0490] For individuals with colorectal cancer, the distribution of polymorphic alleles at position 5774364 of chromosome 10, found within the C10orf18 gene, was different from those without colorectal cancer (Table 151). The dominant test for risk associated with carrying the A allele had an empirical p-value based on permutation analysis of 0.00092, and the corresponding dominant odds ratio is 1.773 (Table 151). These data further suggest that this marker, located within the C10orf18 gene, is associated with colorectal cancer risk and that the A allele at position 5774364 of chromosome 10 is associated with an increased risk of developing colorectal cancer.

TABLE 151

| | |
|---|---|
| rs no. | 9423936 |
| Chromosome; Position | 10; 5774364 |
| Gene Name | C10orf18 |
| SEQ ID NO; Position | 5672; 7979 |
| Genotype; Phenotype | n = A; increased risk |
| Hardy-Weinberg | 0.00945 |

| Case | | | | | | | Odds |
|---|---|---|---|---|---|---|---|
| Flag | Allele B | AA | AB | BB | Model | p-Value | Ratio |
| 0 | A | 100 | 392 | 566 | Dominant | 0.00092 | 1.773 |
| 1 | A | 53 | 395 | 505 | | | |

[0491] Table 151A indicates SNPs found to be in strong linkage disequilibrium with rs9423936. To generate this list, correlation coefficients (r²) were calculated between the index SNP and all neighboring SNPs cited in the June 2006 HapMap data set release. An r² cut off of 0.50 was selected for inclusion as evidence for strong genetic linkage, i.e., a “strong linkage disequilibrium.

TABLE 151A
Linked SNPs

| SNP | r² | Position on chr10 | SEQ ID NO |
|---|---|---|---|
| rs9424191 | 0.584 | 5763668 | 3914 |
| rs9423936 | — | 5774364 | 3915 |

### Example 152

[0492] For individuals with colorectal cancer, the distribution of polymorphic alleles at position 30211510 of chromosome 10 was different from those without colorectal cancer (Table 152). The recessive test for risk associated with carrying the C allele had an empirical p-value of 0.000735 based on permutation analysis, and the corresponding recessive odds ratio is 1.398 (Table 152). These data further suggest that this marker is associated with colorectal cancer risk and that the C allele at position 30211510 of chromosome 10 is associated with an increased risk of developing colorectal cancer.

TABLE 152

| | |
|---|---|
| rs no. | 914278 |
| Chromosome; Position | 10; 30211510 |
| Gene Name | unknown |
| Genotype; Phenotype | n = C; increased risk |
| Hardy-Weinberg | 0.16843 |

| Case | | | | | | | Odds |
|---|---|---|---|---|---|---|---|
| Flag | Allele B | AA | AB | BB | Model | p-Value | Ratio |
| 0 | C | 190 | 489 | 261 | Recessive | 0.000735 | 1.398 |
| 1 | C | 171 | 443 | 330 | | | |

[0493] Table 152A indicates SNPs found to be in strong linkage disequilibrium with rs914278. To generate this list, correlation coefficients (r²) were calculated between the index SNP and all neighboring SNPs cited in the June 2006 HapMap data set release. An r² cut off of 0.50 was selected for inclusion as evidence for strong genetic linkage, i.e., a “strong linkage disequilibrium.

TABLE 152A
Linked SNPs

| SNP | r² | Position on chr10 | SEQ ID NO |
|---|---|---|---|
| rs7096778 | 0.565 | 30205989 | 3916 |
| rs10826719 | 0.56 | 30206553 | 3917 |
| rs1571759 | 0.56 | 30207015 | 3918 |
| rs10740811 | 0.56 | 30207760 | 3919 |
| rs10508757 | 0.705 | 30208850 | 3920 |
| rs914279 | 0.56 | 30210493 | 3921 |
| rs869376 | 0.734 | 30210638 | 3922 |
| rs972206 | 0.734 | 30210790 | 3923 |
| rs12261723 | 0.734 | 30211023 | 3924 |
| rs914278 | — | 30211510 | 3925 |

### Example 153

[0494] For individuals with colorectal cancer, the distribution of polymorphic alleles at position 43467013 of chromosome 10 was different from those without colorectal cancer (Table 153). The trend test for risk associated with carrying the C allele had an empirical p-value of 0.013944 based on permutation analysis, and the corresponding Mantel-Haenszel odds ratio for trend is 1.283 (Table 153). These data further suggest that this marker is associated with colorectal cancer risk and that the C allele at position 43467013 of chromosome 10 is associated with an increased risk of developing colorectal cancer.

TABLE 153

| | |
|---|---|
| rs no. | 3128248 |
| Chromosome; Position | 10; 43467013 |
| Gene Name | unknown |
| Genotype; Phenotype | n = C; increased risk |
| Hardy-Weinberg | 0.13339 |

| Case | | | | | | | Odds |
|---|---|---|---|---|---|---|---|
| Flag | Allele B | AA | AB | BB | Model | p-Value | Ratio |
| 0 | C | 12 | 247 | 779 | Trend | 0.013944 | 1.283 |
| 1 | C | 7 | 184 | 745 | | | |

[0495] Table 153A indicates SNPs found to be in strong linkage disequilibrium with rs3128248. To generate this list, correlation coefficients (r²) were calculated between the index SNP and all neighboring SNPs cited in the June 2006 HapMap data set release. An r² cut off of 0.50 was selected for inclusion as evidence for strong genetic linkage, i.e., a “strong linkage disequilibrium.

TABLE 153A
Linked SNPs

| SNP | r² | Position on chr10 | SEQ ID NO |
|---|---|---|---|
| rs3128248 | — | 43467013 | 3926 |

### Example 154

[0496] For individuals with colorectal cancer, the distribution of polymorphic alleles at position 44135054 of chromosome 10 was different from those without colorectal cancer (Table 154). The dominant test for risk associated with carrying the T allele had an empirical p-value based on permutation analysis of 0.005806, and the corresponding dominant odds ratio is 2.589 (Table 154). These data further suggest that this marker is associated with colorectal cancer risk and that the T allele at position 44135054 of chromosome 10 is associated with an increased risk of developing colorectal cancer.

TABLE 154

| | rs no. | | | | 800310 | | |
|---|---|---|---|---|---|---|---|
| | Chromosome; Position | | | | 10; 44135054 | | |
| | Gene Name | | | | unknown | | |
| | Genotype; Phenotype | | | | n = T; increased risk | | |
| | Hardy-Weinberg | | | | 0.02092 | | |
| Case | | | | | | | Odds |
| Flag | Allele B | AA | AB | BB | Model | p-Value | Ratio |
| 0 | T | 28 | 323 | 559 | Dominant | 0.005806 | 2.589 |
| 1 | T | 11 | 324 | 573 | | | |

[0497] Table 154A indicates SNPs found to be in strong linkage disequilibrium with rs800310. To generate this list, correlation coefficients (r²) were calculated between the index SNP and all neighboring SNPs cited in the June 2006 HapMap data set release. An r² cut off of 0.50 was selected for inclusion as evidence for strong genetic linkage, i.e., a “strong linkage disequilibrium.

TABLE 154A
Linked SNPs

| SNP | r² | Position on chr10 | SEQ ID NO |
|---|---|---|---|
| rs4491167 | 0.631 | 44130826 | 3927 |
| rs2146807 | 0.664 | 44133744 | 3928 |
| rs7082209 | 0.631 | 44134342 | 3929 |
| rs800310 | — | 44135054 | 3930 |
| rs9422606 | 0.624 | 44136288 | 3931 |
| rs977754 | 0.631 | 44137425 | 3932 |
| rs2476351 | 0.631 | 44140163 | 3933 |
| rs2505740 | 0.631 | 44141103 | 3934 |
| rs2505743 | 0.552 | 44143798 | 3935 |
| rs1370158 | 0.631 | 44146090 | 3936 |
| rs2028102 | 0.574 | 44146547 | 3937 |
| rs1436931 | 0.594 | 44146739 | 3938 |
| rs1836982 | 0.566 | 44147170 | 3939 |
| rs1144484 | 0.591 | 44149523 | 3940 |
| rs1144483 | 0.609 | 44152160 | 3941 |

### Example 155

[0498] For individuals with colorectal cancer, the distribution of polymorphic alleles at position 61680529 of chromosome 10, found within the ANK3 gene, was different from those without colorectal cancer (Table 155). The recessive test for risk associated with carrying the A allele had an empirical p-value of 0.002292 based on permutation analysis, and the corresponding recessive odds ratio is 1.768 (Table 155). These data further suggest that this marker, located within the ANK3 gene, is associated with colorectal cancer risk and that the A allele at position 61680529 of chromosome 10 is associated with an increased risk of developing colorectal cancer.

TABLE 155

| | |
|---|---|
| rs no. | 12767186 |
| Chromosome; Position | 10; 61680529 |
| Gene Name | ANK3 |
| SEQ ID NO; Position | 5673; 138966 |
| Genotype; Phenotype | n = A; increased risk |
| Hardy-Weinberg | 0.21519 |

| Case | | | | | | | Odds |
|---|---|---|---|---|---|---|---|
| Flag | Allele B | AA | AB | BB | Model | p-Value | Ratio |
| 0 | A | 573 | 371 | 47 | Recessive | 0.002292 | 1.768 |
| 1 | A | 562 | 347 | 80 | | | |

[0499] Table 155A indicates SNPs found to be in strong linkage disequilibrium with rs12767186. To generate this list, correlation coefficients (r²) were calculated between the index SNP and all neighboring SNPs cited in the June 2006 HapMap data set release. An r² cut off of 0.50 was selected for inclusion as evidence for strong genetic linkage, i.e., a “strong linkage disequilibrium.

TABLE 155A
Linked SNPs

| SNP | r² | Position on chr10 | SEQ ID NO |
|---|---|---|---|
| rs3897459 | 0.663 | 61627647 | 3942 |
| rs7895510 | 0.686 | 61634954 | 3943 |
| rs10740014 | 0.691 | 61635015 | 3944 |
| rs10732408 | 0.693 | 61635194 | 3945 |
| rs4948257 | 0.693 | 61636447 | 3946 |
| rs3927694 | 0.693 | 61655634 | 3947 |
| rs1340654 | 0.693 | 61668066 | 3948 |
| rs7908011 | 0.691 | 61673395 | 3949 |
| rs6479706 | 0.687 | 61678714 | 3950 |
| rs12767186 | — | 61680529 | 3951 |
| rs1459731 | 0.758 | 61698803 | 3952 |
| rs7894698 | 0.758 | 61700731 | 3953 |
| rs7901951 | 0.608 | 61705507 | 3954 |
| rs898328 | 0.579 | 61717600 | 3955 |

### Example 156

[0500] For individuals with colorectal cancer, the distribution of polymorphic alleles at position 67146138 of chromosome 10 was different from those without colorectal cancer (Table 156). The recessive test for risk associated with carrying the A allele had an empirical p-value of 0.004653 based on permutation analysis, and the corresponding recessive odds ratio is 1.396 (Table 156). These data further suggest that this marker is associated with colorectal cancer risk and that the A allele at position 67146138 of chromosome 10 is associated with an increased risk of developing colorectal cancer.

TABLE 156

| | |
|---|---|
| rs no. | 1904723 |
| Chromosome; Position | 10; 67146138 |
| Gene Name | unknown |
| Genotype; Phenotype | n = A; increased risk |
| Hardy-Weinberg | 0.05078 |

| Case | | | | | | | Odds |
|---|---|---|---|---|---|---|---|
| Flag | Allele B | AA | AB | BB | Model | p-Value | Ratio |
| 0 | A | 329 | 516 | 156 | Recessive | 0.004653 | 1.396 |
| 1 | A | 333 | 451 | 202 | | | |

[0501] Table 156A indicates SNPs found to be in strong linkage disequilibrium with rs1904723. To generate this list, correlation coefficients (r²) were calculated between the index SNP and all neighboring SNPs cited in the June 2006 HapMap data set release. An r² cut off of 0.50 was selected for inclusion as evidence for strong genetic linkage, i.e., a “strong linkage disequilibrium.

TABLE 156A
Linked SNPs

| SNP | r² | Position on chr10 | SEQ ID NO |
|---|---|---|---|
| rs4531352 | 0.658 | 67129869 | 3956 |
| rs10996605 | 0.658 | 67136480 | 3957 |
| rs10822609 | 0.622 | 67137478 | 3958 |
| rs1904710 | 0.606 | 67138672 | 3959 |
| rs1904708 | 0.652 | 67139962 | 3960 |
| rs4596964 | 0.663 | 67140692 | 3961 |
| rs1904720 | 0.62 | 67141195 | 3962 |
| rs1904722 | 0.603 | 67143178 | 3963 |
| rs4746528 | 0.663 | 67144395 | 3964 |
| rs7894901 | 1.0 | 67145017 | 3965 |
| rs1904723 | — | 67146138 | 3966 |
| rs10762003 | 1.0 | 67146941 | 3967 |
| rs4333907 | 1.0 | 67147970 | 3968 |
| rs7067834 | 0.715 | 67148082 | 3969 |
| rs4384295 | 1.0 | 67149357 | 3970 |
| rs10822614 | 0.647 | 67151405 | 3971 |
| rs10822615 | 0.642 | 67151574 | 3972 |
| rs4548520 | 0.647 | 67152738 | 3973 |
| rs7920677 | 0.647 | 67156720 | 3974 |
| rs9633568 | 0.585 | 67163419 | 3975 |
| rs7910336 | 0.574 | 67166761 | 3976 |
| rs4370819 | 0.51 | 67173087 | 3977 |
| rs4746529 | 0.51 | 67181098 | 3978 |
| rs9651307 | 0.51 | 67187472 | 3979 |
| rs10762012 | 0.579 | 67203466 | 3980 |

### Example 157

[0502] For individuals with colorectal cancer, the distribution of polymorphic alleles at position 77569191 of chromosome 10, found within the C10orf11 gene, was different from those without colorectal cancer (Table 157). The recessive test for risk associated with carrying the A allele had an empirical p-value of 0.002734 based on permutation analysis, and the corresponding recessive odds ratio is 1.446 (Table 157). These data further suggest that this marker, located within the C10orf11 gene, is associated with colorectal cancer risk and that the A allele at position 77569191 of chromosome 10 is associated with an increased risk of developing colorectal cancer.

TABLE 157

| | |
|---|---|
| rs no. | 7101216 |
| Chromosome; Position | 10; 77569191 |
| Gene Name | C10orf11 |
| SEQ ID NO; Position | 5674; 356667 |
| Genotype; Phenotype | n = A; increased risk |
| Hardy-Weinberg | 0.15037 |

| Case | | | | | | | Odds |
|---|---|---|---|---|---|---|---|
| Flag | Allele B | AA | AB | BB | Model | p-Value | Ratio |
| 0 | A | 397 | 520 | 140 | Recessive | 0.002734 | 1.446 |
| 1 | A | 359 | 420 | 172 | | | |

[0503] Table 157A indicates SNPs found to be in strong linkage disequilibrium with rs7101216. To generate this list, correlation coefficients (r²) were calculated between the index SNP and all neighboring SNPs cited in the June 2006 HapMap data set release. An r² cut off of 0.50 was selected for inclusion as evidence for strong genetic linkage, i.e., a “strong linkage disequilibrium.

TABLE 157A
Linked SNPs

| SNP | r² | Position on chr10 | SEQ ID NO |
|---|---|---|---|
| rs7920191 | 0.677 | 77559267 | 3981 |
| rs4746364 | 0.698 | 77561874 | 3982 |
| rs12355465 | 0.706 | 77563836 | 3983 |
| rs7101216 | — | 77569191 | 3984 |
| rs1898106 | 1.0 | 77570952 | 3985 |
| rs7077442 | 1.0 | 77571486 | 3986 |
| rs7913479 | 0.965 | 77578908 | 3987 |

### Example 158

[0504] For individuals with colorectal cancer, the distribution of polymorphic alleles at position 91205789 of chromosome 10, found within the LOC387700 gene, was different from those without colorectal cancer (Table 158). The recessive test for risk associated with carrying the G allele had an empirical p-value of 0.001128 based on permutation analysis, and the corresponding recessive odds ratio is 1.947 (Table 158). These data further suggest that this marker, located within the LOC387700 gene, is associated with colorectal cancer risk and that the G allele at position 91205789 of chromosome 10 is associated with an increased risk of developing colorectal cancer.

TABLE 158

| | |
|---|---|
| rs no. | 3740029 |
| Chromosome; Position | 10; 91205789 |
| Gene Name | LOC387700 |
| SEQ ID NO; Position | 5675; 79505 |
| Genotype; Phenotype | n = G; increased risk |
| Hardy-Weinberg | 0.02810 |

| Case | | | | | | | Odds |
|---|---|---|---|---|---|---|---|
| Flag | Allele B | AA | AB | BB | Model | p-Value | Ratio |
| 0 | G | 602 | 371 | 37 | Recessive | 0.001128 | 1.947 |
| 1 | G | 575 | 357 | 69 | | | |

[0505] Table 158A indicates SNPs found to be in strong linkage disequilibrium with rs3740029. To generate this list, correlation coefficients (r²) were calculated between the index SNP and all neighboring SNPs cited in the June 2006 HapMap data set release. An r² cut off of 0.50 was selected for inclusion as evidence for strong genetic linkage, i.e., a “strong linkage disequilibrium.

TABLE 158A
Linked SNPs

| SNP | r² | Position on chr10 | SEQ ID NO |
|---|---|---|---|
| rs11593758 | 0.537 | 91204084 | 3988 |
| rs11203135 | 0.846 | 91204301 | 3989 |
| rs11203136 | 0.916 | 91204341 | 3990 |
| rs11594380 | 0.705 | 91205354 | 3991 |
| rs3740029 | — | 91205789 | 3992 |
| rs17387244 | 0.919 | 91207882 | 3993 |

### Example 159

[0506] For individuals with colorectal cancer, the distribution of polymorphic alleles at position 91916839 of chromosome 10 was different from those without colorectal cancer (Table 159). The recessive test for risk associated with carrying the C allele had an empirical p-value of 0.001612 based on permutation analysis, and the corresponding recessive odds ratio is 1.723 (Table 159). These data further suggest that this marker is associated with colorectal cancer risk and that the C allele at position 91916839 of chromosome 10 is associated with an increased risk of developing colorectal cancer.

TABLE 159

| | |
|---|---|
| rs no. | 11186048 |
| Chromosome; Position | 10; 91916839 |
| Gene Name | unknown |
| Genotype; Phenotype | n = C; increased risk |
| Hardy-Weinberg | 0.00144 |

| Case | | | | | | | Odds |
|---|---|---|---|---|---|---|---|
| Flag | Allele B | AA | AB | BB | Model | p-Value | Ratio |
| 0 | C | 453 | 424 | 58 | Recessive | 0.001612 | 1.723 |
| 1 | C | 435 | 381 | 93 | | | |

[0507] Table 159A indicates SNPs found to be in strong linkage disequilibrium with rs11186048. To generate this list, correlation coefficients (r²) were calculated between the index SNP and all neighboring SNPs cited in the June 2006 HapMap data set release. An r² cut off of 0.50 was selected for inclusion as evidence for strong genetic linkage, i.e., a “strong linkage disequilibrium.

TABLE 159A
Linked SNPs

| SNP | r² | Position on chr10 | SEQ ID NO |
|---|---|---|---|
| rs17129607 | 0.596 | 91726020 | 3994 |
| rs11812465 | 0.568 | 91728805 | 3995 |
| rs10785924 | 0.568 | 91728947 | 3996 |
| rs12262992 | 0.568 | 91734313 | 3997 |
| rs12264800 | 0.568 | 91734664 | 3998 |
| rs12265070 | 0.568 | 91735353 | 3999 |
| rs7077870 | 0.505 | 91766646 | 4000 |
| rs10881732 | 0.511 | 91772708 | 4001 |
| rs1936223 | 0.539 | 91789010 | 4002 |
| rs10785931 | 0.539 | 91790046 | 4003 |
| rs12217255 | 0.537 | 91799004 | 4004 |
| rs1325735 | 0.502 | 91808309 | 4005 |
| rs4933548 | 0.519 | 91836719 | 4006 |
| rs6583686 | 0.522 | 91849522 | 4007 |
| rs10881750 | 0.627 | 91859823 | 4008 |
| rs10509591 | 0.742 | 91875901 | 4009 |
| rs1360116 | 0.675 | 91891310 | 4010 |
| rs7085577 | 0.614 | 91898654 | 4011 |
| rs1329154 | 0.838 | 91902473 | 4012 |
| rs17507052 | 0.957 | 91910394 | 4013 |
| rs11186048 | — | 91916839 | 4014 |
| rs6583692 | 0.568 | 91917176 | 4015 |
| rs985604 | 0.655 | 91917383 | 4016 |
| rs985603 | 0.655 | 91917555 | 4017 |
| rs999903 | 0.56 | 91918021 | 4018 |
| rs1329181 | 0.793 | 91918169 | 4019 |
| rs17507605 | 0.622 | 91923057 | 4020 |
| rs1360117 | 0.834 | 91923465 | 4021 |
| rs17416796 | 0.833 | 91931446 | 4022 |

### Example 160

[0508] For individuals with colorectal cancer, the distribution of polymorphic alleles at position 106897228 of chromosome 10, found within the SORCS3 gene, was different from those without colorectal cancer (Table 160). The recessive test for risk associated with carrying the G allele had an empirical p-value of 0.016428 based on permutation analysis, and the corresponding recessive odds ratio is 1.265 (Table 160). These data further suggest that this marker, located within the SORCS3 gene, is associated with colorectal cancer risk and that the G allele at position 106897228 of chromosome 10 is associated with an increased risk of developing colorectal cancer.

TABLE 160

| | |
|---|---|
| rs no. | 10160134 |
| Chromosome; Position | 10; 106897228 |
| Gene Name | SORCS3 |
| SEQ ID NO; Position | 5676; 506380 |
| Genotype; Phenotype | n = G; increased risk |
| Hardy-Weinberg | 1.00000 |

| Case | | | | | | | Odds |
|---|---|---|---|---|---|---|---|
| Flag | Allele B | AA | AB | BB | Model | p-Value | Ratio |
| 0 | G | 241 | 528 | 289 | Recessive | 0.016428 | 1.265 |
| 1 | G | 212 | 434 | 307 | | | |

[0509] Table 160A indicates SNPs found to be in strong linkage disequilibrium with rs10160134. To generate this list, correlation coefficients (r²) were calculated between the index SNP and all neighboring SNPs cited in the June 2006 HapMap data set release. An r² cut off of 0.50 was selected for inclusion as evidence for strong genetic linkage, i.e., a “strong linkage disequilibrium.

TABLE 160A
Linked SNPs

| SNP | r² | Position on chr10 | SEQ ID NO |
|---|---|---|---|
| rs791114 | 0.839 | 106848543 | 4023 |
| rs791104 | 0.839 | 106850608 | 4024 |
| rs703479 | 0.839 | 106855945 | 4025 |
| rs10884091 | 0.524 | 106864786 | 4026 |
| rs4646977 | 0.904 | 106865273 | 4027 |
| rs1452268 | 0.904 | 106871024 | 4028 |
| rs10884095 | 0.904 | 106871459 | 4029 |
| rs1819476 | 0.904 | 106872309 | 4030 |
| rs4646978 | 0.904 | 106873958 | 4031 |
| rs6584653 | 0.903 | 106873995 | 4032 |
| rs6584654 | 0.904 | 106874053 | 4033 |
| rs6584655 | 0.904 | 106876621 | 4034 |
| rs1377013 | 0.904 | 106876775 | 4035 |
| rs10786844 | 0.903 | 106877150 | 4036 |
| rs10884098 | 0.904 | 106877212 | 4037 |
| rs10786845 | 0.871 | 106877222 | 4038 |
| rs10509782 | 0.904 | 106878097 | 4039 |
| rs1562966 | 0.931 | 106878228 | 4040 |
| rs1377012 | 0.904 | 106879167 | 4041 |
| rs1377004 | 0.904 | 106882519 | 4042 |
| rs2864039 | 0.904 | 106882778 | 4043 |
| rs10884102 | 0.933 | 106883225 | 4044 |
| rs11192333 | 0.903 | 106883404 | 4045 |
| rs2218944 | 0.904 | 106884538 | 4046 |
| rs4918147 | 0.901 | 106884893 | 4047 |
| rs4918149 | 0.904 | 106885032 | 4048 |
| rs4918150 | 0.904 | 106885186 | 4049 |
| rs10786846 | 0.904 | 106885275 | 4050 |
| rs1463269 | 0.904 | 106886776 | 4051 |
| rs1344350 | 0.898 | 106887206 | 4052 |
| rs1377010 | 0.904 | 106888505 | 4053 |
| rs1377009 | 0.652 | 106888711 | 4054 |
| rs1377008 | 0.674 | 106888756 | 4055 |
| rs1034178 | 0.904 | 106889411 | 4056 |
| rs1034179 | 0.904 | 106889697 | 4057 |
| rs1999491 | 0.904 | 106890564 | 4058 |
| rs1418872 | 0.505 | 106892268 | 4059 |
| rs1418869 | 0.902 | 106892543 | 4060 |
| rs10884107 | 0.505 | 106893623 | 4061 |
| rs1377007 | 0.904 | 106893754 | 4062 |
| rs703484 | 0.967 | 106894112 | 4063 |
| rs791121 | 0.965 | 106896436 | 4064 |
| rs791122 | 0.967 | 106896479 | 4065 |
| rs791123 | 0.967 | 106896648 | 4066 |
| rs10160134 | — | 106897228 | 4067 |
| rs791124 | 0.967 | 106897310 | 4068 |
| rs791125 | 0.967 | 106897430 | 4069 |
| rs791126 | 0.965 | 106897576 | 4070 |
| rs2488541 | 0.964 | 106898251 | 4071 |
| rs2488542 | 0.966 | 106898407 | 4072 |
| rs791142 | 0.966 | 106898794 | 4073 |
| rs1562967 | 1.0 | 106898906 | 4074 |
| rs791141 | 0.899 | 106899092 | 4075 |
| rs791140 | 1.0 | 106899518 | 4076 |
| rs791139 | 1.0 | 106899623 | 4077 |
| rs2864040 | 1.0 | 106899926 | 4078 |
| rs1377014 | 1.0 | 106900061 | 4079 |
| rs1670032 | 0.966 | 106900891 | 4080 |
| rs791133 | 0.966 | 106901647 | 4081 |
| rs811547 | 1.0 | 106901893 | 4082 |
| rs790752 | 1.0 | 106903034 | 4083 |
| rs790751 | 1.0 | 106903267 | 4084 |
| rs697186 | 1.0 | 106905498 | 4085 |
| rs2278861 | 1.0 | 106905575 | 4086 |
| rs697189 | 1.0 | 106906037 | 4087 |
| rs697190 | 0.934 | 106906641 | 4088 |
| rs703490 | 0.572 | 106911603 | 4089 |
| rs10786848 | 0.572 | 106925199 | 4090 |
| rs1484240 | 0.504 | 106931514 | 4091 |

### Example 161

[0510] For individuals with colorectal cancer, the distribution of polymorphic alleles at position 7233719 of chromosome 11, found within the SYT9 gene, was different from those without colorectal cancer (Table 161). The trend test for risk associated with carrying the C allele had an empirical p-value of 0.008553 based on permutation analysis, and the corresponding Mantel-Haenszel odds ratio for trend is 1.206 (Table 161). These data further suggest that this marker, located within the SYT9 gene, is associated with colorectal cancer risk and that the C allele at position 7233719 of chromosome 11 is associated with an increased risk of developing colorectal cancer.

TABLE 161

| | |
|---|---|
| rs no. | 7126337 |
| Chromosome; Position | 11; 7233719 |
| Gene Name | SYT9 |
| SEQ ID NO; Position | 5677; 3963 |
| Genotype; Phenotype | n = C; increased risk |
| Hardy-Weinberg | 0.06219 |

| Case | | | | | | | Odds |
|---|---|---|---|---|---|---|---|
| Flag | Allele B | AA | AB | BB | Model | p-Value | Ratio |
| 0 | C | 303 | 463 | 135 | Trend | 0.008553 | 1.206 |
| 1 | C | 260 | 502 | 164 | | | |

[0511] Table 161A indicates SNPs found to be in strong linkage disequilibrium with rs7126337. To generate this list, correlation coefficients (r²) were calculated between the index SNP and all neighboring SNPs cited in the June 2006 HapMap data set release. An r² cut off of 0.50 was selected for inclusion as evidence for strong genetic linkage, i.e., a “strong linkage disequilibrium.

TABLE 161A
Linked SNPs

| SNP | r² | Position on chr11 | SEQ ID NO |
|---|---|---|---|
| rs7942860 | 1.0 | 7232814 | 4092 |
| rs7126337 | — | 7233719 | 4093 |
| rs1487866 | 1.0 | 7237726 | 4094 |
| rs1487868 | 1.0 | 7237862 | 4095 |
| rs10839751 | 1.0 | 7239747 | 4096 |
| rs10839752 | 0.967 | 7239825 | 4097 |
| rs2346804 | 0.613 | 7240874 | 4098 |
| rs10743013 | 1.0 | 7240933 | 4099 |
| rs4757988 | 0.624 | 7241450 | 4100 |
| rs12576021 | 0.603 | 7244036 | 4101 |
| rs10839754 | 0.603 | 7244394 | 4102 |
| rs10839755 | 0.597 | 7244594 | 4103 |
| rs2200649 | 1.0 | 7245461 | 4104 |
| rs7113137 | 0.603 | 7245654 | 4105 |
| rs6578840 | 0.624 | 7245750 | 4106 |
| rs7946753 | 0.624 | 7246861 | 4107 |
| rs10500688 | 0.603 | 7247945 | 4108 |
| rs10431020 | 0.619 | 7248795 | 4109 |
| rs7104910 | 0.967 | 7253622 | 4110 |
| rs1487879 | 0.624 | 7253763 | 4111 |
| rs12363517 | 0.624 | 7254352 | 4112 |
| rs960647 | 0.604 | 7255272 | 4113 |
| rs960646 | 0.967 | 7255327 | 4114 |
| rs1395910 | 0.902 | 7257738 | 4115 |
| rs7120457 | 0.693 | 7266085 | 4116 |
| rs4758170 | 0.841 | 7267343 | 4117 |
| rs10839757 | 0.839 | 7268139 | 4118 |
| rs1487875 | 0.656 | 7270442 | 4119 |
| rs4758171 | 0.837 | 7270749 | 4120 |
| rs12796904 | 0.806 | 7273151 | 4121 |
| rs6578844 | 0.841 | 7274316 | 4122 |
| rs6578845 | 0.832 | 7274631 | 4123 |
| rs1319309 | 0.871 | 7276742 | 4124 |
| rs7947110 | 0.583 | 7277233 | 4125 |
| rs2200650 | 0.541 | 7282771 | 4126 |
| rs10769777 | 0.543 | 7287335 | 4127 |

### Example 162

[0512] For individuals with colorectal cancer, the distribution of polymorphic alleles at position 24098848 of chromosome 11 was different from those without colorectal cancer (Table 162). The dominant test for risk associated with carrying the A allele had an empirical p-value based on permutation analysis of 0.001873, and the corresponding dominant odds ratio is 1.706 (Table 162). These data further suggest that this marker is associated with colorectal cancer risk and that the A allele at position 24098848 of chromosome 11 is associated with an increased risk of developing colorectal cancer.

TABLE 162

| | |
|---|---|
| rs no. | 4922675 |
| Chromosome; Position | 11; 24098848 |
| Gene Name | unknown |
| Genotype; Phenotype | n = A; increased risk |
| Hardy-Weinberg | 0.11760 |

| Case | | | | | | | Odds |
|---|---|---|---|---|---|---|---|
| Flag | Allele B | AA | AB | BB | Model | p-Value | Ratio |
| 0 | A | 100 | 415 | 542 | Dominant | 0.001873 | 1.706 |
| 1 | A | 55 | 403 | 495 | | | |

[0513] Table 162A indicates SNPs found to be in strong linkage disequilibrium with rs4922675. To generate this list, correlation coefficients (r²) were calculated between the index SNP and all neighboring SNPs cited in the June 2006 HapMap data set release. An r² cut off of 0.50 was selected for inclusion as evidence for strong genetic linkage, i.e., a “strong linkage disequilibrium.

TABLE 162A
Linked SNPs

| SNP | r² | Position on chr11 | SEQ ID NO |
|---|---|---|---|
| rs7121343 | 0.501 | 24089131 | 4128 |
| rs7105602 | 0.847 | 24089229 | 4129 |
| rs1317037 | 0.647 | 24089447 | 4130 |
| rs7930527 | 1.0 | 24092928 | 4131 |
| rs10767161 | 0.659 | 24093822 | 4132 |
| rs10767162 | 1.0 | 24094484 | 4133 |
| rs10767163 | 1.0 | 24094782 | 4134 |
| rs6484010 | 1.0 | 24097201 | 4135 |
| rs6484011 | 1.0 | 24097409 | 4136 |
| rs2957761 | 0.627 | 24098510 | 4137 |
| rs4922675 | — | 24098848 | 4138 |
| rs2860253 | 0.627 | 24100430 | 4139 |
| rs2957762 | 0.627 | 24100862 | 4140 |
| rs10742027 | 0.95 | 24100992 | 4141 |
| rs2896685 | 0.614 | 24102924 | 4142 |
| rs10767165 | 0.619 | 24109245 | 4143 |
| rs2957764 | 0.627 | 24109319 | 4144 |
| rs2947727 | 0.601 | 24111445 | 4145 |
| rs2403894 | 1.0 | 24112412 | 4146 |
| rs2403895 | 0.611 | 24112847 | 4147 |
| rs7101630 | 1.0 | 24112871 | 4148 |
| rs4360700 | 0.95 | 24113496 | 4149 |
| rs2403896 | 1.0 | 24114341 | 4150 |
| rs2947730 | 0.613 | 24114984 | 4151 |
| rs7122633 | 1.0 | 24116149 | 4152 |
| rs2947734 | 0.627 | 24116272 | 4153 |
| rs9783297 | 1.0 | 24116855 | 4154 |
| rs11027722 | 1.0 | 24117965 | 4155 |
| rs2403900 | 0.936 | 24119117 | 4156 |
| rs2957766 | 0.584 | 24119517 | 4157 |
| rs4293117 | 1.0 | 24120332 | 4158 |
| rs4344486 | 0.671 | 24123708 | 4159 |
| rs7938053 | 1.0 | 24124710 | 4160 |
| rs12418471 | 0.646 | 24125456 | 4161 |
| rs12418503 | 0.671 | 24125609 | 4162 |
| rs12418800 | 0.671 | 24125671 | 4163 |
| rs12418826 | 0.671 | 24125905 | 4164 |
| rs12418831 | 0.671 | 24126100 | 4165 |
| rs2957771 | 0.67 | 24126781 | 4166 |
| rs12419276 | 0.704 | 24127266 | 4167 |
| rs12420740 | 0.67 | 24127403 | 4168 |
| rs2947750 | 0.671 | 24128116 | 4169 |
| rs2947749 | 0.671 | 24128287 | 4170 |
| rs2947745 | 0.671 | 24128608 | 4171 |
| rs6484016 | 1.0 | 24129346 | 4172 |
| rs2957776 | 0.671 | 24131622 | 4173 |
| rs2947760 | 0.671 | 24131757 | 4174 |
| rs12418372 | 0.671 | 24131911 | 4175 |
| rs12421188 | 0.671 | 24131999 | 4176 |
| rs7924473 | 0.671 | 24133658 | 4177 |
| rs1320356 | 0.67 | 24133976 | 4178 |
| rs1320358 | 0.532 | 24134063 | 4179 |
| rs2403903 | 0.694 | 24134710 | 4180 |
| rs10767169 | 0.67 | 24135792 | 4181 |
| rs7940481 | 0.683 | 24136299 | 4182 |
| rs7114820 | 0.671 | 24138593 | 4183 |

### Example 163

[0514] For individuals with colorectal cancer, the distribution of polymorphic alleles at position 37072232 of chromosome 11 was different from those without colorectal cancer (Table 163). The recessive test for risk associated with carrying the T allele had an empirical p-value of 0.002367 based on permutation analysis, and the corresponding recessive odds ratio is 1.322 (Table 163). These data further suggest that this marker is associated with colorectal cancer risk and that the T allele at position 37072232 of chromosome 11 is associated with an increased risk of developing colorectal cancer.

TABLE 163

| | rs no. | | | | 1512369 | | |
|---|---|---|---|---|---|---|---|
| | Chromosome; Position | | | | 11; 37072232 | | |
| | Gene Name | | | | unknown | | |
| | Genotype; Phenotype | | | | n = T; increased risk | | |
| | Hardy-Weinberg | | | | 0.00349 | | |
| Case | | | | | | | Odds |
| Flag | Allele B | AA | AB | BB | Model | p-Value | Ratio |
| 0 | T | 93 | 481 | 403 | Recessive | 0.002367 | 1.322 |
| 1 | T | 74 | 425 | 463 | | | |

[0515] Table 163A indicates SNPs found to be in strong linkage disequilibrium with rs1512369. To generate this list, correlation coefficients (r²) were calculated between the index SNP and all neighboring SNPs cited in the June 2006 HapMap data set release. An r² cut off of 0.50 was selected for inclusion as evidence for strong genetic linkage, i.e., a “strong linkage disequilibrium.

TABLE 163A
Linked SNPs

| SNP | r² | Position on chr11 | SEQ ID NO |
|---|---|---|---|
| rs333789 | 0.503 | 37042702 | 4184 |
| rs932048 | 0.503 | 37045562 | 4185 |
| rs10768243 | 0.614 | 37047075 | 4186 |
| rs974284 | 0.503 | 37047761 | 4187 |
| rs11033927 | 0.704 | 37053096 | 4188 |
| rs964364 | 0.71 | 37057317 | 4189 |
| rs10768245 | 0.598 | 37059039 | 4190 |
| rs2137344 | 0.596 | 37059996 | 4191 |
| rs1996027 | 0.599 | 37060928 | 4192 |
| rs1512370 | 0.687 | 37064906 | 4193 |
| rs1512371 | 0.692 | 37065299 | 4194 |
| rs179801 | 0.687 | 37067111 | 4195 |
| rs334975 | 0.693 | 37069674 | 4196 |
| rs1512369 | — | 37072232 | 4197 |
| rs1512368 | 0.773 | 37072419 | 4198 |
| rs1512367 | 0.773 | 37072441 | 4199 |

### Example 164

[0516] For individuals with colorectal cancer, the distribution of polymorphic alleles at position 43228838 of chromosome 11 was different from those without colorectal cancer (Table 164). The dominant test for risk associated with carrying the G allele had an empirical p-value based on permutation analysis of 0.002749, and the corresponding dominant odds ratio is 1.449 (Table 164). These data further suggest that this marker is associated with colorectal cancer risk and that the G allele at position 43228838 of chromosome 11 is associated with an increased risk of developing colorectal cancer.

TABLE 164

| | |
|---|---|
| rs no. | 4755702 |
| Chromosome; Position | 11; 43228838 |
| Gene Name | unknown |
| Genotype; Phenotype | n = G; increased risk |
| Hardy-Weinberg | 0.07889 |

| Case | | | | | | | Odds |
|---|---|---|---|---|---|---|---|
| Flag | Allele B | AA | AB | BB | Model | p-Value | Ratio |
| 0 | G | 182 | 461 | 367 | Dominant | 0.002749 | 1.449 |
| 1 | G | 132 | 480 | 390 | | | |

[0517] Table 164A indicates SNPs found to be in strong linkage disequilibrium with rs4755702. To generate this list, correlation coefficients (r²) were calculated between the index SNP and all neighboring SNPs cited in the June 2006 HapMap data set release. An r² cut off of 0.50 was selected for inclusion as evidence for strong genetic linkage, i.e., a “strong linkage disequilibrium.

TABLE 164A
Linked SNPs

| SNP | r² | Position on chr11 | SEQ ID NO |
|---|---|---|---|
| rs11037273 | 0.695 | 43127290 | 4200 |
| rs11037284 | 0.693 | 43132253 | 4201 |
| rs12789205 | 0.622 | 43132366 | 4202 |
| rs11037307 | 0.725 | 43149325 | 4203 |
| rs10838050 | 0.695 | 43153863 | 4204 |
| rs12808373 | 0.695 | 43157926 | 4205 |
| rs7935232 | 0.6 | 43158213 | 4206 |
| rs11037325 | 0.69 | 43165780 | 4207 |
| rs977368 | 0.688 | 43166809 | 4208 |
| rs11037342 | 0.669 | 43175000 | 4209 |
| rs11037344 | 0.711 | 43178115 | 4210 |
| rs12365397 | 0.602 | 43192637 | 4211 |
| rs7926780 | 0.606 | 43193331 | 4212 |
| rs11037360 | 0.643 | 43196380 | 4213 |
| rs1353465 | 0.606 | 43199163 | 4214 |
| rs11037365 | 0.868 | 43200251 | 4215 |
| rs2132484 | 0.868 | 43200962 | 4216 |
| rs11037366 | 0.601 | 43201482 | 4217 |
| rs1874435 | 0.868 | 43203251 | 4218 |
| rs11037372 | 0.897 | 43210738 | 4219 |
| rs7481999 | 0.868 | 43215573 | 4220 |
| rs1496222 | 0.868 | 43221085 | 4221 |
| rs1353461 | 0.564 | 43223410 | 4222 |
| rs17500748 | 1.0 | 43225225 | 4223 |
| rs1532408 | 0.571 | 43227459 | 4224 |
| rs4755702 | — | 43228838 | 4225 |
| rs12577356 | 1.0 | 43234838 | 4226 |
| rs11037386 | 0.577 | 43236249 | 4227 |
| rs7103863 | 0.593 | 43244292 | 4228 |
| rs2172998 | 0.593 | 43246639 | 4229 |
| rs11037407 | 0.543 | 43254839 | 4230 |
| rs2279660 | 0.51 | 43290052 | 4231 |
| rs11037416 | 0.568 | 43310734 | 4232 |
| rs4755711 | 0.552 | 43364995 | 4233 |
| rs7951848 | 0.536 | 43383522 | 4234 |
| rs11037452 | 0.568 | 43471106 | 4235 |

### Example 165

[0518] For individuals with colorectal cancer, the distribution of polymorphic alleles at position 44571754 of chromosome 11, found within the KAI1 gene, was different from those without colorectal cancer (Table 165). The recessive test for risk associated with carrying the A allele had an empirical p-value of 0.000281 based on permutation analysis, and the corresponding recessive odds ratio is 4.971 (Table 165). These data further suggest that this marker, located within the KAI1 gene, is associated with colorectal cancer risk and that the A allele at position 44571754 of chromosome 11 is associated with an increased risk of developing colorectal cancer.

TABLE 165

| | |
|---|---|
| rs no. | 17613700 |
| Chromosome; Position | 11; 44571754 |
| Gene Name | KAI1 |
| SEQ ID NO; Position | 5678; 27971 |
| Genotype; Phenotype | n = A; increased risk |
| Hardy-Weinberg | 0.00263 |

| Case | | | | | | | Odds |
|---|---|---|---|---|---|---|---|
| Flag | Allele B | AA | AB | BB | Model | p-Value | Ratio |
| 0 | A | 744 | 231 | 5 | Recessive | 0.000281 | 4.971 |
| 1 | A | 676 | 187 | 22 | | | |

[0519] Table 165A indicates SNPs found to be in strong linkage disequilibrium with rs17613700. To generate this list, correlation coefficients (r²) were calculated between the index SNP and all neighboring SNPs cited in the June 2006 HapMap data set release. An r² cut off of 0.50 was selected for inclusion as evidence for strong genetic linkage, i.e., a “strong linkage disequilibrium.

TABLE 165A
Linked SNPs

| SNP | r² | Position on chr11 | SEQ ID NO |
|---|---|---|---|
| rs7103310 | 1.0 | 44564466 | 4236 |
| rs16938014 | 1.0 | 44566250 | 4237 |
| rs17613700 | — | 44571754 | 4238 |
| rs12576112 | 1.0 | 44572391 | 4239 |
| rs3781750 | 1.0 | 44572616 | 4240 |

### Example 166

[0520] For individuals with colorectal cancer, the distribution of polymorphic alleles at position 44754354 of chromosome 11 was different from those without colorectal cancer (Table 166). The dominant test for risk associated with carrying the G allele had an empirical p-value based on permutation analysis of 0.005073, and the corresponding dominant odds ratio is 1.297 (Table 166). These data further suggest that this marker is associated with colorectal cancer risk and that the G allele at position 44754354 of chromosome 11 is associated with an increased risk of developing colorectal cancer.

TABLE 166

| | |
|---|---|
| rs no. | 750348 |
| Chromosome; Position | 11; 44754354 |
| Gene Name | unknown |
| Genotype; Phenotype | n = G; increased risk |
| Hardy-Weinberg | 0.60730 |

| Case | | | | | | | Odds |
|---|---|---|---|---|---|---|---|
| Flag | Allele B | AA | AB | BB | Model | p-Value | Ratio |
| 0 | G | 660 | 302 | 38 | Dominant | 0.005073 | 1.297 |
| 1 | G | 594 | 370 | 27 | | | |

[0521] Table 166A indicates SNPs found to be in strong linkage disequilibrium with rs750348. To generate this list, correlation coefficients (r²) were calculated between the index SNP and all neighboring SNPs cited in the June 2006 HapMap data set release. An r² cut off of 0.50 was selected for inclusion as evidence for strong genetic linkage, i.e., a “strong linkage disequilibrium.

TABLE 166A
Linked SNPs

| SNP | r² | Position on chr11 | SEQ ID NO |
|---|---|---|---|
| rs748538 | 0.766 | 44744162 | 4241 |
| rs10838353 | 0.597 | 44744691 | 4242 |
| rs4755890 | 1.0 | 44745118 | 4243 |
| rs704662 | 1.0 | 44754062 | 4244 |
| rs750348 | — | 44754354 | 4245 |
| rs860687 | 0.692 | 44766236 | 4246 |
| rs835848 | 0.777 | 44773663 | 4247 |

### Example 167

[0522] For individuals with colorectal cancer, the distribution of polymorphic alleles at position 107635922 of chromosome 11, found within the ATM gene, was different from those without colorectal cancer (Table 167). The dominant test for risk associated with carrying the A allele had an empirical p-value based on permutation analysis of 0.006101, and the corresponding dominant odds ratio is 1.487 (Table 167). These data further suggest that this marker, located within the ATM gene, is associated with colorectal cancer risk and that the A allele at position 107635922 of chromosome 11 is associated with an increased risk of developing colorectal cancer.

TABLE 167

| | |
|---|---|
| rs no. | 11212570 |
| Chromosome; Position | 11; 107635922 |
| Gene Name | ATM |
| SEQ ID NO; Position | 5679; 36870 |
| Genotype; Phenotype | n = A; increased risk |
| Hardy-Weinberg | 0.72140 |

| Case | | | | | | | Odds |
|---|---|---|---|---|---|---|---|
| Flag | Allele B | AA | AB | BB | Model | p-Value | Ratio |
| 0 | A | 840 | 90 | 1 | Dominant | 0.006101 | 1.487 |
| 1 | A | 807 | 130 | 0 | | | |

[0523] Table 167A indicates SNPs found to be in strong linkage disequilibrium with rs11212570. To generate this list, correlation coefficients (r²) were calculated between the index SNP and all neighboring SNPs cited in the June 2006 HapMap data set release. An r² cut off of 0.50 was selected for inclusion as evidence for strong genetic linkage, i.e., a “strong linkage disequilibrium.

TABLE 167A
Linked SNPs

| SNP | r² | Position on chr11 | SEQ ID NO |
|---|---|---|---|
| rs11212492 | 0.935 | 107416661 | 4248 |
| rs11212493 | 0.935 | 107419601 | 4249 |
| rs11212495 | 0.932 | 107424109 | 4250 |
| rs12804831 | 0.935 | 107443390 | 4251 |
| rs11212514 | 0.767 | 107488748 | 4252 |
| rs4144901 | 0.832 | 107549301 | 4253 |
| rs11212570 | — | 107635922 | 4254 |

### Example 168

[0524] For individuals with colorectal cancer, the distribution of polymorphic alleles at position 110676919 of chromosome 11, found within the LOC120376 gene, was different from those without colorectal cancer (Table 168). The trend test for risk associated with carrying the C allele had an empirical p-value of 0.000600 based on permutation analysis, and the corresponding Mantel-Haenszel odds ratio for trend is 1.237 (Table 168). These data further suggest that this marker, located within the LOC120376 gene, is associated with colorectal cancer risk and that the C allele at position 110676919 of chromosome 11 is associated with an increased risk of developing colorectal cancer.

TABLE 168

| | |
|---|---|
| rs no. | 3802842 |
| Chromosome; Position | 11; 110676919 |
| Gene Name | LOC120376 |
| SEQ ID NO; Position | 5680; 2145 |
| Genotype; Phenotype | n = C; increased risk |
| Hardy-Weinberg | 0.88774 |

| Case | | | | | | | Odds |
|---|---|---|---|---|---|---|---|
| Flag | Allele B | AA | AB | BB | Model | p-Value | Ratio |
| 0 | C | 566 | 482 | 100 | Trend | 0.000600 | 1.237 |
| 1 | C | 486 | 513 | 131 | | | |

[0525] Table 168A indicates SNPs found to be in strong linkage disequilibrium with rs3802842. To generate this list, correlation coefficients (r²) were calculated between the index SNP and all neighboring SNPs cited in the June 2006 HapMap data set release. An r² cut off of 0.50 was selected for inclusion as evidence for strong genetic linkage, i.e., a “strong linkage disequilibrium.

TABLE 168A
Linked SNPs

| SNP | r² | Position on chr11 | SEQ ID NO |
|---|---|---|---|
| rs11213801 | 0.858 | 110624904 | 4255 |
| rs10891239 | 0.676 | 110625908 | 4256 |
| rs2001754 | 0.87 | 110630722 | 4257 |
| rs7116087 | 0.831 | 110638215 | 4258 |
| rs11213809 | 0.874 | 110640955 | 4259 |
| rs4548657 | 0.956 | 110645253 | 4260 |
| rs1987128 | 0.956 | 110657706 | 4261 |
| rs7130173 | 0.951 | 110659282 | 4262 |
| rs3087967 | 0.955 | 110662046 | 4263 |
| rs4477469 | 1.0 | 110665963 | 4264 |
| rs10789822 | 1.0 | 110667901 | 4265 |
| rs6589218 | 0.84 | 110672767 | 4266 |
| rs3802840 | 1.0 | 110676856 | 4267 |
| rs3802842 | — | 110676919 | 4268 |
| rs4608113 | 1.0 | 110677389 | 4269 |
| rs6589220 | 0.952 | 110678500 | 4270 |
| rs11213825 | 0.545 | 110685600 | 4271 |
| rs7933961 | 0.513 | 110685841 | 4272 |

### Example 169

[0526] For individuals with colorectal cancer, the distribution of polymorphic alleles at position 118330846 of chromosome 11, found within the UPK2 gene, was different from those without colorectal cancer (Table 169). The recessive test for risk associated with carrying the G allele had an empirical p-value of 0.003202 based on permutation analysis, and the corresponding recessive odds ratio is 1.348 (Table 169). These data further suggest that this marker, located within the UPK2 gene, is associated with colorectal cancer risk and that the G allele at position 118330846 of chromosome 11 is associated with an increased risk of developing colorectal cancer.

TABLE 169

| | |
|---|---|
| rs no. | 1790191 |
| Chromosome; Position | 11; 118330846 |
| Gene Name | UPK2 |
| SEQ ID NO; Position | 5681; −1389 |
| Genotype; Phenotype | n = G; increased risk |
| Hardy-Weinberg | 0.41202 |

| Case | | | | | | | Odds |
|---|---|---|---|---|---|---|---|
| Flag | Allele B | AA | AB | BB | Model | p-Value | Ratio |
| 0 | G | 248 | 515 | 240 | Recessive | 0.003202 | 1.348 |
| 1 | G | 234 | 464 | 296 | | | |

[0527] Table 169A indicates SNPs found to be in strong linkage disequilibrium with rs1790191. To generate this list, correlation coefficients (r²) were calculated between the index SNP and all neighboring SNPs cited in the June 2006 HapMap data set release. An r² cut off of 0.50 was selected for inclusion as evidence for strong genetic linkage, i.e., a “strong linkage disequilibrium.

TABLE 169A
Linked SNPs

| SNP | r² | Position on chr11 | SEQ ID NO |
|---|---|---|---|
| rs586370 | 0.813 | 118321563 | 4273 |
| rs663003 | 1.0 | 118328358 | 4274 |
| rs1790191 | — | 118330846 | 4275 |
| rs7113731 | 0.737 | 118337034 | 4276 |
| rs3890562 | 0.724 | 118342323 | 4277 |
| rs4938602 | 0.714 | 118351676 | 4278 |
| rs4938603 | 0.778 | 118351692 | 4279 |
| rs4938604 | 0.777 | 118351784 | 4280 |
| rs4938606 | 0.702 | 118357291 | 4281 |
| rs4936451 | 0.658 | 118357347 | 4282 |
| rs3889526 | 0.706 | 118361701 | 4283 |

### Example 170

[0528] For individuals with colorectal cancer, the distribution of polymorphic alleles at position 119277053 of chromosome 11 was different from those without colorectal cancer (Table 170). The recessive test for risk associated with carrying the C allele had an empirical p-value of 0.000819 based on permutation analysis, and the corresponding recessive odds ratio is 2.440 (Table 170). These data further suggest that this marker is associated with colorectal cancer risk and that the C allele at position 119277053 of chromosome 11 is associated with an increased risk of developing colorectal cancer.

TABLE 170

| | |
|---|---|
| rs no. | 518932 |
| Chromosome; Position | 11; 119277053 |
| Gene Name | unknown |
| Genotype; Phenotype | n = C; increased risk |
| Hardy-Weinberg | 0.04124 |

| Case | | | | | | | Odds |
|---|---|---|---|---|---|---|---|
| Flag | Allele B | AA | AB | BB | Model | p-Value | Ratio |
| 0 | C | 685 | 298 | 19 | Recessive | 0.000819 | 2.440 |
| 1 | C | 683 | 271 | 45 | | | |

[0529] Table 170A indicates SNPs found to be in strong linkage disequilibrium with rs518932. To generate this list, correlation coefficients (r²) were calculated between the index SNP and all neighboring SNPs cited in the June 2006 HapMap data set release. An r² cut off of 0.50 was selected for inclusion as evidence for strong genetic linkage, i.e., a “strong linkage disequilibrium.

TABLE 170A
Linked SNPs

| SNP | r² | Position on chr11 | SEQ ID NO |
|---|---|---|---|
| rs4938736 | 0.609 | 119266187 | 4284 |
| rs2044545 | 0.714 | 119270528 | 4285 |
| rs4938737 | 0.769 | 119274702 | 4286 |
| rs518932 | — | 119277053 | 4287 |
| rs517918 | 0.769 | 119277178 | 4288 |
| rs525588 | 0.769 | 119279435 | 4289 |
| rs508479 | 1.0 | 119281021 | 4290 |
| rs11217560 | 0.759 | 119282613 | 4291 |
| rs4938738 | 0.768 | 119283754 | 4292 |

### Example 171

[0530] For individuals with colorectal cancer, the distribution of polymorphic alleles at position 123067607 of chromosome 11 was different from those without colorectal cancer (Table 171). The recessive test for risk associated with carrying the T allele had an empirical p-value of 0.00212 based on permutation analysis, and the corresponding recessive odds ratio is 1.660 (Table 171). These data further suggest that this marker is associated with colorectal cancer risk and that the T allele at position 123067607 of chromosome 11 is associated with an increased risk of developing colorectal cancer.

TABLE 171

| | |
|---|---|
| rs no. | 3901231 |
| Chromosome; Position | 11; 123067607 |
| Gene Name | unknown |
| Genotype; Phenotype | n = T; increased risk |
| Hardy-Weinberg | 0.03799 |

| Case | | | | | | | Odds |
|---|---|---|---|---|---|---|---|
| Flag | Allele B | AA | AB | BB | Model | p-Value | Ratio |
| 0 | T | 464 | 411 | 64 | Recessive | 0.00212 | 1.660 |
| 1 | T | 450 | 390 | 102 | | | |

[0531] Table 171A indicates SNPs found to be in strong linkage disequilibrium with rs3901231. To generate this list, correlation coefficients (r²) were calculated between the index SNP and all neighboring SNPs cited in the June 2006 HapMap data set release. An r² cut off of 0.50 was selected for inclusion as evidence for strong genetic linkage, i.e., a “strong linkage disequilibrium.

TABLE 171A
Linked SNPs

| SNP | r² | Position on chr11 | SEQ ID NO |
|---|---|---|---|
| rs3919865 | 0.772 | 123046828 | 4293 |
| rs17127533 | 1.0 | 123048853 | 4294 |
| rs7124162 | 0.71 | 123050340 | 4295 |
| rs10750238 | 0.635 | 123050953 | 4296 |
| rs10790585 | 0.637 | 123051795 | 4297 |
| rs1111905 | 0.635 | 123053512 | 4298 |
| rs10790586 | 0.635 | 123053929 | 4299 |
| rs10790587 | 0.637 | 123053963 | 4300 |
| rs10790588 | 0.637 | 123054200 | 4301 |
| rs10790590 | 0.597 | 123055812 | 4302 |
| rs11219229 | 0.637 | 123056170 | 4303 |
| rs7127157 | 0.637 | 123056379 | 4304 |
| rs11219231 | 1.0 | 123057038 | 4305 |
| rs10790592 | 0.645 | 123057305 | 4306 |
| rs3901231 | — | 123067607 | 4307 |
| rs3851105 | 0.604 | 123069434 | 4308 |
| rs11219240 | 0.945 | 123071807 | 4309 |

### Example 172

[0532] For individuals with colorectal cancer, the distribution of polymorphic alleles at position 123132878 of chromosome 11 was different from those without colorectal cancer (Table 172). The trend test for risk associated with carrying the A allele had an empirical p-value of 0.001103 based on permutation analysis, and the corresponding Mantel-Haenszel odds ratio for trend is 1.238 (Table 172). These data further suggest that this marker is associated with colorectal cancer risk and that the A allele at position 123132878 of chromosome 11 is associated with an increased risk of developing colorectal cancer.

TABLE 172

| | |
|---|---|
| rs no. | 10502270 |
| Chromosome; Position | 11; 123132878 |
| Gene Name | unknown |
| Genotype; Phenotype | n = A; increased risk |
| Hardy-Weinberg | 0.58527 |

| Case | | | | | | | Odds |
|---|---|---|---|---|---|---|---|
| Flag | Allele B | AA | AB | BB | Model | p-Value | Ratio |
| 0 | A | 341 | 459 | 142 | Trend | 0.001103 | 1.238 |
| 1 | A | 291 | 466 | 190 | | | |

[0533] Table 172A indicates SNPs found to be in strong linkage disequilibrium with rs10502270. To generate this list, correlation coefficients (r²) were calculated between the index SNP and all neighboring SNPs cited in the June 2006 HapMap data set release. An r² cut off of 0.50 was selected for inclusion as evidence for strong genetic linkage, i.e., a “strong linkage disequilibrium.

TABLE 172A
Linked SNPs

| SNP | r² | Position on chr11 | SEQ ID NO |
|---|---|---|---|
| rs558021 | 0.899 | 123090819 | 4310 |
| rs2282646 | 0.809 | 123098217 | 4311 |
| rs679597 | 0.516 | 123103014 | 4312 |
| rs687414 | 0.509 | 123103830 | 4313 |
| rs1144507 | 0.52 | 123105685 | 4314 |
| rs2282642 | 0.516 | 123107126 | 4315 |
| rs1144505 | 0.516 | 123107409 | 4316 |
| rs1144502 | 0.516 | 123108095 | 4317 |
| rs1880058 | 0.516 | 123108155 | 4318 |
| rs9326264 | 0.746 | 123111147 | 4319 |
| rs1940185 | 0.516 | 123113791 | 4320 |
| rs3741114 | 0.516 | 123114574 | 4321 |
| rs10893083 | 0.9 | 123121666 | 4322 |
| rs11219270 | 0.9 | 123122086 | 4323 |
| rs10893085 | 0.9 | 123123687 | 4324 |
| rs10893086 | 0.898 | 123125107 | 4325 |
| rs7110051 | 0.516 | 123126375 | 4326 |
| rs11219274 | 0.898 | 123127296 | 4327 |
| rs11219277 | 0.9 | 123127542 | 4328 |
| rs12295819 | 0.9 | 123128342 | 4329 |
| rs12282787 | 0.516 | 123128353 | 4330 |
| rs10502268 | 0.9 | 123131946 | 4331 |
| rs10502270 | — | 123132878 | 4332 |
| rs7103374 | 0.573 | 123137082 | 4333 |
| rs7110581 | 0.724 | 123143910 | 4334 |
| rs7130648 | 0.708 | 123153805 | 4335 |
| rs10790598 | 0.573 | 123157735 | 4336 |
| rs1939915 | 0.507 | 123221459 | 4337 |

### Example 173

[0534] For individuals with colorectal cancer, the distribution of polymorphic alleles at position 13348818 of chromosome 12 was different from those without colorectal cancer (Table 173). The dominant test for risk associated with carrying the T allele had an empirical p-value based on permutation analysis of 0.002243, and the corresponding dominant odds ratio is 1.32 (Table 173). These data further suggest that this marker is associated with colorectal cancer risk and that the T allele at position 13348818 of chromosome 12 is associated with an increased risk of developing colorectal cancer.

TABLE 173

| | rs no. | | | | 12822216 | | |
|---|---|---|---|---|---|---|---|
| | Chromosome; Position | | | | 12; 13348818 | | |
| | Gene Name | | | | unknown | | |
| | Genotype; Phenotype | | | | n = T; increased risk | | |
| | Hardy-Weinberg | | | | 0.22621 | | |
| Case | | | | | | | Odds |
| Flag | Allele B | AA | AB | BB | Model | p-Value | Ratio |
| 0 | T | 667 | 336 | 53 | Dominant | 0.002243 | 1.32 |
| 1 | T | 534 | 355 | 56 | | | |

[0535] Table 173A indicates SNPs found to be in strong linkage disequilibrium with rs12822216. To generate this list, correlation coefficients (r²) were calculated between the index SNP and all neighboring SNPs cited in the June 2006 HapMap data set release. An r² cut off of 0.50 was selected for inclusion as evidence for strong genetic linkage, i.e., a “strong linkage disequilibrium.

TABLE 173A
Linked SNPs

| SNP | r² | Position on chr12 | SEQ ID NO |
|---|---|---|---|
| rs12822216 | — | 13348818 | 4338 |
| rs7966465 | 0.913 | 13350296 | 4339 |
| rs1116723 | 0.709 | 13356632 | 4340 |

### Example 174

[0536] For individuals with colorectal cancer, the distribution of polymorphic alleles at position 49166483 of chromosome 12 was different from those without colorectal cancer (Table 174). The recessive test for risk associated with carrying the T allele had an empirical p-value of 0.000416 based on permutation analysis, and the corresponding recessive odds ratio is 1.615 (Table 174). These data further suggest that this marker is associated with colorectal cancer risk and that the T allele at position 49166483 of chromosome 12 is associated with an increased risk of developing colorectal cancer.

TABLE 174

| | rs no. | | | | 7136702 | | |
|---|---|---|---|---|---|---|---|
| | Chromosome; Position | | | | 12; 49166483 | | |
| | Gene Name | | | | unknown | | |
| | Genotype; Phenotype | | | | n = T; increased risk | | |
| | Hardy-Weinberg | | | | 0.20102 | | |
| Case | | | | | | | Odds |
| Flag | Allele B | AA | AB | BB | Model | p-Value | Ratio |
| 0 | T | 437 | 465 | 102 | Recessive | 0.000416 | 1.615 |
| 1 | T | 412 | 431 | 154 | | | |

[0537] Table 174A indicates SNPs found to be in strong linkage disequilibrium with rs7136702. To generate this list, correlation coefficients (r²) were calculated between the index SNP and all neighboring SNPs cited in the June 2006 HapMap data set release. An r² cut off of 0.50 was selected for inclusion as evidence for strong genetic linkage, i.e., a “strong linkage disequilibrium.

TABLE 174A
Linked SNPs

| SNP | r² | Position on chr12 | SEQ ID NO |
|---|---|---|---|
| rs11169335 | 0.698 | 48922631 | 4341 |
| rs12828340 | 0.698 | 48923562 | 4342 |
| rs7979830 | 0.698 | 48927839 | 4343 |
| rs7132551 | 0.698 | 48933021 | 4344 |
| rs7953953 | 0.678 | 48933491 | 4345 |
| rs7486747 | 0.615 | 48936831 | 4346 |
| rs10783344 | 0.698 | 48939196 | 4347 |
| rs6580735 | 0.724 | 48951494 | 4348 |
| rs11169348 | 0.698 | 48952213 | 4349 |
| rs2111988 | 0.695 | 48954805 | 4350 |
| rs11169350 | 0.698 | 48957637 | 4351 |
| rs10876014 | 0.698 | 48961020 | 4352 |
| rs10876015 | 0.698 | 48963773 | 4353 |
| rs6580736 | 0.766 | 48965685 | 4354 |
| rs10876017 | 0.698 | 48967806 | 4355 |
| rs7311973 | 0.668 | 48970012 | 4356 |
| rs11169357 | 0.698 | 48976252 | 4357 |
| rs6580738 | 0.764 | 48991982 | 4358 |
| rs7489214 | 0.7 | 49010260 | 4359 |
| rs7310541 | 0.698 | 49012232 | 4360 |
| rs7134595 | 0.704 | 49016725 | 4361 |
| rs4768951 | 0.766 | 49025275 | 4362 |
| rs7296291 | 0.693 | 49030386 | 4363 |
| rs7312252 | 0.698 | 49030438 | 4364 |
| rs10506292 | 0.698 | 49031020 | 4365 |
| rs10876023 | 0.695 | 49033184 | 4366 |
| rs4421818 | 0.698 | 49035561 | 4367 |
| rs11169390 | 0.723 | 49036738 | 4368 |
| rs12303082 | 0.525 | 49040830 | 4369 |
| rs11833608 | 0.724 | 49043895 | 4370 |
| rs7972202 | 0.545 | 49048756 | 4371 |
| rs4348979 | 0.698 | 49049682 | 4372 |
| rs12422417 | 0.698 | 49050978 | 4373 |
| rs7136702 | — | 49166483 | 4374 |
| rs11169453 | 0.689 | 49172107 | 4375 |
| rs11169484 | 0.703 | 49221198 | 4376 |
| rs7487429 | 0.703 | 49226074 | 4377 |
| rs10876055 | 0.703 | 49227250 | 4378 |
| rs10747583 | 0.683 | 49233222 | 4379 |
| rs3935870 | 0.703 | 49250373 | 4380 |
| rs11169506 | 0.695 | 49297523 | 4381 |
| rs12818741 | 0.703 | 49318682 | 4382 |
| rs13378012 | 0.703 | 49326664 | 4383 |
| rs1316607 | 0.703 | 49329157 | 4384 |
| rs10876077 | 0.697 | 49337618 | 4385 |
| rs7309964 | 0.637 | 49350331 | 4386 |
| rs11169520 | 0.637 | 49359790 | 4387 |
| rs12427378 | 0.703 | 49360466 | 4388 |
| rs7955736 | 0.66 | 49361140 | 4389 |
| rs7137845 | 0.703 | 49367207 | 4390 |
| rs11169523 | 0.703 | 49372542 | 4391 |
| rs2090852 | 0.703 | 49373198 | 4392 |
| rs2139930 | 0.703 | 49375554 | 4393 |
| rs11169524 | 0.703 | 49376001 | 4394 |

### Example 175

[0538] For individuals with colorectal cancer, the distribution of polymorphic alleles at position 51488647 of chromosome 12, found within the KRT4 gene, was different from those without colorectal cancer (Table 175). The dominant test for risk associated with carrying the C allele had an empirical p-value based on permutation analysis of 0.006799, and the corresponding dominant odds ratio is 1.535 (Table 175). These data further suggest that this marker, located within the KRT4 gene, is associated with colorectal cancer risk and that the C allele at position 51488647 of chromosome 12 is associated with an increased risk of developing colorectal cancer.

TABLE 175

| | |
|---|---|
| rs no. | 2307028 |
| Chromosome; Position | 12; 51488647 |
| Gene Name | KRT4 |
| SEQ ID NO; Position | 5682; 5956 |
| Genotype; Phenotype | n = C; increased risk |
| Hardy-Weinberg | 0.77169 |

| Case | | | | | | | Odds |
|---|---|---|---|---|---|---|---|
| Flag | Allele B | AA | AB | BB | Model | p-Value | Ratio |
| 0 | C | 108 | 423 | 431 | Dominant | 0.006799 | 1.535 |
| 1 | C | 73 | 472 | 414 | | | |

[0539] Table 175A indicates SNPs found to be in strong linkage disequilibrium with rs2307028. To generate this list, correlation coefficients (r²) were calculated between the index SNP and all neighboring SNPs cited in the June 2006 HapMap data set release. An r² cut off of 0.50 was selected for inclusion as evidence for strong genetic linkage, i.e., a “strong linkage disequilibrium.

TABLE 175A
Linked SNPs

| SNP | r² | Position on chr12 | SEQ ID NO |
|---|---|---|---|
| rs4919748 | 1.0 | 51485831 | 4395 |
| rs1994755 | 1.0 | 51486150 | 4396 |
| rs2307028 | — | 51488647 | 4397 |
| rs10783539 | 0.764 | 51491024 | 4398 |
| rs7959052 | 0.526 | 51492024 | 4399 |
| rs11830949 | 0.506 | 51495953 | 4400 |

### Example 176

[0540] For individuals with colorectal cancer, the distribution of polymorphic alleles at position 76791055 of chromosome 12, found within the NAV3 gene, was different from those without colorectal cancer (Table 176). The dominant test for risk associated with carrying the C allele had an empirical p-value based on permutation analysis of 0.003971, and the corresponding dominant odds ratio is 1.554 (Table 176). These data further suggest that this marker, located within the NAV3 gene, is associated with colorectal cancer risk and that the C allele at position 76791055 of chromosome 12 is associated with an increased risk of developing colorectal cancer.

TABLE 176

| | |
|---|---|
| rs no. | 2045989 |
| Chromosome; Position | 12; 76791055 |
| Gene Name | NAV3 |
| SEQ ID NO; Position | 5683; 63391 |
| Genotype; Phenotype | n = C; increased risk |
| Hardy-Weinberg | 0.14221 |

| Case | | | | | | | Odds |
|---|---|---|---|---|---|---|---|
| Flag | Allele B | AA | AB | BB | Model | p-Value | Ratio |
| 0 | C | 124 | 444 | 490 | Dominant | 0.003971 | 1.554 |
| 1 | C | 75 | 424 | 454 | | | |

[0541] Table 176A indicates SNPs found to be in strong linkage disequilibrium with rs2045989. To generate this list, correlation coefficients (r²) were calculated between the index SNP and all neighboring SNPs cited in the June 2006 HapMap data set release. An r² cut off of 0.50 was selected for inclusion as evidence for strong genetic linkage, i.e., a “strong linkage disequilibrium.

TABLE 176A
Linked SNPs

| SNP | r² | Position on chr12 | SEQ ID NO |
|---|---|---|---|
| rs1479031 | 0.965 | 76786901 | 4401 |
| rs11831781 | 0.965 | 76789099 | 4402 |
| rs2045989 | — | 76791055 | 4403 |
| rs2619062 | 0.783 | 76791279 | 4404 |
| rs4142920 | 0.896 | 76793783 | 4405 |
| rs2619065 | 0.751 | 76794372 | 4406 |
| rs7976374 | 0.929 | 76796043 | 4407 |
| rs11107287 | 0.962 | 76801081 | 4408 |
| rs1242291 | 0.747 | 76806276 | 4409 |
| rs11835731 | 0.962 | 76808214 | 4410 |
| rs1920425 | 0.965 | 76809284 | 4411 |
| rs1920428 | 0.929 | 76817549 | 4412 |
| rs11107411 | 0.965 | 76820402 | 4413 |
| rs1479020 | 0.894 | 76829607 | 4414 |
| rs1242273 | 0.512 | 76830502 | 4415 |
| rs1012088 | 0.896 | 76832719 | 4416 |
| rs1382640 | 0.93 | 76834381 | 4417 |
| rs10859692 | 0.925 | 76835231 | 4418 |
| rs7295890 | 0.93 | 76841266 | 4419 |
| rs17817862 | 0.59 | 76849493 | 4420 |
| rs17817928 | 0.565 | 76849556 | 4421 |

### Example 177

[0542] For individuals with colorectal cancer, the distribution of polymorphic alleles at position 88113076 of chromosome 12 was different from those without colorectal cancer (Table 177). The trend test for risk associated with carrying the G allele had an empirical p-value of 0.002542 based on permutation analysis, and the corresponding Mantel-Haenszel odds ratio for trend is 1.286 (Table 177). These data further suggest that this marker is associated with colorectal cancer risk and that the G allele at position 88113076 of chromosome 12 is associated with an increased risk of developing colorectal cancer.

TABLE 177

| | |
|---|---|
| rs no. | 10506966 |
| Chromosome; Position | 12; 88113076 |
| Gene Name | unknown |
| Genotype; Phenotype | n = G; increased risk |
| Hardy-Weinberg | 0.27383 |

| Case | | | | | | | Odds |
|---|---|---|---|---|---|---|---|
| Flag | Allele B | AA | AB | BB | Model | p-Value | Ratio |
| 0 | G | 37 | 264 | 598 | Trend | 0.002542 | 1.286 |
| 1 | G | 21 | 238 | 673 | | | |

[0543] Table 177A indicates SNPs found to be in strong linkage disequilibrium with rs10506966. To generate this list, correlation coefficients (r²) were calculated between the index SNP and all neighboring SNPs cited in the June 2006 HapMap data set release. An r² cut off of 0.50 was selected for inclusion as evidence for strong genetic linkage, i.e., a “strong linkage disequilibrium.

TABLE 177A
Linked SNPs

| SNP | r² | Position on chr12 | SEQ ID NO |
|---|---|---|---|
| rs12830764 | 0.945 | 88008483 | 4422 |
| rs7974391 | 0.559 | 88016229 | 4423 |
| rs1983374 | 0.559 | 88027520 | 4424 |
| rs10777153 | 0.559 | 88034297 | 4425 |
| rs7974399 | 0.559 | 88070765 | 4426 |
| rs1381859 | 0.559 | 88081450 | 4427 |
| rs995727 | 0.577 | 88092416 | 4428 |
| rs10777157 | 0.559 | 88106387 | 4429 |
| rs899003 | 0.539 | 88112458 | 4430 |
| rs10506966 | — | 88113076 | 4431 |

### Example 178

[0544] For individuals with colorectal cancer, the distribution of polymorphic alleles at position 101473743 of chromosome 12 was different from those without colorectal cancer (Table 178). The recessive test for risk associated with carrying the G allele had an empirical p-value of 0.000215 based on permutation analysis, and the corresponding recessive odds ratio is 1.55 (Table 178). These data further suggest that this marker is associated with colorectal cancer risk and that the G allele at position 101473743 of chromosome 12 is associated with an increased risk of developing colorectal cancer.

TABLE 178

| | |
|---|---|
| rs no. | 10778179 |
| Chromosome; Position | 12; 101473743 |
| Gene Name | unknown |
| Genotype; Phenotype | n = G; increased risk |
| Hardy-Weinberg | 0.26029 |

| Case | | | | | | | Odds |
|---|---|---|---|---|---|---|---|
| Flag | Allele B | AA | AB | BB | Model | p-Value | Ratio |
| 0 | G | 370 | 497 | 143 | Recessive | 0.000215 | 1.55 |
| 1 | G | 336 | 462 | 204 | | | |

[0545] Table 178A indicates SNPs found to be in strong linkage disequilibrium with rs10778179. To generate this list, correlation coefficients (r²) were calculated between the index SNP and all neighboring SNPs cited in the June 2006 HapMap data set release. An r² cut off of 0.50 was selected for inclusion as evidence for strong genetic linkage, i.e., a “strong linkage disequilibrium.

TABLE 178A
Linked SNPs

| SNP | r² | Position on chr12 | SEQ ID NO |
|---|---|---|---|
| rs10860879 | 0.87 | 101472403 | 4432 |
| rs10778179 | — | 101473743 | 4433 |
| rs4609653 | 1.0 | 101474537 | 4434 |
| rs1350358 | 0.967 | 101476912 | 4435 |
| rs10735381 | 0.967 | 101477573 | 4436 |
| rs1350356 | 0.646 | 101480992 | 4437 |
| rs3953512 | 0.964 | 101481273 | 4438 |
| rs1902756 | 0.964 | 101481557 | 4439 |
| rs1840958 | 0.967 | 101481686 | 4440 |
| rs7970320 | 0.824 | 101486942 | 4441 |
| rs10860887 | 0.902 | 101487851 | 4442 |
| rs1463446 | 0.934 | 101488216 | 4443 |
| rs1965257 | 0.934 | 101488991 | 4444 |
| rs10745945 | 0.932 | 101489523 | 4445 |
| rs1457594 | 0.897 | 101490105 | 4446 |
| rs10860889 | 0.931 | 101492514 | 4447 |
| rs2100634 | 0.934 | 101493497 | 4448 |
| rs10778187 | 0.934 | 101494144 | 4449 |
| rs1902757 | 0.933 | 101495278 | 4450 |
| rs703558 | 0.635 | 101514547 | 4451 |
| rs1350354 | 0.9 | 101514769 | 4452 |
| rs2201521 | 0.934 | 101520667 | 4453 |
| rs7295435 | 0.838 | 101524864 | 4454 |
| rs10860893 | 0.838 | 101540195 | 4455 |

### Example 179

[0546] For individuals with colorectal cancer, the distribution of polymorphic alleles at position 104974668 of chromosome 12, found within the ARK5 gene, was different from those without colorectal cancer (Table 179). The dominant test for risk associated with carrying the C allele had an empirical p-value based on permutation analysis of 0.001572, and the corresponding dominant odds ratio is 2.068 (Table 179). These data further suggest that this marker, located within the ARK5 gene, is associated with colorectal cancer risk and that the C allele at position 104974668 of chromosome 12 is associated with an increased risk of developing colorectal cancer.

TABLE 179

| | |
|---|---|
| rs no. | 17038085 |
| Chromosome; Position | 12; 104974668 |
| Gene Name | ARK5 |
| SEQ ID NO; Position | 5684; 61611 |
| Genotype; Phenotype | n = C; increased risk |
| Hardy-Weinberg | 0.01278 |

| Case | | | | | | | Odds |
|---|---|---|---|---|---|---|---|
| Flag | Allele B | AA | AB | BB | Model | p-Value | Ratio |
| 0 | C | 57 | 306 | 647 | Dominant | 0.001572 | 2.068 |
| 1 | C | 28 | 326 | 642 | | | |

[0547] Table 179A indicates SNPs found to be in strong linkage disequilibrium with rs17038085. To generate this list, correlation coefficients (r²) were calculated between the index SNP and all neighboring SNPs cited in the June 2006 HapMap data set release. An r² cut off of 0.50 was selected for inclusion as evidence for strong genetic linkage, i.e., a “strong linkage disequilibrium.

TABLE 179A
Linked SNPs

| SNP | r² | Position on chr12 | SEQ ID NO |
|---|---|---|---|
| rs3741883 | 0.879 | 104963405 | 4456 |
| rs17038085 | — | 104974668 | 4457 |
| rs2730486 | 0.838 | 104979631 | 4458 |
| rs1560757 | 0.838 | 104979656 | 4459 |
| rs1427792 | 0.941 | 104981558 | 4460 |
| rs7301800 | 0.941 | 104983503 | 4461 |
| rs2436596 | 0.941 | 104984052 | 4462 |
| rs11112867 | 0.607 | 104999313 | 4463 |
| rs11112869 | 0.59 | 105001063 | 4464 |
| rs3782691 | 0.618 | 105004141 | 4465 |

### Example 180

[0548] For individuals with colorectal cancer, the distribution of polymorphic alleles at position 114397478 of chromosome 12 was different from those without colorectal cancer (Table 180). The dominant test for risk associated with carrying the G allele had an empirical p-value based on permutation analysis of 0.005135, and the corresponding dominant odds ratio is 1.553 (Table 180). These data further suggest that this marker is associated with colorectal cancer risk and that the G allele at position 114397478 of chromosome 12 is associated with an increased risk of developing colorectal cancer.

TABLE 180

| | |
|---|---|
| rs no. | 10850526 |
| Chromosome; Position | 12; 114397478 |
| Gene Name | unknown |
| Genotype; Phenotype | n = G; increased risk |
| Hardy-Weinberg | 0.39837 |

| Case | | | | | | | Odds |
|---|---|---|---|---|---|---|---|
| Flag | Allele B | AA | AB | BB | Model | p-Value | Ratio |
| 0 | G | 117 | 447 | 481 | Dominant | 0.005135 | 1.553 |
| 1 | G | 70 | 408 | 454 | | | |

[0549] Table 180A indicates SNPs found to be in strong linkage disequilibrium with rs10850526. To generate this list, correlation coefficients (r²) were calculated between the index SNP and all neighboring SNPs cited in the June 2006 HapMap data set release. An r² cut off of 0.50 was selected for inclusion as evidence for strong genetic linkage, i.e., a “strong linkage disequilibrium.

TABLE 180A
Linked SNPs

| SNP | r² | Position on chr12 | SEQ ID NO |
|---|---|---|---|
| rs7315438 | 0.557 | 114354123 | 4466 |
| rs7304462 | 0.541 | 114356910 | 4467 |
| rs721218 | 0.544 | 114366770 | 4468 |
| rs721219 | 0.525 | 114366778 | 4469 |
| rs7978535 | 0.544 | 114366985 | 4470 |
| rs4767320 | 0.573 | 114376278 | 4471 |
| rs6490020 | 0.771 | 114384238 | 4472 |
| rs10850519 | 1.0 | 114391160 | 4473 |
| rs7135643 | 0.606 | 114391604 | 4474 |
| rs6490021 | 0.727 | 114391640 | 4475 |
| rs4767327 | 0.727 | 114391911 | 4476 |
| rs4767329 | 0.585 | 114392159 | 4477 |
| rs12304729 | 0.587 | 114392743 | 4478 |
| rs7961066 | 0.571 | 114393208 | 4479 |
| rs4767331 | 0.727 | 114394665 | 4480 |
| rs4767332 | 0.606 | 114394992 | 4481 |
| rs10850521 | 0.606 | 114395239 | 4482 |
| rs10850522 | 0.606 | 114395254 | 4483 |
| rs10850523 | 0.606 | 114395347 | 4484 |
| rs10850524 | 0.606 | 114395381 | 4485 |
| rs7969684 | 0.726 | 114395828 | 4486 |
| rs1498754 | 0.606 | 114395927 | 4487 |
| rs7299936 | 0.606 | 114396720 | 4488 |
| rs10850526 | — | 114397478 | 4489 |
| rs2173452 | 0.726 | 114398044 | 4490 |
| rs7971598 | 0.509 | 114400822 | 4491 |
| rs7958261 | 0.772 | 114403841 | 4492 |
| rs10850527 | 0.768 | 114403983 | 4493 |
| rs1391710 | 0.772 | 114404378 | 4494 |
| rs11067630 | 0.742 | 114406627 | 4495 |
| rs11615738 | 0.742 | 114407356 | 4496 |
| rs11067631 | 0.755 | 114407741 | 4497 |
| rs7958945 | 0.765 | 114410621 | 4498 |
| rs10850528 | 0.773 | 114411153 | 4499 |
| rs9971932 | 0.768 | 114411612 | 4500 |
| rs7965876 | 0.747 | 114411620 | 4501 |
| rs7980016 | 0.742 | 114412048 | 4502 |
| rs10850529 | 0.773 | 114412595 | 4503 |

### Example 181

[0550] For individuals with colorectal cancer, the distribution of polymorphic alleles at position 39876966 of chromosome 13 was different from those without colorectal cancer (Table 181). The trend test for risk associated with carrying the C allele had an empirical p-value of 0.002406 based on permutation analysis, and the corresponding Mantel-Haenszel odds ratio for trend is 1.368 (Table 181). These data further suggest that this marker is associated with colorectal cancer risk and that the C allele at position 39876966 of chromosome 13 is associated with an increased risk of developing colorectal cancer.

TABLE 181

| | |
|---|---|
| rs no. | 1751852 |
| Chromosome; Position | 13; 39876966 |
| Gene Name | unknown |
| Genotype; Phenotype | n = C; increased risk |
| Hardy-Weinberg | 0.64108 |

| Case | | | | | | | Odds |
|---|---|---|---|---|---|---|---|
| Flag | Allele B | AA | AB | BB | Model | p-Value | Ratio |
| 0 | C | 11 | 210 | 790 | Trend | 0.002406 | 1.368 |
| 1 | C | 4 | 165 | 833 | | | |

[0551] Table 181A indicates SNPs found to be in strong linkage disequilibrium with rs1751852. To generate this list, correlation coefficients (r²) were calculated between the index SNP and all neighboring SNPs cited in the June 2006 HapMap data set release. An r² cut off of 0.50 was selected for inclusion as evidence for strong genetic linkage, i.e., a “strong linkage disequilibrium.

TABLE 181A
Linked SNPs

| SNP | r² | Position on chr13 | SEQ ID NO |
|---|---|---|---|
| rs1555981 | 0.546 | 39852882 | 4504 |
| rs2802510 | 0.648 | 39864768 | 4505 |
| rs1751857 | 0.649 | 39867438 | 4506 |
| rs1782808 | 0.649 | 39874034 | 4507 |
| rs1751853 | 0.546 | 39874507 | 4508 |
| rs1751852 | — | 39876966 | 4509 |
| rs1782792 | 1.0 | 39877240 | 4510 |
| rs1624886 | 1.0 | 39878019 | 4511 |
| rs1782793 | 0.73 | 39878687 | 4512 |
| rs2802515 | 0.608 | 39882912 | 4513 |
| rs2802517 | 1.0 | 39894067 | 4514 |

### Example 182

[0552] For individuals with colorectal cancer, the distribution of polymorphic alleles at position 49833923 of chromosome 13 was different from those without colorectal cancer (Table 182). The trend test for risk associated with carrying the C allele had an empirical p-value of 0.000299 based on permutation analysis, and the corresponding Mantel-Haenszel odds ratio for trend is 1.62 (Table 182). These data further suggest that this marker is associated with colorectal cancer risk and that the C allele at position 49833923 of chromosome 13 is associated with an increased risk of developing colorectal cancer.

TABLE 182

| | |
|---|---|
| rs no. | 12874278 |
| Chromosome; Position | 13; 49833923 |
| Gene Name | unknown |
| Genotype; Phenotype | n = C; increased risk |
| Hardy-Weinberg | 0.82764 |

| Case | | | | | | | Odds |
|---|---|---|---|---|---|---|---|
| Flag | Allele B | AA | AB | BB | Model | p-Value | Ratio |
| 0 | C | 5 | 153 | 898 | Trend | 0.000299 | 1.62 |
| 1 | C | 2 | 90 | 858 | | | |

[0553] Table 182A indicates SNPs found to be in strong linkage disequilibrium with rs12874278. To generate this list, correlation coefficients (r²) were calculated between the index SNP and all neighboring SNPs cited in the June 2006 HapMap data set release. An r² cut off of 0.50 was selected for inclusion as evidence for strong genetic linkage, i.e., a “strong linkage disequilibrium.

TABLE 182A
Linked SNPs

| SNP | r² | Position on chr13 | SEQ ID NO |
|---|---|---|---|
| rs9596268 | 0.526 | 49731880 | 4515 |
| rs9596270 | 0.588 | 49740441 | 4516 |
| rs706603 | 0.708 | 49753024 | 4517 |
| rs12874827 | 0.708 | 49798737 | 4518 |
| rs12853498 | 0.556 | 49811875 | 4519 |
| rs17074143 | 0.708 | 49820774 | 4520 |
| rs11842790 | 0.708 | 49822449 | 4521 |
| rs17074145 | 0.707 | 49827390 | 4522 |
| rs12871645 | 0.708 | 49829566 | 4523 |
| rs17363566 | 1.0 | 49832893 | 4524 |
| rs12874278 | — | 49833923 | 4525 |
| rs12864797 | 0.734 | 49847949 | 4526 |
| rs200220 | 0.611 | 49858379 | 4527 |

### Example 183

[0554] For individuals with colorectal cancer, the distribution of polymorphic alleles at position 73798631 of chromosome 13 was different from those without colorectal cancer (Table 183). The dominant test for risk associated with carrying the A allele had an empirical p-value based on permutation analysis of 0.002624, and the corresponding dominant odds ratio is 1.329 (Table 183). These data further suggest that this marker is associated with colorectal cancer risk and that the A allele at position 73798631 of chromosome 13 is associated with an increased risk of developing colorectal cancer.

TABLE 183

| | |
|---|---|
| rs no. | 9592985 |
| Chromosome; Position | 13; 73798631 |
| Gene Name | unknown |
| Genotype; Phenotype | n = A; increased risk |
| Hardy-Weinberg | 0.01904 |

| Case | | | | | | | Odds |
|---|---|---|---|---|---|---|---|
| Flag | Allele B | AA | AB | BB | Model | p-Value | Ratio |
| 0 | A | 722 | 282 | 44 | Dominant | 0.002624 | 1.329 |
| 1 | A | 590 | 318 | 36 | | | |

[0555] Table 183A indicates SNPs found to be in strong linkage disequilibrium with rs9592985. To generate this list, correlation coefficients (r²) were calculated between the index SNP and all neighboring SNPs cited in the June 2006 HapMap data set release. An r² cut off of 0.50 was selected for inclusion as evidence for strong genetic linkage, i.e., a “strong linkage disequilibrium.

TABLE 183A
Linked SNPs

| SNP | r² | Position on chr13 | SEQ ID NO |
|---|---|---|---|
| rs1041514 | 0.686 | 73791516 | 4528 |
| rs4885168 | 0.516 | 73793561 | 4529 |
| rs7992578 | 0.511 | 73795648 | 4530 |
| rs9543578 | 0.505 | 73796232 | 4531 |
| rs9600261 | 1.0 | 73797634 | 4532 |
| rs9592985 | — | 73798631 | 4533 |
| rs7991085 | 0.656 | 73817057 | 4534 |
| rs6562815 | 0.605 | 73817643 | 4535 |
| rs4403930 | 0.59 | 73830873 | 4536 |

### Example 184

[0556] For individuals with colorectal cancer, the distribution of polymorphic alleles at position 74467066 of chromosome 13 was different from those without colorectal cancer (Table 184). The trend test for risk associated with carrying the C allele had an empirical p-value of 0.006401 based on permutation analysis, and the corresponding Mantel-Haenszel odds ratio for trend is 1.201 (Table 184). These data further suggest that this marker is associated with colorectal cancer risk and that the C allele at position 74467066 of chromosome 13 is associated with an increased risk of developing colorectal cancer.

TABLE 184

| | |
|---|---|
| rs no. | 9543827 |
| Chromosome; Position | 13; 74467066 |
| Gene Name | unknown |
| Genotype; Phenotype | n = C; increased risk |
| Hardy-Weinberg | 0.35593 |

| Case | | | | | | | Odds |
|---|---|---|---|---|---|---|---|
| Flag | Allele B | AA | AB | BB | Model | p-Value | Ratio |
| 0 | C | 112 | 444 | 500 | Trend | 0.006401 | 1.201 |
| 1 | C | 75 | 377 | 501 | | | |

[0557] Table 184A indicates SNPs found to be in strong linkage disequilibrium with rs9543827. To generate this list, correlation coefficients (r²) were calculated between the index SNP and all neighboring SNPs cited in the June 2006 HapMap data set release. An r² cut off of 0.50 was selected for inclusion as evidence for strong genetic linkage, i.e., a “strong linkage disequilibrium.

TABLE 184A
Linked SNPs

| SNP | r² | Position on chr13 | SEQ ID NO |
|---|---|---|---|
| rs1074634 | 0.589 | 74291176 | 4537 |
| rs10161758 | 0.557 | 74294283 | 4538 |
| rs12861426 | 0.511 | 74296869 | 4539 |
| rs12867144 | 0.511 | 74297059 | 4540 |
| rs9600396 | 0.589 | 74299032 | 4541 |
| rs4356354 | 0.557 | 74301925 | 4542 |
| rs4242957 | 0.535 | 74305801 | 4543 |
| rs4595676 | 0.589 | 74306967 | 4544 |
| rs12428193 | 0.589 | 74307954 | 4545 |
| rs2225002 | 0.58 | 74312063 | 4546 |
| rs9543787 | 0.589 | 74315191 | 4547 |
| rs2209532 | 0.58 | 74317380 | 4548 |
| rs2876700 | 0.58 | 74323828 | 4549 |
| rs12430473 | 0.576 | 74332962 | 4550 |
| rs12430706 | 0.64 | 74333453 | 4551 |
| rs189602 | 0.631 | 74334367 | 4552 |
| rs970988 | 0.631 | 74341095 | 4553 |
| rs12875786 | 0.64 | 74344149 | 4554 |
| rs356801 | 0.64 | 74344843 | 4555 |
| rs4885242 | 0.64 | 74345635 | 4556 |
| rs1562380 | 0.633 | 74348089 | 4557 |
| rs356802 | 0.633 | 74348524 | 4558 |
| rs17195525 | 0.539 | 74349020 | 4559 |
| rs2328922 | 0.595 | 74350680 | 4560 |
| rs809257 | 0.633 | 74355403 | 4561 |
| rs2225003 | 0.64 | 74360517 | 4562 |
| rs2166586 | 0.53 | 74364541 | 4563 |
| rs1156501 | 0.577 | 74365406 | 4564 |
| rs804909 | 0.628 | 74368477 | 4565 |
| rs9530388 | 0.633 | 74368981 | 4566 |
| rs9530389 | 0.611 | 74369007 | 4567 |
| rs518507 | 0.64 | 74369270 | 4568 |
| rs9543795 | 0.64 | 74369460 | 4569 |
| rs7317785 | 0.64 | 74370135 | 4570 |
| rs1475339 | 0.53 | 74370622 | 4571 |
| rs4885244 | 0.539 | 74372407 | 4572 |
| rs1867938 | 0.64 | 74372494 | 4573 |
| rs9318310 | 0.659 | 74372780 | 4574 |
| rs8001381 | 0.64 | 74374712 | 4575 |
| rs8002274 | 0.637 | 74375084 | 4576 |
| rs8002759 | 0.64 | 74375502 | 4577 |
| rs7139749 | 0.702 | 74381956 | 4578 |
| rs4885246 | 0.557 | 74388471 | 4579 |
| rs505836 | 0.56 | 74389001 | 4580 |
| rs4885249 | 0.579 | 74389625 | 4581 |
| rs12860514 | 0.544 | 74389659 | 4582 |
| rs1417552 | 0.569 | 74389818 | 4583 |
| rs12867084 | 0.527 | 74390032 | 4584 |
| rs700349 | 0.729 | 74392110 | 4585 |
| rs912924 | 0.673 | 74393228 | 4586 |
| rs9573451 | 0.729 | 74401178 | 4587 |
| rs4885250 | 0.569 | 74403542 | 4588 |
| rs356737 | 0.521 | 74405161 | 4589 |
| rs356705 | 0.565 | 74409627 | 4590 |
| rs4885252 | 0.579 | 74412048 | 4591 |
| rs4883983 | 0.569 | 74412374 | 4592 |
| rs9543803 | 0.673 | 74423025 | 4593 |
| rs1592012 | 0.547 | 74423460 | 4594 |
| rs496836 | 0.567 | 74425012 | 4595 |
| rs1832732 | 0.673 | 74425568 | 4596 |
| rs356749 | 0.516 | 74431719 | 4597 |
| rs12867583 | 0.647 | 74439614 | 4598 |
| rs1934869 | 0.668 | 74445545 | 4599 |
| rs12858683 | 0.569 | 74445738 | 4600 |
| rs1340911 | 0.673 | 74446187 | 4601 |
| rs17195609 | 0.569 | 74447569 | 4602 |
| rs17195616 | 0.569 | 74447610 | 4603 |
| rs9600410 | 0.658 | 74448949 | 4604 |
| rs7988629 | 0.673 | 74450132 | 4605 |
| rs2328930 | 0.56 | 74452030 | 4606 |
| rs10492517 | 0.569 | 74453192 | 4607 |
| rs356767 | 0.673 | 74454071 | 4608 |
| rs356765 | 0.729 | 74454950 | 4609 |
| rs7991708 | 0.713 | 74456183 | 4610 |
| rs4885259 | 0.724 | 74460869 | 4611 |
| rs12860849 | 0.729 | 74463899 | 4612 |
| rs876267 | 0.673 | 74463969 | 4613 |
| rs12866892 | 0.729 | 74464048 | 4614 |
| rs12868178 | 0.561 | 74464138 | 4615 |
| rs9543825 | 0.613 | 74465245 | 4616 |
| rs9543827 | — | 74467066 | 4617 |
| rs12865179 | 0.826 | 74467730 | 4618 |
| rs947066 | 0.964 | 74469281 | 4619 |
| rs947067 | 0.797 | 74469343 | 4620 |
| rs12862025 | 0.79 | 74472663 | 4621 |
| rs17337503 | 0.515 | 74474385 | 4622 |
| rs9543830 | 1.0 | 74477599 | 4623 |
| rs9573460 | 0.727 | 74481389 | 4624 |
| rs17252720 | 0.826 | 74482470 | 4625 |

### Example 185

[0558] For individuals with colorectal cancer, the distribution of polymorphic alleles at position 106131423 of chromosome 13 was different from those without colorectal cancer (Table 185). The trend test for risk associated with carrying the C allele had an empirical p-value of 0.009856 based on permutation analysis, and the corresponding Mantel-Haenszel odds ratio for trend is 1.296 (Table 185). These data further suggest that this marker is associated with colorectal cancer risk and that the C allele at position 106131423 of chromosome 13 is associated with an increased risk of developing colorectal cancer.

TABLE 185

| | |
|---|---|
| rs no. | 17548667 |
| Chromosome; Position | 13; 106131423 |
| Gene Name | unknown |
| Genotype; Phenotype | n = C; increased risk |
| Hardy-Weinberg | 1 |

| Case | | | | | | | Odds |
|---|---|---|---|---|---|---|---|
| Flag | Allele B | AA | AB | BB | Model | p-Value | Ratio |
| 0 | C | 11 | 195 | 797 | Trend | 0.009856 | 1.296 |
| 1 | C | 3 | 162 | 830 | | | |

[0559] Table 185A indicates SNPs found to be in strong linkage disequilibrium with rs17548667. To generate this list, correlation coefficients (r²) were calculated between the index SNP and all neighboring SNPs cited in the June 2006 HapMap data set release. An r² cut off of 0.50 was selected for inclusion as evidence for strong genetic linkage, i.e., a “strong linkage disequilibrium.

TABLE 185A
Linked SNPs

| SNP | r² | Position on chr13 | SEQ ID NO |
|---|---|---|---|
| rs16969008 | 0.539 | 106128657 | 4626 |
| rs17548667 | — | 106131423 | 4627 |
| rs12429618 | 0.673 | 106146991 | 4628 |

### Example 186

[0560] For individuals with colorectal cancer, the distribution of polymorphic alleles at position 109042402 of chromosome 13 was different from those without colorectal cancer (Table 186). The recessive test for risk associated with carrying the G allele had an empirical p-value of 0.008447 based on permutation analysis, and the corresponding recessive odds ratio is 1.370 (Table 186). These data further suggest that this marker is associated with colorectal cancer risk and that the G allele at position 109042402 of chromosome 13 is associated with an increased risk of developing colorectal cancer.

TABLE 186

| | |
|---|---|
| rs no. | 11069790 |
| Chromosome; Position | 13; 109042402 |
| Gene Name | unknown |
| Genotype; Phenotype | n = G; increased risk |
| Hardy-Weinberg | 0.86712 |

| Case | | | | | | | Odds |
|---|---|---|---|---|---|---|---|
| Flag | Allele B | AA | AB | BB | Model | p-Value | Ratio |
| 0 | G | 10 | 194 | 847 | Recessive | 0.008447 | 1.370 |
| 1 | G | 7 | 135 | 808 | | | |

[0561] Table 186A indicates SNPs found to be in strong linkage disequilibrium with rs11069790. To generate this list, correlation coefficients (r²) were calculated between the index SNP and all neighboring SNPs cited in the June 2006 HapMap data set release. An r² cut off of 0.50 was selected for inclusion as evidence for strong genetic linkage, i.e., a “strong linkage disequilibrium.

TABLE 186A
Linked SNPs

| SNP | r² | Position on chr13 | SEQ ID NO |
|---|---|---|---|
| rs11069790 | — | 109042402 | 4629 |

### Example 187

[0562] For individuals with colorectal cancer, the distribution of polymorphic alleles at position 109175464 of chromosome 13 was different from those without colorectal cancer (Table 187). The dominant test for risk associated with carrying the G allele had an empirical p-value based on permutation analysis of 0.000642, and the corresponding dominant odds ratio is 1.681 (Table 187). These data further suggest that this marker is associated with colorectal cancer risk and that the G allele at position 109175464 of chromosome 13 is associated with an increased risk of developing colorectal cancer.

TABLE 187

| | |
|---|---|
| rs no. | 7319633 |
| Chromosome; Position | 13; 109175464 |
| Gene Name | unknown |
| Genotype; Phenotype | n = G; increased risk |
| Hardy-Weinberg | 0.08322 |

| Case | | | | | | | Odds |
|---|---|---|---|---|---|---|---|
| Flag | Allele B | AA | AB | BB | Model | p-Value | Ratio |
| 0 | G | 123 | 403 | 426 | Dominant | 0.000642 | 1.681 |
| 1 | G | 76 | 448 | 413 | | | |

[0563] Table 187A indicates SNPs found to be in strong linkage disequilibrium with rs7319633. To generate this list, correlation coefficients (r²) were calculated between the index SNP and all neighboring SNPs cited in the June 2006 HapMap data set release. An r² cut off of 0.50 was selected for inclusion as evidence for strong genetic linkage, i.e., a “strong linkage disequilibrium.

TABLE 187A
Linked SNPs

| SNP | r² | Position on chr13 | SEQ ID NO |
|---|---|---|---|
| rs7320738 | 0.681 | 109154406 | 4630 |
| rs6492221 | 0.769 | 109158183 | 4631 |
| rs7336999 | 0.763 | 109159306 | 4632 |
| rs2026815 | 0.769 | 109162594 | 4633 |
| rs2391785 | 0.773 | 109165751 | 4634 |
| rs7985034 | 0.836 | 109168465 | 4635 |
| rs9587970 | 0.762 | 109168563 | 4636 |
| rs9301408 | 0.883 | 109175309 | 4637 |
| rs7319633 | — | 109175464 | 4638 |

### Example 188

[0564] For individuals with colorectal cancer, the distribution of polymorphic alleles at position 32814428 of chromosome 14, found within the NPAS3 gene, was different from those without colorectal cancer (Table 188). The trend test for risk associated with carrying the C allele had an empirical p-value of 0.000843 based on permutation analysis, and the corresponding Mantel-Haenszel odds ratio for trend is 1.255 (Table 188). These data further suggest that this marker, located within the NPAS3 gene, is associated with colorectal cancer risk and that the C allele at position 32814428 of chromosome 14 is associated with an increased risk of developing colorectal cancer.

TABLE 188

| | |
|---|---|
| rs no. | 7152037 |
| Chromosome; Position | 14; 32814428 |
| Gene Name | NPAS3 |
| SEQ ID NO; Position | 5685; 336229 |
| Genotype; Phenotype | n = C; increased risk |
| Hardy-Weinberg | 0.70577 |

| Case | | | | | | | Odds |
|---|---|---|---|---|---|---|---|
| Flag | Allele B | AA | AB | BB | Model | p-Value | Ratio |
| 0 | C | 597 | 326 | 48 | Trend | 0.000843 | 1.255 |
| 1 | C | 538 | 345 | 83 | | | |

[0565] Table 188A indicates SNPs found to be in strong linkage disequilibrium with rs7152037. To generate this list, correlation coefficients (r²) were calculated between the index SNP and all neighboring SNPs cited in the June 2006 HapMap data set release. An r² cut off of 0.50 was selected for inclusion as evidence for strong genetic linkage, i.e., a “strong linkage disequilibrium.

TABLE 188A
Linked SNPs

| SNP | r² | Position on chr14 | SEQ ID NO |
|---|---|---|---|
| rs243313 | 0.713 | 32813779 | 4639 |
| rs1875288 | 0.802 | 32814180 | 4640 |
| rs8014015 | 0.865 | 32814215 | 4641 |
| rs6571591 | 0.865 | 32814236 | 4642 |
| rs7152037 | — | 32814428 | 4643 |
| rs7152368 | 0.95 | 32814490 | 4644 |
| rs10129441 | 0.783 | 32828643 | 4645 |
| rs912854 | 0.826 | 32835686 | 4646 |
| rs12886732 | 0.776 | 32840593 | 4647 |
| rs3844011 | 0.522 | 32841577 | 4648 |
| rs12897225 | 0.501 | 32842241 | 4649 |
| rs4007518 | 0.776 | 32844778 | 4650 |

### Example 189

[0566] For individuals with colorectal cancer, the distribution of polymorphic alleles at position 32929909 of chromosome 14 was different from those without colorectal cancer (Table 189). The dominant test for risk associated with carrying the G allele had an empirical p-value based on permutation analysis of 0.003507, and the corresponding dominant odds ratio is 11.090 (Table 189). These data further suggest that this marker is associated with colorectal cancer risk and that the G allele at position 32929909 of chromosome 14 is associated with an increased risk of developing colorectal cancer.

TABLE 189

| | |
|---|---|
| rs no. | 17100933 |
| Chromosome; Position | 14; 32929909 |
| Gene Name | unknown |
| Genotype; Phenotype | n = G; increased risk |
| Hardy-Weinberg | 0.33839 |

| Case | | | | | | | Odds |
|---|---|---|---|---|---|---|---|
| Flag | Allele B | AA | AB | BB | Model | p-Value | Ratio |
| 0 | G | 11 | 160 | 815 | Dominant | 0.003507 | 11.090 |
| 1 | G | 1 | 161 | 822 | | | |

[0567] Table 189A indicates SNPs found to be in strong linkage disequilibrium with rs17100933. To generate this list, correlation coefficients (r²) were calculated between the index SNP and all neighboring SNPs cited in the June 2006 HapMap data set release. An r² cut off of 0.50 was selected for inclusion as evidence for strong genetic linkage, i.e., a “strong linkage disequilibrium.

TABLE 189A
Linked SNPs

| SNP | r² | Position on chr14 | SEQ ID NO |
|---|---|---|---|
| rs17100933 | — | 32929909 | 4651 |

### Example 190

[0568] For individuals with colorectal cancer, the distribution of polymorphic alleles at position 38722249 of chromosome 14 was different from those without colorectal cancer (Table 190). The recessive test for risk associated with carrying the G allele had an empirical p-value of 0.001239 based on permutation analysis, and the corresponding recessive odds ratio is 5.637 (Table 190). These data further suggest that this marker is associated with colorectal cancer risk and that the G allele at position 38722249 of chromosome 14 is associated with an increased risk of developing colorectal cancer.

TABLE 190

| | |
|---|---|
| rs no. | 10135561 |
| Chromosome; Position | 14; 38722249 |
| Gene Name | unknown |
| Genotype; Phenotype | n = G; increased risk |
| Hardy-Weinberg | 0.02602 |

| Case | | | | | | | Odds |
|---|---|---|---|---|---|---|---|
| Flag | Allele B | AA | AB | BB | Model | p-Value | Ratio |
| 0 | G | 865 | 188 | 3 | Recessive | 0.001239 | 5.637 |
| 1 | G | 779 | 155 | 15 | | | |

[0569] Table 190A indicates SNPs found to be in strong linkage disequilibrium with rs10135561. To generate this list, correlation coefficients (r²) were calculated between the index SNP and all neighboring SNPs cited in the June 2006 HapMap data set release. An r² cut off of 0.50 was selected for inclusion as evidence for strong genetic linkage, i.e., a “strong linkage disequilibrium.

TABLE 190A
Linked SNPs

| SNP | r² | Position on chr14 | SEQ ID NO |
|---|---|---|---|
| rs743223 | 0.746 | 38479068 | 4652 |
| rs2025061 | 0.774 | 38480457 | 4653 |
| rs17108596 | 0.774 | 38485844 | 4654 |
| rs8019396 | 0.774 | 38486966 | 4655 |
| rs10150756 | 0.774 | 38496308 | 4656 |
| rs10149971 | 0.774 | 38508662 | 4657 |
| rs11844428 | 0.774 | 38509514 | 4658 |
| rs11844342 | 0.774 | 38509542 | 4659 |
| rs17108654 | 0.773 | 38510038 | 4660 |
| rs10483544 | 0.774 | 38510255 | 4661 |
| rs7159520 | 0.774 | 38510675 | 4662 |
| rs17108664 | 0.774 | 38512241 | 4663 |
| rs10148805 | 0.774 | 38513475 | 4664 |
| rs11848150 | 0.774 | 38513837 | 4665 |
| rs11157034 | 0.749 | 38515181 | 4666 |
| rs12323578 | 0.773 | 38516976 | 4667 |
| rs2144528 | 0.774 | 38521446 | 4668 |
| rs11623907 | 0.774 | 38521998 | 4669 |
| rs11623945 | 0.773 | 38522050 | 4670 |
| rs11628564 | 0.774 | 38522195 | 4671 |
| rs10141081 | 0.774 | 38523473 | 4672 |
| rs17108696 | 0.774 | 38524018 | 4673 |
| rs11627264 | 0.774 | 38530214 | 4674 |
| rs993675 | 0.773 | 38533854 | 4675 |
| rs926970 | 0.881 | 38548144 | 4676 |
| rs10139666 | 0.618 | 38562908 | 4677 |
| rs10483543 | 0.688 | 38576104 | 4678 |
| rs1884384 | 0.568 | 38583982 | 4679 |
| rs17092044 | 0.892 | 38589166 | 4680 |
| rs11628784 | 0.803 | 38613732 | 4681 |
| rs8018720 | 0.568 | 38625936 | 4682 |
| rs10134166 | 0.774 | 38629795 | 4683 |
| rs12587208 | 0.749 | 38646046 | 4684 |
| rs11622731 | 0.892 | 38646321 | 4685 |
| rs10131369 | 1.0 | 38664129 | 4686 |
| rs11624584 | 1.0 | 38684472 | 4687 |
| rs11626002 | 1.0 | 38702727 | 4688 |
| rs1002193 | 1.0 | 38714523 | 4689 |
| rs2273592 | 1.0 | 38715209 | 4690 |
| rs1050136 | 0.764 | 38720575 | 4691 |
| rs13021 | 1.0 | 38720675 | 4692 |
| rs10135561 | — | 38722249 | 4693 |
| rs10141924 | 1.0 | 38724104 | 4694 |
| rs7156264 | 0.511 | 38743742 | 4695 |
| rs7140164 | 0.511 | 38755290 | 4696 |

### Example 191

[0570] For individuals with colorectal cancer, the distribution of polymorphic alleles at position 84254314 of chromosome 14 was different from those without colorectal cancer (Table 191). The recessive test for risk associated with carrying the T allele had an empirical p-value of 0.000192 based on permutation analysis, and the corresponding recessive odds ratio is 2.116 (Table 191). These data further suggest that this marker is associated with colorectal cancer risk and that the T allele at position 84254314 of chromosome 14 is associated with an increased risk of developing colorectal cancer.

TABLE 191

| | rs no. | | | | 2623142 | | |
|---|---|---|---|---|---|---|---|
| | Chromosome; Position | | | | 14; 84254314 | | |
| | Gene Name | | | | unknown | | |
| | Genotype; Phenotype | | | | n = T; increased risk | | |
| | Hardy-Weinberg | | | | 0.00129 | | |
| Case | | | | | | | Odds |
| Flag | Allele B | AA | AB | BB | Model | p-Value | Ratio |
| 0 | T | 595 | 410 | 38 | Recessive | 0.000192 | 2.116 |
| 1 | T | 529 | 346 | 70 | | | |

[0571] Table 191A indicates SNPs found to be in strong linkage disequilibrium with rs2623142. To generate this list, correlation coefficients (r²) were calculated between the index SNP and all neighboring SNPs cited in the June 2006 HapMap data set release. An r² cut off of 0.50 was selected for inclusion as evidence for strong genetic linkage, i.e., a “strong linkage disequilibrium.

TABLE 191A
Linked SNPs

| SNP | r² | Position on chr14 | SEQ ID NO |
|---|---|---|---|
| rs1481404 | 0.575 | 84192776 | 4697 |
| rs2819810 | 0.575 | 84206728 | 4698 |
| rs2623122 | 0.575 | 84208183 | 4699 |
| rs2623143 | 0.553 | 84210737 | 4700 |
| rs2819809 | 0.535 | 84214008 | 4701 |
| rs2623129 | 0.536 | 84222923 | 4702 |
| rs1958063 | 0.959 | 84253556 | 4703 |
| rs2623142 | — | 84254314 | 4704 |
| rs2623135 | 0.916 | 84268666 | 4705 |
| rs2819825 | 0.956 | 84274612 | 4706 |
| rs2819824 | 0.957 | 84276002 | 4707 |
| rs2819822 | 0.958 | 84277594 | 4708 |
| rs2819820 | 0.916 | 84291919 | 4709 |
| rs2819817 | 0.916 | 84302496 | 4710 |
| rs1481415 | 0.916 | 84304684 | 4711 |
| rs2623121 | 0.914 | 84307393 | 4712 |
| rs2765921 | 0.877 | 84311538 | 4713 |

### Example 192

[0572] For individuals with colorectal cancer, the distribution of polymorphic alleles at position 85233147 of chromosome 14 was different from those without colorectal cancer (Table 192). The trend test for risk associated with carrying the A allele had an empirical p-value of 0.005274 based on permutation analysis, and the corresponding Mantel-Haenszel odds ratio for trend is 1.198 (Table 192). These data further suggest that this marker is associated with colorectal cancer risk and that the A allele at position 85233147 of chromosome 14 is associated with an increased risk of developing colorectal cancer.

TABLE 192

| | |
|---|---|
| rs no. | 6574840 |
| Chromosome; Position | 14; 85233147 |
| Gene Name | unknown |
| Genotype; Phenotype | n = A; increased risk |
| Hardy-Weinberg | 0.94814 |

| Case | | | | | | | Odds |
|---|---|---|---|---|---|---|---|
| Flag | Allele B | AA | AB | BB | Model | p-Value | Ratio |
| 0 | A | 177 | 486 | 328 | Trend | 0.005274 | 1.198 |
| 1 | A | 136 | 469 | 369 | | | |

[0573] Table 192A indicates SNPs found to be in strong linkage disequilibrium with rs6574840. To generate this list, correlation coefficients (r²) were calculated between the index SNP and all neighboring SNPs cited in the June 2006 HapMap data set release. An r² cut off of 0.50 was selected for inclusion as evidence for strong genetic linkage, i.e., a “strong linkage disequilibrium.

TABLE 192A
Linked SNPs

| SNP | r² | Position on chr14 | SEQ ID NO |
|---|---|---|---|
| rs12435750 | 0.844 | 85206930 | 4714 |
| rs2638806 | 0.844 | 85209412 | 4715 |
| rs2753634 | 0.841 | 85213915 | 4716 |
| rs2753632 | 0.836 | 85214634 | 4717 |
| rs12588930 | 0.844 | 85215088 | 4718 |
| rs12887050 | 0.844 | 85216336 | 4719 |
| rs12888694 | 0.844 | 85216501 | 4720 |
| rs11848342 | 0.841 | 85218011 | 4721 |
| rs11159719 | 0.844 | 85219650 | 4722 |
| rs12879794 | 0.836 | 85220146 | 4723 |
| rs12434801 | 0.844 | 85220562 | 4724 |
| rs7492614 | 0.841 | 85220666 | 4725 |
| rs4608268 | 0.844 | 85220676 | 4726 |
| rs7493141 | 0.844 | 85221016 | 4727 |
| rs12885876 | 0.838 | 85221418 | 4728 |
| rs12885781 | 0.812 | 85221577 | 4729 |
| rs12590047 | 0.844 | 85221813 | 4730 |
| rs11159722 | 0.831 | 85222179 | 4731 |
| rs11159723 | 0.841 | 85223990 | 4732 |
| rs12147060 | 0.844 | 85224180 | 4733 |
| rs2038496 | 0.841 | 85224501 | 4734 |
| rs2038495 | 0.838 | 85224735 | 4735 |
| rs11848204 | 0.831 | 85226794 | 4736 |
| rs1289351 | 0.844 | 85231886 | 4737 |
| rs6574840 | — | 85233147 | 4738 |
| rs7150809 | 1.0 | 85233774 | 4739 |
| rs7152193 | 1.0 | 85234265 | 4740 |
| rs6574842 | 1.0 | 85234635 | 4741 |
| rs11628600 | 0.643 | 85235063 | 4742 |
| rs10150404 | 1.0 | 85235438 | 4743 |
| rs11625354 | 0.967 | 85240904 | 4744 |
| rs11846631 | 0.967 | 85243452 | 4745 |
| rs10145617 | 0.967 | 85246148 | 4746 |
| rs1742180 | 0.807 | 85246661 | 4747 |
| rs7155200 | 0.932 | 85246923 | 4748 |
| rs8018359 | 0.932 | 85247699 | 4749 |
| rs761974 | 0.81 | 85255860 | 4750 |

### Example 193

[0574] For individuals with colorectal cancer, the distribution of polymorphic alleles at position 51245627 of chromosome 15 was different from those without colorectal cancer (Table 193). The dominant test for risk associated with carrying the C allele had an empirical p-value based on permutation analysis of 0.000158, and the corresponding dominant odds ratio is 1.739 (Table 193). These data further suggest that this marker is associated with colorectal cancer risk and that the C allele at position 51245627 of chromosome 15 is associated with an increased risk of developing colorectal cancer.

TABLE 193

| | |
|---|---|
| rs no. | 10518710 |
| Chromosome; Position | 15; 51245627 |
| Gene Name | unknown |
| Genotype; Phenotype | n = C; increased risk |
| Hardy-Weinberg | 1 |

| Case | | | | | | | Odds |
|---|---|---|---|---|---|---|---|
| Flag | Allele B | AA | AB | BB | Model | p-Value | Ratio |
| 0 | C | 769 | 80 | 2 | Dominant | 0.000158 | 1.739 |
| 1 | C | 739 | 136 | 1 | | | |

[0575] Table 193A indicates SNPs found to be in strong linkage disequilibrium with rs10518710. To generate this list, correlation coefficients (r²) were calculated between the index SNP and all neighboring SNPs cited in the June 2006 HapMap data set release. An r² cut off of 0.50 was selected for inclusion as evidence for strong genetic linkage, i.e., a “strong linkage disequilibrium.

TABLE 193A
Linked SNPs

| SNP | r² | Position on chr15 | SEQ ID NO |
|---|---|---|---|
| rs17545046 | 0.715 | 51189302 | 4751 |
| rs8039795 | 0.582 | 51190324 | 4752 |
| rs11858823 | 0.748 | 51190404 | 4753 |
| rs690535 | 0.777 | 51194001 | 4754 |
| rs689991 | 0.856 | 51195489 | 4755 |
| rs584758 | 0.769 | 51195545 | 4756 |
| rs12442241 | 0.808 | 51195790 | 4757 |
| rs12440597 | 0.685 | 51197700 | 4758 |
| rs17627721 | 0.928 | 51214080 | 4759 |
| rs17545312 | 0.928 | 51214304 | 4760 |
| rs576633 | 0.656 | 51214796 | 4761 |
| rs16965586 | 0.636 | 51225339 | 4762 |
| rs16965587 | 0.849 | 51225655 | 4763 |
| rs7181898 | 0.617 | 51234395 | 4764 |
| rs11070957 | 0.928 | 51238288 | 4765 |
| rs10518706 | 0.928 | 51240801 | 4766 |
| rs10518708 | 0.582 | 51243958 | 4767 |
| rs10518710 | — | 51245627 | 4768 |
| rs519957 | 0.768 | 51260182 | 4769 |
| rs690133 | 0.769 | 51268982 | 4770 |
| rs1912650 | 0.712 | 51270770 | 4771 |
| rs17628175 | 0.852 | 51272844 | 4772 |
| rs538505 | 0.769 | 51275052 | 4773 |
| rs690050 | 0.709 | 51279348 | 4774 |
| rs690013 | 0.555 | 51279653 | 4775 |
| rs578363 | 0.555 | 51279938 | 4776 |
| rs473249 | 0.555 | 51280500 | 4777 |
| rs8031971 | 0.555 | 51280606 | 4778 |
| rs689856 | 0.529 | 51285677 | 4779 |
| rs17545973 | 0.79 | 51288845 | 4780 |
| rs1508023 | 0.529 | 51294397 | 4781 |
| rs7168646 | 0.8 | 51305758 | 4782 |
| rs17628504 | 0.687 | 51322236 | 4783 |

### Example 194

[0576] For individuals with colorectal cancer, the distribution of polymorphic alleles at position 69387794 of chromosome 15 was different from those without colorectal cancer (Table 194). The dominant test for risk associated with carrying the T allele had an empirical p-value based on permutation analysis of 0.00157, and the corresponding dominant odds ratio is 1.332 (Table 194). These data further suggest that this marker is associated with colorectal cancer risk and that the T allele at position 69387794 of chromosome 15 is associated with an increased risk of developing colorectal cancer.

TABLE 194

| | rs no. | | | | 7174619 | | |
|---|---|---|---|---|---|---|---|
| | Chromosome; Position | | | | 15; 69387794 | | |
| | Gene Name | | | | unknown | | |
| | Genotype; Phenotype | | | | n = T; increased risk | | |
| | Hardy-Weinberg | | | | 0.30372 | | |
| Case | | | | | | | Odds |
| Flag | Allele B | AA | AB | BB | Model | p-Value | Ratio |
| 0 | T | 630 | 329 | 52 | Dominant | 0.00157 | 1.332 |
| 1 | T | 555 | 389 | 58 | | | |

[0577] Table 194A indicates SNPs found to be in strong linkage disequilibrium with rs7174619. To generate this list, correlation coefficients (r²) were calculated between the index SNP and all neighboring SNPs cited in the June 2006 HapMap data set release. An r² cut off of 0.50 was selected for inclusion as evidence for strong genetic linkage, i.e., a “strong linkage disequilibrium.

TABLE 194A
Linked SNPs

| SNP | r² | Position on chr15 | SEQ ID NO |
|---|---|---|---|
| rs3803494 | 0.798 | 69382722 | 4784 |
| rs11633212 | 0.52 | 69387305 | 4785 |
| rs7169622 | 0.944 | 69387523 | 4786 |
| rs7174619 | — | 69387794 | 4787 |
| rs10851838 | 0.52 | 69391304 | 4788 |
| rs11856837 | 0.642 | 69408616 | 4789 |
| rs16955436 | 0.631 | 69408932 | 4790 |
| rs11858540 | 0.642 | 69409840 | 4791 |
| rs1441361 | 0.642 | 69412176 | 4792 |
| rs1473608 | 0.642 | 69415310 | 4793 |
| rs1473607 | 0.595 | 69415401 | 4794 |
| rs1031029 | 0.601 | 69415913 | 4795 |
| rs11072274 | 0.512 | 69431235 | 4796 |

### Example 195

[0578] For individuals with colorectal cancer, the distribution of polymorphic alleles at position 76871863 of chromosome 15, found within the ADAMTS7 gene, was different from those without colorectal cancer (Table 195). The dominant test for risk associated with carrying the C allele had an empirical p-value based on permutation analysis of 0.001537, and the corresponding dominant odds ratio is 1.843 (Table 195). These data further suggest that this marker, located within the ADAMTS7 gene, is associated with colorectal cancer risk and that the C allele at position 76871863 of chromosome 15 is associated with an increased risk of developing colorectal cancer.

TABLE 195

| | |
|---|---|
| rs no. | 1564499 |
| Chromosome; Position | 15; 76871863 |
| Gene Name | ADAMTS7 |
| SEQ ID NO; Position | 5686; 18966 |
| Genotype; Phenotype | n = C; increased risk |
| Hardy-Weinberg | 0.33185 |

| Case | | | | | | | Odds |
|---|---|---|---|---|---|---|---|
| Flag | Allele B | AA | AB | BB | Model | p-Value | Ratio |
| 0 | C | 77 | 379 | 545 | Dominant | 0.001537 | 1.843 |
| 1 | C | 43 | 376 | 575 | | | |

[0579] Table 195A indicates SNPs found to be in strong linkage disequilibrium with rs1564499. To generate this list, correlation coefficients (r²) were calculated between the index SNP and all neighboring SNPs cited in the June 2006 HapMap data set release. An r² cut off of 0.50 was selected for inclusion as evidence for strong genetic linkage, i.e., a “strong linkage disequilibrium.

TABLE 195A
Linked SNPs

| SNP | r² | Position on chr15 | SEQ ID NO |
|---|---|---|---|
| rs1021070 | 0.512 | 76733918 | 4797 |
| rs12910237 | 0.577 | 76743393 | 4798 |
| rs922691 | 0.503 | 76751049 | 4799 |
| rs12905641 | 0.579 | 76751417 | 4800 |
| rs8038920 | 0.558 | 76761600 | 4801 |
| rs1964562 | 0.502 | 76833546 | 4802 |
| rs1994017 | 1.0 | 76867361 | 4803 |
| rs12905740 | 1.0 | 76869419 | 4804 |
| rs1564499 | — | 76871863 | 4805 |
| rs2904228 | 0.958 | 76873154 | 4806 |
| rs3743057 | 1.0 | 76876062 | 4807 |
| rs8038189 | 0.959 | 76886081 | 4808 |
| rs922693 | 0.958 | 76886593 | 4809 |
| rs7182809 | 0.682 | 76892161 | 4810 |
| rs1383636 | 0.92 | 76893275 | 4811 |
| rs8029659 | 0.511 | 76954658 | 4812 |
| rs17243470 | 0.511 | 76959821 | 4813 |
| rs17832351 | 0.511 | 76960060 | 4814 |

### Example 196

[0580] For individuals with colorectal cancer, the distribution of polymorphic alleles at position 93232312 of chromosome 15 was different from those without colorectal cancer (Table 196). The trend test for risk associated with carrying the C allele had an empirical p-value of 0.00053 based on permutation analysis, and the corresponding Mantel-Haenszel odds ratio for trend is 1.295 (Table 196). These data further suggest that this marker is associated with colorectal cancer risk and that the C allele at position 93232312 of chromosome 15 is associated with an increased risk of developing colorectal cancer.

TABLE 196

| | |
|---|---|
| rs no. | 6496061 |
| Chromosome; Position | 15; 93232312 |
| Gene Name | unknown |
| Genotype; Phenotype | n = C; increased risk |
| Hardy-Weinberg | 0.93411 |

| Case | | | | | | | Odds |
|---|---|---|---|---|---|---|---|
| Flag | Allele B | AA | AB | BB | Model | p-Value | Ratio |
| 0 | C | 65 | 392 | 600 | Trend | 0.00053 | 1.295 |
| 1 | C | 37 | 310 | 606 | | | |

[0581] Table 196A indicates SNPs found to be in strong linkage disequilibrium with rs6496061. To generate this list, correlation coefficients (r²) were calculated between the index SNP and all neighboring SNPs cited in the June 2006 HapMap data set release. An r² cut off of 0.50 was selected for inclusion as evidence for strong genetic linkage, i.e., a “strong linkage disequilibrium.

TABLE 196A
Linked SNPs

| SNP | r² | Position on chr15 | SEQ ID NO |
|---|---|---|---|
| rs6496053 | 0.795 | 93195638 | 4815 |
| rs12439498 | 0.681 | 93202040 | 4816 |
| rs4984579 | 1.0 | 93217814 | 4817 |
| rs4489958 | 1.0 | 93221398 | 4818 |
| rs6416529 | 1.0 | 93222123 | 4819 |
| rs4247091 | 0.919 | 93226669 | 4820 |
| rs6496059 | 1.0 | 93229804 | 4821 |
| rs6496060 | 1.0 | 93231817 | 4822 |
| rs6496061 | — | 93232312 | 4823 |
| rs4372639 | 1.0 | 93233505 | 4824 |
| rs766233 | 0.742 | 93238457 | 4825 |
| rs12440481 | 1.0 | 93261273 | 4826 |
| rs4306453 | 0.947 | 93263139 | 4827 |
| rs4247087 | 1.0 | 93264699 | 4828 |
| rs1562628 | 1.0 | 93265029 | 4829 |
| rs6496067 | 1.0 | 93266435 | 4830 |
| rs6496068 | 1.0 | 93266453 | 4831 |
| rs11630913 | 1.0 | 93267466 | 4832 |
| rs4283178 | 0.649 | 93274496 | 4833 |
| rs9920787 | 0.649 | 93277598 | 4834 |
| rs6416531 | 0.569 | 93279847 | 4835 |

### Example 197

[0582] For individuals with colorectal cancer, the distribution of polymorphic alleles at position 97473570 of chromosome 15, found within the DMN gene, was different from those without colorectal cancer (Table 197). The dominant test for risk associated with carrying the T allele had an empirical p-value based on permutation analysis of 2e-06, and the corresponding dominant odds ratio is 1.564 (Table 197). These data further suggest that this marker, located within the DMN gene, is associated with colorectal cancer risk and that the T allele at position 97473570 of chromosome 15 is associated with an increased risk of developing colorectal cancer.

TABLE 197

| | rs no. | | | | 1965866 | | |
|---|---|---|---|---|---|---|---|
| | Chromosome; Position | | | | 15; 97473570 | | |
| | Gene Name | | | | DMN | | |
| | SEQ ID NO; Position | | | | 5687; 10762 | | |
| | Genotype; Phenotype | | | | n = T; increased risk | | |
| | Hardy-Weinberg | | | | 0.02564 | | |
| Case | | | | | | | Odds |
| Flag | Allele B | AA | AB | BB | Model | p-Value | Ratio |
| 0 | T | 382 | 450 | 178 | Dominant | 0.000002 | 1.564 |
| 1 | T | 280 | 510 | 210 | | | |

[0583] Table 197A indicates SNPs found to be in strong linkage disequilibrium with rs1965866. To generate this list, correlation coefficients (r²) were calculated between the index SNP and all neighboring SNPs cited in the June 2006 HapMap data set release. An r² cut off of 0.50 was selected for inclusion as evidence for strong genetic linkage, i.e., a “strong linkage disequilibrium.

TABLE 197A
Linked SNPs

| SNP | r² | Position on chr15 | SEQ ID NO |
|---|---|---|---|
| rs2305446 | 0.761 | 97471189 | 4836 |
| rs12911794 | 0.65 | 97472403 | 4837 |
| rs1965866 | — | 97473570 | 4838 |
| rs8032817 | 1.0 | 97475137 | 4839 |
| rs8038845 | 0.861 | 97475852 | 4840 |
| rs896700 | 0.765 | 97477041 | 4841 |
| rs7162579 | 0.89 | 97480753 | 4842 |
| rs8029732 | 0.66 | 97481697 | 4843 |
| rs1810091 | 0.87 | 97482559 | 4844 |
| rs7164548 | 0.51 | 97483852 | 4845 |
| rs2242076 | 0.87 | 97483971 | 4846 |
| rs12324825 | 0.696 | 97500514 | 4847 |
| rs12591477 | 0.7 | 97505717 | 4848 |
| rs12594336 | 0.665 | 97510252 | 4849 |
| rs8023490 | 0.598 | 97518402 | 4850 |
| rs3803472 | 0.637 | 97519380 | 4851 |
| rs8038002 | 0.615 | 97524820 | 4852 |
| rs8038392 | 0.603 | 97527318 | 4853 |
| rs1530920 | 0.628 | 97527904 | 4854 |
| rs12595385 | 0.637 | 97530400 | 4855 |
| rs8026991 | 0.628 | 97537568 | 4856 |
| rs8032154 | 0.605 | 97538182 | 4857 |
| rs9672800 | 0.609 | 97556377 | 4858 |
| rs1377267 | 0.62 | 97557412 | 4859 |
| rs7174431 | 0.513 | 97560036 | 4860 |

### Example 198

[0584] For individuals with colorectal cancer, the distribution of polymorphic alleles at position 98637371 of chromosome 15, found within the ADAMTS17 gene, was different from those without colorectal cancer (Table 198). The trend test for risk associated with carrying the G allele had an empirical p-value of 0.002684 based on permutation analysis, and the corresponding Mantel-Haenszel odds ratio for trend is 1.236 (Table 198). These data further suggest that this marker, located within the ADAMTS17 gene, is associated with colorectal cancer risk and that the G allele at position 98637371 of chromosome 15 is associated with an increased risk of developing colorectal cancer.

TABLE 198

| | |
|---|---|
| rs no. | 11247180 |
| Chromosome; Position | 15; 98637371 |
| Gene Name | ADAMTS17 |
| SEQ ID NO; Position | 5688; 62280 |
| Genotype; Phenotype | n = G; increased risk |
| Hardy-Weinberg | 0.13476 |

| Case | | | | | | | Odds |
|---|---|---|---|---|---|---|---|
| Flag | Allele B | AA | AB | BB | Model | p-Value | Ratio |
| 0 | G | 89 | 372 | 489 | Trend | 0.002684 | 1.236 |
| 1 | G | 61 | 336 | 536 | | | |

[0585] Table 198A indicates SNPs found to be in strong linkage disequilibrium with rs11247180. To generate this list, correlation coefficients (r²) were calculated between the index SNP and all neighboring SNPs cited in the June 2006 HapMap data set release. An r² cut off of 0.50 was selected for inclusion as evidence for strong genetic linkage, i.e., a “strong linkage disequilibrium.

TABLE 198A
Linked SNPs

| SNP | r² | Position on chr15 | SEQ ID NO |
|---|---|---|---|
| rs4567683 | 0.537 | 98596360 | 4861 |
| rs4246310 | 0.576 | 98604209 | 4862 |
| rs4246312 | 0.536 | 98605328 | 4863 |
| rs7171129 | 0.541 | 98610870 | 4864 |
| rs4471661 | 0.527 | 98612143 | 4865 |
| rs4074098 | 0.511 | 98612927 | 4866 |
| rs10902566 | 0.585 | 98622005 | 4867 |
| rs4965616 | 0.665 | 98623294 | 4868 |
| rs12148659 | 0.774 | 98623847 | 4869 |
| rs7168602 | 0.848 | 98623951 | 4870 |
| rs4965299 | 0.815 | 98624069 | 4871 |
| rs4965617 | 0.512 | 98624169 | 4872 |
| rs11634485 | 0.662 | 98624867 | 4873 |
| rs4433794 | 0.626 | 98625471 | 4874 |
| rs7403309 | 1.0 | 98625685 | 4875 |
| rs7171164 | 0.635 | 98626523 | 4876 |
| rs4965302 | 0.66 | 98627275 | 4877 |
| rs7184029 | 1.0 | 98627413 | 4878 |
| rs5011255 | 0.594 | 98627999 | 4879 |
| rs5011256 | 0.597 | 98628117 | 4880 |
| rs12901824 | 1.0 | 98628565 | 4881 |
| rs11247180 | — | 98637371 | 4882 |
| rs4965622 | 0.618 | 98637952 | 4883 |
| rs4965623 | 0.618 | 98638227 | 4884 |
| rs2120030 | 1.0 | 98655850 | 4885 |

### Example 199

[0586] For individuals with colorectal cancer, the distribution of polymorphic alleles at position 99771450 of chromosome 15, found within the PCSK6 gene, was different from those without colorectal cancer (Table 199). The recessive test for risk associated with carrying the C allele had an empirical p-value of 0.010102 based on permutation analysis, and the corresponding recessive odds ratio is 1.298 (Table 199). These data further suggest that this marker, located within the PCSK6 gene, is associated with colorectal cancer risk and that the C allele at position 99771450 of chromosome 15 is associated with an increased risk of developing colorectal cancer.

TABLE 199

| | |
|---|---|
| rs no. | 1495273 |
| Chromosome; Position | 15; 99771450 |
| Gene Name | PCSK6 |
| SEQ ID NO; Position | 5689; 76261 |
| Genotype; Phenotype | n = C; increased risk |
| Hardy-Weinberg | 0.20439 |

| Case | | | | | | | Odds |
|---|---|---|---|---|---|---|---|
| Flag | Allele B | AA | AB | BB | Model | p-Value | Ratio |
| 0 | C | 233 | 518 | 243 | Recessive | 0.010102 | 1.298 |
| 1 | C | 221 | 474 | 292 | | | |

[0587] Table 199A indicates SNPs found to be in strong linkage disequilibrium with rs1495273. To generate this list, correlation coefficients (r²) were calculated between the index SNP and all neighboring SNPs cited in the June 2006 HapMap data set release. An r² cut off of 0.50 was selected for inclusion as evidence for strong genetic linkage, i.e., a “strong linkage disequilibrium.

TABLE 199A
Linked SNPs

| SNP | r² | Position on chr15 | SEQ ID NO |
|---|---|---|---|
| rs1495273 | — | 99771450 | 4886 |
| rs1495271 | 0.784 | 99780246 | 4887 |

### Example 200

[0588] For individuals with colorectal cancer, the distribution of polymorphic alleles at position 1803521 of chromosome 16, found within the HAGH gene, was different from those without colorectal cancer (Table 200). The dominant test for risk associated with carrying the T allele had an empirical p-value based on permutation analysis of 0.001725, and the corresponding dominant odds ratio is 2.111 (Table 200). These data further suggest that this marker, located within the HAGH gene, is associated with colorectal cancer risk and that the T allele at position 1803521 of chromosome 16 is associated with an increased risk of developing colorectal cancer.

TABLE 200

| | rs no. | | | | 2575357 | | |
|---|---|---|---|---|---|---|---|
| | Chromosome; Position | | | | 16; 1803521 | | |
| | Gene Name | | | | HAGH | | |
| | SEQ ID NO; Position | | | | 5690; 13643 | | |
| | Genotype; Phenotype | | | | n = T; increased risk | | |
| | Hardy-Weinberg | | | | 0.37415 | | |
| Case | | | | | | | Odds |
| Flag | Allele B | AA | AB | BB | Model | p-Value | Ratio |
| 0 | T | 57 | 355 | 643 | Dominant | 0.001725 | 2.111 |
| 1 | T | 25 | 335 | 589 | | | |

[0589] Table 200A indicates SNPs found to be in strong linkage disequilibrium with rs2575357. To generate this list, correlation coefficients (r²) were calculated between the index SNP and all neighboring SNPs cited in the June 2006 HapMap data set release. An r² cut off of 0.50 was selected for inclusion as evidence for strong genetic linkage, i.e., a “strong linkage disequilibrium.

TABLE 200A
Linked SNPs

| SNP | r² | Position on chr16 | SEQ ID NO |
|---|---|---|---|
| rs2745189 | 0.515 | 1791149 | 4888 |
| rs1742450 | 0.879 | 1794541 | 4889 |
| rs1742453 | 0.836 | 1794649 | 4890 |
| rs8047464 | 0.702 | 1796441 | 4891 |
| rs1742430 | 0.876 | 1798950 | 4892 |
| rs1628812 | 0.879 | 1799433 | 4893 |
| rs1742442 | 0.793 | 1799851 | 4894 |
| rs8046750 | 0.598 | 1800806 | 4895 |
| rs4786635 | 0.518 | 1802725 | 4896 |
| rs2575357 | — | 1803521 | 4897 |
| rs12597098 | 0.537 | 1805095 | 4898 |
| rs12597803 | 0.577 | 1806272 | 4899 |
| rs12596094 | 0.589 | 1806363 | 4900 |
| rs2076451 | 1.0 | 1806665 | 4901 |
| rs344361 | 0.616 | 1808555 | 4902 |
| rs2268671 | 1.0 | 1811231 | 4903 |
| rs2268670 | 0.6 | 1811330 | 4904 |
| rs3743853 | 0.6 | 1817559 | 4905 |
| rs9652776 | 0.512 | 1826234 | 4906 |
| rs9652786 | 0.589 | 1826523 | 4907 |
| rs9652777 | 0.589 | 1826610 | 4908 |
| rs12325141 | 0.588 | 1826967 | 4909 |
| rs12325218 | 0.54 | 1826982 | 4910 |
| rs11643835 | 0.562 | 1827575 | 4911 |
| rs3813760 | 0.589 | 1829646 | 4912 |
| rs3848346 | 0.6 | 1829822 | 4913 |
| rs3848348 | 0.6 | 1830057 | 4914 |
| rs9806787 | 0.545 | 1833344 | 4915 |
| rs11248898 | 0.502 | 1833810 | 4916 |
| rs9806945 | 0.599 | 1834962 | 4917 |
| rs11640407 | 0.6 | 1837495 | 4918 |
| rs11642885 | 0.6 | 1838377 | 4919 |
| rs2492886 | 0.548 | 1839951 | 4920 |
| rs2575359 | 0.6 | 1840036 | 4921 |
| rs1657116 | 0.599 | 1841479 | 4922 |
| rs1742419 | 0.6 | 1841810 | 4923 |
| rs1625279 | 0.6 | 1841845 | 4924 |
| rs1625393 | 0.6 | 1841894 | 4925 |
| rs1617255 | 0.6 | 1842890 | 4926 |
| rs1657117 | 0.6 | 1843652 | 4927 |
| rs1742421 | 0.589 | 1843935 | 4928 |
| rs1742422 | 0.576 | 1843939 | 4929 |
| rs1742423 | 0.6 | 1844323 | 4930 |
| rs11643972 | 0.6 | 1844546 | 4931 |
| rs11643973 | 0.573 | 1844557 | 4932 |
| rs7199384 | 0.6 | 1844588 | 4933 |
| rs1657118 | 0.6 | 1844641 | 4934 |
| rs1742426 | 0.6 | 1844812 | 4935 |
| rs1742428 | 0.586 | 1844960 | 4936 |
| rs1742429 | 0.6 | 1845007 | 4937 |
| rs2754186 | 0.6 | 1845764 | 4938 |
| rs1742431 | 0.6 | 1845875 | 4939 |
| rs1657120 | 0.552 | 1847224 | 4940 |
| rs1742432 | 0.6 | 1847303 | 4941 |
| rs428123 | 0.6 | 1847653 | 4942 |
| rs408286 | 0.564 | 1847701 | 4943 |
| rs411193 | 0.597 | 1847947 | 4944 |
| rs410465 | 0.6 | 1848219 | 4945 |
| rs448374 | 0.589 | 1848257 | 4946 |
| rs1657121 | 0.6 | 1848340 | 4947 |
| rs1657122 | 0.6 | 1848501 | 4948 |
| rs449530 | 0.6 | 1848669 | 4949 |
| rs420681 | 0.6 | 1848750 | 4950 |
| rs448961 | 0.6 | 1848888 | 4951 |
| rs2754187 | 0.6 | 1849108 | 4952 |
| rs427732 | 0.568 | 1849841 | 4953 |
| rs433268 | 0.571 | 1850374 | 4954 |
| rs2492881 | 0.564 | 1854890 | 4955 |
| rs378201 | 0.6 | 1855035 | 4956 |
| rs404413 | 0.57 | 1855056 | 4957 |
| rs11640914 | 0.6 | 1855459 | 4958 |
| rs453494 | 0.6 | 1856104 | 4959 |
| rs404772 | 0.599 | 1857175 | 4960 |
| rs9935266 | 0.6 | 1859452 | 4961 |
| rs447782 | 0.6 | 1860317 | 4962 |
| rs1657094 | 0.6 | 1860630 | 4963 |
| rs1657095 | 0.6 | 1860679 | 4964 |
| rs2917523 | 0.6 | 1860741 | 4965 |
| rs2974856 | 0.588 | 1860758 | 4966 |
| rs2982235 | 0.6 | 1860793 | 4967 |
| rs173164 | 0.529 | 1865280 | 4968 |

### Example 201

[0590] For individuals with colorectal cancer, the distribution of polymorphic alleles at position 5809618 of chromosome 16 was different from those without colorectal cancer (Table 201). The trend test for risk associated with carrying the C allele had an empirical p-value of 0.015641 based on permutation analysis, and the corresponding Mantel-Haenszel odds ratio for trend is 1.177 (Table 201). These data further suggest that this marker is associated with colorectal cancer risk and that the C allele at position 5809618 of chromosome 16 is associated with an increased risk of developing colorectal cancer.

TABLE 201

| | |
|---|---|
| rs no. | 7200468 |
| Chromosome; Position | 16; 5809618 |
| Gene Name | unknown |
| Genotype; Phenotype | n = C; increased risk |
| Hardy-Weinberg | 0.88623 |

| Case | | | | | | | Odds |
|---|---|---|---|---|---|---|---|
| Flag | Allele B | AA | AB | BB | Model | p-Value | Ratio |
| 0 | C | 106 | 447 | 458 | Trend | 0.015641 | 1.177 |
| 1 | C | 81 | 421 | 500 | | | |

[0591] Table 201A indicates SNPs found to be in strong linkage disequilibrium with rs7200468. To generate this list, correlation coefficients (r²) were calculated between the index SNP and all neighboring SNPs cited in the June 2006 HapMap data set release. An r² cut off of 0.50 was selected for inclusion as evidence for strong genetic linkage, i.e., a “strong linkage disequilibrium.

TABLE 201A
Linked SNPs

| SNP | r² | Position on chr16 | SEQ ID NO |
|---|---|---|---|
| rs1865818 | 0.702 | 5796152 | 4969 |
| rs1865819 | 0.696 | 5796463 | 4970 |
| rs12925737 | 0.699 | 5796692 | 4971 |
| rs1436397 | 0.664 | 5796802 | 4972 |
| rs1436398 | 0.702 | 5796895 | 4973 |
| rs6500724 | 0.748 | 5798935 | 4974 |
| rs9938377 | 0.691 | 5801007 | 4975 |
| rs2342740 | 0.883 | 5801769 | 4976 |
| rs2342741 | 0.844 | 5801792 | 4977 |
| rs7342717 | 0.851 | 5802165 | 4978 |
| rs12325484 | 0.875 | 5802892 | 4979 |
| rs7192464 | 0.778 | 5803453 | 4980 |
| rs7198171 | 0.811 | 5803764 | 4981 |
| rs12929047 | 0.906 | 5804132 | 4982 |
| rs12920834 | 0.961 | 5805957 | 4983 |
| rs7193758 | 1.0 | 5806056 | 4984 |
| rs7187057 | 1.0 | 5806139 | 4985 |
| rs7189118 | 1.0 | 5806149 | 4986 |
| rs1865820 | 1.0 | 5806269 | 4987 |
| rs1865821 | 1.0 | 5806359 | 4988 |
| rs7189684 | 1.0 | 5806460 | 4989 |
| rs7195375 | 1.0 | 5807386 | 4990 |
| rs11648254 | 1.0 | 5807689 | 4991 |
| rs6500727 | 0.961 | 5808267 | 4992 |
| rs2342743 | 1.0 | 5808466 | 4993 |
| rs2342745 | 1.0 | 5808524 | 4994 |
| rs2342747 | 1.0 | 5808701 | 4995 |
| rs2342748 | 1.0 | 5808730 | 4996 |
| rs1550136 | 1.0 | 5809059 | 4997 |
| rs7200468 | — | 5809618 | 4998 |
| rs7201911 | 0.89 | 5809651 | 4999 |
| rs1550137 | 1.0 | 5810450 | 5000 |
| rs2343252 | 1.0 | 5812560 | 5001 |
| rs9930544 | 1.0 | 5813426 | 5002 |
| rs4296263 | 0.961 | 5819886 | 5003 |
| rs2118014 | 0.524 | 5828787 | 5004 |
| rs7200548 | 0.509 | 5830572 | 5005 |

### Example 202

[0592] For individuals with colorectal cancer, the distribution of polymorphic alleles at position 52441905 of chromosome 16, found within the FTO gene, was different from those without colorectal cancer (Table 202). The trend test for risk associated with carrying the G allele had an empirical p-value of 0.000866 based on permutation analysis, and the corresponding Mantel-Haenszel odds ratio for trend is 1.306 (Table 202). These data further suggest that this marker, located within the FTO gene, is associated with colorectal cancer risk and that the G allele at position 52441905 of chromosome 16 is associated with an increased risk of developing colorectal cancer.

TABLE 202

| | |
|---|---|
| rs no. | 10521306 |
| Chromosome; Position | 16; 52441905 |
| Gene Name | FTO |
| SEQ ID NO; Position | 5691; 146337 |
| Genotype; Phenotype | n = G; increased risk |
| Hardy-Weinberg | 0.55400 |

| Case | | | | | | | Odds |
|---|---|---|---|---|---|---|---|
| Flag | Allele B | AA | AB | BB | Model | p-Value | Ratio |
| 0 | G | 635 | 250 | 28 | Trend | 0.000866 | 1.306 |
| 1 | G | 592 | 297 | 50 | | | |

[0593] Table 202A indicates SNPs found to be in strong linkage disequilibrium with rs10521306. To generate this list, correlation coefficients (r²) were calculated between the index SNP and all neighboring SNPs cited in the June 2006 HapMap data set release. An r² cut off of 0.50 was selected for inclusion as evidence for strong genetic linkage, i.e., a “strong linkage disequilibrium.

TABLE 202A
Linked SNPs

| SNP | r² | Position on chr16 | SEQ ID NO |
|---|---|---|---|
| rs8061228 | 1.0 | 52439872 | 5006 |
| rs12448529 | 0.928 | 52440158 | 5007 |
| rs11075999 | 0.929 | 52440360 | 5008 |
| rs1344500 | 0.928 | 52440534 | 5009 |
| rs2111114 | 0.929 | 52440953 | 5010 |
| rs10521306 | — | 52441905 | 5011 |
| rs13337591 | 0.564 | 52444943 | 5012 |

### Example 203

[0594] For individuals with colorectal cancer, the distribution of polymorphic alleles at position 67331784 of chromosome 16, found within the CDH1 gene, was different from those without colorectal cancer (Table 203). The recessive test for risk associated with carrying the T allele had an empirical p-value of 0.003602 based on permutation analysis, and the corresponding recessive odds ratio is 1.297 (Table 203). These data further suggest that this marker, located within the CDH1 gene, is associated with colorectal cancer risk and that the T allele at position 67331784 of chromosome 16 is associated with an increased risk of developing colorectal cancer.

TABLE 203

| | rs no. | | | | 11865026 | | |
|---|---|---|---|---|---|---|---|
| | Chromosome; Position | | | | 16; 67331784 | | |
| | Gene Name | | | | CDH1 | | |
| | SEQ ID NO; Position | | | | 5692; 3089 | | |
| | Genotype; Phenotype | | | | n = T; increased risk | | |
| | Hardy-Weinberg | | | | 0.09970 | | |
| Case | | | | | | | Odds |
| Flag | Allele B | AA | AB | BB | Model | p-Value | Ratio |
| 0 | T | 80 | 448 | 482 | Recessive | 0.003602 | 1.297 |
| 1 | T | 68 | 389 | 541 | | | |

[0595] Table 203A indicates SNPs found to be in strong linkage disequilibrium with rs11865026. To generate this list, correlation coefficients (r²) were calculated between the index SNP and all neighboring SNPs cited in the June 2006 HapMap data set release. An r² cut off of 0.50 was selected for inclusion as evidence for strong genetic linkage, i.e., a “strong linkage disequilibrium.

TABLE 203A
Linked SNPs

| SNP | r² | Position on chr16 | SEQ ID NO |
|---|---|---|---|
| rs7196626 | 0.673 | 67246920 | 5013 |
| rs1111720 | 0.553 | 67256387 | 5014 |
| rs3114398 | 0.802 | 67264434 | 5015 |
| rs3118228 | 0.85 | 67268238 | 5016 |
| rs2296409 | 0.587 | 67271231 | 5017 |
| rs2296408 | 0.515 | 67271324 | 5018 |
| rs1886697 | 0.547 | 67273680 | 5019 |
| rs2281850 | 0.555 | 67276251 | 5020 |
| rs2296406 | 0.547 | 67278841 | 5021 |
| rs2274240 | 0.555 | 67282987 | 5022 |
| rs2274239 | 0.546 | 67283284 | 5023 |
| rs6499193 | 0.55 | 67284570 | 5024 |
| rs7201437 | 0.555 | 67284631 | 5025 |
| rs3785133 | 0.555 | 67286112 | 5026 |
| rs3785134 | 0.555 | 67286439 | 5027 |
| rs3785135 | 0.555 | 67286477 | 5028 |
| rs8060790 | 0.555 | 67286613 | 5029 |
| rs2296404 | 0.517 | 67287026 | 5030 |
| rs11075696 | 0.956 | 67288866 | 5031 |
| rs3118235 | 0.956 | 67290478 | 5032 |
| rs2902323 | 0.956 | 67293793 | 5033 |
| rs6499194 | 0.534 | 67301601 | 5034 |
| rs10852450 | 0.91 | 67307030 | 5035 |
| rs8059194 | 0.534 | 67307164 | 5036 |
| rs4783565 | 0.817 | 67307691 | 5037 |
| rs4500718 | 0.955 | 67311813 | 5038 |
| rs16260 | 0.957 | 67328535 | 5039 |
| rs11865026 | — | 67331784 | 5040 |
| rs7203337 | 0.536 | 67332301 | 5041 |
| rs7200690 | 1.0 | 67335958 | 5042 |
| rs1078621 | 0.534 | 67336497 | 5043 |
| rs12185157 | 0.597 | 67342088 | 5044 |
| rs17772363 | 1.0 | 67346410 | 5045 |
| rs11642413 | 0.529 | 67347895 | 5046 |
| rs13333528 | 0.955 | 67348003 | 5047 |
| rs9646284 | 0.948 | 67348807 | 5048 |
| rs9928847 | 1.0 | 67355394 | 5049 |
| rs13334471 | 1.0 | 67357953 | 5050 |
| rs4783676 | 0.536 | 67358578 | 5051 |
| rs8056538 | 1.0 | 67359783 | 5052 |
| rs12930371 | 1.0 | 67360437 | 5053 |
| rs12446407 | 1.0 | 67361569 | 5054 |
| rs12446413 | 1.0 | 67361818 | 5055 |
| rs12443730 | 1.0 | 67361843 | 5056 |
| rs4783681 | 1.0 | 67364009 | 5057 |
| rs4783570 | 1.0 | 67364040 | 5058 |
| rs13334326 | 1.0 | 67366708 | 5059 |
| rs13339591 | 0.86 | 67366774 | 5060 |
| rs1125557 | 0.536 | 67367100 | 5061 |
| rs9282650 | 1.0 | 67367141 | 5062 |
| rs17772411 | 1.0 | 67368424 | 5063 |
| rs2113199 | 1.0 | 67372003 | 5064 |
| rs12599517 | 1.0 | 67372091 | 5065 |
| rs12597188 | 0.766 | 67372327 | 5066 |
| rs2113200 | 1.0 | 67372449 | 5067 |
| rs2113201 | 0.956 | 67372501 | 5068 |
| rs12448999 | 0.527 | 67373050 | 5069 |
| rs7186333 | 0.956 | 67373339 | 5070 |
| rs7186084 | 0.957 | 67373761 | 5071 |
| rs2059254 | 0.957 | 67374940 | 5072 |
| rs7199991 | 0.957 | 67375746 | 5073 |
| rs7198799 | 0.957 | 67375891 | 5074 |
| rs2961 | 0.957 | 67376404 | 5075 |
| rs1981871 | 0.957 | 67376508 | 5076 |
| rs9925923 | 0.957 | 67377115 | 5077 |
| rs9929218 | 0.957 | 67378447 | 5078 |
| rs9929239 | 0.957 | 67378627 | 5079 |
| rs9929479 | 0.957 | 67378772 | 5080 |
| rs12919719 | 0.913 | 67379842 | 5081 |
| rs12924033 | 0.802 | 67380100 | 5082 |
| rs4076177 | 0.799 | 67381509 | 5083 |
| rs12599393 | 0.91 | 67386522 | 5084 |
| rs17715799 | 0.913 | 67388012 | 5085 |
| rs2010724 | 0.794 | 67389915 | 5086 |
| rs1075959 | 0.814 | 67390251 | 5087 |
| rs1862748 | 0.873 | 67390444 | 5088 |
| rs4783686 | 0.911 | 67391657 | 5089 |
| rs2011779 | 0.555 | 67394997 | 5090 |

### Example 204

[0596] For individuals with colorectal cancer, the distribution of polymorphic alleles at position 76102583 of chromosome 16 was different from those without colorectal cancer (Table 204). The trend test for risk associated with carrying the G allele had an empirical p-value of 0.004492 based on permutation analysis, and the corresponding Mantel-Haenszel odds ratio for trend is 1.194 (Table 204). These data further suggest that this marker is associated with colorectal cancer risk and that the G allele at position 76102583 of chromosome 16 is associated with an increased risk of developing colorectal cancer.

TABLE 204

| | |
|---|---|
| rs no. | 1493892 |
| Chromosome; Position | 16; 76102583 |
| Gene Name | unknown |
| Genotype; Phenotype | n = G; increased risk |
| Hardy-Weinberg | 0.29533 |

| Case | | | | | | | Odds |
|---|---|---|---|---|---|---|---|
| Flag | Allele B | AA | AB | BB | Model | p-Value | Ratio |
| 0 | G | 252 | 511 | 295 | Trend | 0.004492 | 1.194 |
| 1 | G | 182 | 464 | 307 | | | |

[0597] Table 204A indicates SNPs found to be in strong linkage disequilibrium with rs1493892. To generate this list, correlation coefficients (r²) were calculated between the index SNP and all neighboring SNPs cited in the June 2006 HapMap data set release. An r² cut off of 0.50 was selected for inclusion as evidence for strong genetic linkage, i.e., a “strong linkage disequilibrium.

TABLE 204A
Linked SNPs

| SNP | r² | Position on chr16 | SEQ ID NO |
|---|---|---|---|
| rs1493892 | — | 76102583 | 5091 |

### Example 205

[0598] For individuals with colorectal cancer, the distribution of polymorphic alleles at position 77795011 of chromosome 16, found within the WWOX gene, was different from those without colorectal cancer (Table 205). The trend test for risk associated with carrying the C allele had an empirical p-value of 0.000708 based on permutation analysis, and the corresponding Mantel-Haenszel odds ratio for trend is 1.265 (Table 205). These data further suggest that this marker, located within the WWOX gene, is associated with colorectal cancer risk and that the C allele at position 77795011 of chromosome 16 is associated with an increased risk of developing colorectal cancer.

TABLE 205

| | |
|---|---|
| rs no. | 1813526 |
| Chromosome; Position | 16; 77795011 |
| Gene Name | WWOX |
| SEQ ID NO; Position | 5693; 1103960 |
| Genotype; Phenotype | n = C; increased risk |
| Hardy-Weinberg | 0.47278 |

| Case | | | | | | | Odds |
|---|---|---|---|---|---|---|---|
| Flag | Allele B | AA | AB | BB | Model | p-Value | Ratio |
| 0 | C | 77 | 396 | 572 | Trend | 0.000708 | 1.265 |
| 1 | C | 39 | 333 | 574 | | | |

[0599] Table 205A indicates SNPs found to be in strong linkage disequilibrium with rs1813526. To generate this list, correlation coefficients (r²) were calculated between the index SNP and all neighboring SNPs cited in the June 2006 HapMap data set release. An r² cut off of 0.50 was selected for inclusion as evidence for strong genetic linkage, i.e., a “strong linkage disequilibrium.

TABLE 205A
Linked SNPs

| SNP | r² | Position on chr16 | SEQ ID NO |
|---|---|---|---|
| rs1813526 | — | 77795011 | 5092 |
| rs1553723 | 0.633 | 77795109 | 5093 |
| rs2016545 | 0.68 | 77795260 | 5094 |

### Example 206

[0600] For individuals with colorectal cancer, the distribution of polymorphic alleles at position 78531040 of chromosome 16 was different from those without colorectal cancer (Table 206). The dominant test for risk associated with carrying the G allele had an empirical p-value based on permutation analysis of 0.001871, and the corresponding dominant odds ratio is 1.33 (Table 206). These data further suggest that this marker is associated with colorectal cancer risk and that the G allele at position 78531040 of chromosome 16 is associated with an increased risk of developing colorectal cancer.

TABLE 206

| | |
|---|---|
| rs no. | 13335346 |
| Chromosome; Position | 16; 78531040 |
| Gene Name | unknown |
| Genotype; Phenotype | n = G; increased risk |
| Hardy-Weinberg | 0.57458 |

| Case | | | | | | | Odds |
|---|---|---|---|---|---|---|---|
| Flag | Allele B | AA | AB | BB | Model | p-Value | Ratio |
| 0 | G | 668 | 341 | 48 | Dominant | 0.001871 | 1.33 |
| 1 | G | 536 | 361 | 54 | | | |

[0601] Table 206A indicates SNPs found to be in strong linkage disequilibrium with rs13335346. To generate this list, correlation coefficients (r²) were calculated between the index SNP and all neighboring SNPs cited in the June 2006 HapMap data set release. An r² cut off of 0.50 was selected for inclusion as evidence for strong genetic linkage, i.e., a “strong linkage disequilibrium.

TABLE 206A
Linked SNPs

| SNP | r² | Position on chr16 | SEQ ID NO |
|---|---|---|---|
| rs7196036 | 0.545 | 78507029 | 5095 |
| rs7203273 | 0.568 | 78508980 | 5096 |
| rs4130728 | 0.566 | 78509723 | 5097 |
| rs11150229 | 0.547 | 78509863 | 5098 |
| rs6564714 | 0.59 | 78510460 | 5099 |
| rs6564715 | 0.568 | 78511718 | 5100 |
| rs6564716 | 0.559 | 78513035 | 5101 |
| rs11150230 | 0.555 | 78513627 | 5102 |
| rs12445463 | 0.527 | 78514644 | 5103 |
| rs12445495 | 0.547 | 78514790 | 5104 |
| rs12448083 | 0.526 | 78514927 | 5105 |
| rs6564717 | 0.939 | 78517960 | 5106 |
| rs4889045 | 0.59 | 78518612 | 5107 |
| rs4889046 | 0.547 | 78518831 | 5108 |
| rs4243186 | 0.547 | 78521396 | 5109 |
| rs4264404 | 0.547 | 78522990 | 5110 |
| rs9938511 | 0.531 | 78523633 | 5111 |
| rs4545828 | 0.574 | 78524456 | 5112 |
| rs4132185 | 0.568 | 78524825 | 5113 |
| rs10514470 | 0.568 | 78526291 | 5114 |
| rs4506913 | 0.566 | 78526600 | 5115 |
| rs8043932 | 0.547 | 78527579 | 5116 |
| rs8046894 | 1.0 | 78528001 | 5117 |
| rs7195382 | 1.0 | 78528364 | 5118 |
| rs10514472 | 0.517 | 78528542 | 5119 |
| rs9930219 | 1.0 | 78530026 | 5120 |
| rs9940998 | 0.568 | 78530348 | 5121 |
| rs8060741 | 1.0 | 78530449 | 5122 |
| rs13335346 | — | 78531040 | 5123 |
| rs10459867 | 0.568 | 78531210 | 5124 |
| rs4281728 | 0.568 | 78531810 | 5125 |
| rs9319545 | 0.568 | 78532892 | 5126 |
| rs4888055 | 0.568 | 78533723 | 5127 |
| rs6564719 | 0.95 | 78534887 | 5128 |
| rs4445915 | 0.588 | 78535701 | 5129 |
| rs4627367 | 0.568 | 78535735 | 5130 |
| rs4444353 | 0.608 | 78535956 | 5131 |
| rs4888057 | 0.59 | 78536589 | 5132 |
| rs4888058 | 0.94 | 78536893 | 5133 |
| rs16951730 | 0.59 | 78537257 | 5134 |
| rs4243187 | 0.585 | 78537469 | 5135 |
| rs4555167 | 0.95 | 78537911 | 5136 |
| rs4258627 | 0.568 | 78537926 | 5137 |
| rs4271604 | 0.547 | 78538384 | 5138 |
| rs4462604 | 0.59 | 78538583 | 5139 |
| rs4243188 | 0.545 | 78538630 | 5140 |
| rs11866704 | 0.568 | 78539037 | 5141 |
| rs4889049 | 0.568 | 78539131 | 5142 |
| rs12445070 | 0.568 | 78541336 | 5143 |
| rs8062687 | 0.526 | 78543143 | 5144 |
| rs4243190 | 0.505 | 78544051 | 5145 |
| rs4461087 | 0.95 | 78548517 | 5146 |
| rs8045969 | 0.507 | 78550378 | 5147 |
| rs4243191 | 0.906 | 78550728 | 5148 |
| rs4243192 | 0.944 | 78551293 | 5149 |
| rs4603572 | 0.896 | 78551701 | 5150 |
| rs11150235 | 0.515 | 78554765 | 5151 |
| rs8051754 | 0.906 | 78554834 | 5152 |
| rs7188559 | 0.507 | 78556053 | 5153 |
| rs7192512 | 0.865 | 78559824 | 5154 |
| rs4344763 | 0.95 | 78562596 | 5155 |
| rs7190907 | 0.906 | 78563468 | 5156 |
| rs5029361 | 0.784 | 78564910 | 5157 |
| rs9941093 | 0.501 | 78565362 | 5158 |
| rs4146391 | 0.784 | 78567471 | 5159 |
| rs4417561 | 0.756 | 78568860 | 5160 |
| rs4438317 | 0.826 | 78572842 | 5161 |
| rs4889064 | 0.611 | 78580575 | 5162 |
| rs10514478 | 0.627 | 78582528 | 5163 |
| rs6564722 | 0.545 | 78592084 | 5164 |
| rs4426363 | 0.57 | 78595960 | 5165 |
| rs4580171 | 0.57 | 78597066 | 5166 |
| rs4243198 | 0.57 | 78602515 | 5167 |

### Example 207

[0602] For individuals with colorectal cancer, the distribution of polymorphic alleles at position 2666091 of chromosome 17, found within the GARNL4 gene, was different from those without colorectal cancer (Table 207). The dominant test for risk associated with carrying the T allele had an empirical p-value based on permutation analysis of 0.00258, and the corresponding dominant odds ratio is 1.315 (Table 207). These data further suggest that this marker, located within the GARNL4 gene, is associated with colorectal cancer risk and that the T allele at position 2666091 of chromosome 17 is associated with an increased risk of developing colorectal cancer.

TABLE 207

| | rs no. | | | | 8080237 | | |
|---|---|---|---|---|---|---|---|
| | Chromosome; Position | | | | 17; 2666091 | | |
| | Gene Name | | | | GARNL4 | | |
| | SEQ ID NO; Position | | | | 5694; 38992 | | |
| | Genotype; Phenotype | | | | n = T; increased risk | | |
| | Hardy-Weinberg | | | | 0.14502 | | |
| Case | | | | | | | Odds |
| Flag | Allele B | AA | AB | BB | Model | p-Value | Ratio |
| 0 | T | 660 | 341 | 57 | Dominant | 0.00258 | 1.315 |
| 1 | T | 531 | 366 | 55 | | | |

[0603] Table 207A indicates SNPs found to be in strong linkage disequilibrium with rs8080237. To generate this list, correlation coefficients (r²) were calculated between the index SNP and all neighboring SNPs cited in the June 2006 HapMap data set release. An r² cut off of 0.50 was selected for inclusion as evidence for strong genetic linkage, i.e., a “strong linkage disequilibrium.

TABLE 207A
Linked SNPs

| SNP | r² | Position on chr17 | SEQ ID NO |
|---|---|---|---|
| rs9890608 | 0.505 | 2658514 | 5168 |
| rs4790365 | 0.875 | 2661001 | 5169 |
| rs8071247 | 1.0 | 2665103 | 5170 |
| rs11653110 | 0.552 | 2665118 | 5171 |
| rs8080237 | — | 2666091 | 5172 |
| rs9902395 | 1.0 | 2673087 | 5173 |

### Example 208

[0604] For individuals with colorectal cancer, the distribution of polymorphic alleles at position 22877777 of chromosome 17 was different from those without colorectal cancer (Table 208). The trend test for risk associated with carrying the G allele had an empirical p-value of 0.001648 based on permutation analysis, and the corresponding Mantel-Haenszel odds ratio for trend is 1.222 (Table 208). These data further suggest that this marker is associated with colorectal cancer risk and that the G allele at position 22877777 of chromosome 17 is associated with an increased risk of developing colorectal cancer.

TABLE 208

| | |
|---|---|
| rs no. | 2945379 |
| Chromosome; Position | 17; 22877777 |
| Gene Name | unknown |
| Genotype; Phenotype | n = G; increased risk |
| Hardy-Weinberg | 0.03017 |

| Case | | | | | | | Odds |
|---|---|---|---|---|---|---|---|
| Flag | Allele B | AA | AB | BB | Model | p-Value | Ratio |
| 0 | G | 153 | 436 | 417 | Trend | 0.001648 | 1.222 |
| 1 | G | 112 | 411 | 469 | | | |

[0605] Table 208A indicates SNPs found to be in strong linkage disequilibrium with rs2945379. To generate this list, correlation coefficients (r²) were calculated between the index SNP and all neighboring SNPs cited in the June 2006 HapMap data set release. An r² cut off of 0.50 was selected for inclusion as evidence for strong genetic linkage, i.e., a “strong linkage disequilibrium.

TABLE 208A
Linked SNPs

| SNP | r² | Position on chr17 | SEQ ID NO |
|---|---|---|---|
| rs8076714 | 0.962 | 22820896 | 5174 |
| rs10853147 | 0.513 | 22823395 | 5175 |
| rs2140224 | 0.513 | 22824689 | 5176 |
| rs12452983 | 0.785 | 22825137 | 5177 |
| rs11651276 | 0.506 | 22830498 | 5178 |
| rs8069590 | 0.961 | 22832527 | 5179 |
| rs4795684 | 0.961 | 22833055 | 5180 |
| rs8076061 | 0.961 | 22836140 | 5181 |
| rs953113 | 0.505 | 22839015 | 5182 |
| rs8070481 | 0.513 | 22840839 | 5183 |
| rs10083891 | 0.785 | 22843340 | 5184 |
| rs9332455 | 0.962 | 22846791 | 5185 |
| rs17778066 | 0.782 | 22846832 | 5186 |
| rs9910137 | 0.513 | 22847173 | 5187 |
| rs9303652 | 0.551 | 22847504 | 5188 |
| rs2008032 | 0.785 | 22850255 | 5189 |
| rs7208616 | 0.512 | 22856541 | 5190 |
| rs8075860 | 0.548 | 22861817 | 5191 |
| rs2948546 | 0.819 | 22864080 | 5192 |
| rs2945411 | 0.835 | 22869931 | 5193 |
| rs878028 | 0.962 | 22873444 | 5194 |
| rs2945377 | 1.0 | 22874985 | 5195 |
| rs2945378 | 1.0 | 22875818 | 5196 |
| rs2948544 | 1.0 | 22876070 | 5197 |
| rs2945379 | — | 22877777 | 5198 |
| rs7222355 | 1.0 | 22878315 | 5199 |
| rs1010026 | 1.0 | 22882194 | 5200 |
| rs2008013 | 1.0 | 22883192 | 5201 |
| rs940011 | 1.0 | 22883607 | 5202 |
| rs940010 | 1.0 | 22883806 | 5203 |
| rs2948541 | 0.76 | 22884337 | 5204 |
| rs2948540 | 1.0 | 22884838 | 5205 |
| rs2948539 | 1.0 | 22885655 | 5206 |
| rs2948538 | 1.0 | 22885716 | 5207 |
| rs2948534 | 0.819 | 22890677 | 5208 |
| rs2945384 | 1.0 | 22892455 | 5209 |
| rs2948532 | 1.0 | 22893135 | 5210 |
| rs2948530 | 1.0 | 22894092 | 5211 |
| rs2945385 | 0.74 | 22896216 | 5212 |
| rs2948527 | 1.0 | 22896312 | 5213 |
| rs869671 | 1.0 | 22897438 | 5214 |

### Example 209

[0606] For individuals with colorectal cancer, the distribution of polymorphic alleles at position 28921210 of chromosome 17, found within the LOC147004 gene, was different from those without colorectal cancer (Table 209). The dominant test for risk associated with carrying the G allele had an empirical p-value based on permutation analysis of 0.00244, and the corresponding dominant odds ratio is 2.332 (Table 209). These data further suggest that this marker, located within the LOC147004 gene, is associated with colorectal cancer risk and that the G allele at position 28921210 of chromosome 17 is associated with an increased risk of developing colorectal cancer.

TABLE 209

| | |
|---|---|
| rs no. | 12453488 |
| Chromosome; Position | 17; 28921210 |
| Gene Name | LOC147004 |
| SEQ ID NO; Position | 5695; 35969 |
| Genotype; Phenotype | n = G; increased risk |
| Hardy-Weinberg | 0.07564 |

| Case | | | | | | | Odds |
|---|---|---|---|---|---|---|---|
| Flag | Allele B | AA | AB | BB | Model | p-Value | Ratio |
| 0 | G | 43 | 294 | 718 | Dominant | 0.00244 | 2.332 |
| 1 | G | 17 | 261 | 672 | | | |

[0607] Table 209A indicates SNPs found to be in strong linkage disequilibrium with rs12453488. To generate this list, correlation coefficients (r²) were calculated between the index SNP and all neighboring SNPs cited in the June 2006 HapMap data set release. An r² cut off of 0.50 was selected for inclusion as evidence for strong genetic linkage, i.e., a “strong linkage disequilibrium.

TABLE 209A
Linked SNPs

| SNP | r² | Position on chr17 | SEQ ID NO |
|---|---|---|---|
| rs9903859 | 0.928 | 28890180 | 5215 |
| rs8079016 | 0.932 | 28894872 | 5216 |
| rs9898999 | 0.919 | 28905348 | 5217 |
| rs12452350 | 1.0 | 28910497 | 5218 |
| rs2043475 | 0.932 | 28911274 | 5219 |
| rs12453488 | — | 28921210 | 5220 |
| rs12451111 | 1.0 | 28925064 | 5221 |
| rs12451588 | 1.0 | 28925255 | 5222 |
| rs12452510 | 1.0 | 28928070 | 5223 |
| rs12449501 | 1.0 | 28928118 | 5224 |
| rs12452091 | 0.877 | 28931247 | 5225 |
| rs8072065 | 0.877 | 28935710 | 5226 |
| rs9900677 | 0.877 | 28944267 | 5227 |

### Example 210

[0608] For individuals with colorectal cancer, the distribution of polymorphic alleles at position 30403780 of chromosome 17, found within the LOC117584 gene, was different from those without colorectal cancer (Table 210). The dominant test for risk associated with carrying the T allele had an empirical p-value based on permutation analysis of 0.001778, and the corresponding dominant odds ratio is 1.442 (Table 210). These data further suggest that this marker, located within the LOC117584 gene, is associated with colorectal cancer risk and that the T allele at position 30403780 of chromosome 17 is associated with an increased risk of developing colorectal cancer.

TABLE 210

| | rs no. | | | | 9303681 | | |
|---|---|---|---|---|---|---|---|
| | Chromosome; Position | | | | 17; 30403780 | | |
| | Gene Name | | | | LOC117584 | | |
| | SEQ ID NO; Position | | | | 5696; 36628 | | |
| | Genotype; Phenotype | | | | n = T; increased risk | | |
| | Hardy-Weinberg | | | | 0.15613 | | |
| Case | | | | | | | Odds |
| Flag | Allele B | AA | AB | BB | Model | p-Value | Ratio |
| 0 | T | 782 | 145 | 11 | Dominant | 0.001778 | 1.442 |
| 1 | T | 730 | 196 | 14 | | | |

[0609] Table 210A indicates SNPs found to be in strong linkage disequilibrium with rs9303681. To generate this list, correlation coefficients (r²) were calculated between the index SNP and all neighboring SNPs cited in the June 2006 HapMap data set release. An r² cut off of 0.50 was selected for inclusion as evidence for strong genetic linkage, i.e., a “strong linkage disequilibrium.

TABLE 210A
Linked SNPs

| SNP | r² | Position on chr17 | SEQ ID NO |
|---|---|---|---|
| rs1351554 | 0.785 | 30321178 | 5228 |
| rs3135966 | 1.0 | 30337424 | 5229 |
| rs3135974 | 1.0 | 30339558 | 5230 |
| rs3135983 | 1.0 | 30342425 | 5231 |
| rs2074516 | 1.0 | 30350130 | 5232 |
| rs2066505 | 1.0 | 30350893 | 5233 |
| rs1859248 | 1.0 | 30361524 | 5234 |
| rs16970540 | 1.0 | 30362560 | 5235 |
| rs2074520 | 1.0 | 30363396 | 5236 |
| rs6505438 | 1.0 | 30371625 | 5237 |
| rs2240074 | 1.0 | 30373383 | 5238 |
| rs9303681 | — | 30403780 | 5239 |
| rs8065886 | 1.0 | 30410974 | 5240 |
| rs12453568 | 1.0 | 30414282 | 5241 |
| rs3937429 | 1.0 | 30416800 | 5242 |
| rs10083888 | 1.0 | 30427093 | 5243 |
| rs7216074 | 1.0 | 30428955 | 5244 |
| rs4796033 | 0.526 | 30457600 | 5245 |
| rs9915078 | 0.608 | 30467328 | 5246 |

### Example 211

[0610] For individuals with colorectal cancer, the distribution of polymorphic alleles at position 3209591 of chromosome 18, found within the MYOM1 gene, was different from those without colorectal cancer (Table 211). The trend test for risk associated with carrying the A allele had an empirical p-value of 0.003444 based on permutation analysis, and the corresponding Mantel-Haenszel odds ratio for trend is 1.283 (Table 211). These data further suggest that this marker, located within the MYOM1 gene, is associated with colorectal cancer risk and that the A allele at position 3209591 of chromosome 18 is associated with an increased risk of developing colorectal cancer.

TABLE 211

| | |
|---|---|
| rs no. | 4507002 |
| Chromosome; Position | 18; 3209591 |
| Gene Name | MYOM1 |
| SEQ ID NO; Position | 5697; 516 |
| Genotype; Phenotype | n = A; increased risk |
| Hardy-Weinberg | 0.68466 |

| Case | | | | | | | Odds |
|---|---|---|---|---|---|---|---|
| Flag | Allele B | AA | AB | BB | Model | p-Value | Ratio |
| 0 | A | 792 | 244 | 16 | Trend | 0.003444 | 1.283 |
| 1 | A | 663 | 256 | 27 | | | |

[0611] Table 211A indicates SNPs found to be in strong linkage disequilibrium with rs4507002. To generate this list, correlation coefficients (r²) were calculated between the index SNP and all neighboring SNPs cited in the June 2006 HapMap data set release. An r² cut off of 0.50 was selected for inclusion as evidence for strong genetic linkage, i.e., a “strong linkage disequilibrium.

TABLE 211A
Linked SNPs

| SNP | r² | Position on chr18 | SEQ ID NO |
|---|---|---|---|
| rs4340411 | 0.623 | 3199224 | 5247 |
| rs4507002 | — | 3209591 | 5248 |
| rs7237476 | 1.0 | 3210857 | 5249 |
| rs10468735 | 0.748 | 3218815 | 5250 |

### Example 212

[0612] For individuals with colorectal cancer, the distribution of polymorphic alleles at position 4960506 of chromosome 18 was different from those without colorectal cancer (Table 212). The recessive test for risk associated with carrying the C allele had an empirical p-value of 0.002818 based on permutation analysis, and the corresponding recessive odds ratio is 1.341 (Table 212). These data further suggest that this marker is associated with colorectal cancer risk and that the C allele at position 4960506 of chromosome 18 is associated with an increased risk of developing colorectal cancer.

TABLE 212

| | |
|---|---|
| rs no. | 1466882 |
| Chromosome; Position | 18; 4960506 |
| Gene Name | unknown |
| Genotype; Phenotype | n = C; increased risk |
| Hardy-Weinberg | 0.27875 |

| Case | | | | | | | Odds |
|---|---|---|---|---|---|---|---|
| Flag | Allele B | AA | AB | BB | Model | p-Value | Ratio |
| 0 | C | 209 | 511 | 271 | Recessive | 0.002818 | 1.341 |
| 1 | C | 180 | 478 | 332 | | | |

[0613] Table 212A indicates SNPs found to be in strong linkage disequilibrium with rs1466882. To generate this list, correlation coefficients (r²) were calculated between the index SNP and all neighboring SNPs cited in the June 2006 HapMap data set release. An r² cut off of 0.50 was selected for inclusion as evidence for strong genetic linkage, i.e., a “strong linkage disequilibrium.

TABLE 212A
Linked SNPs

| SNP | r² | Position on chr18 | SEQ ID NO |
|---|---|---|---|
| rs4632225 | 0.87 | 4923689 | 5251 |
| rs11081160 | 0.855 | 4926147 | 5252 |
| rs4381685 | 0.903 | 4926402 | 5253 |
| rs12458527 | 0.834 | 4934685 | 5254 |
| rs1604290 | 0.823 | 4936422 | 5255 |
| rs1604289 | 0.928 | 4936562 | 5256 |
| rs8092847 | 0.787 | 4937183 | 5257 |
| rs11664775 | 0.787 | 4937365 | 5258 |
| rs13370240 | 1.0 | 4938110 | 5259 |
| rs7241459 | 1.0 | 4938253 | 5260 |
| rs13380903 | 0.603 | 4938671 | 5261 |
| rs1604288 | 1.0 | 4939304 | 5262 |
| rs1501045 | 0.524 | 4941575 | 5263 |
| rs12960297 | 1.0 | 4948939 | 5264 |
| rs1587544 | 0.517 | 4950581 | 5265 |
| rs1995314 | 0.76 | 4959766 | 5266 |
| rs2321278 | 0.755 | 4959964 | 5267 |
| rs1466882 | — | 4960506 | 5268 |
| rs8088956 | 0.967 | 4963174 | 5269 |
| rs7229501 | 0.869 | 4969612 | 5270 |
| rs2221230 | 0.869 | 4970659 | 5271 |
| rs2133995 | 0.867 | 4974601 | 5272 |
| rs2874484 | 0.869 | 4979314 | 5273 |
| rs1304794 | 0.869 | 4981745 | 5274 |
| rs8090942 | 0.807 | 4993537 | 5275 |
| rs4797190 | 0.806 | 5002433 | 5276 |
| rs4798276 | 0.807 | 5004084 | 5277 |
| rs1392870 | 0.804 | 5004339 | 5278 |
| rs1392869 | 0.797 | 5004366 | 5279 |
| rs12455861 | 0.807 | 5004748 | 5280 |
| rs8089268 | 0.8 | 5006279 | 5281 |
| rs7235238 | 0.776 | 5007428 | 5282 |
| rs8095458 | 0.827 | 5008786 | 5283 |
| rs7228058 | 0.713 | 5011644 | 5284 |
| rs9957084 | 0.519 | 5039243 | 5285 |

### Example 213

[0614] For individuals with colorectal cancer, the distribution of polymorphic alleles at position 18318589 of chromosome 18, found within the LOC441815 gene, was different from those without colorectal cancer (Table 213). The dominant test for risk associated with carrying the G allele had an empirical p-value based on permutation analysis of 0.011284, and the corresponding dominant odds ratio is 1.396 (Table 213). These data further suggest that this marker, located within the LOC441815 gene, is associated with colorectal cancer risk and that the G allele at position 18318589 of chromosome 18 is associated with an increased risk of to developing colorectal cancer.

TABLE 213

| | |
|---|---|
| rs no. | 177994 |
| Chromosome; Position | 18; 18318589 |
| Gene Name | LOC441815 |
| SEQ ID NO; Position | 5698; 18904 |
| Genotype; Phenotype | n = G; increased risk |
| Hardy-Weinberg | 0.14867 |

| Case | | | | | | | Odds |
|---|---|---|---|---|---|---|---|
| Flag | Allele B | AA | AB | BB | Model | p-Value | Ratio |
| 0 | G | 152 | 482 | 462 | Dominant | 0.011284 | 1.396 |
| 1 | G | 113 | 523 | 457 | | | |

[0615] Table 213A indicates SNPs found to be in strong linkage disequilibrium with rs177994. To generate this list, correlation coefficients (r²) were calculated between the index SNP and all neighboring SNPs cited in the June 2006 HapMap data set release. An r² cut off of 0.50 was selected for inclusion as evidence for strong genetic linkage, i.e., a “strong linkage disequilibrium.

TABLE 213A
Linked SNPs

| SNP | r² | Position on chr18 | SEQ ID NO |
|---|---|---|---|
| rs13370629 | 0.895 | 18312106 | 5286 |
| rs11876900 | 0.507 | 18313143 | 5287 |
| rs1297686 | 0.738 | 18315385 | 5288 |
| rs177992 | 1.0 | 18317202 | 5289 |
| rs177994 | — | 18318589 | 5290 |
| rs177995 | 1.0 | 18319478 | 5291 |
| rs177996 | 0.531 | 18320153 | 5292 |
| rs177997 | 1.0 | 18321043 | 5293 |
| rs178000 | 1.0 | 18322157 | 5294 |
| rs929581 | 1.0 | 18323697 | 5295 |
| rs16967814 | 0.602 | 18324589 | 5296 |
| rs178004 | 0.602 | 18338815 | 5297 |
| rs12958298 | 0.595 | 18351412 | 5298 |
| rs764359 | 0.602 | 18351907 | 5299 |
| rs764358 | 0.576 | 18351955 | 5300 |
| rs2110136 | 0.602 | 18355664 | 5301 |
| rs178010 | 0.553 | 18359560 | 5302 |
| rs178013 | 0.965 | 18361520 | 5303 |
| rs178014 | 0.696 | 18362154 | 5304 |
| rs519254 | 0.929 | 18373649 | 5305 |
| rs577725 | 0.676 | 18375382 | 5306 |
| rs9960559 | 0.929 | 18379689 | 5307 |
| rs515674 | 0.705 | 18379848 | 5308 |
| rs518217 | 0.676 | 18380080 | 5309 |
| rs542228 | 0.705 | 18380432 | 5310 |

### Example 214

[0616] For individuals with colorectal cancer, the distribution of polymorphic alleles at position 37705863 of chromosome 18 was different from those without colorectal cancer (Table 214). The trend test for risk associated with carrying the C allele had an empirical p-value of 0.003686 based on permutation analysis, and the corresponding Mantel-Haenszel odds ratio for trend is 1.218 (Table 214). These data further suggest that this marker is associated with colorectal cancer risk and that the C allele at position 37705863 of chromosome 18 is associated with an increased risk of developing colorectal cancer.

TABLE 214

| | |
|---|---|
| rs no. | 930189 |
| Chromosome; Position | 18; 37705863 |
| Gene Name | unknown |
| Genotype; Phenotype | n = C; increased risk |
| Hardy-Weinberg | 0.78799 |

| Case | | | | | | | Odds |
|---|---|---|---|---|---|---|---|
| Flag | Allele B | AA | AB | BB | Model | p-Value | Ratio |
| 0 | C | 172 | 454 | 287 | Trend | 0.003686 | 1.218 |
| 1 | C | 148 | 437 | 355 | | | |

[0617] Table 214A indicates SNPs found to be in strong linkage disequilibrium with rs930189. To generate this list, correlation coefficients (r²) were calculated between the index SNP and all neighboring SNPs cited in the June 2006 HapMap data set release. An r² cut off of 0.50 was selected for inclusion as evidence for strong genetic linkage, i.e., a “strong linkage disequilibrium.

TABLE 214A
Linked SNPs

| SNP | r² | Position on chr18 | SEQ ID NO |
|---|---|---|---|
| rs12965979 | 0.578 | 37702718 | 5311 |
| rs1560571 | 0.662 | 37703149 | 5312 |
| rs4890369 | 0.635 | 37703215 | 5313 |
| rs6507446 | 0.914 | 37703488 | 5314 |
| rs12454443 | 1.0 | 37703966 | 5315 |
| rs1025441 | 1.0 | 37704734 | 5316 |
| rs930189 | — | 37705863 | 5317 |
| rs2334940 | 1.0 | 37708590 | 5318 |
| rs11082250 | 1.0 | 37709295 | 5319 |
| rs1030620 | 1.0 | 37709510 | 5320 |
| rs4890371 | 0.838 | 37710264 | 5321 |
| rs12455820 | 0.965 | 37711607 | 5322 |
| rs11663241 | 0.646 | 37713054 | 5323 |
| rs891805 | 0.8 | 37713702 | 5324 |
| rs9675493 | 0.8 | 37714980 | 5325 |
| rs12103961 | 0.721 | 37715153 | 5326 |
| rs7238810 | 0.744 | 37716013 | 5327 |
| rs9951582 | 0.721 | 37716214 | 5328 |
| rs9951593 | 0.78 | 37716277 | 5329 |
| rs11082252 | 0.619 | 37717458 | 5330 |
| rs2878293 | 0.965 | 37718102 | 5331 |
| rs4563117 | 0.896 | 37718127 | 5332 |
| rs1347022 | 0.896 | 37718470 | 5333 |
| rs12185424 | 0.55 | 37719111 | 5334 |

### Example 215

[0618] For individuals with colorectal cancer, the distribution of polymorphic alleles at position 41627762 of chromosome 18 was different from those without colorectal cancer (Table 215). The recessive test for risk associated with carrying the A allele had an empirical p-value of 0.011576 based on permutation analysis, and the corresponding recessive odds ratio is 1.267 (Table 215). These data further suggest that this marker is associated with colorectal cancer risk and that the A allele at position 41627762 of chromosome 18 is associated with an increased risk of developing colorectal cancer.

TABLE 215

| | |
|---|---|
| rs no. | 4362470 |
| Chromosome; Position | 18; 41627762 |
| Gene Name | unknown |
| Genotype; Phenotype | n = A; increased risk |
| Hardy-Weinberg | 0.01565 |

| Case | | | | | | | Odds |
|---|---|---|---|---|---|---|---|
| Flag | Allele B | AA | AB | BB | Model | p-Value | Ratio |
| 0 | A | 102 | 467 | 374 | Recessive | 0.011576 | 1.267 |
| 1 | A | 86 | 422 | 423 | | | |

[0619] Table 215A indicates SNPs found to be in strong linkage disequilibrium with rs4362470. To generate this list, correlation coefficients (r²) were calculated between the index SNP and all neighboring SNPs cited in the June 2006 HapMap data set release. An r² cut off of 0.50 was selected for inclusion as evidence for strong genetic linkage, i.e., a “strong linkage disequilibrium.

TABLE 215A
Linked SNPs

| SNP | r² | Position on chr18 | SEQ ID NO |
|---|---|---|---|
| rs17674580 | 0.541 | 41563909 | 5335 |
| rs692899 | 0.571 | 41570268 | 5336 |
| rs493363 | 0.639 | 41571247 | 5337 |
| rs493262 | 0.655 | 41577622 | 5338 |
| rs4890588 | 0.639 | 41581292 | 5339 |
| rs474270 | 0.639 | 41582293 | 5340 |
| rs2282616 | 0.639 | 41582632 | 5341 |
| rs2282615 | 0.639 | 41582748 | 5342 |
| rs6507641 | 0.639 | 41583196 | 5343 |
| rs17142 | 0.63 | 41583308 | 5344 |
| rs1944336 | 0.639 | 41588324 | 5345 |
| rs8090267 | 0.608 | 41588803 | 5346 |
| rs11874337 | 0.634 | 41589256 | 5347 |
| rs9953451 | 0.639 | 41589691 | 5348 |
| rs9966818 | 0.639 | 41589897 | 5349 |
| rs8096392 | 0.546 | 41593219 | 5350 |
| rs572858 | 0.567 | 41594516 | 5351 |
| rs2005378 | 0.567 | 41595420 | 5352 |
| rs550201 | 0.586 | 41595770 | 5353 |
| rs576687 | 0.567 | 41595792 | 5354 |
| rs10502870 | 0.551 | 41596131 | 5355 |
| rs1626743 | 0.567 | 41597080 | 5356 |
| rs475584 | 0.567 | 41597415 | 5357 |
| rs517221 | 0.567 | 41597628 | 5358 |
| rs502339 | 0.567 | 41597987 | 5359 |
| rs505060 | 0.604 | 41598280 | 5360 |
| rs7506509 | 1.0 | 41613925 | 5361 |
| rs1789553 | 0.961 | 41614138 | 5362 |
| rs2187405 | 1.0 | 41617419 | 5363 |
| rs539249 | 0.961 | 41618120 | 5364 |
| rs7241939 | 1.0 | 41623325 | 5365 |
| rs8083889 | 1.0 | 41623910 | 5366 |
| rs4890592 | 0.922 | 41624961 | 5367 |
| rs1944340 | 1.0 | 41626853 | 5368 |
| rs4362470 | — | 41627762 | 5369 |
| rs11659608 | 1.0 | 41633410 | 5370 |
| rs559774 | 0.961 | 41634834 | 5371 |
| rs4890594 | 1.0 | 41635463 | 5372 |
| rs4890302 | 1.0 | 41635510 | 5373 |
| rs6507645 | 0.961 | 41635799 | 5374 |
| rs7237600 | 1.0 | 41636812 | 5375 |
| rs6507646 | 1.0 | 41637703 | 5376 |
| rs11082479 | 1.0 | 41638223 | 5377 |
| rs484914 | 0.961 | 41639267 | 5378 |
| rs12326731 | 0.887 | 41641545 | 5379 |
| rs11082484 | 0.961 | 41643303 | 5380 |
| rs1789557 | 0.961 | 41644754 | 5381 |
| rs504030 | 0.961 | 41648373 | 5382 |
| rs573463 | 0.956 | 41648521 | 5383 |
| rs538405 | 0.961 | 41653433 | 5384 |
| rs495078 | 0.639 | 41663873 | 5385 |

### Example 216

[0620] For individuals with colorectal cancer, the distribution of polymorphic alleles at position 60507710 of chromosome 18 was different from those without colorectal cancer (Table 216). The trend test for risk associated with carrying the G allele had an empirical p-value of 0.002912 based on permutation analysis, and the corresponding Mantel-Haenszel odds ratio for trend is 1.271 (Table 216). These data further suggest that this marker is associated with colorectal cancer risk and that the G allele at position 60507710 of chromosome 18 is associated with an increased risk of developing colorectal cancer.

TABLE 216

| | |
|---|---|
| rs no. | 11151137 |
| Chromosome; Position | 18; 60507710 |
| Gene Name | unknown |
| Genotype; Phenotype | n = G; increased risk |
| Hardy-Weinberg | 0.40723 |

| Case | | | | | | | Odds |
|---|---|---|---|---|---|---|---|
| Flag | Allele B | AA | AB | BB | Model | p-Value | Ratio |
| 0 | G | 716 | 261 | 29 | Trend | 0.002912 | 1.271 |
| 1 | G | 652 | 299 | 45 | | | |

[0621] Table 216A indicates SNPs found to be in strong linkage disequilibrium with rs11151137. To generate this list, correlation coefficients (r²) were calculated between the index SNP and all neighboring SNPs cited in the June 2006 HapMap data set release. An r² cut off of 0.50 was selected for inclusion as evidence for strong genetic linkage, i.e., a “strong linkage disequilibrium.

TABLE 216A
Linked SNPs

| SNP | r² | Position on chr18 | SEQ ID NO |
|---|---|---|---|
| rs1506218 | 0.517 | 60452260 | 5386 |
| rs17073435 | 0.646 | 60477510 | 5387 |
| rs8099766 | 0.694 | 60488119 | 5388 |
| rs8087195 | 0.648 | 60490204 | 5389 |
| rs8087694 | 0.587 | 60490280 | 5390 |
| rs17073507 | 0.693 | 60496339 | 5391 |
| rs11151137 | — | 60507710 | 5392 |
| rs2135383 | 1.0 | 60511196 | 5393 |
| rs17073546 | 0.817 | 60517518 | 5394 |
| rs17073547 | 1.0 | 60520125 | 5395 |
| rs11151148 | 1.0 | 60522027 | 5396 |
| rs17073551 | 1.0 | 60522514 | 5397 |
| rs17073555 | 0.938 | 60524571 | 5398 |
| rs17073559 | 1.0 | 60525741 | 5399 |
| rs10871574 | 1.0 | 60533668 | 5400 |
| rs17073583 | 1.0 | 60534962 | 5401 |
| rs2174572 | 0.688 | 60548441 | 5402 |
| rs8086469 | 0.688 | 60548679 | 5403 |
| rs1587989 | 0.935 | 60554118 | 5404 |

### Example 217

[0622] For individuals with colorectal cancer, the distribution of polymorphic alleles at position 68444594 of chromosome 18 was different from those without colorectal cancer (Table 217). The trend test for risk associated with carrying the G allele had an empirical p-value of 0.00588 based on permutation analysis, and the corresponding Mantel-Haenszel odds ratio for trend is 1.527 (Table 217). These data further suggest that this marker is associated with colorectal cancer risk and that the G allele at position 68444594 of chromosome 18 is associated with an increased risk of developing colorectal cancer.

TABLE 217

| | |
|---|---|
| rs no. | 17086215 |
| Chromosome; Position | 18; 68444594 |
| Gene Name | unknown |
| Genotype; Phenotype | n = G; increased risk |
| Hardy-Weinberg | 0.36600 |

| Case | | | | | | | Odds |
|---|---|---|---|---|---|---|---|
| Flag | Allele B | AA | AB | BB | Model | p-Value | Ratio |
| 0 | G | 883 | 66 | 2 | Trend | 0.00588 | 1.527 |
| 1 | G | 820 | 93 | 5 | | | |

[0623] Table 217A indicates SNPs found to be in strong linkage disequilibrium with rs17086215. To generate this list, correlation coefficients (r²) were calculated between the index SNP and all neighboring SNPs cited in the June 2006 HapMap data set release. An r² cut off of 0.50 was selected for inclusion as evidence for strong genetic linkage, i.e., a “strong linkage disequilibrium.

TABLE 217A
Linked SNPs

| SNP | r² | Position on chr18 | SEQ ID NO |
|---|---|---|---|
| rs11873636 | 1.0 | 68423906 | 5405 |
| rs11151779 | 1.0 | 68426604 | 5406 |
| rs9963185 | 1.0 | 68427893 | 5407 |
| rs1347012 | 1.0 | 68441726 | 5408 |
| rs17086215 | — | 68444594 | 5409 |

### Example 218

[0624] For individuals with colorectal cancer, the distribution of polymorphic alleles at position 34356661 of chromosome 19 was different from those without colorectal cancer (Table 218). The trend test for risk associated with carrying the A allele had an empirical p-value of 0.000157 based on permutation analysis, and the corresponding Mantel-Haenszel odds ratio for trend is 1.280 (Table 218). These data further suggest that this marker is associated with colorectal cancer risk and that the A allele at position 34356661 of chromosome 19 is associated with an increased risk of developing colorectal cancer.

TABLE 218

| | |
|---|---|
| rs no. | 2160740 |
| Chromosome; Position | 19; 34356661 |
| Gene Name | unknown |
| Genotype; Phenotype | n = A; increased risk |
| Hardy-Weinberg | 0.32311 |

| Case | | | | | | | Odds |
|---|---|---|---|---|---|---|---|
| Flag | Allele B | AA | AB | BB | Model | p-Value | Ratio |
| 0 | A | 425 | 462 | 108 | Trend | 0.000157 | 1.280 |
| 1 | A | 353 | 471 | 154 | | | |

[0625] Table 218A indicates SNPs found to be in strong linkage disequilibrium with rs2160740. To generate this list, correlation coefficients (r²) were calculated between the index SNP and all neighboring SNPs cited in the June 2006 HapMap data set release. An r² cut off of 0.50 was selected for inclusion as evidence for strong genetic linkage, i.e., a “strong linkage disequilibrium.

TABLE 218A
Linked SNPs

| SNP | r² | Position on chr19 | SEQ ID NO |
|---|---|---|---|
| rs10412792 | 0.646 | 34276329 | 5410 |
| rs10413066 | 0.652 | 34276495 | 5411 |
| rs2278441 | 0.618 | 34277090 | 5412 |
| rs11083782 | 0.621 | 34277961 | 5413 |
| rs1549947 | 0.671 | 34279795 | 5414 |
| rs2007843 | 0.583 | 34281209 | 5415 |
| rs1263208 | 0.671 | 34283109 | 5416 |
| rs11667513 | 0.661 | 34283740 | 5417 |
| rs1263209 | 0.671 | 34285910 | 5418 |
| rs1263211 | 0.671 | 34288722 | 5419 |
| rs1368473 | 0.646 | 34294949 | 5420 |
| rs2865496 | 0.85 | 34298201 | 5421 |
| rs888303 | 0.646 | 34301022 | 5422 |
| rs11667078 | 0.841 | 34302834 | 5423 |
| rs8103663 | 0.646 | 34309273 | 5424 |
| rs17110 | 0.851 | 34314346 | 5425 |
| rs4805335 | 0.961 | 34330168 | 5426 |
| rs12974901 | 0.921 | 34332628 | 5427 |
| rs11672470 | 0.96 | 34333479 | 5428 |
| rs4805336 | 0.962 | 34335698 | 5429 |
| rs11673068 | 0.962 | 34344182 | 5430 |
| rs4805337 | 0.962 | 34344849 | 5431 |
| rs759634 | 1.0 | 34353570 | 5432 |
| rs2160740 | — | 34356661 | 5433 |
| rs8106473 | 0.705 | 34364519 | 5434 |
| rs12971698 | 0.96 | 34364983 | 5435 |

### Example 219

[0626] For individuals with colorectal cancer, the distribution of polymorphic alleles at position 59509847 of chromosome 19, found within the LIR9 gene, was different from those without colorectal cancer (Table 219). The dominant test for risk associated with carrying the G allele had an empirical p-value based on permutation analysis of 0.035346, and the corresponding dominant odds ratio is 2.979 (Table 219). These data further suggest that this marker, located within the LIR9 gene, is associated with colorectal cancer risk and that the G allele at position 59509847 of chromosome 19 is associated with an increased risk of developing colorectal cancer.

TABLE 219

| | |
|---|---|
| rs no. | 1761450 |
| Chromosome; Position | 19; 59509847 |
| Gene Name | LIR9 |
| SEQ ID NO; Position | 5699; 6375 |
| Genotype; Phenotype | n = G; increased risk |
| Hardy-Weinberg | 0.0391 |

| Case | | | | | | | Odds |
|---|---|---|---|---|---|---|---|
| Flag | Allele B | AA | AB | BB | Model | p-Value | Ratio |
| 0 | G | 15 | 159 | 824 | Dominant | 0.035346 | 2.979 |
| 1 | G | 5 | 165 | 811 | | | |

[0627] Table 219A indicates SNPs found to be in strong linkage disequilibrium with rs1761450. To generate this list, correlation coefficients (r²) were calculated between the index SNP and all neighboring SNPs cited in the June 2006 HapMap data set release. An r² cut off of 0.50 was selected for inclusion as evidence for strong genetic linkage, i.e., a “strong linkage disequilibrium.

TABLE 219A
Linked SNPs

| SNP | r² | Position on chr19 | SEQ ID NO |
|---|---|---|---|
| rs1761450 | — | 59509847 | 5436 |

### Example 220

[0628] For individuals with colorectal cancer, the distribution of polymorphic alleles at position 2503157 of chromosome 20, found within the TMC2 gene, was different from those without colorectal cancer (Table 220). The recessive test for risk associated with carrying the C allele had an empirical p-value of 0.00014 based on permutation analysis, and the corresponding recessive odds ratio is 1.544 (Table 220). These data further suggest that this marker, located within the TMC2 gene, is associated with colorectal cancer risk and that the C allele at position 2503157 of chromosome 20 is associated with an increased risk of developing colorectal cancer.

TABLE 220

| | |
|---|---|
| rs no. | 6050260 |
| Chromosome; Position | 20; 2503157 |
| Gene Name | TMC2 |
| SEQ ID NO; Position | 5700; 37905 |
| Genotype; Phenotype | n = C; increased risk |
| Hardy-Weinberg | 0.00380 |

| Case | | | | | | | Odds |
|---|---|---|---|---|---|---|---|
| Flag | Allele B | AA | AB | BB | Model | p-Value | Ratio |
| 0 | C | 324 | 564 | 169 | Recessive | 0.00014 | 1.544 |
| 1 | C | 312 | 423 | 216 | | | |

[0629] Table 220A indicates SNPs found to be in strong linkage disequilibrium with rs6050260. To generate this list, correlation coefficients (r²) were calculated between the index SNP and all neighboring SNPs cited in the June 2006 HapMap data set release. An r² cut off of 0.50 was selected for inclusion as evidence for strong genetic linkage, i.e., a “strong linkage disequilibrium.

TABLE 220A
Linked SNPs

| SNP | r² | Position on chr20 | SEQ ID NO |
|---|---|---|---|
| rs2223883 | 0.605 | 2488701 | 5437 |
| rs6083663 | 0.598 | 2489084 | 5438 |
| rs4815323 | 0.571 | 2490747 | 5439 |
| rs11087484 | 0.539 | 2491144 | 5440 |
| rs6083683 | 0.69 | 2493219 | 5441 |
| rs742839 | 0.887 | 2494225 | 5442 |
| rs4815349 | 0.659 | 2495597 | 5443 |
| rs4815352 | 0.901 | 2497008 | 5444 |
| rs767739 | 0.654 | 2498579 | 5445 |
| rs1883980 | 0.888 | 2500926 | 5446 |
| rs6050256 | 0.904 | 2502907 | 5447 |
| rs6050260 | — | 2503157 | 5448 |
| rs6083735 | 0.635 | 2507778 | 5449 |
| rs2325890 | 0.679 | 2510604 | 5450 |
| rs2325891 | 0.929 | 2510708 | 5451 |
| rs11087509 | 0.588 | 2526935 | 5452 |
| rs6037081 | 0.602 | 2528772 | 5453 |
| rs7266213 | 0.558 | 2531652 | 5454 |
| rs6083806 | 0.607 | 2533770 | 5455 |

### Example 221

[0630] For individuals with colorectal cancer, the distribution of polymorphic alleles at position 10589575 of chromosome 20, found within the JAG1 gene, was different from those without colorectal cancer (Table 221). The trend test for risk associated with carrying the C allele had an empirical p-value of 0.027093 based on permutation analysis, and the corresponding Mantel-Haenszel odds ratio for trend is 1.407 (Table 221). These data further suggest that this marker, located within the JAG1 gene, is associated with colorectal cancer risk and that the C allele at position 10589575 of chromosome 20 is associated with an increased risk of developing colorectal cancer.

TABLE 221

| | |
|---|---|
| rs no. | 3748478 |
| Chromosome; Position | 20; 10589575 |
| Gene Name | JAG1 |
| SEQ ID NO; Position | 5701; 13016 |
| Genotype; Phenotype | n = C; increased risk |
| Hardy-Weinberg | 0.51603 |

| Case | | | | | | | Odds |
|---|---|---|---|---|---|---|---|
| Flag | Allele B | AA | AB | BB | Model | p-Value | Ratio |
| 0 | C | 1 | 101 | 856 | Trend | 0.027093 | 1.407 |
| 1 | C | 0 | 75 | 886 | | | |

[0631] Table 221A indicates SNPs found to be in strong linkage disequilibrium with rs3748478. To generate this list, correlation coefficients (r²) were calculated between the index SNP and all neighboring SNPs cited in the June 2006 HapMap data set release. An r² cut off of 0.50 was selected for inclusion as evidence for strong genetic linkage, i.e., a “strong linkage disequilibrium.

TABLE 221A
Linked SNPs

| SNP | r² | Position on chr20 | SEQ ID NO |
|---|---|---|---|
| rs7262165 | 0.742 | 10523782 | 5456 |
| rs16991883 | 1.0 | 10586327 | 5457 |
| rs6040058 | 1.0 | 10586424 | 5458 |
| rs1801138 | 1.0 | 10587222 | 5459 |
| rs3790158 | 1.0 | 10587841 | 5460 |
| rs3748477 | 1.0 | 10589470 | 5461 |
| rs3748478 | — | 10589575 | 5462 |
| rs12624962 | 1.0 | 10590389 | 5463 |
| rs6032915 | 1.0 | 10591091 | 5464 |

### Example 222

[0632] For individuals with colorectal cancer, the distribution of polymorphic alleles at position 38556196 of chromosome 20 was different from those without colorectal cancer (Table 222). The dominant test for risk associated with carrying the T allele had an empirical p-value based on permutation analysis of 0.00633, and the corresponding dominant odds ratio is 1.281 (Table 222). These data further suggest that this marker is associated with colorectal cancer risk and that the T allele at position 38556196 of chromosome 20 is associated with an increased risk of developing colorectal cancer.

TABLE 222

| | |
|---|---|
| rs no. | 2207135 |
| Chromosome; Position | 20; 38556196 |
| Gene Name | unknown |
| Genotype; Phenotype | n = T; increased risk |
| Hardy-Weinberg | 0.77427 |

| Case | | | | | | | Odds |
|---|---|---|---|---|---|---|---|
| Flag | Allele B | AA | AB | BB | Model | p-Value | Ratio |
| 0 | T | 457 | 446 | 104 | Dominant | 0.00633 | 1.281 |
| 1 | T | 391 | 488 | 115 | | | |

[0633] Table 222A indicates SNPs found to be in strong linkage disequilibrium with rs2207135. To generate this list, correlation coefficients (r²) were calculated between the index SNP and all neighboring SNPs cited in the June 2006 HapMap data set release. An r² cut off of 0.50 was selected for inclusion as evidence for strong genetic linkage, i.e., a “strong linkage disequilibrium.

TABLE 222A
Linked SNPs

| SNP | r² | Position on chr20 | SEQ ID NO |
|---|---|---|---|
| rs6029126 | 0.576 | 38527211 | 5465 |
| rs6029127 | 0.567 | 38528818 | 5466 |
| rs6016360 | 0.576 | 38529666 | 5467 |
| rs7272909 | 0.605 | 38532337 | 5468 |
| rs8115272 | 0.607 | 38534109 | 5469 |
| rs6016361 | 0.567 | 38536785 | 5470 |
| rs6029132 | 0.567 | 38539932 | 5471 |
| rs6016364 | 0.607 | 38541748 | 5472 |
| rs6016365 | 0.607 | 38541918 | 5473 |
| rs6029134 | 0.576 | 38544403 | 5474 |
| rs6016366 | 0.557 | 38546263 | 5475 |
| rs6029140 | 0.607 | 38549619 | 5476 |
| rs6016367 | 0.607 | 38550978 | 5477 |
| rs6029141 | 0.567 | 38551409 | 5478 |
| rs2207135 | — | 38556196 | 5479 |
| rs6513669 | 0.705 | 38556633 | 5480 |
| rs6029145 | 1.0 | 38557455 | 5481 |
| rs6029146 | 0.956 | 38557463 | 5482 |
| rs6029153 | 0.628 | 38561992 | 5483 |

### Example 223

[0634] For individuals with colorectal cancer, the distribution of polymorphic alleles at position 42151350 of chromosome 20 was different from those without colorectal cancer (Table 223). The trend test for risk associated with carrying the C allele had an empirical p-value of 0.00353 based on permutation analysis, and the corresponding Mantel-Haenszel odds ratio for trend is 1.205 (Table 223). These data further suggest that this marker is associated with colorectal cancer risk and that the C allele at position 42151350 of chromosome 20 is associated with an increased risk of developing colorectal cancer.

TABLE 223

| | |
|---|---|
| rs no. | 16988700 |
| Chromosome; Position | 20; 42151350 |
| Gene Name | unknown |
| Genotype; Phenotype | n = C; increased risk |
| Hardy-Weinberg | 0.64401 |

| Case | | | | | | | Odds |
|---|---|---|---|---|---|---|---|
| Flag | Allele B | AA | AB | BB | Model | p-Value | Ratio |
| 0 | C | 158 | 474 | 378 | Trend | 0.00353 | 1.205 |
| 1 | C | 117 | 459 | 424 | | | |

[0635] Table 223A indicates SNPs found to be in strong linkage disequilibrium with rs16988700. To generate this list, correlation coefficients (r²) were calculated between the index SNP and all neighboring SNPs cited in the June 2006 HapMap data set release. An r² cut off of 0.50 was selected for inclusion as evidence for strong genetic linkage, i.e., a “strong linkage disequilibrium.

TABLE 223A
Linked SNPs

| SNP | r² | Position on chr20 | SEQ ID NO |
|---|---|---|---|
| rs6093933 | 0.692 | 42147372 | 5484 |
| rs6031367 | 0.597 | 42147941 | 5485 |
| rs4810407 | 0.965 | 42148380 | 5486 |
| rs4812783 | 0.967 | 42148459 | 5487 |
| rs4812784 | 0.965 | 42148669 | 5488 |
| rs6017263 | 1.0 | 42149347 | 5489 |
| rs16988700 | — | 42151350 | 5490 |
| rs6031370 | 0.935 | 42151833 | 5491 |
| rs6073315 | 1.0 | 42152019 | 5492 |
| rs6073318 | 0.965 | 42155679 | 5493 |
| rs6073319 | 1.0 | 42155996 | 5494 |
| rs6073321 | 1.0 | 42156826 | 5495 |
| rs6130522 | 0.846 | 42158000 | 5496 |
| rs6130524 | 0.874 | 42159296 | 5497 |
| rs6124622 | 0.778 | 42159619 | 5498 |
| rs1883684 | 0.691 | 42160904 | 5499 |
| rs6031378 | 0.72 | 42162052 | 5500 |
| rs6031379 | 0.72 | 42162344 | 5501 |
| rs6031380 | 0.72 | 42162545 | 5502 |
| rs6065700 | 0.72 | 42165258 | 5503 |
| rs6073327 | 0.72 | 42165548 | 5504 |
| rs6073328 | 0.752 | 42165767 | 5505 |
| rs2038165 | 0.614 | 42166601 | 5506 |
| rs6073329 | 0.683 | 42167016 | 5507 |
| rs6065701 | 0.595 | 42167261 | 5508 |
| rs6065702 | 0.614 | 42167414 | 5509 |
| rs4378864 | 0.692 | 42169375 | 5510 |
| rs6065703 | 0.711 | 42170362 | 5511 |
| rs6031388 | 0.614 | 42170805 | 5512 |
| rs6073330 | 0.562 | 42170908 | 5513 |
| rs3746568 | 0.614 | 42172004 | 5514 |
| rs6031395 | 0.802 | 42173722 | 5515 |
| rs1055716 | 0.809 | 42174113 | 5516 |
| rs6065705 | 0.614 | 42174528 | 5517 |

### Example 224

[0636] For individuals with colorectal cancer, the distribution of polymorphic alleles at position 42460924 of chromosome 20 was different from those without colorectal cancer (Table 224). The recessive test for risk associated with carrying the G allele had an empirical p-value of 0.000722 based on permutation analysis, and the corresponding recessive odds ratio is 1.407 (Table 224). These data further suggest that this marker is associated with colorectal cancer risk and that the G allele at position 42460924 of chromosome 20 is associated with an increased risk of developing colorectal cancer.

TABLE 224

| | |
|---|---|
| rs no. | 2425639 |
| Chromosome; Position | 20; 42460924 |
| Gene Name | unknown |
| Genotype; Phenotype | n = G; increased risk |
| Hardy-Weinberg | 0.14828 |

| Case | | | | | | | Odds |
|---|---|---|---|---|---|---|---|
| Flag | Allele B | AA | AB | BB | Model | p-Value | Ratio |
| 0 | G | 243 | 529 | 239 | Recessive | 0.000722 | 1.407 |
| 1 | G | 240 | 458 | 304 | | | |

[0637] Table 224A indicates SNPs found to be in strong linkage disequilibrium with rs2425639. To generate this list, correlation coefficients (r²) were calculated between the index SNP and all neighboring SNPs cited in the June 2006 HapMap data set release. An r² cut off of 0.50 was selected for inclusion as evidence for strong genetic linkage, i.e., a “strong linkage disequilibrium.

TABLE 224A
Linked SNPs

| SNP | r² | Position on chr20 | SEQ ID NO |
|---|---|---|---|
| rs2425635 | 0.934 | 42457255 | 5518 |
| rs2425637 | 1.0 | 42457463 | 5519 |
| rs717247 | 0.566 | 42459198 | 5520 |
| rs2868094 | 0.566 | 42460030 | 5521 |
| rs2425639 | — | 42460924 | 5522 |

### Example 225

[0638] For individuals with colorectal cancer, the distribution of polymorphic alleles at position 60036888 of chromosome 20, found within the TAF4 gene, was different from those without colorectal cancer (Table 225). The recessive test for risk associated with carrying the T allele had an empirical p-value of 0.021306 based on permutation analysis, and the corresponding recessive odds ratio is 4.462 (Table 225). These data further suggest that this marker, located within the TAF4 gene, is associated with colorectal cancer risk and that the T allele at position 60036888 of chromosome 20 is associated with an increased risk of developing colorectal cancer.

TABLE 225

| | rs no. | | | | 6142925 | | |
|---|---|---|---|---|---|---|---|
| | Chromosome; Position | | | | 20; 60036888 | | |
| | Gene Name | | | | TAF4 | | |
| | SEQ ID NO; Position | | | | 5702; 37374 | | |
| | Genotype; Phenotype | | | | n = T; increased risk | | |
| | Hardy-Weinberg | | | | 0.00071 | | |
| Case | | | | | | | Odds |
| Flag | Allele B | AA | AB | BB | Model | p-Value | Ratio |
| 0 | T | 838 | 215 | 2 | Recessive | 0.021306 | 4.462 |
| 1 | T | 774 | 170 | 8 | | | |

[0639] Table 225A indicates SNPs found to be in strong linkage disequilibrium with rs6142925. To generate this list, correlation coefficients (r²) were calculated between the index SNP and all neighboring SNPs cited in the June 2006 HapMap data set release. An r² cut off of 0.50 was selected for inclusion as evidence for strong genetic linkage, i.e., a “strong linkage disequilibrium.

TABLE 225A
Linked SNPs

| SNP | r² | Position on chr20 | SEQ ID NO |
|---|---|---|---|
| rs6142696 | 1.0 | 59989629 | 5523 |
| rs2281733 | 1.0 | 60009225 | 5524 |
| rs2144677 | 1.0 | 60014082 | 5525 |
| rs2296085 | 0.938 | 60017343 | 5526 |
| rs2296086 | 0.938 | 60017467 | 5527 |
| rs2296088 | 0.938 | 60017755 | 5528 |
| rs2281736 | 1.0 | 60019004 | 5529 |
| rs3787428 | 0.882 | 60020185 | 5530 |
| rs2273991 | 1.0 | 60021444 | 5531 |
| rs6061956 | 0.882 | 60026791 | 5532 |
| rs6142922 | 0.706 | 60028281 | 5533 |
| rs1555577 | 1.0 | 60029814 | 5534 |
| rs1886008 | 0.882 | 60031018 | 5535 |
| rs7343378 | 0.862 | 60033821 | 5536 |
| rs4266091 | 1.0 | 60034898 | 5537 |
| rs6061961 | 0.832 | 60035259 | 5538 |
| rs6142925 | — | 60036888 | 5539 |
| rs1473739 | 1.0 | 60046156 | 5540 |
| rs10888229 | 1.0 | 60058583 | 5541 |

### Example 226

[0640] For individuals with colorectal cancer, the distribution of polymorphic alleles at position 18809897 of chromosome 21 was different from those without colorectal cancer (Table 226). The recessive test for risk associated with carrying the C allele had an empirical p-value of 0.00326 based on permutation analysis, and the corresponding recessive odds ratio is 3.152 (Table 226). These data further suggest that this marker is associated with colorectal cancer risk and that the C allele at position 18809897 of chromosome 21 is associated with an increased risk of developing colorectal cancer.

TABLE 226

| | |
|---|---|
| rs no. | 2824888 |
| Chromosome; Position | 21; 18809897 |
| Gene Name | unknown |
| Genotype; Phenotype | n = C; increased risk |
| Hardy-Weinberg | 0.11887 |

| Case | | | | | | | Odds |
|---|---|---|---|---|---|---|---|
| Flag | Allele B | AA | AB | BB | Model | p-Value | Ratio |
| 0 | C | 722 | 208 | 8 | Recessive | 0.00326 | 3.152 |
| 1 | C | 730 | 192 | 25 | | | |

[0641] Table 226A indicates SNPs found to be in strong linkage disequilibrium with rs2824888. To generate this list, correlation coefficients (r²) were calculated between the index SNP and all neighboring SNPs cited in the June 2006 HapMap data set release. An r² cut off of 0.50 was selected for inclusion as evidence for strong genetic linkage, i.e., a “strong linkage disequilibrium.

TABLE 226A
Linked SNPs

| SNP | r² | Position on chr21 | SEQ ID NO |
|---|---|---|---|
| rs2824844 | 0.688 | 18771052 | 5542 |
| rs2824854 | 0.653 | 18791084 | 5543 |
| rs2824888 | — | 18809897 | 5544 |
| rs2824902 | 0.706 | 18820035 | 5545 |

### Example 227

[0642] For individuals with colorectal cancer, the distribution of polymorphic alleles at position 20282727 of chromosome 21 was different from those without colorectal cancer (Table 227). The recessive test for risk associated with carrying the C allele had an empirical p-value of 0.001142 based on permutation analysis, and the corresponding recessive odds ratio is 1.409 (Table 227). These data further suggest that this marker is associated with colorectal cancer risk and that the C allele at position 20282727 of chromosome 21 is associated with an increased risk of developing colorectal cancer.

TABLE 227

| | |
|---|---|
| rs no. | 12482714 |
| Chromosome; Position | 21; 20282727 |
| Gene Name | unknown |
| Genotype; Phenotype | n = C; increased risk |
| Hardy-Weinberg | 0.22729 |

| Case | | | | | | | Odds |
|---|---|---|---|---|---|---|---|
| Flag | Allele B | AA | AB | BB | Model | p-Value | Ratio |
| 0 | C | 271 | 517 | 210 | Recessive | 0.001142 | 1.409 |
| 1 | C | 258 | 461 | 270 | | | |

[0643] Table 227A indicates SNPs found to be in strong linkage disequilibrium with rs12482714. To generate this list, correlation coefficients (r²) were calculated between the index SNP and all neighboring SNPs cited in the June 2006 HapMap data set release. An r² cut off of 0.50 was selected for inclusion as evidence for strong genetic linkage, i.e., a “strong linkage disequilibrium.

TABLE 227A
Linked SNPs

| SNP | r² | Position on chr21 | SEQ ID NO |
|---|---|---|---|
| rs2825896 | 0.564 | 20218657 | 5546 |
| rs2825899 | 0.571 | 20222308 | 5547 |
| rs2825905 | 0.561 | 20226492 | 5548 |
| rs2825910 | 0.591 | 20228734 | 5549 |
| rs12482291 | 0.591 | 20232506 | 5550 |
| rs2825922 | 0.714 | 20243479 | 5551 |
| rs13047152 | 0.714 | 20257959 | 5552 |
| rs12482827 | 0.714 | 20261725 | 5553 |
| rs377685 | 1.0 | 20272988 | 5554 |
| rs7281221 | 0.51 | 20274521 | 5555 |
| rs2825928 | 0.522 | 20274865 | 5556 |
| rs2825930 | 1.0 | 20279236 | 5557 |
| rs12482714 | — | 20282727 | 5558 |
| rs2825941 | 0.966 | 20308050 | 5559 |

### Example 228

[0644] For individuals with colorectal cancer, the distribution of polymorphic alleles at position 25192249 of chromosome 21 was different from those without colorectal cancer (Table 228). The recessive test for risk associated with carrying the C allele had an empirical p-value of 0.001184 based on permutation analysis, and the corresponding recessive odds ratio is 1.654 (Table 228). These data further suggest that this marker is associated with colorectal cancer risk and that the C allele at position 25192249 of chromosome 21 is associated with an increased risk of developing colorectal cancer.

TABLE 228

| | |
|---|---|
| rs no. | 2250059 |
| Chromosome; Position | 21; 25192249 |
| Gene Name | unknown |
| Genotype; Phenotype | n = C; increased risk |
| Hardy-Weinberg | 0.07151 |

| Case | | | | | | | Odds |
|---|---|---|---|---|---|---|---|
| Flag | Allele B | AA | AB | BB | Model | p-Value | Ratio |
| 0 | C | 510 | 455 | 76 | Recessive | 0.001184 | 1.654 |
| 1 | C | 451 | 378 | 108 | | | |

[0645] Table 228A indicates SNPs found to be in strong linkage disequilibrium with rs2250059. To generate this list, correlation coefficients (r²) were calculated between the index SNP and all neighboring SNPs cited in the June 2006 HapMap data set release. An r² cut off of 0.50 was selected for inclusion as evidence for strong genetic linkage, i.e., a “strong linkage disequilibrium.

TABLE 228A
Linked SNPs

| SNP | r² | Position on chr21 | SEQ ID NO |
|---|---|---|---|
| rs4402842 | 0.524 | 25132923 | 5560 |
| rs13052483 | 0.669 | 25139728 | 5561 |
| rs6516641 | 0.59 | 25142953 | 5562 |
| rs6516643 | 0.59 | 25144269 | 5563 |
| rs2829434 | 0.687 | 25149891 | 5564 |
| rs1892725 | 0.603 | 25150796 | 5565 |
| rs1892727 | 1.0 | 25154439 | 5566 |
| rs2829438 | 0.651 | 25157062 | 5567 |
| rs1012660 | 0.669 | 25158001 | 5568 |
| rs1012662 | 0.668 | 25158027 | 5569 |
| rs2226391 | 0.669 | 25162631 | 5570 |
| rs2829441 | 0.669 | 25163382 | 5571 |
| rs2829443 | 0.669 | 25164231 | 5572 |
| rs2226392 | 0.669 | 25172000 | 5573 |
| rs2154618 | 0.669 | 25174725 | 5574 |
| rs2829447 | 0.669 | 25179102 | 5575 |
| rs2154619 | 0.669 | 25181676 | 5576 |
| rs2829448 | 0.669 | 25184885 | 5577 |
| rs2829451 | 0.781 | 25188509 | 5578 |
| rs11087936 | 1.0 | 25190795 | 5579 |
| rs2250059 | — | 25192249 | 5580 |
| rs2829454 | 0.781 | 25194942 | 5581 |
| rs2829456 | 0.781 | 25195327 | 5582 |
| rs9984205 | 0.655 | 25202797 | 5583 |
| rs2829464 | 0.781 | 25203906 | 5584 |
| rs12627329 | 0.781 | 25205864 | 5585 |
| rs2829465 | 0.508 | 25216178 | 5586 |
| rs2409056 | 0.508 | 25219492 | 5587 |
| rs2829466 | 0.508 | 25220024 | 5588 |
| rs17000583 | 0.542 | 25262070 | 5589 |

### Example 229

[0646] For individuals with colorectal cancer, the distribution of polymorphic alleles at position 40477600 of chromosome 21, found within the DSCAM gene, was different from those without colorectal cancer (Table 229). The trend test for risk associated with carrying the C allele had an empirical p-value of 0.000652 based on permutation analysis, and the corresponding Mantel-Haenszel odds ratio for trend is 1.249 (Table 229). These data further suggest that this marker, located within the DSCAM gene, is associated with colorectal cancer risk and that the C allele at position 40477600 of chromosome 21 is associated with an increased risk of developing colorectal cancer.

TABLE 229

| | |
|---|---|
| rs no. | 1000371 |
| Chromosome; Position | 21; 40477600 |
| Gene Name | DSCAM |
| SEQ ID NO; Position | 5703; 663310 |
| Genotype; Phenotype | n = C; increased risk |
| Hardy-Weinberg | 0.73980 |

| Case | | | | | | | Odds |
|---|---|---|---|---|---|---|---|
| Flag | Allele B | AA | AB | BB | Model | p-Value | Ratio |
| 0 | C | 550 | 385 | 63 | Trend | 0.000652 | 1.249 |
| 1 | C | 486 | 395 | 103 | | | |

[0647] Table 229A indicates SNPs found to be in strong linkage disequilibrium with rs1000371. To generate this list, correlation coefficients (r²) were calculated between the index SNP and all neighboring SNPs cited in the June 2006 HapMap data set release. An r² cut off of 0.50 was selected for inclusion as evidence for strong genetic linkage, i.e., a “strong linkage disequilibrium.

TABLE 229A
Linked SNPs

| SNP | r² | Position on chr21 | SEQ ID NO |
|---|---|---|---|
| rs2837479 | 0.58 | 40467923 | 5590 |
| rs2837480 | 0.604 | 40468825 | 5591 |
| rs7278294 | 0.539 | 40469751 | 5592 |
| rs11908938 | 0.561 | 40470121 | 5593 |
| rs8130311 | 0.606 | 40471529 | 5594 |
| rs3804022 | 0.58 | 40473045 | 5595 |
| rs1000371 | — | 40477600 | 5596 |
| rs1000373 | 0.821 | 40478284 | 5597 |
| rs2898402 | 0.781 | 40478922 | 5598 |
| rs726105 | 0.55 | 40485092 | 5599 |
| rs726103 | 0.589 | 40485283 | 5600 |
| rs2837481 | 0.622 | 40487282 | 5601 |
| rs2837482 | 0.55 | 40487855 | 5602 |
| rs2837483 | 0.57 | 40487938 | 5603 |
| rs8127634 | 0.532 | 40488679 | 5604 |
| rs8128592 | 0.514 | 40488748 | 5605 |
| rs2837485 | 0.532 | 40488921 | 5606 |
| rs2837489 | 0.532 | 40489274 | 5607 |
| rs9978725 | 0.532 | 40489378 | 5608 |
| rs9979293 | 0.532 | 40489417 | 5609 |
| rs9981386 | 0.525 | 40489901 | 5610 |
| rs1882797 | 0.56 | 40491419 | 5611 |
| rs7278621 | 0.517 | 40494077 | 5612 |
| rs2837491 | 0.567 | 40494926 | 5613 |
| rs2005934 | 0.567 | 40495261 | 5614 |
| rs2837492 | 0.55 | 40496156 | 5615 |

### Example 230

[0648] For individuals with colorectal cancer, the distribution of polymorphic alleles at position 17935876 of chromosome 22 was different from those without colorectal cancer (Table 230). The trend test for risk associated with carrying the G allele had an empirical p-value of 0.001457 based on permutation analysis, and the corresponding Mantel-Haenszel odds ratio for trend is 1.259 (Table 230). These data further suggest that this marker is associated with colorectal cancer risk and that the G allele at position 17935876 of chromosome 22 is associated with an increased risk of developing colorectal cancer.

TABLE 230

| | |
|---|---|
| rs no. | 7286951 |
| Chromosome; Position | 22; 17935876 |
| Gene Name | unknown |
| Genotype; Phenotype | n = G; increased risk |
| Hardy-Weinberg | 1 |

| Case | | | | | | | Odds |
|---|---|---|---|---|---|---|---|
| Flag | Allele B | AA | AB | BB | Model | p-Value | Ratio |
| 0 | G | 73 | 397 | 541 | Trend | 0.001457 | 1.259 |
| 1 | G | 50 | 352 | 600 | | | |

[0649] Table 230A indicates SNPs found to be in strong linkage disequilibrium with rs7286951. To generate this list, correlation coefficients (r²) were calculated between the index SNP and all neighboring SNPs cited in the June 2006 HapMap data set release. An r² cut off of 0.50 was selected for inclusion as evidence for strong genetic linkage, i.e., a “strong linkage disequilibrium.

TABLE 230A
Linked SNPs

| SNP | r² | Position on chr22 | SEQ ID NO |
|---|---|---|---|
| rs7286951 | — | 17935876 | 5616 |
| rs4819808 | 0.947 | 17941703 | 5617 |
| rs5746789 | 0.514 | 17944549 | 5618 |

[0650] Another aspect of the invention is a method of diagnosing colorectal cancer in an individual, or determining whether the individual is at altered risk for colorectal cancer, by detecting polymorphism in a subject by treating a tissue sample from the subject with an antibody to a polymorphic genetic variant of the present invention and detecting binding of said antibody. A person of skill in the art would know how to produce such an antibody (see, for instance, Harlow, E. and Lane, eds., 1988, “Antibodies: A Laboratory Manual”, Cold Spring Harbor Press, Cold Spring Harbor). Such antibodies may include, but are not limited to polyclonal antibodies, monoclonal antibodies (mAbs), humanized or chimeric antibodies, single chain antibodies, Fab fragments, F(ab′)₂ fragments, fragments produced by a Fab expression library, anti-idiotypic (anti-Id) antibodies and epitope-binding fragments of any of the above. The present invention also provides an animal model to study colorectal cancer and susceptibility to colorectal cancer. Such studies can be performed using transgenic animals. For example, one can produce transgenic mice, which contain a specific allelic variant of a containing any of the SNPs disclosed herein. These mice can be created, e.g., by replacing their wild-type gene with an allele containing a SNP disclosed herein, or of the corresponding human gene containing such a SNP.

[0651] In a preferred embodiment, the present invention provides a transgenic mammalian animal, said animal having cells incorporating a recombinant expression system adapted to express a gene containing a SNP disclosed herein (preferably the human gene containing a SNP disclosed herein). Generally, the recombinant expression system will be stably integrated into the genome of the transgenic animal and will thus be heritable so that the offspring of such a transgenic animal may themselves contain the transgene. Transgenic animals can be engineered by introducing the a nucleic acid molecule containing only the coding portion of the gene into the genome of animals of interest, using standard techniques for producing transgenic animals. Animals that can serve as a target for transgenic manipulation include, without limitation, mice, rats, rabbits, guinea pigs, sheep, goats, pigs, and non-human primates, e.g. baboons, chimpanzees and monkeys. Techniques known in the art to introduce a transgene into such animals include pronucleic microinjection (U.S. Pat. No. 4,873,191); retrovirus-mediated gene transfer into germ lines (e.g. Van der Putten et al. 1985, Proc. Natl. Acad. Sci. USA 82: 6148-6152); gene targeting in embryonic stem cells (Thompson et al., Cell 56 (1989), 313-321); electroporation of embryos and sperm-mediated gene transfer (for a review, see for example, U.S. Pat. No. 4,736,866). For the purpose of the present invention, transgenic animals include those that carry the recombinant molecule only in part of their cells (“mosaic animals”). The molecule can be integrated either as a single transgene, or in concatamers. Selective introduction of a nucleic acid molecule into a particular cell type is also possible by following, for example, the technique of Lasko et al., Proc. Natl. Acad. Sci. USA 89 (1992): 6232-6236. Particular cells could also be targeted for molecular incorporation with tissue-specific enhancers. The expression of the integrated molecule can be monitored by standard techniques such as in situ hybridization, Northern Blot analysis, PCR or immunocytochemistry. Transgenic animals that include a copy of such a nucleic acid molecule introduced into the germ line of the animal at an embryonic stage can be used to examine the effect of increased expression of DNA encoding the corresponding protein. In accordance with this facet of the invention, an animal is treated with the reagent and a reduced incidence of the pathological condition, compared to untreated animals bearing the transgene, would indicate a potential therapeutic intervention for the pathological condition.

[0652] The present invention has been described in detail by way of illustration and example in order to acquaint others skilled in the art with the invention, its principles and its practical application. Particular formulations and processes of the present invention are not limited to the descriptions of the specific embodiments presented, but rather the descriptions and examples should be viewed in terms of the claims that follow and their equivalents. While some of the examples and descriptions above include some conclusions about the way the invention may function, the inventors do not intend to be bound by those conclusions and functions, but put them forth only as possible explanations.

[0653] It is to be further understood that the specific embodiments of the present invention as set forth are not intended as being exhaustive or limiting of the invention, and that many alternatives, modifications and variations will be apparent to those of ordinary skill in the art in light of the foregoing examples and detailed description. Accordingly, this invention is intended to embrace all such alternatives, modifications and variations that fall within the spirit and scope of the following claims.

### REFERENCE LIST

[0654] All publications mentioned in the specification are herein incorporated by reference to the same extent as if each individual publication was specifically and individually indicated to be incorporated by reference herein.
[0655] (1999) Current Protocols in Molecular Biology. Wiley, New York.
[0656] (2005) Remington's Pharmaceutical Sciences. Mack.
[0657] Abderrahmani A, Steinmann M, Plaisance V, Niederhauser G, Haefliger J A, Mooser V, Bonny C, Nicod P and Waeber G (2001) The Transcriptional Repressor REST Determines the Cell-Specific Expression of the Human MAPK8IP1 Gene Encoding IB1 (JIP-1). Mol Cell Biol 21: pp 7256-7267.
[0658] Abecasis G R, Noguchi E, Heinzmann A, Traherne J A, Bhattacharyya S, Leaves N I, Anderson G G, Zhang Y, Lench N J, Carey A, Cardon L R, Moffatt M F and Cookson W O (2001) Extent and Distribution of Linkage Disequilibrium in Three Genomic Regions. Am J Hum Genet 68: pp 191-197.
[0659] Agresti A (2001) Exact Inference for Categorical Data: Recent Advances and Continuing Controversies. Stat Med 20: pp 2709-2722.
[0660] Ansell R J, Kriz D and Mosbach K (1996) Molecularly Imprinted Polymers for Bioanalysis: Chromatography, Binding Assays and Biomimetic Sensors. Curr Opin Biotechnol 7: pp 89-94.
[0661] Banerji J, Olson L and Schaffner W (1983) A Lymphocyte-Specific Cellular Enhancer Is Located Downstream of the Joining Region in Immunoglobulin Heavy Chain Genes. Cell 33: pp 729-740.
[0662] Bartel D P and Szostak J W (1993) Isolation of New Ribozymes From a Large Pool of Random Sequences. Science 261: pp 1411-1418.
[0663] Bartel P, Chien C T, Sternglanz R and Fields S (1993) Elimination of False Positives That Arise in Using the Two-Hybrid System. Biotechniques 14: pp 920-924.
[0664] Beidler C B, Ludwig J R, Cardenas J, Phelps J, Papworth C G, Melcher E, Sierzega M, Myers L J, Unger B W, Fisher M and . (1988) Cloning and High Level Expression of a Chimeric Antibody With Specificity for Human Carcinoembryonic Antigen. J Immunol 141: pp 4053-4060.
[0665] Better M, Chang C P, Robinson R R and Horwitz A H (1988) Escherichia Coli Secretion of an Active Chimeric Antibody Fragment. Science 240: pp 1041-1043.
[0666] Bhattacharya-Chatterjee M and Foon K A (1998) Anti-Idiotype Antibody Vaccine Therapies of Cancer. Cancer Treat Res 94:51-68: pp 51-68.
[0667] Bosher J M and Labouesse M (2000) RNA Interference: Genetic Wand and Genetic Watchdog. Nat Cell Biol 2: pp E31-E36.
[0668] Byrne G W and Ruddle F H (1989) Multiplex Gene Regulation: a Two-Tiered Approach to Transgene Regulation in Transgenic Mice. Proc Natl Acad Sci USA 86: pp 5473-5477.
[0669] Calame K and Eaton S (1988) Transcriptional Controlling Elements in the Immunoglobulin and T Cell Receptor Loci. Adv Immunol 43:235-75: pp 235-275.
[0670] Camper S A and Tilghman S M (1989) Postnatal Repression of the Alpha-Fetoprotein Gene Is Enhancer Independent. Genes Dev 3: pp 537-546.
[0671] Caplen N J, Parrish S, Imani F, Fire A and Morgan R A (2001a) Specific Inhibition of Gene Expression by Small Double-Stranded RNAs in Invertebrate and Vertebrate Systems. Proc Natl Acad Sci USA 98: pp 9742-9747.
[0672] Caplen N J, Parrish S, Imani F, Fire A and Morgan R A (2001b) Specific Inhibition of Gene Expression by Small Double-Stranded RNAs in Invertebrate and Vertebrate Systems. Proc Natl Acad Sci USA 98: pp 9742-9747.
[0673] Carstensen B, Soll-Johanning H, Villadsen E, Sondergaard J O and Lynge E (1996) Familial Aggregation of Colorectal Cancer in the General Population. Int J Cancer 68: pp 428-435.
[0674] Chen S H, Shine H D, Goodman J C, Grossman R G and Woo S L (1994) Gene Therapy for Brain Tumors: Regression of Experimental Gliomas by Adenovirus-Mediated Gene Transfer in Vivo. Proc Natl Acad Sci USA 91: pp 3054-3057.
[0675] Cho C Y, Moran E J, Cherry S R, Stephans J C, Fodor S P, Adams C L, Sundaram A, Jacobs J W and Schultz P G (1993) An Unnatural Biopolymer. Science 261: pp 1303-1305.
[0676] Clark A G, Weiss K M, Nickerson D A, Taylor S L, Buchanan A, Stengard J, Salomaa V, Vartiainen E, Perola M, Boerwinkle E and Sing C F (1998) Haplotype Structure and Population Genetic Inferences From Nucleotide-Sequence Variation in Human Lipoprotein Lipase. Am J Hum Genet 63: pp 595-612.
[0677] Colcher D, Pavlinkova G, Beresford G, Booth B J and Batra S K (1999) Single-Chain Antibodies in Pancreatic Cancer. Ann N Y Acad Sci 880:263-80: pp 263-280.
[0678] Collins F S, Brooks L D and Chakravarti A (1998) A DNA Polymorphism Discovery Resource for Research on Human Genetic Variation. Genome Res 8: pp 1229-1231.
[0679] Cotton R G, Rodrigues N R and Campbell R D (1988) Reactivity of Cytosine and Thymine in Single-Base-Pair Mismatches With Hydroxylamine and Osmium Tetroxide and Its Application to the Study of Mutations. Proc Natl Acad Sci USA 85: pp 4397-4401.
[0680] Cronin M T, Fucini R V, Kim S M, Masino R S, Wespi R M and Miyada C G (1996) Cystic Fibrosis Mutation Detection by Hybridization to Light-Generated DNA Probe Arrays. Hum Mutat 7: pp 244-255.
[0681] Crow J F (1995) Spontaneous Mutation As a Risk Factor. Exp Clin Immunogenet 12: pp 121-128.
[0682] Cruikshank W W, Doctrow S R, Falvo M S, Huffman K, Maciaszek J. Viglianti G. Raina Kornfeld H and Malfroy B (1997) A Lipidated Anti-Tat Antibody Enters Living Cells and Blocks HIV-1 Viral Replication. J Acquir Immune Defic Syndr Hum Retrovirol 14: pp 193-203.
[0683] Cull M G, Miller J F and Schatz P J (1992) Screening for Receptor Ligands Using Large Libraries of Peptides Linked to the C Terminus of the Lac Repressor. Proc Natl Acad Sci USA 89: pp 1865-1869.
[0684] Cwirla S E, Peters E A, Barrett R W and Dower W J (1990) Peptides on Phage: a Vast Library of Peptides for Identifying Ligands. Proc Natl Acad Sci USA 87: pp 6378-6382.
[0685] Daly M J, Rioux J D, Schaffner S F, Hudson T J and Lander E S (2001) High-Resolution Haplotype Structure in the Human Genome. Nat Genet 29: pp 229-232.
[0686] Dawson E, Abecasis G R, Bumpstead S, Chen Y, Hunt S, Beare D M, Pabial J, Dibling T, Tinsley E, Kirby S, Carter D, Papaspyridonos M, Livingstone S, Ganske R, Lohmussaar E, Zernant J, Tonisson N, Remm M, Magi R, Puurand T, Vilo J, Kurg A, Rice K, Deloukas P, Mott R, Metspalu A, Bentley D R, Cardon L R and Dunham I (2002) A First-Generation Linkage Disequilibrium Map of Human Chromosome 22. Nature 418: pp 544-548.
[0687] de Leon M P, Pedroni M, Benatti P, Percesepe A, Di Gregorio C, Foroni M, Rossi G, Genuardi M, Neri G, Leonardi F, Viel A, Capozzi E, Boiocchi M and Roncucci L (1999) Hereditary Colorectal Cancer in the General Population: From Cancer Registration to Molecular Diagnosis. Gut 45: pp 32-38.
[0688] Devlin J J, Panganiban L C and Devlin P E (1990) Random Peptide Libraries: a Source of Specific Protein Binding Molecules. Science 249: pp 404-406.
[0689] DeWitt S H, Kiely J S, Stankovic C J, Schroeder M C, Cody D M and Pavia M R (1993) “Diversomers”: an Approach to Nonpeptide, Nonoligomeric Chemical Diversity. Proc Natl Acad Sci USA 90: pp 6909-6913.
[0690] Dunning A M, Durocher F, Healey C S, Teare M D, McBride S E, Carlomagno F, Xu C F, Dawson E, Rhodes S, Ueda S, Lai E, Luben R N, Van Rensburg E J, Mannermaa A, Kataja V, Rennart G, Dunham I, Purvis I, Easton D and Ponder B A (2000) The Extent of Linkage Disequilibrium in Four Populations With Distinct Demographic Histories. Am J Hum Genet 67: pp 1544-1554.
[0691] Edlund T, Walker M D, Barr P J and Rutter W J (1985) Cell-Specific Expression of the Rat Insulin Gene Evidence for Role of Two Distinct 5′ Flanking Elements. Science 230: pp 912-916.
[0692] Elbashir S M, Harborth J, Weber K and Tuschl T (2002) Analysis of Gene Function in Somatic Mammalian Cells Using Small Interfering RNAs. Methods 26: pp 199-213.
[0693] Erb E, Janda K D and Brenner S (1994) Recursive Deconvolution of Combinatorial Chemical Libraries. Proc Natl Acad Sci USA 91: pp 11422-11426.
[0694] Felici F, Castagnoli L, Musacchio A, Jappelli R and Cesareni G (1991) Selection of Antibody Ligands From a Large Library of Oligopeptides Expressed on a Multivalent Exposition Vector. J Mol Biol 222: pp 301-310.
[0695] Fodor S P, Rava R P, Huang X C, Pease A C, Holmes C P and Adams C L (1993) Multiplexed Biochemical Assays With Biological Chips. Nature 364: pp 555-556.
[0696] Gabriel S B, Schaffner S F, Nguyen H, Moore J M, Roy J, Blumenstiel B, Higgins J, DeFelice M, Lochner A, Faggart M, Liu-Cordero S N, Rotimi C, Adeyemo A, Cooper R, Ward R, Lander E S, Daly M J and Altshuler D (2002) The Structure of Haplotype Blocks in the Human Genome. Science 296: pp 2225-2229.
[0697] Gallop M A, Barrett R W, Dower W J, Fodor S P and Gordon E M (1994) Applications of Combinatorial Technologies to Drug Discovery. 1. Background and Peptide Combinatorial Libraries. J Med Chem 37: pp 1233-1251.
[0698] Gautier C, Morvan F, Rayner B, Huynh-Dinh T, Igolen J, Imbach J L, Paoletti C and Paoletti J (1987) Alpha-DNA. IV: Alpha-Anomeric and Beta-Anomeric Tetrathymidylates Covalently Linked to Intercalating Oxazolopyridocarbazole. Synthesis, Physicochemical Properties and Poly (RA) Binding. Nucleic Acids Res 15: pp 6625-6641.
[0699] Goeddel D V (1990) Systems for Heterologous Gene Expression. Methods Enzymol 185:3-7: pp 3-7.
[0700] Gottesman S (1990) Minimizing Proteolysis in Escherichia Coli: Genetic Solutions. Methods Enzymol 185:119-29: pp 119429.
[0701] Hage D S and Tweed S A (1997) Recent Advances in Chromatographic and Electrophoretic Methods for the Study of Drug-Protein Interactions. J Chromatogr B Biomed Sci Appl 699: pp 499-525.
[0702] Haseloff J and Gerlach W L (1988) Simple RNA Enzymes With New and Highly Specific Endoribonuclease Activities. Nature 334: pp 585-591.
[0703] Heegaard N H (1998) Capillary Electrophoresis for the Study of Affinity Interactions. J Mol Recognit 11: pp 141-148.
[0704] Helene C (1991) The Anti-Gene Strategy: Control of Gene Expression by Triplex-Forming-Oligonucleotides. Anticancer Drug Des 6: pp 569-584.
[0705] Helene C, Thuong N T and Harel-Bellan A (1992) Control of Gene Expression by Triple Helix-Forming Oligonucleotides. The Antigene Strategy. Ann NY Acad Sci 660:27-36: pp 27-36.
[0706] Herlyn D and Birebent B (1999) Advances in Cancer Vaccine Development. Ann Med 31: pp 66-78.
[0707] Herzog T J (2003) New approaches for the management of cervical cancer. Gynecol Oncol. (3 Pt 2):S22-7.
[0708] Houghten R A, Appel J R, Blondelle S E, Cuervo J H, Dooley C T and Pinilla C (1992) The Use of Synthetic Peptide Combinatorial Libraries for the Identification of Bioactive Peptides. Biotechniques 13: pp 412-421.
[0709] Hyrup B and Nielsen P E (1996) Peptide Nucleic Acids (PNA): Synthesis, Properties and Potential Applications. Bioorg Med Chem 4: pp 5-23.
[0710] Inoue H, Hayase Y, Imura A, Iwai S, Miura K and Ohtsuka E (1987a) Synthesis and Hybridization Studies on Two Complementary Nona (2′-O-Methyl) Ribonucleotides. Nucleic Acids Res 15: pp 6131-6148.

[0711] Inoue H, Hayase Y, Iwai S and Ohtsuka E (1987b) Sequence-Dependent Hydrolysis of RNA Using Modified Oligonucleotide Splints and RNase H. FEBS Lett 215: pp 327-330.
[0712] Iwabuchi K, Li B, Bartel P and Fields S (1993) Use of the Two-Hybrid System to Identify the Domain of P53 Involved in Oligomerization. Oncogene 8: pp 1693-1696.
[0713] Jespers L S, Roberts A, Mahler S M, Winter G and Hoogenboom H R (1994) Guiding the Selection of Human Antibodies From Phage Display Repertoires to a Single Epitope of an Antigen. Biotechnology (NY) 12: pp 899-903.
[0714] Kessel M and Gruss P (1990) Murine Developmental Control Genes. Science 249: pp 374-379.
[0715] Kikuchi T, Daigo Y, Katagiri T, Tsunoda T, Okada K, Kakiuchi S, Zembutsu H, Furukawa Y, Kawamura M, Kobayashi K, Imai K and Nakamura Y (2003) Expression Profiles of Non-Small Cell Lung Cancers on CDNA Microarrays: Identification of Genes for Prediction of Lymph-Node Metastasis and Sensitivity to Anti-Cancer Drugs. Oncogene 22: pp 2192-2205.
[0716] Kondrashov A S (1995) Contamination of the Genome by Very Slightly Deleterious Mutations: Why Have We Not Died 100 Times Over? J Theor Biol 175: pp 583-594.
[0717] Kozal M J, Shah N, Shen N, Yang R, Fucini R, Merigan T C, Richman D D, Morris D, Hubbell E, Chee M and Gingeras T R (1996) Extensive Polymorphisms Observed in HIV-1 Clade B Protease Gene Using High-Density Oligonucleotide Arrays. Nat Med 2: pp 753-759.
[0718] Lam K S (1997) Application of Combinatorial Library Methods in Cancer Research and Drug Discovery. Anticancer Drug Des 12: pp 145-167.
[0719] Lam K S, Salmon S E, Hersh E M, Hruby V J, Kazmierski W M and Knapp R J (1991) A New Type of Synthetic Peptide Library for Identifying Ligand-Binding Activity. Nature 354: pp 82-84.
[0720] Lemaitre M, Bayard B and Lebleu B (1987) Specific Antiviral Activity of a Poly (L-Lysine)-Conjugated Oligodeoxyribonucleotide Sequence Complementary to Vesicular Stomatitis Virus N Protein MRNA Initiation Site. Proc Natl Acad Sci USA 84: pp 648-652.
[0721] Letsinger R L, Zhang G R, Sun D K, Ikeuchi T and Sarin P S (1989) Cholesteryl-Conjugated Oligonucleotides: Synthesis, Properties, and Activity As Inhibitors of Replication of Human Immunodeficiency Virus in Cell Culture. Proc Natl Acad Sci USA 86: pp 6553-6556.
[0722] Liu A Y, Robinson R R, Hellstrom K E, Murray E D, Jr., Chang C P and Hellstrom I (1987a) Chimeric Mouse-Human IgG1 Antibody That Can Mediate Lysis of Cancer Cells. Proc Natl Acad Sci USA 84: pp 3439-3443.
[0723] Liu A Y, Robinson R R, Murray E D, Jr., Ledbetter J A, Hellstrom I and Hellstrom K E (1987b) Production of a Mouse-Human Chimeric Monoclonal Antibody to CD20 With Potent Fc-Dependent Biologic Activity. J Immunol 139: pp 3521-3526.
[0724] Liu N, Sawyer S L, Mukherjee N, Pakstis A J, Kidd J R, Kidd K K, Brookes A J and Zhao H (2004) Haplotype Block Structures Show Significant Variation Among Populations. Genet Epidemiol 27: pp 385-400.
[0725] Lonberg N and Huszar D (1995) Human Antibodies From Transgenic Mice. Int Rev Immunol 13: pp 65-93.
[0726] Lynch H T and de La C A (2003) Hereditary Colorectal Cancer. N Engl J Med 348: pp 919-932.
[0727] Madura K, Dohmen R J and Varshaysky A (1993) N-Recognin/Ubc2 Interactions in the N-End Rule Pathway. J Biol Chem 268: pp 12046-12054.
[0728] Maher L J, III (1992) DNA Triple-Helix Formation: an Approach to Artificial Gene Repressors? Bioessays 14: pp 807-815.
[0729] Malik F, Delgado C, Knusli C, Irvine A E, Fisher D and Francis G E (1992) Polyethylene Glycol (PEG)-Modified Granulocyte-Macrophage Colony-Stimulating Factor (GM-CSF) With Conserved Biological Activity. Exp Hematol 20: pp 1028-1035.
[0730] Marasco W A, Haseltine W A and Chen S Y (1993) Design, Intracellular Expression, and Activity of a Human Anti-Human Immunodeficiency Virus Type 1 Gp120 Single-Chain Antibody. Proc Natl Acad Sci USA 90: pp 7889-7893.
[0731] McConnell H M, Owicki J C, Parce J W, Miller D L, Baxter G T, Wada H G and Pitchford S (1992) The Cytosensor Microphysiometer: Biological Applications of Silicon Technology. Science 257: pp 1906-1912.
[0732] Morrison S L (1985) Transfectomas Provide Novel Chimeric Antibodies. Science 229: pp 1202-1207.
[0733] Myers R M, Larin Z and Maniatis T (1985) Detection of Single Base Substitutions by Ribonuclease Cleavage at Mismatches in RNA:DNA Duplexes. Science 230: pp 1242-1246.
[0734] Nishimura Y, Yokoyama M, Araki K, Ueda R, Kudo A and Watanabe T (1987) Recombinant Human-Mouse Chimeric Monoclonal Antibody Specific for Common Acute Lymphocytic Leukemia Antigen. Cancer Res 47: pp 999-1005.
[0735] Osborne S E, Matsumura I and Ellington A D (1997) Aptamers As Therapeutic and Diagnostic Reagents: Problems and Prospects. Curr Opin Chem Biol 1: pp 5-9.
[0736] Patel D J (1997) Structural Analysis of Nucleic Acid Aptamers. Curr Opin Chem Biol 1: pp 32-46.
[0737] Perry-O'Keefe H, Yao X W, Coull J M, Fuchs M and Egholm M (1996) Peptide Nucleic Acid Pre-Gel Hybridization: an Alternative to Southern Hybridization. Proc Natl Acad Sci USA 93: pp 14670-14675.
[0738] Pinkert C A, Ornitz D M, Brinster R L and Palmiter R D (1987) An Albumin Enhancer Located 10 Kb Upstream Functions Along With Its Promoter to Direct Efficient, Liver-Specific Expression in Transgenic Mice. Genes Dev 1: pp 268-276.
[0739] Queen C and Baltimore D (1983) Immunoglobulin Gene Transcription Is Activated by Downstream Sequence Elements. Cell 33: pp 741-748.
[0740] Reich D E, Cargill M, Bolk S, Ireland J, Sabeti P C, Richter D J, Layery T, Kouyoumjian R, Farhadian S F, Ward R and Lander E S (2001) Linkage Disequilibrium in the Human Genome. Nature 411: pp 199-204.
[0741] Reiter Y and Pastan I (1996) Antibody Engineering of Recombinant Fv Immunotoxins for Improved Targeting of Cancer: Disulfide-Stabilized Fv Immunotoxins. Clin Cancer Res 2: pp 245-252.
[0742] Rioux J D, Daly M J, Silverberg M S, Lindblad K, Steinhart H, Cohen Z, Delmonte T, Kocher K, Miller K, Guschwan S, Kulbokas E J, O'Leary S, Winchester E, Dewar K, Green T, Stone V, Chow C, Cohen A, Langelier D, Lapointe G, Gaudet D, Faith J, Branco N, Bull S B, McLeod R S, Griffiths A M, Bitton A, Greenberg G R, Lander E S, Siminovitch K A and Hudson T J (2001) Genetic Variation in the 5q31 Cytokine Gene Cluster Confers Susceptibility to Crohn Disease. Nat Genet 29: pp 223-228.
[0743] Rivas G and Minton A P (1993) New Developments in the Study of Biomolecular Associations Via Sedimentation Equilibrium. Trends Biochem Sci 18: pp 284-287.
[0744] Sachidanandam R, Weissman D, Schmidt S C, Kakol J M, Stein L D, Marth G, Sherry S, Mullikin J C, Mortimore B J, Willey D L, Hunt S E, Cole C G, Coggill P C, Rice C M, Ning Z, Rogers J, Bentley D R, Kwok P Y, Mardis E R, Yeh R T, Schultz B, Cook L, Davenport R, Dante M, Fulton L, Hillier L, Waterston R H, McPherson J D, Gilman B, Schaffner S, Van Etten W J, Reich D, Higgins J, Daly M J, Blumenstiel B, Baldwin J, Stange-Thomann N, Zody M C, Linton L, Lander E S and Altshuler D (2001) A Map of Human Genome Sequence Variation Containing 1.42 Million Single Nucleotide Polymorphisms. Nature 409: pp 928-933.
[0745] Saiki R K, Bugawan T L, Horn G T, Mullis K B and Erlich H A (1986) Analysis of Enzymatically Amplified Beta-Globin and HLA-DQ Alpha DNA With Allele-Specific Oligonucleotide Probes. Nature 324: pp 163-166.
[0746] Sasieni D P (1997) From Genotypes to Genes: Doubling the Sample Size. Biometrics V.53, (4) 1253-1261.
[0747] Scott J K and Smith G P (1990) Searching for Peptide Ligands With an Epitope Library. Science 249: pp 386-390.
[0748] Shaw D R, Khazaeli M B and LoBuglio A F (1988) Mouse/Human Chimeric Antibodies to a Tumor-Associated Antigen: Biologic Activity of the Four Human IgG Subclasses. J Natl Cancer Inst 80: pp 1553-1559.
[0749] Sjolander S and Urbaniczky C (1991) Integrated Fluid Handling System for Biomolecular Interaction Analysis. Anal Chem 63: pp 2338-2345.
[0750] Smith & Johnson (1988) Single-step purification of polypeptides expressed in Escherichia coli as fusions with glutathione S-transferase. Gene 67: 31-40.
[0751] Sun L K, Curtis P, Rakowicz-Szulczynska E, Ghrayeb J, Chang N, Morrison S L and Koprowski H (1987) Chimeric Antibody With Human Constant Regions and Mouse Variable Regions Directed Against Carcinoma-Associated Antigen 17-1A. Proc Natl Acad Sci USA 84: pp 214-218.
[0752] Szabo A, Stolz L and Granzow R (1995) Surface Plasmon Resonance and Its Use in Biomolecular Interaction Analysis (BIA). Curr Opin Struct Biol 5: pp 699-705.
[0753] Taillon-Miller P, Piernot E E and Kwok P Y (1999) Efficient Approach to Unique Single-Nucleotide Polymorphism Discovery. Genome Res 9: pp 499-505.
[0754] van der Krol A R, Mol J N and Stuitje A R (1988) Modulation of Eukaryotic Gene Expression by Complementary RNA or DNA Sequences. Biotechniques 6: pp 958-976.
[0755] Verhoeyen M, Milstein C and Winter G (1988) Reshaping Human Antibodies: Grafting an Antilysozyme Activity. Science 239: pp 1534-1536.
[0756] Vlatakis G, Andersson L I, Muller R and Mosbach K (1993) Drug Assay Using Antibody Mimics Made by Molecular Imprinting. Nature 361: pp 645-647.
[0757] Wada K, Wada Y, Ishibashi F, Gojobori T and Ikemura T (1992) Codon Usage Tabulated From the GenBank Genetic Sequence Data. Nucleic Acids Res 20 Suppl:2111-8: pp 2111-2118.
[0758] Wang D G, Fan J B, Siao C J, Berno A, Young P, Sapolsky R, Ghandour G, Perkins N, Winchester E, Spencer J, Kruglyak L, Stein L, Hsie L, Topaloglou T, Hubbell E, Robinson E, Mittmann M, Morris M S, Shen N, Kilburn D, Rioux J, Nusbaum C, Rozen S, Hudson T J, Lipshutz R, Chee M and Lander E S (1998) Large-Scale Identification, Mapping, and Genotyping of Single-Nucleotide Polymorphisms in the Human Genome. Science 280: pp 1077-1082.
[0759] Winoto A and Baltimore D (1989) A Novel, Inducible and T Cell-Specific Enhancer Located at the 3′ End of the T Cell Receptor Alpha Locus. EMBO J 8: pp 729-733.
[0760] Wood C R, Boss M A, Kenten J H, Calvert J E, Roberts N A and Emtage J S (1985) The Synthesis and in Vivo Assembly of Functional Antibodies in Yeast. Nature 314: pp 446-449.
[0761] Zervos A S, Gyuris J and Brent R (1993) Mxi1, a Protein That Specifically Interacts With Max to Bind Myc-Max Recognition Sites. Cell 72: pp 223-232.
[0762] Zon G (1988) Oligonucleotide Analogues As Potential Chemotherapeutic Agents. Pharm Res 5: pp 539-549.
[0763] Zuckermann R N, Martin E J, Spellmeyer D C, Stauber G B, Shoemaker K R, Kerr J M, Figliozzi G M, Goff D A. Siani M A, Simon R J and . (1994) Discovery of Nanomolar Ligands for 7-Transmembrane G-Protein-Coupled Receptors From a Diverse N-(Substituted) Glycine Peptoid Library. J Med Chem 37: pp 2678-2685.

1. A method for identifying a human subject as having an increased susceptibility for developing colorectal cancer, said method comprising detecting at least one polymorphism from the group consisting of:
a G nucleotide at a position corresponding to position 331 of SEQ ID. NO: 17;
a C nucleotide at a position corresponding to position 331 of SEQ ID. NO: 24;
a A nucleotide at a position corresponding to position 331 of SEQ ID. NO: 57;
a A nucleotide at a position corresponding to position 331 of SEQ ID. NO: 85;
a G nucleotide at a position corresponding to position 331 of SEQ ID. NO: 189;
a C nucleotide at a position corresponding to position 331 of SEQ ID. NO: 205;
a A nucleotide at a position corresponding to position 331 of SEQ ID. NO: 218;
a A nucleotide at a position corresponding to position 331 of SEQ ID. NO: 246;
a T nucleotide at a position corresponding to position 331 of SEQ ID. NO: 327;
a C nucleotide at a position corresponding to position 331 of SEQ ID. NO: 333;
a C nucleotide at a position corresponding to position 331 of SEQ ID. NO: 371;
a T nucleotide at a position corresponding to position 331 of SEQ ID. NO: 395;
a G nucleotide at a position corresponding to position 331 of SEQ ID. NO: 422;
a G nucleotide at a position corresponding to position 331 of SEQ ID. NO: 432;
a C nucleotide at a position corresponding to position 331 of SEQ ID. NO: 449;
a G nucleotide at a position corresponding to position 331 of SEQ ID. NO: 485;
a T nucleotide at a position corresponding to position 331 of SEQ ID. NO: 496;
a T nucleotide at a position corresponding to position 331 of SEQ ID. NO: 501;
a G nucleotide at a position corresponding to position 331 of SEQ ID. NO: 504;
a G nucleotide at a position corresponding to position 331 of SEQ ID. NO: 518;
a G nucleotide at a position corresponding to position 331 of SEQ ID. NO: 535;
a C nucleotide at a position corresponding to position 331 of SEQ ID. NO: 550;
a T nucleotide at a position corresponding to position 331 of SEQ ID. NO: 560;
a G nucleotide at a position corresponding to position 331 of SEQ ID. NO: 579;
a C nucleotide at a position corresponding to position 331 of SEQ ID. NO: 591;
a G nucleotide at a position corresponding to position 331 of SEQ ID. NO: 621;
a G nucleotide at a position corresponding to position 331 of SEQ ID. NO: 710;
a G nucleotide at a position corresponding to position 331 of SEQ ID. NO: 734;
a A nucleotide at a position corresponding to position 331 of SEQ ID. NO: 745;
a A nucleotide at a position corresponding to position 331 of SEQ ID. NO: 753;
a A nucleotide at a position corresponding to position 331 of SEQ ID. NO: 758;
a C nucleotide at a position corresponding to position 331 of SEQ ID. NO: 796;
a T nucleotide at a position corresponding to position 331 of SEQ ID. NO: 937;
a C nucleotide at a position corresponding to position 331 of SEQ ID. NO: 1042;
a T nucleotide at a position corresponding to position 331 of SEQ ID. NO: 1056;
a G nucleotide at a position corresponding to position 331 of SEQ ID. NO: 1154;
a T nucleotide at a position corresponding to position 331 of SEQ ID. NO: 1170;
a G nucleotide at a position corresponding to position 331 of SEQ ID. NO: 1174;
a C nucleotide at a position corresponding to position 331 of SEQ ID. NO: 1179;
a C nucleotide at a position corresponding to position 331 of SEQ ID. NO: 1205;
a G nucleotide at a position corresponding to position 331 of SEQ ID. NO: 1240;
a G nucleotide at a position corresponding to position 331 of SEQ ID. NO: 1257;
a T nucleotide at a position corresponding to position 331 of SEQ ID. NO: 1267;
a C nucleotide at a position corresponding to position 331 of SEQ ID. NO: 1291;
a A nucleotide at a position corresponding to position 331 of SEQ ID. NO: 1301;
a G nucleotide at a position corresponding to position 331 of SEQ ID. NO: 1332;
a C nucleotide at a position corresponding to position 331 of SEQ ID. NO: 1367;
a G nucleotide at a position corresponding to position 331 of SEQ ID. NO: 1410;
a C nucleotide at a position corresponding to position 331 of SEQ ID. NO: 1462;
a T nucleotide at a position corresponding to position 331 of SEQ ID. NO: 1510;
a G nucleotide at a position corresponding to position 331 of SEQ ID. NO: 1530;
a G nucleotide at a position corresponding to position 331 of SEQ ID. NO: 1544;
a G nucleotide at a position corresponding to position 331 of SEQ ID. NO: 1551;
a G nucleotide at a position corresponding to position 331 of SEQ ID. NO: 1583;
a G nucleotide at a position corresponding to position 331 of SEQ ID. NO: 1589;
a C nucleotide at a position corresponding to position 331 of SEQ ID. NO: 1646;
a G nucleotide at a position corresponding to position 331 of SEQ ID. NO: 1660;
a T nucleotide at a position corresponding to position 331 of SEQ ID. NO: 1700;
a C nucleotide at a position corresponding to position 331 of SEQ ID. NO: 1763;
a C nucleotide at a position corresponding to position 331 of SEQ ID. NO: 1794;
a T nucleotide at a position corresponding to position 331 of SEQ ID. NO: 1795;
a C nucleotide at a position corresponding to position 331 of SEQ ID. NO: 1830;
a A nucleotide at a position corresponding to position 331 of SEQ ID. NO: 1875;
a G nucleotide at a position corresponding to position 331 of SEQ ID. NO: 1887;
a T nucleotide at a position corresponding to position 331 of SEQ ID. NO: 1932;
a G nucleotide at a position corresponding to position 331 of SEQ ID. NO: 1941;
a C nucleotide at a position corresponding to position 331 of SEQ ID. NO: 1954;
a A nucleotide at a position corresponding to position 331 of SEQ ID. NO: 1990;
a G nucleotide at a position corresponding to position 331 of SEQ ID. NO: 2017;
a G nucleotide at a position corresponding to position 331 of SEQ ID. NO: 2061;
a T nucleotide at a position corresponding to position 331 of SEQ ID. NO: 2068;
a A nucleotide at a position corresponding to position 331 of SEQ ID. NO: 2081;
a C nucleotide at a position corresponding to position 331 of SEQ ID. NO: 2094;
a G nucleotide at a position corresponding to position 331 of SEQ ID. NO: 2116;
a G nucleotide at a position corresponding to position 331 of SEQ ID. NO: 2137;
a A nucleotide at a position corresponding to position 331 of SEQ ID. NO: 2170;
a A nucleotide at a position corresponding to position 331 of SEQ ID. NO: 2175;
a C nucleotide at a position corresponding to position 331 of SEQ ID. NO: 2207;
a G nucleotide at a position corresponding to position 331 of SEQ ID. NO: 2217;
a T nucleotide at a position corresponding to position 331 of SEQ ID. NO: 2307;
a A nucleotide at a position corresponding to position 331 of SEQ ID. NO: 2379;
a C nucleotide at a position corresponding to position 331 of SEQ ID. NO: 2402;
a G nucleotide at a position corresponding to position 331 of SEQ ID. NO: 2444;
a G nucleotide at a position corresponding to position 331 of SEQ ID. NO: 2469;
a G nucleotide at a position corresponding to position 331 of SEQ ID. NO: 2563;
a G nucleotide at a position corresponding to position 331 of SEQ ID. NO: 2573;
a A nucleotide at a position corresponding to position 331 of SEQ ID. NO: 2585;
a G nucleotide at a position corresponding to position 331 of SEQ ID. NO: 2598;
a C nucleotide at a position corresponding to position 331 of SEQ ID. NO: 2707;
a A nucleotide at a position corresponding to position 331 of SEQ ID. NO: 2709;
a C nucleotide at a position corresponding to position 331 of SEQ ID. NO: 2710;
a A nucleotide at a position corresponding to position 331 of SEQ ID. NO: 2744;
a G nucleotide at a position corresponding to position 331 of SEQ ID. NO: 2751;
a G nucleotide at a position corresponding to position 331 of SEQ ID. NO: 2754;
a G nucleotide at a position corresponding to position 331 of SEQ ID. NO: 2760;
a C nucleotide at a position corresponding to position 331 of SEQ ID. NO: 2764;
a T nucleotide at a position corresponding to position 331 of SEQ ID. NO: 2776;
a A nucleotide at a position corresponding to position 331 of SEQ ID. NO: 2793;
a A nucleotide at a position corresponding to position 331 of SEQ ID. NO: 2802;
a A nucleotide at a position corresponding to position 331 of SEQ ID. NO: 2828;
a C nucleotide at a position corresponding to position 331 of SEQ ID. NO: 2846;
a G nucleotide at a position corresponding to position 331 of SEQ ID. NO: 2884;
a C nucleotide at a position corresponding to position 331 of SEQ ID. NO: 2932;
a A nucleotide at a position corresponding to position 331 of SEQ ID. NO: 2974;
a C nucleotide at a position corresponding to position 331 of SEQ ID. NO: 2989;
a T nucleotide at a position corresponding to position 331 of SEQ ID. NO: 3011;
a A nucleotide at a position corresponding to position 331 of SEQ ID. NO: 3039;
a A nucleotide at a position corresponding to position 331 of SEQ ID. NO: 3047;
a C nucleotide at a position corresponding to position 331 of SEQ ID. NO: 3064;
a T nucleotide at a position corresponding to position 331 of SEQ ID. NO: 3103;
a C nucleotide at a position corresponding to position 331 of SEQ ID. NO: 3108;
a T nucleotide at a position corresponding to position 331 of SEQ ID. NO: 3136;
a G nucleotide at a position corresponding to position 331 of SEQ ID. NO: 3146;
a A nucleotide at a position corresponding to position 331 of SEQ ID. NO: 3159;
a T nucleotide at a position corresponding to position 331 of SEQ ID. NO: 3160;
a T nucleotide at a position corresponding to position 331 of SEQ ID. NO: 3162;
a T nucleotide at a position corresponding to position 331 of SEQ ID. NO: 3175;
a T nucleotide at a position corresponding to position 331 of SEQ ID. NO: 3231;
a G nucleotide at a position corresponding to position 331 of SEQ ID. NO: 3291;
a C nucleotide at a position corresponding to position 331 of SEQ ID. NO: 3316;
a G nucleotide at a position corresponding to position 331 of SEQ ID. NO: 3334;
a C nucleotide at a position corresponding to position 331 of SEQ ID. NO: 3343;
a C nucleotide at a position corresponding to position 331 of SEQ ID. NO: 3355;
a C nucleotide at a position corresponding to position 331 of SEQ ID. NO: 3423;
a A nucleotide at a position corresponding to position 331 of SEQ ID. NO: 3439;
a A nucleotide at a position corresponding to position 331 of SEQ ID. NO: 3468;
a G nucleotide at a position corresponding to position 331 of SEQ ID. NO: 3487;
a T nucleotide at a position corresponding to position 331 of SEQ ID. NO: 3496;
a T nucleotide at a position corresponding to position 331 of SEQ ID. NO: 3498;
a A nucleotide at a position corresponding to position 331 of SEQ ID. NO: 3512;
a G nucleotide at a position corresponding to position 331 of SEQ ID. NO: 3610;
a A nucleotide at a position corresponding to position 331 of SEQ ID. NO: 3624;
a G nucleotide at a position corresponding to position 331 of SEQ ID. NO: 3631;
a G nucleotide at a position corresponding to position 331 of SEQ ID. NO: 3671;
a A nucleotide at a position corresponding to position 331 of SEQ ID. NO: 3677;
a G nucleotide at a position corresponding to position 331 of SEQ ID. NO: 3679;
a G nucleotide at a position corresponding to position 331 of SEQ ID. NO: 3706;
a G nucleotide at a position corresponding to position 331 of SEQ ID. NO: 3725;
a T nucleotide at a position corresponding to position 331 of SEQ ID. NO: 3736;
a C nucleotide at a position corresponding to position 331 of SEQ ID. NO: 3741;
a C nucleotide at a position corresponding to position 331 of SEQ ID. NO: 3748;
a C nucleotide at a position corresponding to position 331 of SEQ ID. NO: 3760;
a C nucleotide at a position corresponding to position 331 of SEQ ID. NO: 3787;
a C nucleotide at a position corresponding to position 331 of SEQ ID. NO: 3798;
a C nucleotide at a position corresponding to position 331 of SEQ ID. NO: 3841;
a A nucleotide at a position corresponding to position 331 of SEQ ID. NO: 3897;
a T nucleotide at a position corresponding to position 331 of SEQ ID. NO: 3908;
a A nucleotide at a position corresponding to position 331 of SEQ ID. NO: 3915;
a C nucleotide at a position corresponding to position 331 of SEQ ID. NO: 3925;
a C nucleotide at a position corresponding to position 331 of SEQ ID. NO: 3926;
a T nucleotide at a position corresponding to position 331 of SEQ ID. NO: 3930;
a A nucleotide at a position corresponding to position 331 of SEQ ID. NO: 3951;
a A nucleotide at a position corresponding to position 331 of SEQ ID. NO: 3966;
a A nucleotide at a position corresponding to position 331 of SEQ ID. NO: 3984;
a G nucleotide at a position corresponding to position 331 of SEQ ID. NO: 3992;
a C nucleotide at a position corresponding to position 331 of SEQ ID. NO: 4014;
a G nucleotide at a position corresponding to position 331 of SEQ ID. NO: 4067;
a C nucleotide at a position corresponding to position 331 of SEQ ID. NO: 4093;
a A nucleotide at a position corresponding to position 331 of SEQ ID. NO: 4138;
a T nucleotide at a position corresponding to position 331 of SEQ ID. NO: 4197;
a G nucleotide at a position corresponding to position 331 of SEQ ID. NO: 4225;
a A nucleotide at a position corresponding to position 331 of SEQ ID. NO: 4238;
a G nucleotide at a position corresponding to position 331 of SEQ ID. NO: 4245;
a A nucleotide at a position corresponding to position 331 of SEQ ID. NO: 4254;
a C nucleotide at a position corresponding to position 331 of SEQ ID. NO: 4268;
a G nucleotide at a position corresponding to position 331 of SEQ ID. NO: 4275;
a C nucleotide at a position corresponding to position 331 of SEQ ID. NO: 4287;
a T nucleotide at a position corresponding to position 331 of SEQ ID. NO: 4307;
a A nucleotide at a position corresponding to position 331 of SEQ ID. NO: 4332;
a T nucleotide at a position corresponding to position 331 of SEQ ID. NO: 4338;
a T nucleotide at a position corresponding to position 331 of SEQ ID. NO: 4374;
a C nucleotide at a position corresponding to position 331 of SEQ ID. NO: 4397;
a C nucleotide at a position corresponding to position 331 of SEQ ID. NO: 4403;
a G nucleotide at a position corresponding to position 331 of SEQ ID. NO: 4431;
a G nucleotide at a position corresponding to position 331 of SEQ ID. NO: 4433;
a C nucleotide at a position corresponding to position 331 of SEQ ID. NO: 4457;
a G nucleotide at a position corresponding to position 331 of SEQ ID. NO: 4489;
a C nucleotide at a position corresponding to position 331 of SEQ ID. NO: 4509;
a C nucleotide at a position corresponding to position 331 of SEQ ID. NO: 4525;
a A nucleotide at a position corresponding to position 331 of SEQ ID. NO: 4533;
a C nucleotide at a position corresponding to position 331 of SEQ ID. NO: 4617;
a C nucleotide at a position corresponding to position 331 of SEQ ID. NO: 4627;
a G nucleotide at a position corresponding to position 331 of SEQ ID. NO: 4629;
a G nucleotide at a position corresponding to position 331 of SEQ ID. NO: 4638;
a C nucleotide at a position corresponding to position 331 of SEQ ID. NO: 4643;
a G nucleotide at a position corresponding to position 331 of SEQ ID. NO: 4651;
a G nucleotide at a position corresponding to position 331 of SEQ ID. NO: 4693;
a T nucleotide at a position corresponding to position 331 of SEQ ID. NO: 4704;
a A nucleotide at a position corresponding to position 331 of SEQ ID. NO: 4738;
a C nucleotide at a position corresponding to position 331 of SEQ ID. NO: 4768;
a T nucleotide at a position corresponding to position 331 of SEQ ID. NO: 4787;
a C nucleotide at a position corresponding to position 331 of SEQ ID. NO: 4805;
a C nucleotide at a position corresponding to position 331 of SEQ ID. NO: 4823;
a T nucleotide at a position corresponding to position 331 of SEQ ID. NO: 4838;
a G nucleotide at a position corresponding to position 331 of SEQ ID. NO: 4882;
a C nucleotide at a position corresponding to position 331 of SEQ ID. NO: 4886;
a T nucleotide at a position corresponding to position 331 of SEQ ID. NO: 4897;
a C nucleotide at a position corresponding to position 331 of SEQ ID. NO: 4998;
a G nucleotide at a position corresponding to position 331 of SEQ ID. NO: 5011;
a T nucleotide at a position corresponding to position 331 of SEQ ID. NO: 5040;
a G nucleotide at a position corresponding to position 331 of SEQ ID. NO: 5091;
a C nucleotide at a position corresponding to position 331 of SEQ ID. NO: 5092;
a G nucleotide at a position corresponding to position 331 of SEQ ID. NO: 5123;
a T nucleotide at a position corresponding to position 331 of SEQ ID. NO: 5172;
a G nucleotide at a position corresponding to position 331 of SEQ ID. NO: 5198;
a G nucleotide at a position corresponding to position 331 of SEQ ID. NO: 5220;
a T nucleotide at a position corresponding to position 331 of SEQ ID. NO: 5239;
a A nucleotide at a position corresponding to position 331 of SEQ ID. NO: 5248;
a C nucleotide at a position corresponding to position 331 of SEQ ID. NO: 5268;
a G nucleotide at a position corresponding to position 331 of SEQ ID. NO: 5290;
a C nucleotide at a position corresponding to position 331 of SEQ ID. NO: 5317;
a A nucleotide at a position corresponding to position 331 of SEQ ID. NO: 5369;
a G nucleotide at a position corresponding to position 331 of SEQ ID. NO: 5392;
a G nucleotide at a position corresponding to position 331 of SEQ ID. NO: 5409;
a A nucleotide at a position corresponding to position 331 of SEQ ID. NO: 5433;
a G nucleotide at a position corresponding to position 331 of SEQ ID. NO: 5436;
a C nucleotide at a position corresponding to position 331 of SEQ ID. NO: 5448;
a C nucleotide at a position corresponding to position 331 of SEQ ID. NO: 5462;
a T nucleotide at a position corresponding to position 331 of SEQ ID. NO: 5479;
a C nucleotide at a position corresponding to position 331 of SEQ ID. NO: 5490;
a G nucleotide at a position corresponding to position 331 of SEQ ID. NO: 5522;
a T nucleotide at a position corresponding to position 331 of SEQ ID. NO: 5539;
a C nucleotide at a position corresponding to position 331 of SEQ ID. NO: 5544;
a C nucleotide at a position corresponding to position 331 of SEQ ID. NO: 5558;
a C nucleotide at a position corresponding to position 331 of SEQ ID. NO: 5580;
a C nucleotide at a position corresponding to position 331 of SEQ ID. NO: 5596; and
a G nucleotide at a position corresponding to position 331 of SEQ ID. NO: 5616,
and correlating the presence of the at least one polymorphism with an increased susceptibility for development of colorectal cancer in the subject.

2. The method according to claim 1, wherein the polymorphism is selected from the group consisting of:
a G nucleotide at a position corresponding to position 331 of SEQ ID. NO: 17;
a C nucleotide at a position corresponding to position 331 of SEQ ID. NO: 24;
a A nucleotide at a position corresponding to position 331 of SEQ ID. NO: 57;
a A nucleotide at a position corresponding to position 331 of SEQ ID. NO: 85;
a G nucleotide at a position corresponding to position 331 of SEQ ID. NO: 189;
a C nucleotide at a position corresponding to position 331 of SEQ ID. NO: 205;
a A nucleotide at a position corresponding to position 331 of SEQ ID. NO: 218;
a A nucleotide at a position corresponding to position 331 of SEQ ID. NO: 246;
a T nucleotide at a position corresponding to position 331 of SEQ ID. NO: 327;
a C nucleotide at a position corresponding to position 331 of SEQ ID. NO: 333;
a C nucleotide at a position corresponding to position 331 of SEQ ID. NO: 371;
a T nucleotide at a position corresponding to position 331 of SEQ ID. NO: 395;
a G nucleotide at a position corresponding to position 331 of SEQ ID. NO: 422;
a G nucleotide at a position corresponding to position 331 of SEQ ID. NO: 432;
a C nucleotide at a position corresponding to position 331 of SEQ ID. NO: 449;
a G nucleotide at a position corresponding to position 331 of SEQ ID. NO: 485;
a T nucleotide at a position corresponding to position 331 of SEQ ID. NO: 496;
a T nucleotide at a position corresponding to position 331 of SEQ ID. NO: 501;
a G nucleotide at a position corresponding to position 331 of SEQ ID. NO: 504;
a G nucleotide at a position corresponding to position 331 of SEQ ID. NO: 518;
a G nucleotide at a position corresponding to position 331 of SEQ ID. NO: 535;
a C nucleotide at a position corresponding to position 331 of SEQ ID. NO: 550;
a T nucleotide at a position corresponding to position 331 of SEQ ID. NO: 560;
a G nucleotide at a position corresponding to position 331 of SEQ ID. NO: 579;
a C nucleotide at a position corresponding to position 331 of SEQ ID. NO: 591;
a G nucleotide at a position corresponding to position 331 of SEQ ID. NO: 621;
a G nucleotide at a position corresponding to position 331 of SEQ ID. NO: 710;
a G nucleotide at a position corresponding to position 331 of SEQ ID. NO: 734;
a A nucleotide at a position corresponding to position 331 of SEQ ID. NO: 745;
a A nucleotide at a position corresponding to position 331 of SEQ ID. NO: 753;
a A nucleotide at a position corresponding to position 331 of SEQ ID. NO: 758;
a C nucleotide at a position corresponding to position 331 of SEQ ID. NO: 796;
a T nucleotide at a position corresponding to position 331 of SEQ ID. NO: 937;
a T nucleotide at a position corresponding to position 331 of SEQ ID. NO: 1056;
a G nucleotide at a position corresponding to position 331 of SEQ ID. NO: 1154;
a T nucleotide at a position corresponding to position 331 of SEQ ID. NO: 1170;
a G nucleotide at a position corresponding to position 331 of SEQ ID. NO: 1174;
a C nucleotide at a position corresponding to position 331 of SEQ ID. NO: 1179;
a C nucleotide at a position corresponding to position 331 of SEQ ID. NO: 1205;
a G nucleotide at a position corresponding to position 331 of SEQ ID. NO: 1240;
a G nucleotide at a position corresponding to position 331 of SEQ ID. NO: 1257;
a T nucleotide at a position corresponding to position 331 of SEQ ID. NO: 1267;
a C nucleotide at a position corresponding to position 331 of SEQ ID. NO: 1291;
a A nucleotide at a position corresponding to position 331 of SEQ ID. NO: 1301;
a G nucleotide at a position corresponding to position 331 of SEQ ID. NO: 1332;
a C nucleotide at a position corresponding to position 331 of SEQ ID. NO: 1367;
a G nucleotide at a position corresponding to position 331 of SEQ ID. NO: 1410;
a C nucleotide at a position corresponding to position 331 of SEQ ID. NO: 1462;
a T nucleotide at a position corresponding to position 331 of SEQ ID. NO: 1510;
a G nucleotide at a position corresponding to position 331 of SEQ ID. NO: 1530;
a G nucleotide at a position corresponding to position 331 of SEQ ID. NO: 1551;
a G nucleotide at a position corresponding to position 331 of SEQ ID. NO: 1589;
a C nucleotide at a position corresponding to position 331 of SEQ ID. NO: 1646;
a G nucleotide at a position corresponding to position 331 of SEQ ID. NO: 1660;
a T nucleotide at a position corresponding to position 331 of SEQ ID. NO: 1700;
a C nucleotide at a position corresponding to position 331 of SEQ ID. NO: 1794;
a T nucleotide at a position corresponding to position 331 of SEQ ID. NO: 1795;
a A nucleotide at a position corresponding to position 331 of SEQ ID. NO: 1875;
a G nucleotide at a position corresponding to position 331 of SEQ ID. NO: 1887;
a T nucleotide at a position corresponding to position 331 of SEQ ID. NO: 1932;
a C nucleotide at a position corresponding to position 331 of SEQ ID. NO: 1954;
a A nucleotide at a position corresponding to position 331 of SEQ ID. NO: 1990;
a G nucleotide at a position corresponding to position 331 of SEQ ID. NO: 2017;
a G nucleotide at a position corresponding to position 331 of SEQ ID. NO: 2061;
a A nucleotide at a position corresponding to position 331 of SEQ ID. NO: 2081;
a C nucleotide at a position corresponding to position 331 of SEQ ID. NO: 2094;
a G nucleotide at a position corresponding to position 331 of SEQ ID. NO: 2116;
a G nucleotide at a position corresponding to position 331 of SEQ ID. NO: 2137;
a A nucleotide at a position corresponding to position 331 of SEQ ID. NO: 2170;
a A nucleotide at a position corresponding to position 331 of SEQ ID. NO: 2175;
a G nucleotide at a position corresponding to position 331 of SEQ ID. NO: 2217;
a T nucleotide at a position corresponding to position 331 of SEQ ID. NO: 2307;
a A nucleotide at a position corresponding to position 331 of SEQ ID. NO: 2379;
a C nucleotide at a position corresponding to position 331 of SEQ ID. NO: 2402;
a G nucleotide at a position corresponding to position 331 of SEQ ID. NO: 2469;
a G nucleotide at a position corresponding to position 331 of SEQ ID. NO: 2563;
a G nucleotide at a position corresponding to position 331 of SEQ ID. NO: 2573;
a A nucleotide at a position corresponding to position 331 of SEQ ID. NO: 2585;
a G nucleotide at a position corresponding to position 331 of SEQ ID. NO: 2598;
a C nucleotide at a position corresponding to position 331 of SEQ ID. NO: 2707;
a A nucleotide at a position corresponding to position 331 of SEQ ID. NO: 2709;
a C nucleotide at a position corresponding to position 331 of SEQ ID. NO: 2710;
a A nucleotide at a position corresponding to position 331 of SEQ ID. NO: 2744;
a G nucleotide at a position corresponding to position 331 of SEQ ID. NO: 2751;
a G nucleotide at a position corresponding to position 331 of SEQ ID. NO: 2754;
a G nucleotide at a position corresponding to position 331 of SEQ ID. NO: 2760;
a C nucleotide at a position corresponding to position 331 of SEQ ID. NO: 2764;
a T nucleotide at a position corresponding to position 331 of SEQ ID. NO: 2776;
a A nucleotide at a position corresponding to position 331 of SEQ ID. NO: 2793;
a A nucleotide at a position corresponding to position 331 of SEQ ID. NO: 2802;
a A nucleotide at a position corresponding to position 331 of SEQ ID. NO: 2828;
a C nucleotide at a position corresponding to position 331 of SEQ ID. NO: 2846;
a G nucleotide at a position corresponding to position 331 of SEQ ID. NO: 2884;
a C nucleotide at a position corresponding to position 331 of SEQ ID. NO: 2932;
a A nucleotide at a position corresponding to position 331 of SEQ ID. NO: 2974;
a C nucleotide at a position corresponding to position 331 of SEQ ID. NO: 2989;
a T nucleotide at a position corresponding to position 331 of SEQ ID. NO: 3011;
a A nucleotide at a position corresponding to position 331 of SEQ ID. NO: 3039;
a A nucleotide at a position corresponding to position 331 of SEQ ID. NO: 3047;
a C nucleotide at a position corresponding to position 331 of SEQ ID. NO: 3064;
a T nucleotide at a position corresponding to position 331 of SEQ ID. NO: 3103;
a C nucleotide at a position corresponding to position 331 of SEQ ID. NO: 3108;
a G nucleotide at a position corresponding to position 331 of SEQ ID. NO: 3146;
a A nucleotide at a position corresponding to position 331 of SEQ ID. NO: 3159;
a T nucleotide at a position corresponding to position 331 of SEQ ID. NO: 3160;
a T nucleotide at a position corresponding to position 331 of SEQ ID. NO: 3162;
a T nucleotide at a position corresponding to position 331 of SEQ ID. NO: 3231;
a G nucleotide at a position corresponding to position 331 of SEQ ID. NO: 3291;
a C nucleotide at a position corresponding to position 331 of SEQ ID. NO: 3316;
a G nucleotide at a position corresponding to position 331 of SEQ ID. NO: 3334;
a C nucleotide at a position corresponding to position 331 of SEQ ID. NO: 3343;
a C nucleotide at a position corresponding to position 331 of SEQ ID. NO: 3355;
a C nucleotide at a position corresponding to position 331 of SEQ ID. NO: 3423;
a A nucleotide at a position corresponding to position 331 of SEQ ID. NO: 3439;
a A nucleotide at a position corresponding to position 331 of SEQ ID. NO: 3468;
a G nucleotide at a position corresponding to position 331 of SEQ ID. NO: 3487;
a T nucleotide at a position corresponding to position 331 of SEQ ID. NO: 3496;
a A nucleotide at a position corresponding to position 331 of SEQ ID. NO: 3512;
a G nucleotide at a position corresponding to position 331 of SEQ ID. NO: 3631;
a G nucleotide at a position corresponding to position 331 of SEQ ID. NO: 3671;
a A nucleotide at a position corresponding to position 331 of SEQ ID. NO: 3677;
a G nucleotide at a position corresponding to position 331 of SEQ ID. NO: 3679;
a G nucleotide at a position corresponding to position 331 of SEQ ID. NO: 3706;
a G nucleotide at a position corresponding to position 331 of SEQ ID. NO: 3725;
a T nucleotide at a position corresponding to position 331 of SEQ ID. NO: 3736;
a C nucleotide at a position corresponding to position 331 of SEQ ID. NO: 3741;
a C nucleotide at a position corresponding to position 331 of SEQ ID. NO: 3748;
a C nucleotide at a position corresponding to position 331 of SEQ ID. NO: 3798;
a C nucleotide at a position corresponding to position 331 of SEQ ID. NO: 3841;
a A nucleotide at a position corresponding to position 331 of SEQ ID. NO: 3897;
a T nucleotide at a position corresponding to position 331 of SEQ ID. NO: 3908;
a A nucleotide at a position corresponding to position 331 of SEQ ID. NO: 3915;
a C nucleotide at a position corresponding to position 331 of SEQ ID. NO: 3925;
a T nucleotide at a position corresponding to position 331 of SEQ ID. NO: 3930;
a A nucleotide at a position corresponding to position 331 of SEQ ID. NO: 3951;
a A nucleotide at a position corresponding to position 331 of SEQ ID. NO: 3966;
a A nucleotide at a position corresponding to position 331 of SEQ ID. NO: 3984;
a G nucleotide at a position corresponding to position 331 of SEQ ID. NO: 3992;
a C nucleotide at a position corresponding to position 331 of SEQ ID. NO: 4014;
a C nucleotide at a position corresponding to position 331 of SEQ ID. NO: 4093;
a A nucleotide at a position corresponding to position 331 of SEQ ID. NO: 4138;
a T nucleotide at a position corresponding to position 331 of SEQ ID. NO: 4197;
a G nucleotide at a position corresponding to position 331 of SEQ ID. NO: 4225;
a A nucleotide at a position corresponding to position 331 of SEQ ID. NO: 4238;
a G nucleotide at a position corresponding to position 331 of SEQ ID. NO: 4245;
a A nucleotide at a position corresponding to position 331 of SEQ ID. NO: 4254;
a C nucleotide at a position corresponding to position 331 of SEQ ID. NO: 4268;
a G nucleotide at a position corresponding to position 331 of SEQ ID. NO: 4275;
a C nucleotide at a position corresponding to position 331 of SEQ ID. NO: 4287;
a T nucleotide at a position corresponding to position 331 of SEQ ID. NO: 4307;
a A nucleotide at a position corresponding to position 331 of SEQ ID. NO: 4332;
a T nucleotide at a position corresponding to position 331 of SEQ ID. NO: 4338;
a T nucleotide at a position corresponding to position 331 of SEQ ID. NO: 4374;
a C nucleotide at a position corresponding to position 331 of SEQ ID. NO: 4397;
a C nucleotide at a position corresponding to position 331 of SEQ ID. NO: 4403;
a G nucleotide at a position corresponding to position 331 of SEQ ID. NO: 4431;
a G nucleotide at a position corresponding to position 331 of SEQ ID. NO: 4433;
a C nucleotide at a position corresponding to position 331 of SEQ ID. NO: 4457;
a G nucleotide at a position corresponding to position 331 of SEQ ID. NO: 4489;
a C nucleotide at a position corresponding to position 331 of SEQ ID. NO: 4509;
a C nucleotide at a position corresponding to position 331 of SEQ ID. NO: 4525;
a A nucleotide at a position corresponding to position 331 of SEQ ID. NO: 4533;
a C nucleotide at a position corresponding to position 331 of SEQ ID. NO: 4617;
a C nucleotide at a position corresponding to position 331 of SEQ ID. NO: 4627;
a G nucleotide at a position corresponding to position 331 of SEQ ID. NO: 4629;
a G nucleotide at a position corresponding to position 331 of SEQ ID. NO: 4638;
a C nucleotide at a position corresponding to position 331 of SEQ ID. NO: 4643;
a G nucleotide at a position corresponding to position 331 of SEQ ID. NO: 4651;
a G nucleotide at a position corresponding to position 331 of SEQ ID. NO: 4693;
a T nucleotide at a position corresponding to position 331 of SEQ ID. NO: 4704;
a A nucleotide at a position corresponding to position 331 of SEQ ID. NO: 4738;
a C nucleotide at a position corresponding to position 331 of SEQ ID. NO: 4768;
a T nucleotide at a position corresponding to position 331 of SEQ ID. NO: 4787;
a C nucleotide at a position corresponding to position 331 of SEQ ID. NO: 4805;
a C nucleotide at a position corresponding to position 331 of SEQ ID. NO: 4823;
a T nucleotide at a position corresponding to position 331 of SEQ ID. NO: 4838;
a G nucleotide at a position corresponding to position 331 of SEQ ID. NO: 4882;
a T nucleotide at a position corresponding to position 331 of SEQ ID. NO: 4897;
a G nucleotide at a position corresponding to position 331 of SEQ ID. NO: 5011;
a T nucleotide at a position corresponding to position 331 of SEQ ID. NO: 5040;
a G nucleotide at a position corresponding to position 331 of SEQ ID. NO: 5091;
a C nucleotide at a position corresponding to position 331 of SEQ ID. NO: 5092;
a G nucleotide at a position corresponding to position 331 of SEQ ID. NO: 5123;
a T nucleotide at a position corresponding to position 331 of SEQ ID. NO: 5172;
a G nucleotide at a position corresponding to position 331 of SEQ ID. NO: 5198;
a G nucleotide at a position corresponding to position 331 of SEQ ID. NO: 5220;
a T nucleotide at a position corresponding to position 331 of SEQ ID. NO: 5239;
a A nucleotide at a position corresponding to position 331 of SEQ ID. NO: 5248;
a C nucleotide at a position corresponding to position 331 of SEQ ID. NO: 5268;
a C nucleotide at a position corresponding to position 331 of SEQ ID. NO: 5317;
a G nucleotide at a position corresponding to position 331 of SEQ ID. NO: 5392;
a G nucleotide at a position corresponding to position 331 of SEQ ID. NO: 5409;
a A nucleotide at a position corresponding to position 331 of SEQ ID. NO: 5433;
a C nucleotide at a position corresponding to position 331 of SEQ ID. NO: 5448;
a T nucleotide at a position corresponding to position 331 of SEQ ID. NO: 5479;
a C nucleotide at a position corresponding to position 331 of SEQ ID. NO: 5490;
a G nucleotide at a position corresponding to position 331 of SEQ ID. NO: 5522;
a C nucleotide at a position corresponding to position 331 of SEQ ID. NO: 5544;
a C nucleotide at a position corresponding to position 331 of SEQ ID. NO: 5558;
a C nucleotide at a position corresponding to position 331 of SEQ ID. NO: 5580;
a C nucleotide at a position corresponding to position 331 of SEQ ID. NO: 5596; and
a G nucleotide at a position corresponding to position 331 of SEQ ID. NO: 5616.

3. The method according to claim 2, wherein the polymorphism is selected from the group consisting of:
a A nucleotide at a position corresponding to position 331 of SEQ ID. NO: 57;
a C nucleotide at a position corresponding to position 331 of SEQ ID. NO: 205;
a C nucleotide at a position corresponding to position 331 of SEQ ID. NO: 449;
a G nucleotide at a position corresponding to position 331 of SEQ ID. NO: 710;
a A nucleotide at a position corresponding to position 331 of SEQ ID. NO: 758;
a T nucleotide at a position corresponding to position 331 of SEQ ID. NO: 1056;
a C nucleotide at a position corresponding to position 331 of SEQ ID. NO: 1367;
a G nucleotide at a position corresponding to position 331 of SEQ ID. NO: 1589;
a C nucleotide at a position corresponding to position 331 of SEQ ID. NO: 1646;
a T nucleotide at a position corresponding to position 331 of SEQ ID. NO: 1932;
a C nucleotide at a position corresponding to position 331 of SEQ ID. NO: 2094;
a A nucleotide at a position corresponding to position 331 of SEQ ID. NO: 2175;
a G nucleotide at a position corresponding to position 331 of SEQ ID. NO: 2217;
a T nucleotide at a position corresponding to position 331 of SEQ ID. NO: 2307;
a C nucleotide at a position corresponding to position 331 of SEQ ID. NO: 2707;
a A nucleotide at a position corresponding to position 331 of SEQ ID. NO: 2709;
a C nucleotide at a position corresponding to position 331 of SEQ ID. NO: 2710;
a G nucleotide at a position corresponding to position 331 of SEQ ID. NO: 2754;
a G nucleotide at a position corresponding to position 331 of SEQ ID. NO: 2760;
a C nucleotide at a position corresponding to position 331 of SEQ ID. NO: 2764;
a C nucleotide at a position corresponding to position 331 of SEQ ID. NO: 2846;
a G nucleotide at a position corresponding to position 331 of SEQ ID. NO: 2884;
a C nucleotide at a position corresponding to position 331 of SEQ ID. NO: 2989;
a A nucleotide at a position corresponding to position 331 of SEQ ID. NO: 3039;
a T nucleotide at a position corresponding to position 331 of SEQ ID. NO: 3160;
a T nucleotide at a position corresponding to position 331 of SEQ ID. NO: 3231;
a G nucleotide at a position corresponding to position 331 of SEQ ID. NO: 3291;
a C nucleotide at a position corresponding to position 331 of SEQ ID. NO: 3423;
a G nucleotide at a position corresponding to position 331 of SEQ ID. NO: 3631;
a G nucleotide at a position corresponding to position 331 of SEQ ID. NO: 3671;
a A nucleotide at a position corresponding to position 331 of SEQ ID. NO: 3677;
a G nucleotide at a position corresponding to position 331 of SEQ ID. NO: 3706;
a C nucleotide at a position corresponding to position 331 of SEQ ID. NO: 3741;
a C nucleotide at a position corresponding to position 331 of SEQ ID. NO: 3798;
a A nucleotide at a position corresponding to position 331 of SEQ ID. NO: 3915;
a C nucleotide at a position corresponding to position 331 of SEQ ID. NO: 3925;
a A nucleotide at a position corresponding to position 331 of SEQ ID. NO: 4238;
a C nucleotide at a position corresponding to position 331 of SEQ ID. NO: 4268;
a C nucleotide at a position corresponding to position 331 of SEQ ID. NO: 4287;
a T nucleotide at a position corresponding to position 331 of SEQ ID. NO: 4374;
a G nucleotide at a position corresponding to position 331 of SEQ ID. NO: 4433;
a C nucleotide at a position corresponding to position 331 of SEQ ID. NO: 4525;
a G nucleotide at a position corresponding to position 331 of SEQ ID. NO: 4638;
a C nucleotide at a position corresponding to position 331 of SEQ ID. NO: 4643;
a T nucleotide at a position corresponding to position 331 of SEQ ID. NO: 4704;
a C nucleotide at a position corresponding to position 331 of SEQ ID. NO: 4768;
a C nucleotide at a position corresponding to position 331 of SEQ ID. NO: 4823;
a T nucleotide at a position corresponding to position 331 of SEQ ID. NO: 4838;
a G nucleotide at a position corresponding to position 331 of SEQ ID. NO: 5011;
a C nucleotide at a position corresponding to position 331 of SEQ ID. NO: 5092;
a A nucleotide at a position corresponding to position 331 of SEQ ID. NO: 5433;
a C nucleotide at a position corresponding to position 331 of SEQ ID. NO: 5448;
a G nucleotide at a position corresponding to position 331 of SEQ ID. NO: 5522; and
a C nucleotide at a position corresponding to position 331 of SEQ ID. NO: 5596.

4. The method according to claim 1, wherein the polymorphism is selected from the group consisting of:
a A nucleotide at a position corresponding to position 331 of SEQ ID. NO: 218;
a C nucleotide at a position corresponding to position 331 of SEQ ID. NO: 371;
a A nucleotide at a position corresponding to position 331 of SEQ ID. NO: 758;
a C nucleotide at a position corresponding to position 331 of SEQ ID. NO: 796;
a T nucleotide at a position corresponding to position 331 of SEQ ID. NO: 937;
a T nucleotide at a position corresponding to position 331 of SEQ ID. NO: 1056;
a T nucleotide at a position corresponding to position 331 of SEQ ID. NO: 1170;
a G nucleotide at a position corresponding to position 331 of SEQ ID. NO: 1240;
a G nucleotide at a position corresponding to position 331 of SEQ ID. NO: 1257;
a T nucleotide at a position corresponding to position 331 of SEQ ID. NO: 1267;
a C nucleotide at a position corresponding to position 331 of SEQ ID. NO: 1462;
a T nucleotide at a position corresponding to position 331 of SEQ ID. NO: 1510;
a G nucleotide at a position corresponding to position 331 of SEQ ID. NO: 1530;
a T nucleotide at a position corresponding to position 331 of SEQ ID. NO: 1700;
a C nucleotide at a position corresponding to position 331 of SEQ ID. NO: 1794;
a A nucleotide at a position corresponding to position 331 of SEQ ID. NO: 1990;
a A nucleotide at a position corresponding to position 331 of SEQ ID. NO: 2170;
a A nucleotide at a position corresponding to position 331 of SEQ ID. NO: 2175;
a T nucleotide at a position corresponding to position 331 of SEQ ID. NO: 2307;
a G nucleotide at a position corresponding to position 331 of SEQ ID. NO: 2563;
a C nucleotide at a position corresponding to position 331 of SEQ ID. NO: 2707;
a A nucleotide at a position corresponding to position 331 of SEQ ID. NO: 2709;
a G nucleotide at a position corresponding to position 331 of SEQ ID. NO: 2754;
a T nucleotide at a position corresponding to position 331 of SEQ ID. NO: 2776;
a A nucleotide at a position corresponding to position 331 of SEQ ID. NO: 2793;
a A nucleotide at a position corresponding to position 331 of SEQ ID. NO: 2802;
a A nucleotide at a position corresponding to position 331 of SEQ ID. NO: 3039;
a A nucleotide at a position corresponding to position 331 of SEQ ID. NO: 3047;
a T nucleotide at a position corresponding to position 331 of SEQ ID. NO: 3103;
a C nucleotide at a position corresponding to position 331 of SEQ ID. NO: 3343;
a A nucleotide at a position corresponding to position 331 of SEQ ID. NO: 3439;
a A nucleotide at a position corresponding to position 331 of SEQ ID. NO: 3677;
a T nucleotide at a position corresponding to position 331 of SEQ ID. NO: 3736;
a C nucleotide at a position corresponding to position 331 of SEQ ID. NO: 3798;
a T nucleotide at a position corresponding to position 331 of SEQ ID. NO: 3908;
a A nucleotide at a position corresponding to position 331 of SEQ ID. NO: 3915;
a T nucleotide at a position corresponding to position 331 of SEQ ID. NO: 3930;
a A nucleotide at a position corresponding to position 331 of SEQ ID. NO: 3951;
a G nucleotide at a position corresponding to position 331 of SEQ ID. NO: 3992;
a C nucleotide at a position corresponding to position 331 of SEQ ID. NO: 4014;
a A nucleotide at a position corresponding to position 331 of SEQ ID. NO: 4138;
a A nucleotide at a position corresponding to position 331 of SEQ ID. NO: 4238;
a C nucleotide at a position corresponding to position 331 of SEQ ID. NO: 4287;
a T nucleotide at a position corresponding to position 331 of SEQ ID. NO: 4307;
a T nucleotide at a position corresponding to position 331 of SEQ ID. NO: 4374;
a C nucleotide at a position corresponding to position 331 of SEQ ID. NO: 4397;
a C nucleotide at a position corresponding to position 331 of SEQ ID. NO: 4403;
a G nucleotide at a position corresponding to position 331 of SEQ ID. NO: 4433;
a C nucleotide at a position corresponding to position 331 of SEQ ID. NO: 4457;
a G nucleotide at a position corresponding to position 331 of SEQ ID. NO: 4489;
a C nucleotide at a position corresponding to position 331 of SEQ ID. NO: 4525;
a G nucleotide at a position corresponding to position 331 of SEQ ID. NO: 4638;
a G nucleotide at a position corresponding to position 331 of SEQ ID. NO: 4651;
a G nucleotide at a position corresponding to position 331 of SEQ ID. NO: 4693;
a T nucleotide at a position corresponding to position 331 of SEQ ID. NO: 4704;
a C nucleotide at a position corresponding to position 331 of SEQ ID. NO: 4768;
a C nucleotide at a position corresponding to position 331 of SEQ ID. NO: 4805;
a T nucleotide at a position corresponding to position 331 of SEQ ID. NO: 4838;
a T nucleotide at a position corresponding to position 331 of SEQ ID. NO: 4897;
a G nucleotide at a position corresponding to position 331 of SEQ ID. NO: 5220;
a G nucleotide at a position corresponding to position 331 of SEQ ID. NO: 5409;
a G nucleotide at a position corresponding to position 331 of SEQ ID. NO: 5436;
a C nucleotide at a position corresponding to position 331 of SEQ ID. NO: 5448;
a T nucleotide at a position corresponding to position 331 of SEQ ID. NO: 5539; and
a C nucleotide at a position corresponding to position 331 of SEQ ID. NO: 5544.

5. The method according to claim 4, wherein the polymorphism is selected from the group consisting of:
a A nucleotide at a position corresponding to position 331 of SEQ ID. NO: 218;
a T nucleotide at a position corresponding to position 331 of SEQ ID. NO: 937;
a T nucleotide at a position corresponding to position 331 of SEQ ID. NO: 1056;
a C nucleotide at a position corresponding to position 331 of SEQ ID. NO: 1462;
a G nucleotide at a position corresponding to position 331 of SEQ ID. NO: 1530;
a T nucleotide at a position corresponding to position 331 of SEQ ID. NO: 1700;
a A nucleotide at a position corresponding to position 331 of SEQ ID. NO: 2170;
a T nucleotide at a position corresponding to position 331 of SEQ ID. NO: 2307;
a C nucleotide at a position corresponding to position 331 of SEQ ID. NO: 2707;
a A nucleotide at a position corresponding to position 331 of SEQ ID. NO: 2709;
a A nucleotide at a position corresponding to position 331 of SEQ ID. NO: 2793;
a A nucleotide at a position corresponding to position 331 of SEQ ID. NO: 3047;
a A nucleotide at a position corresponding to position 331 of SEQ ID. NO: 3439;
a T nucleotide at a position corresponding to position 331 of SEQ ID. NO: 3736;
a C nucleotide at a position corresponding to position 331 of SEQ ID. NO: 3798;
a T nucleotide at a position corresponding to position 331 of SEQ ID. NO: 3930;
a A nucleotide at a position corresponding to position 331 of SEQ ID. NO: 4238;
a C nucleotide at a position corresponding to position 331 of SEQ ID. NO: 4287;
a C nucleotide at a position corresponding to position 331 of SEQ ID. NO: 4457;
a G nucleotide at a position corresponding to position 331 of SEQ ID. NO: 4651;
a G nucleotide at a position corresponding to position 331 of SEQ ID. NO: 4693;
a T nucleotide at a position corresponding to position 331 of SEQ ID. NO: 4704;
a T nucleotide at a position corresponding to position 331 of SEQ ID. NO: 4897;
a G nucleotide at a position corresponding to position 331 of SEQ ID. NO: 5220;
a G nucleotide at a position corresponding to position 331 of SEQ ID. NO: 5436; and
a T nucleotide at a position corresponding to position 331 of SEQ ID. NO: 5539.

6. The method according to claim 5, wherein the polymorphism is selected from the group consisting of:
a A nucleotide at a position corresponding to position 331 of SEQ ID. NO: 218;
a T nucleotide at a position corresponding to position 331 of SEQ ID. NO: 937;
a C nucleotide at a position corresponding to position 331 of SEQ ID. NO: 2707;
a A nucleotide at a position corresponding to position 331 of SEQ ID. NO: 2709;
a G nucleotide at a position corresponding to position 331 of SEQ ID. NO: 4651;
a G nucleotide at a position corresponding to position 331 of SEQ ID. NO: 4693; and
a T nucleotide at a position corresponding to position 331 of SEQ ID. NO: 5539.

7. The method according to claim 1, wherein a blood sample from the subject is used to detect the presence of the polymorphism.

8. The method according to claim 1, wherein the step of detecting comprises DNA extraction and a process selected from the group consisting of: allele-specific probe hybridization, allele-specific primer extension, allele-specific amplification, sequencing, 5′ nuclease digestion, molecular beacon assay, oligonucleotide ligation assay, size analysis, and single-stranded conformation polymorphism.

9. A method for identifying a human subject as having an increased susceptibility for developing colorectal cancer, said method comprising:
(a) providing a sample containing genetic material of the individual;
(b) amplifying the genetic material in the presence of a pair of primers wherein a first of the primers comprises at least 10 consecutive nucleotides selected from one of sequences of SEQ ID NOs: 1 to 5618, each located upstream of the base located at position 331 of each sequence and a second primer comprising at least 10 consecutive nucleotides selected from within the same sequence and located downstream of the base located at position 331;
(c) determining the identity of the base in the genetic material that corresponds to position 331; and
(d) correlating the presence of at least one polymorphism with an increased susceptibility for development of colorectal cancer in the subject.

10. The method according to claim 9, wherein the first and second primers are selected from one of the sequences of SEQ ID NOs: 17, 24, 57, 85, 189, 205, 218, 246, 327, 333, 371, 395, 422, 432, 449, 485, 496, 501, 504, 518, 535, 550, 560, 579, 591, 621, 710, 734, 745, 753, 758, 796, 937, 1042, 1056, 1154, 1170, 1174, 1179, 1205, 1240, 1257, 1267, 1291, 1301, 1332, 1367, 1410, 1462, 1510, 1530, 1544, 1551, 1583, 1589, 1646, 1660, 1700, 1763, 1794, 1795, 1830, 1875, 1887, 1932, 1941, 1954, 1990, 2017, 2061, 2068, 2081, 2094, 2116, 2137, 2170, 2175, 2207, 2217, 2307, 2379, 2402, 2444, 2469, 2563, 2573, 2585, 2598, 2707, 2709, 2710, 2744, 2751, 2754, 2760, 2764, 2776, 2793, 2802, 2828, 2846, 2884, 2932, 2974, 2989, 3011, 3039, 3047, 3064, 3103, 3108, 3136, 3146, 3159, 3160, 3162, 3175, 3231, 3291, 3316, 3334, 3343, 3355, 3423, 3439, 3468, 3487, 3496, 3498, 3512, 3610, 3624, 3631, 3671, 3677, 3679, 3706, 3725, 3736, 3741, 3748, 3760, 3787, 3798, 3841, 3897, 3908, 3915, 3925, 3926, 3930, 3951, 3966, 3984, 3992, 4014, 4067, 4093, 4138, 4197, 4225, 4238, 4245, 4254, 4268, 4275, 4287, 4307, 4332, 4338, 4374, 4397, 4403, 4431, 4433, 4457, 4489, 4509, 4525, 4533, 4617, 4627, 4629, 4638, 4643, 4651, 4693, 4704, 4738, 4768, 4787, 4805, 4823, 4838, 4882, 4886, 4897, 4998, 5011, 5040, 5091, 5092, 5123, 5172, 5198, 5220, 5239, 5248, 5268, 5290, 5317, 5369, 5392, 5409, 5433, 5436, 5448, 5462, 5479, 5490, 5522, 5539, 5544, 5558, 5580, 5596 or 5616.

11. The method according to claim 10, wherein the first and second primers are selected from one of the sequences of SEQ ID NOs: 17, 24, 57, 85, 189, 205, 218, 246, 327, 333, 371, 395, 422, 432, 449, 485, 496, 501, 504, 518, 535, 550, 560, 579, 591, 621, 710, 734, 745, 753, 758, 796, 937, 1056, 1154, 1170, 1174, 1179, 1205, 1240, 1257, 1267, 1291, 1301, 1332, 1367, 1410, 1462, 1510, 1530, 1551, 1589, 1646, 1660, 1700, 1794, 1795, 1875, 1887, 1932, 1954, 1990, 2017, 2061, 2081, 2094, 2116, 2137, 2170, 2175, 2217, 2307, 2379, 2402, 2469, 2563, 2573, 2585, 2598, 2707, 2709, 2710, 2744, 2751, 2754, 2760, 2764, 2776, 2793, 2802, 2828, 2846, 2884, 2932, 2974, 2989, 3011, 3039, 3047, 3064, 3103, 3108, 3146, 3159, 3160, 3162, 3231, 3291, 3316, 3334, 3343, 3355, 3423, 3439, 3468, 3487, 3496, 3512, 3610, 3631, 3671, 3677, 3679, 3706, 3725, 3736, 3741, 3748, 3798, 3841, 3897, 3908, 3915, 3925, 3930, 3951, 3966, 3984, 3992, 4014, 4093, 4138, 4197, 4225, 4238, 4245, 4254, 4268, 4275, 4287, 4307, 4332, 4338, 4374, 4397, 4403, 4431, 4433, 4457, 4489, 4509, 4525, 4533, 4617, 4627, 4629, 4638, 4643, 4651, 4693, 4704, 4738, 4768, 4787, 4805, 4823, 4838, 4882, 4897, 5011, 5040, 5091, 5092, 5123, 5172, 5198, 5220, 5239, 5248, 5268, 5317, 5392, 5409, 5433, 5448, 5479, 5490, 5522, 5544, 5558, 5580, 5596 or 5616.

12. The method according to claim 11, wherein the first and second primers are selected from one of the sequences of SEQ ID NOs: 57, 205, 449, 710, 758, 1056, 1367, 1589, 1646, 1932, 2094, 2175, 2217, 2307, 2707, 2709, 2710, 2754, 2760, 2764, 2846, 2884, 2989, 3039, 3160, 3231, 3291, 3423, 3631, 3671, 3677, 3706, 3741, 3798, 3915, 3925, 4238, 4268, 4287, 4374, 4433, 4525, 4643, 4704, 4768, 4823, 4838, 5011, 5092, 5433, 5448, 5522 or 5616.

13. The method according to claim 10, wherein the first and second primers are selected from one of the sequences of SEQ ID Nos: 218, 371, 758, 796, 937, 1056, 1170, 1240, 1257, 1267, 1462, 1510, 1530, 1700, 1794, 1990, 2170, 2175, 2307, 2563, 2707, 2709, 2754, 2776, 2793, 2802, 3039, 3047, 3103, 3343, 3439, 3677, 3736, 3798, 3908, 3915, 3930, 3951, 3992, 4014, 4138, 4238, 4287, 4307, 4374, 4397, 4403, 4433, 4457, 4489, 4525, 4638, 4651, 4693, 4704, 4768, 4805, 4838, 4897, 5220, 5409, 5436, 5448, 5539 or 5544.

14. The method according to claim 13, wherein the first and second primers are selected from one of the sequences of SEQ ID Nos: 218, 937, 1056, 1462, 1530, 1700, 2170, 2307, 2707, 2709, 2793, 3047, 3439, 3736, 3798, 3930, 4238, 4457, 4651, 4693, 4704, 4897, 5220, 5436 or 5539.

15. The method according to claim 14, wherein the first and second primers are selected from one of the sequences of SEQ ID Nos: 218, 937, 2707, 2709, 4651, 4693 or 5539.

16. The method according to claim 9, wherein the step of determining the identity of the base is carried out by a process selected from the group consisting of: allele-specific probe hybridization, allele-specific primer extension, allele-specific amplification, sequencing, 5′ nuclease digestion, molecular beacon assay, oligonucleotide ligation assay, size analysis, and single-stranded conformation polymorphism.

17. A method for identifying a human subject as having an increased susceptibility for developing colorectal cancer, said method comprising detecting at least one polymorphism from the group consisting of:
a G nucleotide at a position corresponding to position 331 of SEQ ID. NO: 17;
a C nucleotide at a position corresponding to position 331 of SEQ ID. NO: 24;
a A nucleotide at a position corresponding to position 331 of SEQ ID. NO: 57;
a A nucleotide at a position corresponding to position 331 of SEQ ID. NO: 85;
a G nucleotide at a position corresponding to position 331 of SEQ ID. NO: 189;
a C nucleotide at a position corresponding to position 331 of SEQ ID. NO: 205;
a A nucleotide at a position corresponding to position 331 of SEQ ID. NO: 218;
a A nucleotide at a position corresponding to position 331 of SEQ ID. NO: 246;
a T nucleotide at a position corresponding to position 331 of SEQ ID. NO: 327;
a C nucleotide at a position corresponding to position 331 of SEQ ID. NO: 333;
a C nucleotide at a position corresponding to position 331 of SEQ ID. NO: 371;
a T nucleotide at a position corresponding to position 331 of SEQ ID. NO: 395;
a G nucleotide at a position corresponding to position 331 of SEQ ID. NO: 422;
a G nucleotide at a position corresponding to position 331 of SEQ ID. NO: 432;
a C nucleotide at a position corresponding to position 331 of SEQ ID. NO: 449;
a G nucleotide at a position corresponding to position 331 of SEQ ID. NO: 485;
a T nucleotide at a position corresponding to position 331 of SEQ ID. NO: 496;
a T nucleotide at a position corresponding to position 331 of SEQ ID. NO: 501;
a G nucleotide at a position corresponding to position 331 of SEQ ID. NO: 504;
a G nucleotide at a position corresponding to position 331 of SEQ ID. NO: 518;
a G nucleotide at a position corresponding to position 331 of SEQ ID. NO: 535;
a C nucleotide at a position corresponding to position 331 of SEQ ID. NO: 550;
a T nucleotide at a position corresponding to position 331 of SEQ ID. NO: 560;
a G nucleotide at a position corresponding to position 331 of SEQ ID. NO: 579;
a C nucleotide at a position corresponding to position 331 of SEQ ID. NO: 591;
a G nucleotide at a position corresponding to position 331 of SEQ ID. NO: 621;
a G nucleotide at a position corresponding to position 331 of SEQ ID. NO: 710;
a G nucleotide at a position corresponding to position 331 of SEQ ID. NO: 734;
a A nucleotide at a position corresponding to position 331 of SEQ ID. NO: 745;
a A nucleotide at a position corresponding to position 331 of SEQ ID. NO: 753;
a A nucleotide at a position corresponding to position 331 of SEQ ID. NO: 758;
a C nucleotide at a position corresponding to position 331 of SEQ ID. NO: 796;
a T nucleotide at a position corresponding to position 331 of SEQ ID. NO: 937;
a C nucleotide at a position corresponding to position 331 of SEQ ID. NO: 1042;
a T nucleotide at a position corresponding to position 331 of SEQ ID. NO: 1056;
a G nucleotide at a position corresponding to position 331 of SEQ ID. NO: 1154;
a T nucleotide at a position corresponding to position 331 of SEQ ID. NO: 1170;
a G nucleotide at a position corresponding to position 331 of SEQ ID. NO: 1174;
a C nucleotide at a position corresponding to position 331 of SEQ ID. NO: 1179;
a C nucleotide at a position corresponding to position 331 of SEQ ID. NO: 1205;
a G nucleotide at a position corresponding to position 331 of SEQ ID. NO: 1240;
a G nucleotide at a position corresponding to position 331 of SEQ ID. NO: 1257;
a T nucleotide at a position corresponding to position 331 of SEQ ID. NO: 1267;
a C nucleotide at a position corresponding to position 331 of SEQ ID. NO: 1291;
a A nucleotide at a position corresponding to position 331 of SEQ ID. NO: 1301;
a G nucleotide at a position corresponding to position 331 of SEQ ID. NO: 1332;
a C nucleotide at a position corresponding to position 331 of SEQ ID. NO: 1367;
a G nucleotide at a position corresponding to position 331 of SEQ ID. NO: 1410;
a C nucleotide at a position corresponding to position 331 of SEQ ID. NO: 1462;
a T nucleotide at a position corresponding to position 331 of SEQ ID. NO: 1510;
a G nucleotide at a position corresponding to position 331 of SEQ ID. NO: 1530;
a G nucleotide at a position corresponding to position 331 of SEQ ID. NO: 1544;
a G nucleotide at a position corresponding to position 331 of SEQ ID. NO: 1551;
a G nucleotide at a position corresponding to position 331 of SEQ ID. NO: 1583;
a G nucleotide at a position corresponding to position 331 of SEQ ID. NO: 1589;
a C nucleotide at a position corresponding to position 331 of SEQ ID. NO: 1646;
a G nucleotide at a position corresponding to position 331 of SEQ ID. NO: 1660;
a T nucleotide at a position corresponding to position 331 of SEQ ID. NO: 1700;
a C nucleotide at a position corresponding to position 331 of SEQ ID. NO: 1763;
a C nucleotide at a position corresponding to position 331 of SEQ ID. NO: 1794;
a T nucleotide at a position corresponding to position 331 of SEQ ID. NO: 1795;
a C nucleotide at a position corresponding to position 331 of SEQ ID. NO: 1830;
a A nucleotide at a position corresponding to position 331 of SEQ ID. NO: 1875;
a G nucleotide at a position corresponding to position 331 of SEQ ID. NO: 1887;
a T nucleotide at a position corresponding to position 331 of SEQ ID. NO: 1932;
a G nucleotide at a position corresponding to position 331 of SEQ ID. NO: 1941;
a C nucleotide at a position corresponding to position 331 of SEQ ID. NO: 1954;
a A nucleotide at a position corresponding to position 331 of SEQ ID. NO: 1990;
a G nucleotide at a position corresponding to position 331 of SEQ ID. NO: 2017;
a G nucleotide at a position corresponding to position 331 of SEQ ID. NO: 2061;
a T nucleotide at a position corresponding to position 331 of SEQ ID. NO: 2068;
a A nucleotide at a position corresponding to position 331 of SEQ ID. NO: 2081;
a C nucleotide at a position corresponding to position 331 of SEQ ID. NO: 2094;
a G nucleotide at a position corresponding to position 331 of SEQ ID. NO: 2116;
a G nucleotide at a position corresponding to position 331 of SEQ ID. NO: 2137;
a A nucleotide at a position corresponding to position 331 of SEQ ID. NO: 2170;
a A nucleotide at a position corresponding to position 331 of SEQ ID. NO: 2175;
a C nucleotide at a position corresponding to position 331 of SEQ ID. NO: 2207;
a G nucleotide at a position corresponding to position 331 of SEQ ID. NO: 2217;
a T nucleotide at a position corresponding to position 331 of SEQ ID. NO: 2307;
a A nucleotide at a position corresponding to position 331 of SEQ ID. NO: 2379;
a C nucleotide at a position corresponding to position 331 of SEQ ID. NO: 2402;
a G nucleotide at a position corresponding to position 331 of SEQ ID. NO: 2444;
a G nucleotide at a position corresponding to position 331 of SEQ ID. NO: 2469;
a G nucleotide at a position corresponding to position 331 of SEQ ID. NO: 2563;
a G nucleotide at a position corresponding to position 331 of SEQ ID. NO: 2573;
a A nucleotide at a position corresponding to position 331 of SEQ ID. NO: 2585;
a G nucleotide at a position corresponding to position 331 of SEQ ID. NO: 2598;
a C nucleotide at a position corresponding to position 331 of SEQ ID. NO: 2707;
a A nucleotide at a position corresponding to position 331 of SEQ ID. NO: 2709;
a C nucleotide at a position corresponding to position 331 of SEQ ID. NO: 2710;
a A nucleotide at a position corresponding to position 331 of SEQ ID. NO: 2744;
a G nucleotide at a position corresponding to position 331 of SEQ ID. NO: 2751;
a G nucleotide at a position corresponding to position 331 of SEQ ID. NO: 2754;
a G nucleotide at a position corresponding to position 331 of SEQ ID. NO: 2760;
a C nucleotide at a position corresponding to position 331 of SEQ ID. NO: 2764;
a T nucleotide at a position corresponding to position 331 of SEQ ID. NO: 2776;
a A nucleotide at a position corresponding to position 331 of SEQ ID. NO: 2793;
a A nucleotide at a position corresponding to position 331 of SEQ ID. NO: 2802;
a A nucleotide at a position corresponding to position 331 of SEQ ID. NO: 2828;
a C nucleotide at a position corresponding to position 331 of SEQ ID. NO: 2846;
a G nucleotide at a position corresponding to position 331 of SEQ ID. NO: 2884;
a C nucleotide at a position corresponding to position 331 of SEQ ID. NO: 2932;
a A nucleotide at a position corresponding to position 331 of SEQ ID. NO: 2974;
a C nucleotide at a position corresponding to position 331 of SEQ ID. NO: 2989;
a T nucleotide at a position corresponding to position 331 of SEQ ID. NO: 3011;
a A nucleotide at a position corresponding to position 331 of SEQ ID. NO: 3039;
a A nucleotide at a position corresponding to position 331 of SEQ ID. NO: 3047;
a C nucleotide at a position corresponding to position 331 of SEQ ID. NO: 3064;
a T nucleotide at a position corresponding to position 331 of SEQ ID. NO: 3103;
a C nucleotide at a position corresponding to position 331 of SEQ ID. NO: 3108;
a T nucleotide at a position corresponding to position 331 of SEQ ID. NO: 3136;
a G nucleotide at a position corresponding to position 331 of SEQ ID. NO: 3146;
a A nucleotide at a position corresponding to position 331 of SEQ ID. NO: 3159;
a T nucleotide at a position corresponding to position 331 of SEQ ID. NO: 3160;
a T nucleotide at a position corresponding to position 331 of SEQ ID. NO: 3162;
a T nucleotide at a position corresponding to position 331 of SEQ ID. NO: 3175;
a T nucleotide at a position corresponding to position 331 of SEQ ID. NO: 3231;
a G nucleotide at a position corresponding to position 331 of SEQ ID. NO: 3291;
a C nucleotide at a position corresponding to position 331 of SEQ ID. NO: 3316;
a G nucleotide at a position corresponding to position 331 of SEQ ID. NO: 3334;
a C nucleotide at a position corresponding to position 331 of SEQ ID. NO: 3343;
a C nucleotide at a position corresponding to position 331 of SEQ ID. NO: 3355;
a C nucleotide at a position corresponding to position 331 of SEQ ID. NO: 3423;
a A nucleotide at a position corresponding to position 331 of SEQ ID. NO: 3439;
a A nucleotide at a position corresponding to position 331 of SEQ ID. NO: 3468;
a G nucleotide at a position corresponding to position 331 of SEQ ID. NO: 3487;
a T nucleotide at a position corresponding to position 331 of SEQ ID. NO: 3496;
a T nucleotide at a position corresponding to position 331 of SEQ ID. NO: 3498;
a A nucleotide at a position corresponding to position 331 of SEQ ID. NO: 3512;
a G nucleotide at a position corresponding to position 331 of SEQ ID. NO: 3610;
a A nucleotide at a position corresponding to position 331 of SEQ ID. NO: 3624;
a G nucleotide at a position corresponding to position 331 of SEQ ID. NO: 3631;
a G nucleotide at a position corresponding to position 331 of SEQ ID. NO: 3671;
a A nucleotide at a position corresponding to position 331 of SEQ ID. NO: 3677;
a G nucleotide at a position corresponding to position 331 of SEQ ID. NO: 3679;
a G nucleotide at a position corresponding to position 331 of SEQ ID. NO: 3706;
a G nucleotide at a position corresponding to position 331 of SEQ ID. NO: 3725;
a T nucleotide at a position corresponding to position 331 of SEQ ID. NO: 3736;
a C nucleotide at a position corresponding to position 331 of SEQ ID. NO: 3741;
a C nucleotide at a position corresponding to position 331 of SEQ ID. NO: 3748;
a C nucleotide at a position corresponding to position 331 of SEQ ID. NO: 3760;
a C nucleotide at a position corresponding to position 331 of SEQ ID. NO: 3787;
a C nucleotide at a position corresponding to position 331 of SEQ ID. NO: 3798;
a C nucleotide at a position corresponding to position 331 of SEQ ID. NO: 3841;
a A nucleotide at a position corresponding to position 331 of SEQ ID. NO: 3897;
a T nucleotide at a position corresponding to position 331 of SEQ ID. NO: 3908;
a A nucleotide at a position corresponding to position 331 of SEQ ID. NO: 3915;
a C nucleotide at a position corresponding to position 331 of SEQ ID. NO: 3925;
a C nucleotide at a position corresponding to position 331 of SEQ ID. NO: 3926;
a T nucleotide at a position corresponding to position 331 of SEQ ID. NO: 3930;
a A nucleotide at a position corresponding to position 331 of SEQ ID. NO: 3951;
a A nucleotide at a position corresponding to position 331 of SEQ ID. NO: 3966;
a A nucleotide at a position corresponding to position 331 of SEQ ID. NO: 3984;
a G nucleotide at a position corresponding to position 331 of SEQ ID. NO: 3992;
a C nucleotide at a position corresponding to position 331 of SEQ ID. NO: 4014;
a G nucleotide at a position corresponding to position 331 of SEQ ID. NO: 4067;
a C nucleotide at a position corresponding to position 331 of SEQ ID. NO: 4093;
a A nucleotide at a position corresponding to position 331 of SEQ ID. NO: 4138;
a T nucleotide at a position corresponding to position 331 of SEQ ID. NO: 4197;
a G nucleotide at a position corresponding to position 331 of SEQ ID. NO: 4225;
a A nucleotide at a position corresponding to position 331 of SEQ ID. NO: 4238;
a G nucleotide at a position corresponding to position 331 of SEQ ID. NO: 4245;
a A nucleotide at a position corresponding to position 331 of SEQ ID. NO: 4254;
a C nucleotide at a position corresponding to position 331 of SEQ ID. NO: 4268;
a G nucleotide at a position corresponding to position 331 of SEQ ID. NO: 4275;
a C nucleotide at a position corresponding to position 331 of SEQ ID. NO: 4287;
a T nucleotide at a position corresponding to position 331 of SEQ ID. NO: 4307;
a A nucleotide at a position corresponding to position 331 of SEQ ID. NO: 4332;
a T nucleotide at a position corresponding to position 331 of SEQ ID. NO: 4338;
a T nucleotide at a position corresponding to position 331 of SEQ ID. NO: 4374;
a C nucleotide at a position corresponding to position 331 of SEQ ID. NO: 4397;
a C nucleotide at a position corresponding to position 331 of SEQ ID. NO: 4403;
a G nucleotide at a position corresponding to position 331 of SEQ ID. NO: 4431;
a G nucleotide at a position corresponding to position 331 of SEQ ID. NO: 4433;
a C nucleotide at a position corresponding to position 331 of SEQ ID. NO: 4457;
a G nucleotide at a position corresponding to position 331 of SEQ ID. NO: 4489;
a C nucleotide at a position corresponding to position 331 of SEQ ID. NO: 4509;
a C nucleotide at a position corresponding to position 331 of SEQ ID. NO: 4525;
a A nucleotide at a position corresponding to position 331 of SEQ ID. NO: 4533;
a C nucleotide at a position corresponding to position 331 of SEQ ID. NO: 4617;
a C nucleotide at a position corresponding to position 331 of SEQ ID. NO: 4627;
a G nucleotide at a position corresponding to position 331 of SEQ ID. NO: 4629;
a G nucleotide at a position corresponding to position 331 of SEQ ID. NO: 4638;
a C nucleotide at a position corresponding to position 331 of SEQ ID. NO: 4643;
a G nucleotide at a position corresponding to position 331 of SEQ ID. NO: 4651;
a G nucleotide at a position corresponding to position 331 of SEQ ID. NO: 4693;
a T nucleotide at a position corresponding to position 331 of SEQ ID. NO: 4704;
a A nucleotide at a position corresponding to position 331 of SEQ ID. NO: 4738;
a C nucleotide at a position corresponding to position 331 of SEQ ID. NO: 4768;
a T nucleotide at a position corresponding to position 331 of SEQ ID. NO: 4787;
a C nucleotide at a position corresponding to position 331 of SEQ ID. NO: 4805;
a C nucleotide at a position corresponding to position 331 of SEQ ID. NO: 4823;
a T nucleotide at a position corresponding to position 331 of SEQ ID. NO: 4838;
a G nucleotide at a position corresponding to position 331 of SEQ ID. NO: 4882;
a C nucleotide at a position corresponding to position 331 of SEQ ID. NO: 4886;
a T nucleotide at a position corresponding to position 331 of SEQ ID. NO: 4897;
a C nucleotide at a position corresponding to position 331 of SEQ ID. NO: 4998;
a G nucleotide at a position corresponding to position 331 of SEQ ID. NO: 5011;
a T nucleotide at a position corresponding to position 331 of SEQ ID. NO: 5040;
a G nucleotide at a position corresponding to position 331 of SEQ ID. NO: 5091;
a C nucleotide at a position corresponding to position 331 of SEQ ID. NO: 5092;
a G nucleotide at a position corresponding to position 331 of SEQ ID. NO: 5123;
a T nucleotide at a position corresponding to position 331 of SEQ ID. NO: 5172;
a G nucleotide at a position corresponding to position 331 of SEQ ID. NO: 5198;
a G nucleotide at a position corresponding to position 331 of SEQ ID. NO: 5220;
a T nucleotide at a position corresponding to position 331 of SEQ ID. NO: 5239;
a A nucleotide at a position corresponding to position 331 of SEQ ID. NO: 5248;
a C nucleotide at a position corresponding to position 331 of SEQ ID. NO: 5268;
a G nucleotide at a position corresponding to position 331 of SEQ ID. NO: 5290;
a C nucleotide at a position corresponding to position 331 of SEQ ID. NO: 5317;
a A nucleotide at a position corresponding to position 331 of SEQ ID. NO: 5369;
a G nucleotide at a position corresponding to position 331 of SEQ ID. NO: 5392;
a G nucleotide at a position corresponding to position 331 of SEQ ID. NO: 5409;
a A nucleotide at a position corresponding to position 331 of SEQ ID. NO: 5433;
a G nucleotide at a position corresponding to position 331 of SEQ ID. NO: 5436;
a C nucleotide at a position corresponding to position 331 of SEQ ID. NO: 5448;
a C nucleotide at a position corresponding to position 331 of SEQ ID. NO: 5462;
a T nucleotide at a position corresponding to position 331 of SEQ ID. NO: 5479;
a C nucleotide at a position corresponding to position 331 of SEQ ID. NO: 5490;
a G nucleotide at a position corresponding to position 331 of SEQ ID. NO: 5522;
a T nucleotide at a position corresponding to position 331 of SEQ ID. NO: 5539;
a C nucleotide at a position corresponding to position 331 of SEQ ID. NO: 5544;
a C nucleotide at a position corresponding to position 331 of SEQ ID. NO: 5558;
a C nucleotide at a position corresponding to position 331 of SEQ ID. NO: 5580;
a C nucleotide at a position corresponding to position 331 of SEQ ID. NO: 5596;
a G nucleotide at a position corresponding to position 331 of SEQ ID. NO: 5616; and
a polymorphism with a correlation coefficient greater than or equal to 0.5 with any one of the aforementioned polymorphisms,
and correlating the presence of the at least one polymorphism with an increased susceptibility for development of colorectal cancer in the subject.

18. The method according to claim 17, wherein the correlation coefficient is greater than or equal to 0.8.

19. (canceled)

20. (canceled)

21. (canceled)

22. The method according to claim 18, wherein the correlation coefficient is equal to 1.0.

23. A kit for identifying a human subject as having an increased susceptibility for developing colorectal cancer, said kit comprising:
a) one or more nucleic acid primers corresponding to at least 10 consecutive nucleotides selected from one of sequences of SEQ ID NOs: 1 to 5618 and located upstream of the base located at position 331 of each sequence;
b) one or more nucleic acid primers corresponding to at least 10 consecutive nucleotides selected from one of sequences of SEQ ID NOs: 1 to 5618 and located downstream of the base located at position 331;
c) one or more nucleic acid probes that hybridize to nucleotide sequences comprising the base located at position 331 of SEQ ID NOs: 1 to 5618 including at least one, preferably 3 or more nucleotides upstream and downstream thereof;
d) one or more reagents selected from the group consisting of buffers, dATP, dTTP, dCTP, dGTP, DNA polymerase and combinations thereof;
e) instructions for identifying the susceptibility of the subject to colorectal cancer; and
f) instructions for using any component in the kit.

The application's sequence listing, which the Patent Office published only in electronic form, follows.

SEQUENCE LISTING (5703 sequences)

SEQ ID NO: 1 - DNA, 661 bp, Homo sapiens
  misc_feature [331]..[331]: Chromosome 1, SNP identification no. = rs697708
  misc_feature [331]..[331]: allele = c, in linkage disequilibrium with rs1763322, respectively
  misc_feature [331]..[331]: n is a, t, c or g
ggtggggtccttccccagtaatcttgctcaaagtttgtcctctgtttttctcctgccctcctttccttgccttctttgtgagggccctactcagatggagtccttgctggccggaaatagggtcatggctggtggtgtccagggagtgtgagcaggttgcttggaatcctgggcaggggggtctctagtgaggtcccccggggctctaccttcagccttgttttgagagttgtttttcttcagtgtcttggttgcaggcatagactcaggctttttggatgccagtatcagtgttagtccttagaggacactttctaagagccaagccctngtgtaagtcctctagatgtagttccttattgaatgctctcacaatcaatcatgtgagggaggttctgttaacatccacctgcgtgctgaggaaaccgaggcccagaggggccctgtgactcatgtaaggtcatgacactcgtcatataccgcaactgagttaggcggtcttgcctgagtccacactccacacccctctgtcacacagcctcctgtgatagctcgagatggggagataatttcaggtgacagagtcaggattgagaacagccctggcactctcaagtgataagatcaattctagcaggatggaatttaacagggaaaaatg

SEQ ID NO: 2 - DNA, 661 bp, Homo sapiens
  misc_feature [331]..[331]: Chromosome 1, SNP identification no. = rs707587
  misc_feature [331]..[331]: allele = c, in linkage disequilibrium with rs1763322, respectively
  misc_feature [331]..[331]: n is a, t, c or g
tgagtctttgagtccttttctctggagaccattggggaaactgagtcttacacctgtaaggaactttctgactctgaagtcgttccggcttttatggctctttgtgactggcagctccttcctccagctctggttcctcagtggcccagcccatcaggtggagcccctggggttatcctggctggtttctccaccaagtgggtgtacgccagcctgtgcacacctccgcacccttgcaggcacaggtgtccggctgagcacgccctctctaagcccctctgtcaactcgaattctgcattttcctgtaagacccagcctacgcccgctctntctagaaagctcccttgctgggtcatgtgggtaactaccctcccgcttctccttcctccttccctgtgtgcccagaacagggcaacgtgcagaggggctgcactgggggaagggtaggggccgctgaagcaccagaccactgcaccgtgctactccgttcccatagccctgccctgtgacagggtcactgttactctctccttgcccgactttatcaaagaggaacctggggatgggagtccagtgttctgtccagctagcgagctcagggtctggattggaactcaggtctgtttgactccaaggtcatcgccactcgtaaggttagct

SEQ ID NO: 3 - DNA, 661 bp, Homo sapiens
  misc_feature [331]..[331]: Chromosome 1, SNP identification no. = rs707588
  misc_feature [331]..[331]: allele = g, in linkage disequilibrium with rs1763322, respectively
  misc_feature [331]..[331]: n is a, t, c or g
acacccgactttgacatctgaatcccagtcctgattcccacggacatttccccagctcctagagccagcctccttgcatgaacctgatgcctgagtccttttctctggagaccattggggaaactgagtctttgagtccttttctctggagaccattggggaaactgagtcttacacctgtaaggaactttctgactctgaagtcgttccggcttttatggctctttgtgactggcagctccttcctccagctctggttcctcagtggcccagcccatcaggtggagcccctggggttatcctggctggtttctccaccaagtgggtgtangccagcctgtgcacacctccgcacccttgcaggcacaggtgtccggctgagcacgccctctctaagcccctctgtcaactcgaattctgcattttcctgtaagacccagcctacgcccgctctgtctagaaagctcccttgctgggtcatgtgggtaactaccctcccgcttctccttcctccttccctgtgtgcccagaacagggcaacgtgcagaggggctgcactgggggaagggtaggggccgctgaagcaccagaccactgcaccgtgctactccgttcccatagccctgccctgtgacagggtcactgttactctctccttgcc

SEQ ID NO: 4 - DNA, 661 bp, Homo sapiens
  misc_feature [331]..[331]: Chromosome 1, SNP identification no. = rs707589
  misc_feature [331]..[331]: allele = t, in linkage disequilibrium with rs1763322, respectively
  misc_feature [331]..[331]: n is a, t, c or g
ttctctgaacttgttttattacatgcaaaacaaggataactgtgcctgcctgcaaggttgctgtcacggccagaaaacactcatcctggggcccgacacacagtcaacacgcaagaaaaggtggctaccttcatgaaggtgtcccatcactgtgcccacgtggaaggcgcccctctgcagcgatcacccacaccacctctgtgggtgttccggggtcacacccgactttgacatctgaatcccagtcctgattcccacggacatttccccagctcctagagccagcctccttgcatgaacctgatgcctgagtccttttctctggagaccnttggggaaactgagtctttgagtccttttctctggagaccattggggaaactgagtcttacacctgtaaggaactttctgactctgaagtcgttccggcttttatggctctttgtgactggcagctccttcctccagctctggttcctcagtggcccagcccatcaggtggagcccctggggttatcctggctggtttctccaccaagtgggtgtacgccagcctgtgcacacctccgcacccttgcaggcacaggtgtccggctgagcacgccctctctaagcccctctgtcaactcgaattctgcattttcctgtaagacccagccta

SEQ ID NO: 5 - DNA, 661 bp, Homo sapiens
  misc_feature [331]..[331]: Chromosome 1, SNP identification no. = rs707590
  misc_feature [331]..[331]: allele = a, in linkage disequilibrium with rs1763322, respectively
  misc_feature [331]..[331]: n is a, t, c or g
cccctcctgcacctgcccctccctgcttccagggagtgcagtctctcttctctctctctctctctctctctctctcgctctctgtctcactctctctctctttctcctctggcttttgcaagttcttcattcatggccagggcagcatcaataaactttgcccagaggatcagggaaggcttccagctccttgatatttaccaagtggaatgtccctaatgccaaatgaaaacactcagcaattagatttcaaattaccccttgagccctctgtcaacgttaggtaggatacagggcatccagagactggcgtctgtctcctttatcctcnggccccttggaagccgcctcgctgcctgccgatgcactgggagccccgtggtcccaatgcccttgccccctcctgtctcctagcaacactttccagcagcctccctccgcagggcactctcgcctctccggagcaagtccccactgtggtgattatcttggcagaagcggggctggcactgtccagaacccagacaagctgtgaggagctgcggggacctgaggagtggggcgcatccctggtgtcctgtggcctggatgtgcccctgcagccagcagggtacagggtgttcagacagtgcattattcaccttatctccatggccttgga

SEQ ID NO: 6 - DNA, 661 bp, Homo sapiens
  misc_feature [331]..[331]: Chromosome 1, SNP identification no. = rs707591
  misc_feature [331]..[331]: allele = a, in linkage disequilibrium with rs1763322, respectively
  misc_feature [331]..[331]: n is a, t, c or g
cccctgtccttctgtctgggcgggtgggctctaggatgcagagttggggtcagcagagagcggggctgatgcagagatcaccaggaaagccaggctcttggaatattcctttcccatatgggacatagaaggcagctactgcagacaaggcaccctggaggggcttggcccagtgacttccttcccctcctgcacctgcccctccctgcttccagggagtgcagtctctcttctctctctctctctctctctctctctcgctctctgtctcactctctctctctttctcctctggcttttgcaagttcttcattcatggccagggcagcancaataaactttgcccagaggatcagggaaggcttccagctccttgatatttaccaagtggaatgtccctaatgccaaatgaaaacactcagcaattagatttcaaattaccccttgagccctctgtcaacgttaggtaggatacagggcatccagagactggcgtctgtctcctttatcctctggccccttggaagccgcctcgctgcctgccgatgcactgggagccccgtggtcccaatgcccttgccccctcctgtctcctagcaacactttccagcagcctccctccgcagggcactctcgcctctccggagcaagtccccactgt

SEQ ID NO: 7 - DNA, 661 bp, Homo sapiens
  misc_feature [331]..[331]: Chromosome 1, SNP identification no. = rs813444
  misc_feature [331]..[331]: allele = g, in linkage disequilibrium with rs1763322, respectively
  misc_feature [331]..[331]: n is a, t, c or g
cctctttatttctttccatttaaatctttggcccatcgggtatttcttttggtataaggtggaggtaaggttccacccttctttttttttcaggaacatttatatttagagctacttcctactacacatcttgacacattgactctcccgccacctagcccccatgttaccagggcataaagctgaccccatcactgctgctttcgctccgtctccaccctcatactcttggctgcccacgaagtgacacattcaccctcagcagggtctcccctgtccttctgtctgggcgggtgggctctaggatgcagagttggggtcagcagagagnggggctgatgcagagatcaccaggaaagccaggctcttggaatattcctttcccatatgggacatagaaggcagctactgcagacaaggcaccctggaggggcttggcccagtgacttccttcccctcctgcacctgcccctccctgcttccagggagtgcagtctctcttctctctctctctctctctctctctctcgctctctgtctcactctctctctctttctcctctggcttttgcaagttcttcattcatggccagggcagcatcaataaactttgcccagaggatcagggaaggcttccagctccttgatatttaccaagtgg

SEQ ID NO: 8 - DNA, 661 bp, Homo sapiens
  misc_feature [331]..[331]: Chromosome 1, SNP identification no. = rs770684
  misc_feature [331]..[331]: allele = c, in linkage disequilibrium with rs1763322, respectively
  misc_feature [331]..[331]: n is a, t, c or g
gttgcttttacccggaagaaaattttgtcttcttaacatttatctttaacattttaaatgttaaacacaaatgtggtttaacattttgaatgttaaacataaatatggtttaacatttatcttttcgtggctcctagattttgtatctttgttagaagggcctttccccaccctgagattattccctctttttttttgtcaggatttcatcaaatatttgaatggttttgctttctttgccttcctctctcccttggttttcctctttatttctttccatttaaatctttggcccatcgggtatttcttttggtataaggtggaggtaagnttccacccttctttttttttcaggaacatttatatttagagctacttcctactacacatcttgacacattgactctcccgccacctagcccccatgttaccagggcataaagctgaccccatcactgctgctttcgctccgtctccaccctcatactcttggctgcccacgaagtgacacattcaccctcagcagggtctcccctgtccttctgtctgggcgggtgggctctaggatgcagagttggggtcagcagagagcggggctgatgcagagatcaccaggaaagccaggctcttggaatattcctttcccatatgggacatagaa

SEQ ID NO: 9 - DNA, 661 bp, Homo sapiens
  misc_feature [331]..[331]: Chromosome 1, SNP identification no. = rs2488379
  misc_feature [331]..[331]: allele = t, in linkage disequilibrium with rs1763322, respectively
  misc_feature [331]..[331]: n is a, t, c or g
gagggagggaggggagggagggaaggaaggaagggagagagggagggagggagggaaagagagaatgagagaaaggtgaaaggtgggaacaggaagggaagagaagccagccataggctgcaggctgtttgttcactcttttacttgacccaggcagttctgcgttttaaatattccaccttctgccatgagttacactgttcaatattcatttctcagagcattcaaaggtctatgtgtgccctgccatgatagaccatggcttcagctctcaaatacaactctcagccaaaatattcatgactggtccttcccatatactcatcaatcncccatgctatgatctgcatgtgtcccccagatctcacgtgttggaaacttaatcctctatgtgacagtgttgagaggcaggcctaataagagtgattaggttatgagattctgcccccatgcatggattaatgtcattatctcaggagtgggttcgttatcttgggggtgggttagttatcttgggagtgggcgtgtattaaaagcaagttcagcccctttttctctctttctttctcaaactctttctcttctgtcttcagccatgagatgacacagcaagaaggccctcaccagatgcagacccctcatacttggacttcctagcctc

SEQ ID NO: 10 - DNA, 661 bp, Homo sapiens
  misc_feature [331]..[331]: Chromosome 1, SNP identification no. = rs1695634
  misc_feature [331]..[331]: allele = a, in linkage disequilibrium with rs1763322, respectively
  misc_feature [331]..[331]: n is a, t, c or g
agaaaagacatttatttcttagcgttctggaggctaggaagtccaagtatgaggggtctgcatctggtgagggccttcttgctgtgtcatctcatggctgaagacagaagagaaagagtttgagaaagaaagagagaaaaaggggctgaacttgcttttaatacacgcccactcccaagataactaacccacccccaagataacgaacccactcctgagataatgacattaatccatgcatgggggcagaatctcataacctaatcactcttattaggcctgcctctcaacactgtcacatagaggattaagtttccaacacgtgagatcngggggacacatgcagatcatagcatgggagattgatgagtatatgggaaggaccagtcatgaatattttggctgagagttgtatttgagagctgaagccatggtctatcatggcagggcacacatagacctttgaatgctctgagaaatgaatattgaacagtgtaactcatggcagaaggtggaatatttaaaacgcagaactgcctgggtcaagtaaaagagtgaacaaacagcctgcagcctatggctggcttctcttcccttcctgttcccacctttcacctttctctcattctctctttccctccctccctccctctctcccttc

SEQ ID NO: 11 - DNA, 661 bp, Homo sapiens
  misc_feature [331]..[331]: Chromosome 1, SNP identification no. = rs1775408
  misc_feature [331]..[331]: allele = a, in linkage disequilibrium with rs1763322, respectively
  misc_feature [331]..[331]: n is a, t, c or g
agcaagttcagcccctttttctctctttctttctcaaactctttctcttctgtcttcagccatgagatgacacagcaagaaggccctcaccagatgcagacccctcatacttggacttcctagcctccagaacgctaagaaataaatgtcttttctttatagattccctagtctatggtattctgttatagcagcacaaaatgggttaagatgccccattacatggagactgctgacccacagggttgagatcattgacttagggtttggagtcttatacaacatccctatgggagttggcctccatattccctaatttccaggaatctcnaatgatgacctcagaccaaaatatagcccagatattttgcctttggcaatattgcccacttttccacaactttatcatggcaggtttgatgtgctcacttttatgatccctgaaaggatatgagttaaagatcctgcaaggttacaatccaaggatagaagattgacttggaataggaagttggatgaatctttggtaatctttcatttcaggatttatcttcagtcttgggctatggagggggcacctttggtcttcaattttgttaagcttgtaagagaagtgccaaggctgattggcacacacaaatgtcttttcagtttacaaaaa

SEQ ID NO: 12 - DNA, 661 bp, Homo sapiens
  misc_feature [331]..[331]: Chromosome 1, SNP identification no. = rs11260671
  misc_feature [331]..[331]: allele = t, in linkage disequilibrium with rs1763322, respectively
  misc_feature [331]..[331]: n is a, t, c or g
atcattgacttagggtttggagtcttatacaacatccctatgggagttggcctccatattccctaatttccaggaatctcaaatgatgacctcagaccaaaatatagcccagatattttgcctttggcaatattgcccacttttccacaactttatcatggcaggtttgatgtgctcacttttatgatccctgaaaggatatgagttaaagatcctgcaaggttacaatccaaggatagaagattgacttggaataggaagttggatgaatctttggtaatctttcatttcaggatttatcttcagtcttgggctatggagggggcacctntggtcttcaattttgttaagcttgtaagagaagtgccaaggctgattggcacacacaaatgtcttttcagtttacaaaaaccgtcctcctttccaacgcgtcccaaagggtgttaagggagatgcggaccaggcagtgggttcagcagaagtcacaacagaaccgttcctaaggggacctgtggagaacctaaatgtgggacaaacccacgtggagacctaggaaagagaaggcagagacagacagtacagacaagagtggccatgaaggtgaatcaaagtccacatggcagagctgctttttcatccccagtaaaggcagtgctgggtt

SEQ ID NO: 13 - DNA, 661 bp, Homo sapiens
  misc_feature [331]..[331]: Chromosome 1, SNP identification no. = rs1763319
  misc_feature [331]..[331]: allele = c, in linkage disequilibrium with rs1763322, respectively
  misc_feature [331]..[331]: n is a, t, c or g
gtttgatgtgctcacttttatgatccctgaaaggatatgagttaaagatcctgcaaggttacaatccaaggatagaagattgacttggaataggaagttggatgaatctttggtaatctttcatttcaggatttatcttcagtcttgggctatggagggggcacctttggtcttcaattttgttaagcttgtaagagaagtgccaaggctgattggcacacacaaatgtcttttcagtttacaaaaaccgtcctcctttccaacgcgtcccaaagggtgttaagggagatgcggaccaggcagtgggttcagcagaagtcacaacagaacngttcctaaggggacctgtggagaacctaaatgtgggacaaacccacgtggagacctaggaaagagaaggcagagacagacagtacagacaagagtggccatgaaggtgaatcaaagtccacatggcagagctgctttttcatccccagtaaaggcagtgctgggttttttgaaacctcaaaatgttatggttgagtaaatgactgtaggaccaagtgacctgggttcaatgctgtctgggcccctgcctagccagagaaacttgagcaaatcataggacttctccatgcctcactctgctcatctggaaatgggacaatagcacaccaag

SEQ ID NO: 14 - DNA, 661 bp, Homo sapiens
  misc_feature [331]..[331]: Chromosome 1, SNP identification no. = rs1695631
  misc_feature [331]..[331]: allele = a, in linkage disequilibrium with rs1763322, respectively
  misc_feature [331]..[331]: n is a, t, c or g
tccacaagtttatgcctgtggagcgctggcttggtgtgctattgtcccatttccagatgagcagagtgaggcatggagaagtcctatgatttgctcaagtttctctggctaggcaggggcccagacagcattgaacccaggtcacttggtcctacagtcatttactcaaccataacattttgaggtttcaaaaaacccagcactgcctttactggggatgaaaaagcagctctgccatgtggactttgattcaccttcatggccactcttgtctgtactgtctgtctctgccttctctttcctaggtctccacgtgggtttgtcccacatntaggttctccacaggtccccttaggaacggttctgttgtgacttctgctgaacccactgcctggtccgcatctcccttaacaccctttgggacgcgttggaaaggaggacggtttttgtaaactgaaaagacatttgtgtgtgccaatcagccttggcacttctcttacaagcttaacaaaattgaagaccaaaggtgccccctccatagcccaagactgaagataaatcctgaaatgaaagattaccaaagattcatccaacttcctattccaagtcaatcttctatccttggattgtaaccttgcaggatctttaactcatatccttt

SEQ ID NO: 15 - DNA, 661 bp, Homo sapiens
  misc_feature [331]..[331]: Chromosome 1, SNP identification no. = rs1763321
  misc_feature [331]..[331]: allele = c, in linkage disequilibrium with rs1763322, respectively
  misc_feature [331]..[331]: n is a, t, c or g
aaggcagagacagacagtacagacaagagtggccatgaaggtgaatcaaagtccacatggcagagctgctttttcatccccagtaaaggcagtgctgggttttttgaaacctcaaaatgttatggttgagtaaatgactgtaggaccaagtgacctgggttcaatgctgtctgggcccctgcctagccagagaaacttgagcaaatcataggacttctccatgcctcactctgctcatctggaaatgggacaatagcacaccaagccagcgctccacaggcataaacttgtggaatcctcacagcacacctgtgagacgggagccatcatnggcaccagcttccagatgaggaaactgaagaaagagaggaagtgagttttacaaagtcacagagcccagaagaggcagcatgttggctcatgcaatctggtgccagggtctctgttcctccaccaagctgcttccccttggcacaaggattaaacaaaataagcatttaggaccaggcctggcacacacggagacccccaaaatggatggcaatcattatctttttttattgcaacagagtccgccctctgcccttcaggggaaattctttttcttctgtctccaccccctcaggatcttcaagggggtgtaggagccttcaatgggctg

SEQ ID NO: 16 - DNA, 661 bp, Homo sapiens
  misc_feature [331]..[331]: Chromosome 1, SNP identification no. = rs1695629
  misc_feature [331]..[331]: allele = a, in linkage disequilibrium with rs1763322, respectively
  misc_feature [331]..[331]: n is a, t, c or g
gcacctcttaccaagcaggcctctttagggccctctgggtcttctgagttggcagttgctctgtgcatcagcccattgaaggctcctacacccccttgaagatcctgagggggtggagacagaagaaaaagaatttcccctgaagggcagagggcggactctgttgcaataaaaaaagataatgattgccatccattttgggggtctccgtgtgtgccaggcctggtcctaaatgcttattttgtttaatccttgtgccaaggggaagcagcttggtggaggaacagagaccctggcaccagattgcatgagccaacatgctgcctcttcngggctctgtgactttgtaaaactcacttcctctctttcttcagtttcctcatctggaagctggtgccgatgatggctcccgtctcacaggtgtgctgtgaggattccacaagtttatgcctgtggagcgctggcttggtgtgctattgtcccatttccagatgagcagagtgaggcatggagaagtcctatgatttgctcaagtttctctggctaggcaggggcccagacagcattgaacccaggtcacttggtcctacagtcatttactcaaccataacattttgaggtttcaaaaaacccagcactgcctttactggggatgaaaaag

SEQ ID NO: 17 - DNA, 661 bp, Homo sapiens
  misc_feature [331]..[331]: Chromosome 1, SNP identification no. = rs1763322
  misc_feature [331]..[331]: allele = a, g
  misc_feature [331]..[331]: n is a, t, c or g
ccttggcacaaggattaaacaaaataagcatttaggaccaggcctggcacacacggagacccccaaaatggatggcaatcattatctttttttattgcaacagagtccgccctctgcccttcaggggaaattctttttcttctgtctccaccccctcaggatcttcaagggggtgtaggagccttcaatgggctgatgcacagagcaactgccaactcagaagacccagagggccctaaagaggcctgcttggtaagaggtgcatgcaattacccaaggagatagcattgattaacacattaataaataacatgactattaaagtcagtcncagaggcgggagataattgccttggacaggaatggcctcagcctcttctatgagctgccttccccacctccttctcccagtaaatcttcactgaaggtgctctttggcccagtgctggcctgagcctgggaggcaggagccctgagccaggcctgtaatgagaacctcaggaccaaggggcggctgactcccaggggataacctggcatcctgacgccaaaccctgcaagaggagcttcaggcatttcattggtcagctctggctgggtcacgttgcagtgacaaccaccaaacctggtggcttatgacatcaaggtgacatcttgctct

SEQ ID NO: 18 - DNA, 661 bp, Homo sapiens
  misc_feature [331]..[331]: Chromosome 1, SNP identification no. = rs1695628
  misc_feature [331]..[331]: allele = g, in linkage disequilibrium with rs1763322, respectively
  misc_feature [331]..[331]: n is a, t, c or g
gtgtgtttcaggtgagggcgtgtccaagggaggacatgttccagggggtgtgtcctaggttggggaagtgttccaggtggggagacacctgcagcctggatggcagagagaagagcaccgtgggccagggccccagctgcaccttggcaaggacgcagcaagagcaagatgtcaccttgatgtcataagccaccaggtttggtggttgtcactgcaacgtgacccagccagagctgaccaatgaaatgcctgaagctcctcttgcagggtttggcgtcaggatgccaggttatcccctgggagtcagccgccccttggtcctgaggttctnattacaggcctggctcagggctcctgcctcccaggctcaggccagcactgggccaaagagcaccttcagtgaagatttactgggagaaggaggtggggaaggcagctcatagaagaggctgaggccattcctgtccaaggcaattatctcccgcctctgcgactgactttaatagtcatgttatttattaatgtgttaatcaatgctatctccttgggtaattgcatgcacctcttaccaagcaggcctctttagggccctctgggtcttctgagttggcagttgctctgtgcatcagcccattgaaggctcctacacccccttgaagat

SEQ ID NO: 19 - DNA, 661 bp, Homo sapiens
  misc_feature [331]..[331]: Chromosome 1, SNP identification no. = rs1763323
  misc_feature [331]..[331]: allele = g, in linkage disequilibrium with rs1763322, respectively
  misc_feature [331]..[331]: n is a, t, c or g
ggcgggagataattgccttggacaggaatggcctcagcctcttctatgagctgccttccccacctccttctcccagtaaatcttcactgaaggtgctctttggcccagtgctggcctgagcctgggaggcaggagccctgagccaggcctgtaatgagaacctcaggaccaaggggcggctgactcccaggggataacctggcatcctgacgccaaaccctgcaagaggagcttcaggcatttcattggtcagctctggctgggtcacgttgcagtgacaaccaccaaacctggtggcttatgacatcaaggtgacatcttgctcttgctncgtccttgccaaggtgcagctggggccctggcccacggtgctcttctctctgccatccaggctgcaggtgtctccccacctggaacacttccccaacctaggacacaccccctggaacatgtcctcccttggacacgccctcacctgaaacacacccctcctaggacatgcccccacctgggacagcctccaggacacgccctctcctgcaatatagcctcctgggactcacgctctgaaacatacgcccacctgggatagcccccaggacaccccccactcctgggacatgcctcctcctgcatcacgccccctgcttggacacaccct

SEQ ID NO: 20 - DNA, 661 bp, Homo sapiens
  misc_feature [331]..[331]: Chromosome 1, SNP identification no. = rs1763324
  misc_feature [331]..[331]: allele = c, in linkage disequilibrium with rs1763322, respectively
  misc_feature [331]..[331]: n is a, t, c or g
tgcccccacctggaacatgctgcctcataggagaaggagaaaagaacagcatggagccctgacacagtcctcagagcacctgctcagacgtggagcgtatctcctggcttccccacaacccttcacttgggcccatctccaggtaaaccttctcacagctgctccagatcagtgtatttgtgtcctggggctgcagtaacaaagcaccacaaactaagtgacttaaagcagccaaactttattctctctccgctccggaggccagatgtccaagatcaaggtgggagcagggctggttccttcaggggctgtgagagagaatctcttccangtctctcccagcctccagtgttttgttggcaacccttgccctccgctggcttgaagaagcatcagcccctctgccttcaccttcccgtggtgtcctccctgtgtgggggtctggaccttccttcccctttttgtaagtatactggtcaaattgcattaggggaccctactacaccaatacaaccccatcttaattcattataaccgcaagcaccttattccaagtaaggccacattctgaggtcctgcaggttaagacttctacatatgaatttcaggaggacacagtttaccccatagaagtccgtaacttgggatttggcttcagact

SEQ ID NO: 21 - DNA, 661 bp, Homo sapiens
  PADI4
  misc_feature [331]..[331]: Chromosome 1, SNP identification no. = rs2501804
  misc_feature [331]..[331]: allele = c, in linkage disequilibrium with rs2147333, respectively
  misc_feature [331]..[331]: n is a, t, c or g
ggcaagagaatcacttgaacccaggaggcggaggttgcagtgagctgagattgcaccattgcactccaacctgggcaataagagtgaaactccgcctcaaaaaaaaaaaaaaaaaagtgggtattggggcaaagaggaagaaagaaaaaaaagatgggtagataagaggtaagtggttgcattgagtctttgatcagctttcactgaatacattttccgtgtgaggtggggagaggaatagtcacttatgccttgagctcagggaatctatattgtcacaaatgataaacatagagcaagggaagaaatcagatatgcatttgttgcaggnaagcagagggataactttgatttctgtcctttgttccatgcctgtgaagataagctattaacttacattgtcagggtgaaattcaacagaactggttcacgggaaagatcttagggctcacaaggaatttccttgtcggcaaattgtgagggagatatgtagcttttttttttttttttttaatctttgtagctatcttatttagaaacaaaatggggctgggcatggtggctcacgcctgtaatcccaacactttaggaggctgaggcgggcagatcatgaggtcaagggatggagaccatcctggccaacatggtgaaaccctgtctc

SEQ ID NO: 22 - DNA, 661 bp, Homo sapiens
  PADI4
  misc_feature [331]..[331]: Chromosome 1, SNP identification no. = rs2501806
  misc_feature [331]..[331]: allele = t, in linkage disequilibrium with rs2147333, respectively
  misc_feature [331]..[331]: n is a, t, c or g
agaggaagcacactcatcttagaatcgaatcccagtggcccagttcccagctggcccttacctctctgagcctcagtttccccatctagcagagagagtggctataaaggtgccagacccacccgtttgtgcccttctcccttcccctcttgaggaagccacatgggacagagggggctgaggcggacctagcccctcggtccacctgctgtgtgcccctcggcctccattgtcttttgagccccttattcatcttcttggtggaccagacacagggcgtgtccctctcctgtccccatcctctgaccacagtgcccaggcagttggaagncctggcttatcactgaggctttgagagaatgaaggaaaacaacagcacacagaaccaagagaatgagcctccaggctttggcagagaaacaagagccttggttaagttttggttcggccaggtaggtgtatcataaatggaggcacctgagcagaaatgcaccagagccactggggcatctcctggccgggaactgccccctgggctgagctgtctgctgcttcatttattgttattattagtagccgtcccatactgagcagttaccacatgccgggccctccaaaccttgcaaccacccaggaagcaggtcgacgtgattcccatttt

SEQ ID NO: 23 - DNA, 661 bp, Homo sapiens
  PADI4
  misc_feature [331]..[331]: Chromosome 1, SNP identification no. = rs6673715
  misc_feature [331]..[331]: allele = g, in linkage disequilibrium with rs2147333, respectively
  misc_feature [331]..[331]: n is a, t, c or g
ataaaataacacccctgcccaaaaacaacccccccacccgtctcccctgccccgcgcccagcttctatctgtagctgcatttcagccgggcattcagtagaagctgtgggactgcatgactggggcagagcctcagtgtgctcatctgtaaaatgggaagagggatgcctgcctcacagtagcaagacctcatagtgctgccgtgaatgttcagccgatgagacagtgtgtgtagaacgccaggctcacagtagctctcaacagataccagtgtatgcattctctccagcctcagtttcttcatttgtagaaggggaactccaatagtacntatgtcgcagagttgtcatggagatgcctgtagagatggggtttagccatgttgcccaggctggtctcaaacttatggactcaagcaatccacttgcctcagcttcccaaagtgctagggttacaggcatgagccaccatgcctggctgtgtgtatggcttttctgcataagaaaatagcaataacaatgcacgccacagacataatgccgacggagtctcgctcttgtcgcctaggctggagtgcaatggtgagatcttggctcactgcaatctccacctcccaggttcaagcaattctcctgcctcagcctcctgagtagctgggatt

SEQ ID NO: 24 - DNA, 661 bp, Homo sapiens
  PADI4
  misc_feature [331]..[331]: Chromosome 1, SNP identification no. = rs2147333
  misc_feature [331]..[331]: allele = t, c
  misc_feature [331]..[331]: n is a, t, c or g
atggattcaccttgaattctttctcaggcaaaattcaagaaccctcttttggggtctggattgggaccactttccagtaatacaaaggtctttataagagggaggcaggagggtctgagtcagggaaactgtggtgatggcagcagagatcagagtgatgctgttgctggaaggggccacaagccaaggaatgcgggcacctctagaagctgcaaggaatgggtttgcccctggagcttccagaaggaatacagccttgccgacaccttgattttagccaagtaagattcatattttggacttctgatcttgcaaactggtaagtaataantttgtgctgtttgaagtcactaagtttgtagtgatttgttacagcagcaatgtgttatattaagtttaccccacagctgcctccttaggtattttaagttcggctgaaaggttttttcgtacatagtaaactgtaacctaactggaggtgtaaacagcccgtgacctacttttataccaagcactgttttggctgatctcaggcagccaactgttcaaaccatgttcaaatgaggccgatgccgagctgtagtcaatccagctgtttctgagcctcgcttccgtgctctgtgggtcactttcgtttttctgtccgtaaatattgttcaac

SEQ ID NO: 25 - DNA, 661 bp, Homo sapiens
  PADI4
  misc_feature [331]..[331]: Chromosome 1, SNP identification no. = rs2147332
  misc_feature [331]..[331]: allele = c, in linkage disequilibrium with rs2147333, respectively
  misc_feature [331]..[331]: n is a, t, c or g
aattgcccaccctttaccctgaaaactcatgaataatccaccccttgtttagcatataatcaagaaataaccataaaaatgggcaaccagcagcctttgggactgctctgtctatggagtagccattcttttattcctttgcgttcttaataaacttgctttcactttatggattcaccttgaattctttctcaggcaaaattcaagaaccctcttttggggtctggattgggaccactttccagtaatacaaaggtctttataagagggaggcaggagggtctgagtcagggaaactgtggtgatggcagcagagatcagagtgatgctnttgctggaaggggccacaagccaaggaatgcgggcacctctagaagctgcaaggaatgggtttgcccctggagcttccagaaggaatacagccttgccgacaccttgattttagccaagtaagattcatattttggacttctgatcttgcaaactggtaagtaataagtttgtgctgtttgaagtcactaagtttgtagtgatttgttacagcagcaatgtgttatattaagtttaccccacagctgcctccttaggtattttaagttcggctgaaaggttttttcgtacatagtaaactgtaacctaactggaggtgtaaacagcccgt

SEQ ID NO: 26 - DNA, 661 bp, Homo sapiens
  PADI4
  misc_feature [331]..[331]: Chromosome 1, SNP identification no. = rs6692262
  misc_feature [331]..[331]: allele = c, in linkage disequilibrium with rs2147333, respectively
  misc_feature [331]..[331]: n is a, t, c or g
tgaatatattctccttacattgtgcttgtctttttactttatattgtcttttgattaacagaatttattttcttttttaatttttaaattgatgttaattttttaaaaaatagaaacagggtctcactatgttgccctggctggccttgaactcctggctcaagtgatcttcccaccttggcctcccaaagcactgggattaaaggtgtgagccactgcacctggcctatttatttacatctagttgaattttttgatcttttccttcaggtttactggttttgagtcttgtttcagagaaagcataaatatgttatcctgtatcctcttntagagattcaaagttctgactttcacatttaagtctttatctccctccagctgatttttgtgtatggtgtgaggctgggatcaatttaattatttttccaatttagtattttctatatgaatgagcaattgctccagcaacatttatgatatagtctctactacctccagccatctgcaagcctatttctgtcatagatcaagttgtatgtcctttaagttttatccttcctttgtcttggcctgagccattaaaaccccatcttaagttccatggctttataggaagtcttatacctggttgagaaagtgcctcaccttttactacttt

SEQ ID NO: 27 - DNA, 661 bp, Homo sapiens
  PADI4
  misc_feature [331]..[331]: Chromosome 1, SNP identification no. = rs1204895
  misc_feature [331]..[331]: allele = a, in linkage disequilibrium with rs2147333, respectively
  misc_feature [331]..[331]: n is a, t, c or g
aataaattacatttctatacatcagcaataaataggaaacaaatatttttctttttttctagcaaaccatttctttaagaagaaaacaatttttaaaaaactgatgtaatttacaaaaggaaaaaatactgtaaagtacctaggataaatctagcaaaatgtgtaagatttttatgaagaaaatattcaaactttattgaaagccattagagaagatccaaataaatagaaatactatgtatatggttaggaagccttgttgccgtaaaggtatgaattctctccaatggatttatatattcaatggaattttagggtttcttatggaacntgacaagttgatttttaaatctacacgagaaatccaggaactaagttggtcaaggtacttgtaaaggaaagtagtaaaaggtgaggcactttctcaaccaggtataagacttcctataaagccatggaacttaagatggggttttaatggctcaggccaagacaaaggaaggataaaacttaaaggacatacaacttgatctatgacagaaataggcttgcagatggctggaggtagtagagactatatcataaatgttgctggagcaattgctcattcatatagaaaatactaaattggaaaaataattaaattgatcccagcctcaca

SEQ ID NO: 28 - DNA, 661 bp, Homo sapiens
  PADI4
  misc_feature [331]..[331]: Chromosome 1, SNP identification no. = rs1635598
  misc_feature [331]..[331]: allele = t, in linkage disequilibrium with rs2147333, respectively
  misc_feature [331]..[331]: n is a, t, c or g
cactcaccttctggtcgcctgtgctaccactggccactttcatcgtcagggtcacctctaccccagggtccaggggccatgtggaggaacctgtggatttcttcttggctggagggccgtgggcaatatccacgaccacccctggggaggcgttgatgctgaaggacgtgcagtcctcaggggcagagctgtggacaagacacatgggaaagcagaggatgcagtgaggaggggctgggccagccatggctctcccagcatttctccttgtgatggttaatattaggtgtcagcttgtttggactgaaagatgcgaagtattttttctggntgtatctgtgagggtgttgccagaggaggttggcatttgagtcagtggactgggagaggaagacccaccctcagtatgggtgggcaccatccagtcggctgccagcaaggctacaacaaaaacaggtggaagaggtgggatcaccttgctcactggggcttctggctgccttctttctccaatgctggatgcttccttccgctcctcctgcccttagacactagactccaggttcattggcttttcgactctgggacttgctccagtggcttgctaggggctcttgggcctttggccacagactgaaggctgcattgttggcttccttgg

SEQ ID NO: 29 - DNA, 661 bp, Homo sapiens
  PADI4
  misc_feature [331]..[331]: Chromosome 1, SNP identification no. = rs1748036
  misc_feature [331]..[331]: allele = t, in linkage disequilibrium with rs2147333, respectively
  misc_feature [331]..[331]: n is a, t, c or g
taaagtacaaatgctgtcttgttattcgctggctgaaaactttttgttggcttcctgttgtttgcagaaaatgaggtccctgataccaaactcttcaaactgactccttcacctcctgttccatctacctttcttgccatacagaacttcctcagtttccccaacacgtgtctcacccttttctcatccagagagtgcacacagcctgcccctctgtgtcaaactctctcctctctcctgctcttaggtgggtagttcgtgtcacccttcagcttgctacttctttcaggaagccttccccgaccaccccctccccagcctgcctggatantcaagctctgtgttcccccagggagaagcctgcttggctggttctgctgggaataagtggctgttggcccagagatctgtgggaaccccagagggtcctgttgagcccatctacaggcaaagggggtgtagtaggtggaatggtggtccccaaaaagatacatccatatcctaatccctggaacttgtcgatgtgatttcatttggaaaaaaagtctttgcagatctaagttgaggatcttgagaccagatgcggtggctcatgcctgtaatcccagcactttgggaggccgaggtgagtggatcacttgaggtcaggagtttgagacca

SEQ ID NO: 30 - DNA, 661 bp, Homo sapiens
  PADI4
  misc_feature [331]..[331]: Chromosome 1, SNP identification no. = rs1635577
  misc_feature [331]..[331]: allele = a, in linkage disequilibrium with rs2147333, respectively
  misc_feature [331]..[331]: n is a, t, c or g
ggtagtagacgagatgtcgtctgtcttgcccactgctgcgtctgctgttcttagaacttggcacatagtaggtgctcaggatttatctgccacacagctgtgtgacaggattgtgccccgttggccagggcaggaggggaacaaagatggggatgacttacgtgtggcctgaaacaccctcactttgtccatctcagacctggccacgtggagcaccagtgtatggtttgtgaagaagtccttgggggtcttcgtgctcagggtcatcagcgacatgtcctgcaggtctgggatgagaagggcattgcctgagtcacagggccctgagacngctgctggtttcccatagccacctcacctcctggtggagcctcacaccccaccgctcccctgagacctccctttaccatgttgcctggttttcttttctttatgctattttgagtatttaaatgatggttttcattttggaatgagagctcattaaggttttggtctcctcccactaggatgagctggggatgtaacctcagcaaagcggggaccacatttattaatattttgctccttgcaacgttccctgaatcttgaacctagaaagccgagaactccctagaacaatgaccagcaggcggcaggcgctcggctgagatttgtgcaa

SEQ ID NO: 31 - DNA, 661 bp, Homo sapiens
  PADI4
  misc_feature [331]..[331]: Chromosome 1, SNP identification no. = rs1635576
  misc_feature [331]..[331]: allele = g, in linkage disequilibrium with rs2147333, respectively
  misc_feature [331]..[331]: n is a, t, c or g
gtctctgattagcaggatgttgcagaacaaatgattacatgccacatgctgtcagcttgcactcaaagtctataaccaggaggtgtgtgtgtgtgtgtgtgtgtgtgtgcgcgcgcgtgtgtgagagagagagaaagaaaagcagggagcaataacgagtcattttgtctgtgtcctccaactggaaggtagtagacgagatgtcgtctgtcttgcccactgctgcgtctgctgttcttagaacttggcacatagtaggtgctcaggatttatctgccacacagctgtgtgacaggattgtgccccgttggccagggcaggaggggaacanagatggggatgacttacgtgtggcctgaaacaccctcactttgtccatctcagacctggccacgtggagcaccagtgtatggtttgtgaagaagtccttgggggtcttcgtgctcagggtcatcagcgacatgtcctgcaggtctgggatgagaagggcattgcctgagtcacagggccctgagaccgctgctggtttcccatagccacctcacctcctggtggagcctcacaccccaccgctcccctgagacctccctttaccatgttgcctggttttcttttctttatgctattttgagtatttaaatgatggttttcattttggaat

SEQ ID NO: 32 - DNA, 661 bp, Homo sapiens
  PADI4
  misc_feature [331]..[331]: Chromosome 1, SNP identification no. = rs1748022
  misc_feature [331]..[331]: allele = t, in linkage disequilibrium with rs2147333, respectively
  misc_feature [331]..[331]: n is a, t, c or g
tctcacctcagggcccacgcacttgccgttccctctgcctggaacgcccttcccctaggtgtctgtctggctgttcctatacctccctctgctcacatggcacctcatgggggacaccttccctggccaccctctctccacacaacccgaactccactcctcactccacatccccttccctgccgcattcttctacatagcatgtcacagcgttggacacactaggtgttttatgtaattattttacctatagttctcccagccactaagatgaaagcaacacgagggcagggactcggtcacagtcatggctctgtgccccgtgcctggnatcaacctggcacctacttagttgcaggtgctcgtgggtcactgagaagttcctgatgtctctgattagcaggatgttgcagaacaaatgattacatgccacatgctgtcagcttgcactcaaagtctataaccaggaggtgtgtgtgtgtgtgtgtgtgtgtgtgcgcgcgcgtgtgtgagagagagagaaagaaaagcagggagcaataacgagtcattttgtctgtgtcctccaactggaaggtagtagacgagatgtcgtctgtcttgcccactgctgcgtctgctgttcttagaacttggcacatagtaggtgctcaggatttat

SEQ ID NO: 33 - DNA, 661 bp, Homo sapiens
  PADI4
  misc_feature [331]..[331]: Chromosome 1, SNP identification no. = rs1748019
  misc_feature [331]..[331]: allele = c, in linkage disequilibrium with rs2147333, respectively
  misc_feature [331]..[331]: n is a, t, c or g
gtagagacagggtttcaccatgttggctgggctgatctcaaacttctgaccttaagtgatccacctgcctcagcctcccaaagtgctaggattacaggcgtgagccaccgtgcccagcccagaaaggtgcattttaaatgagttcccaggagtttctggtgcacaaggtccatgggacacactctacaggcccctgggagttaacgtagcctcagctgcatcagggcaggacagaggcaatgacaacaacagtagggaacttccctgcctttttagagcccccaacaagcagcaagctctcagtgggcaggggaggggtgactgtttttcncatcacacagtgagtgctgcggatggaactcaggctctttgttgtctggacccaccccagcaccccaggacctctcacctgcacgcgtacacctcctgcgggggctgggtgttgggggtcatgatccagggcgccacgcggaagaccacgctgtcttggaacaccacagcctcggggagctcctgcaggggagggggtaaggggaaggaggggctgtcaccgctgccagggcccagcacctaccacttcctgcagctgtttggagtccccctgcccagctgggctctgtacccctttccctagccaggccactgcctggaagcccaggcc

SEQ ID NO: 34 - DNA, 661 bp, Homo sapiens
  PADI4
  misc_feature [331]..[331]: Chromosome 1, SNP identification no. = rs1635570
  misc_feature [331]..[331]: allele = t, in linkage disequilibrium with rs2147333, respectively
  misc_feature [331]..[331]: n is a, t, c or g
ccctgaagaccaaacaccacccataagacagagcctccagctgggcattgggaaagattccagccccggccccacctccaccttgcagcaagagcttcttcaagagcacagggaggtccaagcctgagccacctcctcggcagggttacctggagatcaagctgagctcacgggtgacaagggttttgggaaatgaagagccagatcttatcttggtaataaaaaaataacaagccccacctacatgctcccactttggtaggaattccacctccttgcactgggctactcagctacaggcgcgggcggggaaggcaggctaaaaggaggnagtctcaagacaagagggtttcggcagctgtgccccctccccaccccatgcaggtaccatcacgcgtttgatgggaaactccttcaggcctctgttccttggagagtcgaagaccacgggcagcgttttgtgtggggcttggatgtagccgatctccatttcatcctgtgggagtgagtggagaggaggctgttgcgcgtgctgcctgggtcttggtgcccgacgccaggatgggggcatgaaaccatccactcactctcacccttgcagtcaagggcacattcctatgggatgtttgatctcagagaaggggctcagaagcggagctta

SEQ ID NO: 35 - DNA, 661 bp, Homo sapiens
  misc_feature [331]..[331]: Chromosome 1, SNP identification no. = rs2355880
  misc_feature [331]..[331]: allele = c, in linkage disequilibrium with rs11261011, respectively
  misc_feature [331]..[331]: n is a, t, c or g
gcagaaaagagcactggactcagagtattccttccagctggtcttgcttctctggattacatcttagctcctgaccctcccaggacatttgcttgagggttagatgagagaaaccatgctcacagtgtggggatttcaggcaccaggactttcccttgtggctggaatctgcccagtcaacaagtgggagcaggcctgtgcaatggtgttaaagaggagagagggaaactgccttctgtttctgtctcccttcacttcctcccagctcatgacctctggccactgtttgcttctgatgtttggcctcagagatatatccacaaggcgtganagaagcccagaccagctctgtacatggggcagtaggactcccaggaaaagacctgggctggggttgataaggaagacaacagcagcttcctcttcagtgtcggagtgtaggcacactattggggcaggatgggatggcttgtcgctcacttggcctgagatttggggggaaagagcacaggtctggaagacaccaaactgtaggtctagttctgactgtcactgacttgctctatgaccttgagcaagtcacttcccctctttgagcctcagtttactcatctgtcaaaagaaggccatagctcctcctctgcctcgtgacaagatggtg

SEQ ID NO: 36 - DNA, 661 bp, Homo sapiens
  misc_feature [331]..[331]: Chromosome 1, SNP identification no. = rs1568341
  misc_feature [331]..[331]: allele = g, in linkage disequilibrium with rs11261011, respectively
  misc_feature [331]..[331]: n is a, t, c or g
gattctgccctctggccatgcaccatcttgtcacgaggcagaggaggagctatggccttcttttgacagatgagtaaactgaggctcaaagaggggaagtgacttgctcaaggtcatagagcaagtcagtgacagtcagaactagacctacagtttggtgtcttccagacctgtgctctttccccccaaatctcaggccaagtgagcgacaagccatcccatcctgccccaatagtgtgcctacactccgacactgaagaggaagctgctgttgtcttccttatcaaccccagcccaggtcttttcctgggagtcctactgccccatgtanagagctggtctgggcttctgtcacgccttgtggatatatctctgaggccaaacatcagaagcaaacagtggccagaggtcatgagctgggaggaagtgaagggagacagaaacagaaggcagtttccctctctcctctttaacaccattgcacaggcctgctcccacttgttgactgggcagattccagccacaagggaaagtcctggtgcctgaaatccccacactgtgagcatggtttctctcatctaaccctcaagcaaatgtcctgggagggtcaggagctaagatgtaatccagagaagcaagaccagctggaaggaatactctg

SEQ ID NO: 37 - DNA, 661 bp, Homo sapiens
  misc_feature [331]..[331]: Chromosome 1, SNP identification no. = rs7522180
  misc_feature [331]..[331]: allele = a, in linkage disequilibrium with rs11261011, respectively
  misc_feature [331]..[331]: n is a, t, c or g
aggactttcccttgtggctggaatctgcccagtcaacaagtgggagcaggcctgtgcaatggtgttaaagaggagagagggaaactgccttctgtttctgtctcccttcacttcctcccagctcatgacctctggccactgtttgcttctgatgtttggcctcagagatatatccacaaggcgtgacagaagcccagaccagctctgtacatggggcagtaggactcccaggaaaagacctgggctggggttgataaggaagacaacagcagcttcctcttcagtgtcggagtgtaggcacactattggggcaggatgggatggcttgtcnctcacttggcctgagatttggggggaaagagcacaggtctggaagacaccaaactgtaggtctagttctgactgtcactgacttgctctatgaccttgagcaagtcacttcccctctttgagcctcagtttactcatctgtcaaaagaaggccatagctcctcctctgcctcgtgacaagatggtgcatggccagagggcagaatctggccaaaaaaccctatggagtagtgtcccagaaaagaagagatgaggggacggtgaagggcagggagcagaacaagaggggtacaaatgagttagccagaggaagggggcaggctgggtggag

SEQ ID NO: 38 - DNA, 661 bp, Homo sapiens
  misc_feature [331]..[331]: Chromosome 1, SNP identification no. = rs11577969
  misc_feature [331]..[331]: allele = c, in linkage disequilibrium with rs11261011, respectively
  misc_feature [331]..[331]: n is a, t, c or g
aattatgcaggaggctgctgggagaagcaggcgctgggatcgcttcattattgatgagagatgacgggccctctgctgacagcctgcctaagagatatgattagcttataaagaattaatcaccattttcagggaggacacagattaaaaccccaaggagtggtgttatcaatgttccctaatttcaggggactttgaaaaggttttagcacaacttggagaagacaattgtattcaattagaatcactagtgccgcaatgtcactccctgccgtgaggtgggcccttgcaggggaggtttgaggaaggaggggactgcaggtggccatcnaggaggcctgcccgacgcactgccctctttggaggctcctcccacactgttccctctccaggtgatctcatgttcacctatggcttcatttccatccagactccgatgactcacacttttatggctccagcctggacctctccctgaagctccccatccatttactgtatgcagctcctgctcaactccttctctgggatgtctcaaaggcacctccagaccaccacgtgtgaccctgaactcccaaacaccccccacattccctaccctggtgcctggtcctcctccaagattctctttcttaatgaagagcaccagccttaacaaaat

SEQ ID NO: 39 - DNA, 661 bp, Homo sapiens
  misc_feature [331]..[331]: Chromosome 1, SNP identification no. = rs11577970
  misc_feature [331]..[331]: allele = a, in linkage disequilibrium with rs11261011, respectively
  misc_feature [331]..[331]: n is a, t, c or g
tgcaggaggctgctgggagaagcaggcgctgggatcgcttcattattgatgagagatgacgggccctctgctgacagcctgcctaagagatatgattagcttataaagaattaatcaccattttcagggaggacacagattaaaaccccaaggagtggtgttatcaatgttccctaatttcaggggactttgaaaaggttttagcacaacttggagaagacaattgtattcaattagaatcactagtgccgcaatgtcactccctgccgtgaggtgggcccttgcaggggaggtttgaggaaggaggggactgcaggtggccatcgaggangcctgcccgacgcactgccctctttggaggctcctcccacactgttccctctccaggtgatctcatgttcacctatggcttcatttccatccagactccgatgactcacacttttatggctccagcctggacctctccctgaagctccccatccatttactgtatgcagctcctgctcaactccttctctgggatgtctcaaaggcacctccagaccaccacgtgtgaccctgaactcccaaacaccccccacattccctaccctggtgcctggtcctcctccaagattctctttcttaatgaagagcaccagccttaacaaaatccatc

SEQ ID NO: 40 - DNA, 661 bp, Homo sapiens
  misc_feature [331]..[331]: Chromosome 1, SNP identification no. = rs11261002
  misc_feature [331]..[331]: allele = g, in linkage disequilibrium with rs11261011, respectively
  misc_feature [331]..[331]: n is a, t, c or g
ggctccaggtggagccatcatcgtcaggaatgcaaaaacctggaaagacatctcaaaaggctaattttaggttctacaataatgatgttatctgcaagattatttggggaagttgcaaatctcatgacctctggaataatggctagtaattatttagaatccaagactctctcatcctcttaatttggtggtctttcatttgtcttacaagaacagtttagttttggggaaaggctattatcatttaaactataaactaaatttctctcaaagttaggttggcccatgcccaggaatgagcaaagacagtgaggctagaagcacagtggantcagccatgtcagatttctctcactgccgtaactttgcaaaagcagtttcaatatctggcatccaaattctcaccattcttttcagtccagttcaaatgccactgttggggttcagaaactgatatcccaaaatatgatgctttatttatttatttatttattttttgagagggagttttgctctgttgcccaggccagagtgcagaggcgcgatctctgctcgctataggctcccccacctgggttcaagggattctcatgtctcagcctcctgagtagcaggaattacaggtgtgcgccaccacactcggctaatttttttttttttt

SEQ ID NO: 41 - DNA, 661 bp, Homo sapiens
  misc_feature [331]..[331]: Chromosome 1, SNP identification no. = rs6700748
  misc_feature [331]..[331]: allele = t, in linkage disequilibrium with rs11261011, respectively
  misc_feature [331]..[331]: n is a, t, c or g
attttactctatggccttgccccagattctttctcgaaccctctcttggagtctccatctgaacccctttccaggaacagccgtatagactggtcagtttcatggttccattcagaccagcagttaagacaaattttgctgtgggttcccaaaataaaacaggataagattccctcttgtcttgttttatgtccttgagagcttgacttgtgaccaagcgggagcactctctcggtccctgctgtccagcgagcatgatttttgggtcatatctggtggccagtctgaaaatggctgggaacctgagacacatacgacattgagcagcacnctttttgttccaaaggtgtcaagctctcaggggagtttgtcttaataaaaagtcccatgcacaaagggcttttgttgtctcaacccctgttgtctggttagccctggggaagcccgatcccaggagggtctgcttggtgtcatagattaacaggtctgtgactggtagaccccacctatttatggggttctggagacaccatacacacaaacaccatcctcaaccatctgtggcaagagtcttttgctatcttagcgtaaaccttggagtgaatttttggagatcatggggacttcctcttctatgccctctccactgtaaaccaaaaat

SEQ ID NO: 42 - DNA, 661 bp, Homo sapiens
  misc_feature [331]..[331]: Chromosome 1, SNP identification no. = rs12128025
  misc_feature [331]..[331]: allele = c, in linkage disequilibrium with rs11261011, respectively
  misc_feature [331]..[331]: n is a, t, c or g
gtggtgaaactccatctctactaaaaatacaaaaattagctgagtgttgtggtgcatgcctgtagtcccagttacttgggaggctgaggcaggagaatgtcttgaacccaggaggcggaggttgcagtgagctgagatcgcgccattgcactccagtctgggtgacagagtgagattccatctcaacataaataaataaataaagtaaaccagaaacactagtttaggccatgatgggaatgggtggtcagacatgcctcatcatacattccccactttggaattcaggcacagctgaccagcattcacgttaaaacagagacctcaatantgacaaaacagactcttttagccggataagatgcctgctacttggaggcttcatctgcataataagaaccttggtctccacaaccccttgttgtaaccaaaacactctcttctattgagttcaggtctttcaaactctttcaaccaattgccaatcagaaatctttgattccacctatgacctggaagccccttgcttggagttatcccacgtttctggaccaaaccagtgtccatcttacatgtattgattgatgtcttatgtctccctaaaatgtatgaaaccatgctgtagcgtgatcaccttgggcacatgtcatcaggacctcct

SEQ ID NO: 43 - DNA, 661 bp, Homo sapiens
  misc_feature [331]..[331]: Chromosome 1, SNP identification no. = rs11261003
  misc_feature [331]..[331]: allele = a, in linkage disequilibrium with rs11261011, respectively
  misc_feature [331]..[331]: n is a, t, c or g
ttgatgtcttatgtctccctaaaatgtatgaaaccatgctgtagcgtgatcaccttgggcacatgtcatcaggacctcctgaggctgcatcacagtcatgtgcttagccttggcaaaataaacttctaaattgattgagacctgtctcagatagcttttgacttacaccaggaacaccacttacttatatggtagaaacctattctaaacctagaaaattacttcctgggctttccatgaagaggtttattgaattgagtcactactggaataagtacaccattggaaattatttatgtaacttttgacttttgagggtactcatttgttnttgatcctttttccttccatggacagcttttgatttcctatctcccatctgtagggcatatgggccgtttggacctttgtgtgtagatggtcagctgagaaactgaggccctagagaatatggcaggacagaaacatggattggaccccgtttgtggctagtgaaacttgcttttctttgagctatctttgggggtggttctggatcttgtgaagactgatttgtacctctttgtagatgcctagtgcgtccttggtcaagttataaccttagttaaggcttattggtttggtgagtcatttggtaaggtatcttttgtttaaaagcaaa

SEQ ID NO: 44 - DNA, 661 bp, Homo sapiens
  misc_feature [331]..[331]: Chromosome 1, SNP identification no. = rs11488494
  misc_feature [331]..[331]: allele = t, in linkage disequilibrium with rs11261011, respectively
  misc_feature [331]..[331]: n is a, t, c or g
ctgaggctgcatcacagtcatgtgcttagccttggcaaaataaacttctaaattgattgagacctgtctcagatagcttttgacttacaccaggaacaccacttacttatatggtagaaacctattctaaacctagaaaattacttcctgggctttccatgaagaggtttattgaattgagtcactactggaataagtacaccattggaaattatttatgtaacttttgacttttgagggtactcatttgttattgatcctttttccttccatggacagcttttgatttcctatctcccatctgtagggcatatgggccgtttggaccttngtgtgtagatggtcagctgagaaactgaggccctagagaatatggcaggacagaaacatggattggaccccgtttgtggctagtgaaacttgcttttctttgagctatctttgggggtggttctggatcttgtgaagactgatttgtacctctttgtagatgcctagtgcgtccttggtcaagttataaccttagttaaggcttattggtttggtgagtcatttggtaaggtatcttttgtttaaaagcaaaaaaaaaaaaatgttcaaaagccaagaatattgggtgtcctggctgaaatctgataacaaatttttaaaaattctttta

SEQ ID NO: 45 - DNA, 661 bp, Homo sapiens
  misc_feature [331]..[331]: Chromosome 1, SNP identification no. = rs6603896
  misc_feature [331]..[331]: allele = g, in linkage disequilibrium with rs11261011, respectively
  misc_feature [331]..[331]: n is a, t, c or g
tgaaacttgcttttctttgagctatctttgggggtggttctggatcttgtgaagactgatttgtacctctttgtagatgcctagtgcgtccttggtcaagttataaccttagttaaggcttattggtttggtgagtcatttggtaaggtatcttttgtttaaaagcaaaaaaaaaaaaatgttcaaaagccaagaatattgggtgtcctggctgaaatctgataacaaatttttaaaaattcttttaaagatctctatagtcagaagtcagcttaattaaaagctaatactcaggctagtatttttttttaaaaggctttcttgctttttntcctctggatcctattgctgggaagctttttagttgattgaaaccactttttaatatatttggtccctctgtttgctccttttcttgttggaatgacttttgctgagaaaaatgtcaaacttcattggcattttagaaagcttaaaatcttcccaaattggctcctctaagaattgtcgtctcatttacttctacttctacttcctctgtgccatctttgatagctcataaagaaagctagaggtgatttctagtgtccctgagaccccttgaggaacacagaaaaaggaagacagaagaccccacacacccttcttggggtcttctgcc

SEQ ID NO: 46 - DNA, 661 bp, Homo sapiens
  misc_feature [331]..[331]: Chromosome 1, SNP identification no. = rs869080
  misc_feature [331]..[331]: allele = g, in linkage disequilibrium with rs11261011, respectively
  misc_feature [331]..[331]: n is a, t, c or g
ctcaatgcttccacagtgcagttgctgcaaagacattttcctgaggctggtgggtgacacaatctgcctgttcctgcagtctccatgtgttcaaactgtgcccttcttatctaaatgggcaaagaaacaagtagccctctgtagtaacaaccatccattgcaaatgcagtcagccacttccaaaactgcatccctcacaggtgactttctggccactgtacacccaaagactgtgttcttgtacagtacaaagtaacccctgtattccccaaggccaaagagatcagataactagcaaatgagagtagagctttagactggagaggaaacngccgttaaatcttgagactacgcaaggagggcagaagaccccaagaagggtgtgtggggtcttctgtcttcctttttctgtgttcctcaaggggtctcagggacactagaaatcacctctagctttctttatgagctatcaaagatggcacagaggaagtagaagtagaagtaaatgagacgacaattcttagaggagccaatttgggaagattttaagctttctaaaatgccaatgaagtttgacatttttctcagcaaaagtcattccaacaagaaaaggagcaaacagagggaccaaatatattaaaaagtggtttcaatcaactaa

SEQ ID NO: 47 - DNA, 661 bp, Homo sapiens
  misc_feature [331]..[331]: Chromosome 1, SNP identification no. = rs945501
  misc_feature [331]..[331]: allele = c, in linkage disequilibrium with rs11261011, respectively
  misc_feature [331]..[331]: n is a, t, c or g
acccagtttctatcttgaaatagcttaaattctctctctgctttgagatataaattttctaccagttctctctaaaacttagtaagggcttccaccgtgtaaaagggattaacttattccatttacagagtcaccatttcacccaactgtccagccagtgagttttatctgactcaggactgaaaatttaaaatcaatgctataataactttgcacctgtctgtattttatttgtacatatctgtatttgtatattgtctacctggtaccaaattgacttataaataaatgaatactcataaattaataatcccaaatgcttttcaaattnatatgatgttagttatctttcatgaataacactagttttaaaattgttggtaaaataaaatataatgtttttagaatttaagacatttttgcctgggtgtactggtcagaccaatttatactgtctttatgggatgttttagggtcatataactgtgacttctatgatatttttgtatttgtttgatttgtttatgagcttatgctttgattttgaccctttggattctggggtctacacaagtggccatggtgaggactggggacatatgtgtgtccccacagcctggaccgcatcctctctgccccagctgtgcctcttggtcatgcc

SEQ ID NO: 48 - DNA, 661 bp, Homo sapiens
  misc_feature [331]..[331]: Chromosome 1, SNP identification no. = rs12074757
  misc_feature [331]..[331]: allele = t, in linkage disequilibrium with rs11261011, respectively
  misc_feature [331]..[331]: n is a, t, c or g
gggctcaattaatcctcctgcctcagcctctcaagtacctagaactacagacatgagccaccatgcttggctaatttttaaaattttttgtagagacaagttctcactatgtttcccaggctggtctcaaacttctggcctcaagcaaccctcctgcctcggcctcccaaagtcttgggattacagatagagccactgtgaccagcctgattttctcttttgaacaagattttcatgtagtattaataagaggtaaaagatttttgttcgccttttgaataatctgcaaaaaagtacagaaggggagagagggagagacagattctgttgntgtcataatgtctttattaggtgttttgattgtttggaaaactgagtctcctctctatcaaagagcaacatttttgctttttgaaatattcgaattatcacttggctaaataaattacctttttttaacagtgatctatgatcctgttttgatcaagtgttttaaacttttctcattttgatatcaagtgtgttaaacccttgatatttaacatgcttccccaaatcaaatcttaaatcctaaaatttagactttttgaccccaaactaatttggatattccatatagggtcactggaagtccaagagaaacatactaggcttatttggt

SEQ ID NO: 49 - DNA, 661 bp, Homo sapiens
  misc_feature [331]..[331]: Chromosome 1, SNP identification no. = rs12127617
  misc_feature [331]..[331]: allele = c, in linkage disequilibrium with rs11261011, respectively
  misc_feature [331]..[331]: n is a, t, c or g
gtcaaataagaaatgggatttgactttttttgagttctacttttatggatatgttattaacccatttatgcctgaggttgcaattttttgaatttttgcaatcagaccttggtgatgaccttgagcagtatgatataaataacccatgtgcttagtgttccagtaatggaacactaggcataaattggtttaatatgtgttcaaaaattgcatgacatttgtggtatgtcttagtataggcagtaaattgctttagtttgatgctttattttctaaaagcacttggcagatcctaaagtgttgagtcttcaaggcaattcatggaaaggantctgacaagtaatcttgaatacaggtttccaataactttggagattatactattggactagataaaaacttccagaactgtagtaaaaagaaaaacaaaacctgatgagttcatgaagattcctaattcaagatcaagcaaaactagaattaattacattggattgaactgatagagaattaaaatcattcttatggctttggtttgaaatattgcggatcctttttgtgttttgttttctagagtcaagaaattcttttttttcttttgagctatttatagcatatagcaattgtgtaaaatatacttttgtgaacaaaattgaaacat

SEQ ID NO: 50 - DNA, 661 bp, Homo sapiens
  misc_feature [331]..[331]: Chromosome 1, SNP identification no. = rs1414643
  misc_feature [331]..[331]: allele = t, in linkage disequilibrium with rs11261011, respectively
  misc_feature [331]..[331]: n is a, t, c or g
caatttggactgaatcctgaattttttcctgtctacaagtctccaaactgatgtttccaaatttgtcttccattttctgacttggactcaatgaaattgctattaccgtttttcctgaggccctgcaagctgaagctcatacataaacaacttgtgacatgcaaactacagataagaaaagtatatcagatggccactgcctacttccacattaactgaagatgctcctaatctaacatcaagaaacctcaactgactgccctccaggctctaaggaaacaggtttttagattgttccaaacattaacctctgttttctttctgagattcngtctgcagcaccagctcctgaaatgaaacaggactggccgattcccagaaatgggagactttgcatactcaactcttaacatgatttttctctccacagccacagactcagcttttagtgtgcaaaacttctagggaagtttcagacaggggaatgttggggcttagaaaccaaaaccccaaaatatggcacgttgttatgctgaactggagaagcagcctcaagttctctctgacctttccttctctcctgtctcttgattctctgtctccttcaaagcacaggataaattttttctgtgaagttcccttttctgcctaaagtttgacc

SEQ ID NO: 51 - DNA, 661 bp, Homo sapiens
  misc_feature [331]..[331]: Chromosome 1, SNP identification no. = rs6699137
  misc_feature [331]..[331]: allele = c, in linkage disequilibrium with rs11261011, respectively
  misc_feature [331]..[331]: n is a, t, c or g
actcagcttttagtgtgcaaaacttctagggaagtttcagacaggggaatgttggggcttagaaaccaaaaccccaaaatatggcacgttgttatgctgaactggagaagcagcctcaagttctctctgacctttccttctctcctgtctcttgattctctgtctccttcaaagcacaggataaattttttctgtgaagttcccttttctgcctaaagtttgacccaccaaaggagaaaacaattacctctggtaccatcactgagtttcacgatcagaactcatatgacagaaagaaagactgaagcctgtcaacaccgctggacagacntttgttacaaaccgttgtctgttctgtggacccaacagattttgtcccaggccatcatatgttcttcaagcccattaattcccctaaaaatcatatgttatctccctaaaatcacccacacttttccatcttcctttcccttaagaggaggagtatataaccctttataccacattgagtggtggggatcactctgtgattctcctctgtgcacattaataactgtgtgttccacttctatgaatttctctgctgtcagttgattttcagtgaactttcagaggatgaaggggaagttttcctgtcgcccctacaccacctcttcccaag

SEQ ID NO: 52 - DNA, 661 bp, Homo sapiens
  misc_feature [331]..[331]: Chromosome 1, SNP identification no. = rs4920496
  misc_feature [331]..[331]: allele = c, in linkage disequilibrium with rs11261011, respectively
  misc_feature [331]..[331]: n is a, t, c or g
actgcaacctcctcctcccaggcccaagtgatcctcccacctcagcctcctgagtagctgagattataggtacacaccaccacacctggctagtttttgtattattatttcttgttgctgtttgagagatggtgtttcgccatgatgcccaggctggtctcgaactcctgggctcaaaccatgatgacaggcaggagccactgcatccagccaaggttttgtttttctacctcaacctgaacatatattgatttctagctatgaccattattcacacacctctctcagtttcctcttgagcttgggaccagggtattctcacctctgagtnccccactagcagggcatgcatccaccgggtgctgagcaaggtgggttcacacacacgtgcattatttcccttgggggaaagagcatttgagaaataataagagctggcatttcatagcagctgctagatcccagagcctgtacaaagtgctctacatgcacgacctaggcaaacaatcaggaaccccatgagatgagatgtatgaccctttttttacagataagaatactgaagcacagaaaaagtcaataacttgccccaagtcacacagttagcaagtagcagagctaggcctcaaaccaagggagtctggctctagacccttgcctt

SEQ ID NO: 53 - DNA, 661 bp, Homo sapiens
  misc_feature [331]..[331]: Chromosome 1, SNP identification no. = rs2222257
  misc_feature [331]..[331]: allele = g, in linkage disequilibrium with rs11261011, respectively
  misc_feature [331]..[331]: n is a, t, c or g
tccaacctgagatataagaggatcaaacacacactgaggtcagccatggaactgcacaaatgtggagcagtcccggagagatgagcaacccactttgaaagccaactaactgtgaatattcaagttcccaaattaactgaacctagatttataaaagaagtgccctcctcccatgggctcctgccctctgggtttccagtccttccccagactcatcattttgggggtgagattctagattcctactccttctgcctctgtgctctcaccccccagaaacttcctttccttccttgaacttgcctctggtaatagcacccaggataccgcntatgagaacaatgtatgtggccaacacgtgtagagcagctcacaggtaactgtgtgccaggcactgggctacgaacttctggatgtttttctcaggagttccacaacaattccttcacatgtattgttacacagacacgccagacacacagaggaggcctgcggcttagggtgttgagaatttgcctccctccctcactgacagcttctgaatcctcttgggacccatcctcaggacaagagaaggccaattcttctccatccagattatacaaggtgggaaccaggaatctgcatttgtagcaagtcccctggccagtcattgttctct

SEQ ID NO: 54 - DNA, 661 bp, Homo sapiens
  misc_feature [331]..[331]: Chromosome 1, SNP identification no. = rs10796454
  misc_feature [331]..[331]: allele = a, in linkage disequilibrium with rs11261011, respectively
  misc_feature [331]..[331]: n is a, t, c or g
gtagaataagattagctgacaataacaacagcgatgaaatagtaataatgactggcttttactgagcaattgttagatgccaagcgctgctctcagtgctttccatacattaactaacttaaccttcacaacaactctacaggtgagtacctgcagctattataaaacatgactgcagtccaggcacagtggctcaaacctgcagtcctagtactttgggacactgaggcaggaggatcacttgagcccaggaggagattgaggctgcagtgagtcatgattgcactattgcactccagcctgggcaacagagcaagaagctctctctaantaaataaataaaacatgactgcaagttctttttcctttagtccactgggagatatggtctctgtaattttcccttgagtctgggcaggcctataactagtagaatacagtggaaagtgatgtcatgtgactttcaaagctggacaagcaaaggcaaagcagtttctgccttgtttatgggagcactggcttttggggccctgagtttccacatgagaagtctcgctaccctgaggtcaccatgctgtgaggaagctcaagctacatggggaggcactatatgaaggtgcttctgtccacagtcccccaggtgaaactacagactacacag

SEQ ID NO: 55 - DNA, 661 bp, Homo sapiens
  misc_feature [331]..[331]: Chromosome 1, SNP identification no. = rs10796455
  misc_feature [331]..[331]: allele = c, in linkage disequilibrium with rs11261011, respectively
  misc_feature [331]..[331]: n is a, t, c or g
ctctcagtgctttccatacattaactaacttaaccttcacaacaactctacaggtgagtacctgcagctattataaaacatgactgcagtccaggcacagtggctcaaacctgcagtcctagtactttgggacactgaggcaggaggatcacttgagcccaggaggagattgaggctgcagtgagtcatgattgcactattgcactccagcctgggcaacagagcaagaagctctctctaaataaataaataaaacatgactgcaagttctttttcctttagtccactgggagatatggtctctgtaattttcccttgagtctgggcaggnctataactagtagaatacagtggaaagtgatgtcatgtgactttcaaagctggacaagcaaaggcaaagcagtttctgccttgtttatgggagcactggcttttggggccctgagtttccacatgagaagtctcgctaccctgaggtcaccatgctgtgaggaagctcaagctacatggggaggcactatatgaaggtgcttctgtccacagtcccccaggtgaaactacagactacacagagcagagacaagccatccccaccatgccttatccaaattcccatcctgaagaatcattagcatgataaaaatgggggctgttctatgcc

SEQ ID NO: 56 - DNA, 661 bp, Homo sapiens
  misc_feature [331]..[331]: Chromosome 1, SNP identification no. = rs945503
  misc_feature [331]..[331]: allele = t, in linkage disequilibrium with rs11261011, respectively
  misc_feature [331]..[331]: n is a, t, c or g
gactcgcagttcttcctggggggtgtggcgaactcagtgagctgtaactggcctaggttgttgtggaggagggggcttaggagggctggaattggggtggccagttgaggtgtgcgtcaagctcctaaagaacaaaggcagcgaagtggactctggggaaaggtcccaacatccaggacccaggaatcagggtggcatcgaggcatccacagatgcagaagatatggaaatggagattcagctgctctagggatgggaaccacaacctctctatggtgggcttgggatgggaccagagctgagtgcagtcacagcttcatcactgcaggcngtcctaggctccaggaaaacaacaataaactgacaagcagggtgctcaccttccagtggcctgaagcaagactcaggggaggtgagacaccagaggctgggagacctgccagagaaggtgagggcctggataatgggacagtgaggatggagagaggaggctggaaggagaggattttaagggtatagaatcaaccagaattgtgatggagaaggagagaaagaggacacctgaattcctggcttgggcacctgtggaaagggagagcggatgctggggacagaggggacagagcattggggaagaatccgagagatgtgtgggtggaga

SEQ ID NO: 57 - DNA, 661 bp, Homo sapiens
  misc_feature [331]..[331]: Chromosome 1, SNP identification no. = rs11261011
  misc_feature [331]..[331]: allele = a, g
  misc_feature [331]..[331]: n is a, t, c or g
actacaactacctatgagatccatactatcatccccattttatagatgaggaaactgacacacggagaggtttaacttgctcaaggatatcaaactaataagaggcagacataaaaatcaaacccaggttatctaactccagactccagaattgtgccctctaggctgtactgaatctgaggttcaggaaccataaattggcagccagggtctcactgtcagcaaagctgcaatggatcggaaacaccagactcagggcctcttggtgcctctgtttccccagttttctctgcaaggctgattgctccccttaccccacctcccggtagcnctcaatctaattaatgcttgtgaagctgcagggcagcttatttaacaggtgttcccagagcacaaatgttttcatctttcctcctcaaatgctccagacaagtaagcacttcccagctcagaaacgtgtattaaccaccatatgttcttattttctgtattcttgatggtttaacatcttaagggtcttgcccagctggggaaagactacccttcccagggccagctaattcctagagatgagtgtgcctttcatatgcaaaccaacaagtccacctcttaagcagagatagtaatggtacctccatggatagaacactgccttctacat

SEQ ID NO: 58 - DNA, 661 bp, Homo sapiens
  misc_feature [331]..[331]: Chromosome 1, SNP identification no. = rs7545658
  misc_feature [331]..[331]: allele = a, g
  misc_feature [331]..[331]: n is a, t, c or g
tgagcacatctgcattctcagtgtgtatgatggactgagggtcaggtgagccactggtgagcctgtatagctcccgctgctgggctgcagagttgggcgtaggggactgctccagccacaaggcccgtggtggcattgctacccaggggagagggggcatctcctgggcacccacacatgcctttgtctatgcatttactcaacattctccctgatcttaggcacaagataccaaaatgaaccccgaattagtggtcaggtggttcagcccctgtgtctctcctcccaatgtcagattccccacctgtaaaatgaaaatgagaatggagcngaccagtgcttttcaaacgacattcctcctgtcctagacttctcaggggtgccccaggagctgctgtggggagtgatggggaaatggagtagggagacccccgcctcgctttaactagagcagtatgtgttacctgtctggggattctatgagtccatttgaataatgggatttacagatttttgaaacaattgaaatcactgagcaagaggctctctaaaccttcccttccagccctgaggctctagggcctgttgggctgactaggtgtgagaagtattattggagcaggtcagagattctcaaacgcggcggcaacagagggctttt

SEQ ID NO: 59 - DNA, 661 bp, Homo sapiens
  misc_feature [331]..[331]: Chromosome 1, SNP identification no. = rs7555911
  misc_feature [331]..[331]: allele = g, in linkage disequilibrium with rs7545658, respectively
  misc_feature [331]..[331]: n is a, t, c or g
agtgtgtatgatggactgagggtcaggtgagccactggtgagcctgtatagctcccgctgctgggctgcagagttgggcgtaggggactgctccagccacaaggcccgtggtggcattgctacccaggggagagggggcatctcctgggcacccacacatgcctttgtctatgcatttactcaacattctccctgatcttaggcacaagataccaaaatgaaccccgaattagtggtcaggtggttcagcccctgtgtctctcctcccaatgtcagattccccacctgtaaaatgaaaatgagaatggagcagaccagtgcttttcaaacnacattcctcctgtcctagacttctcaggggtgccccaggagctgctgtggggagtgatggggaaatggagtagggagacccccgcctcgctttaactagagcagtatgtgttacctgtctggggattctatgagtccatttgaataatgggatttacagatttttgaaacaattgaaatcactgagcaagaggctctctaaaccttcccttccagccctgaggctctagggcctgttgggctgactaggtgtgagaagtattattggagcaggtcagagattctcaaacgcggcggcaacagagggcttttcaagaatgacaggcagcca

SEQ ID NO: 60 - DNA, 661 bp, Homo sapiens
  LOC400745
  misc_feature [331]..[331]: Chromosome 1, SNP identification no. = rs951805
  misc_feature [331]..[331]: allele = a, in linkage disequilibrium with rs4654874, respectively
  misc_feature [331]..[331]: n is a, t, c or g
tctgtcgcccaggctggagcgacagtacagcaagggtttaagatagggtctgactctgtcgcccaggctggagtgacagtggcacaatcacaatcaatgctcactcctccatctctcaggctcaagtgatcctcctgtctcagccaccaagcagctgggactacaggtgcatgccaccacacccagctaatttttttgtttgttttttagtagaaacgaggtctcactatattgcctaggctgaagcaagggctctttgacttctagatgtaagtgctctgggcaacacttcaccacagccatctgccagccttgagtccagtgacaaganggaacaagatggtttacaagtcacccctattctctgcaaatccagtttattaaacttggagttcacaaagaataaacggttaattcctagctttcttgggtgggggcagggggagaaaagcgcgtaagttttaaatagaggactcgacaatttctagctccacagtccccgttttgagaatattcagagacagcaacacgaggcaagctccattaaatactaactctaacaagttttctgatgcatacaattcattctgatacatgcaatttttaaaatagtggcaggaatttgtttgaggtcaaaatgacaaaagcttaaattcagata

SEQ ID NO: 61 - DNA, 661 bp, Homo sapiens
  misc_feature [331]..[331]: Chromosome 1, SNP identification no. = rs710311
  misc_feature [331]..[331]: allele = c, in linkage disequilibrium with rs4654874, respectively
  misc_feature [331]..[331]: n is a, t, c or g
caggaaataccatgacatggcatgtgcaccaacatgttcagcagtcatgactcccacccccaccccagcttgcctttttgtcatccttccctgctcaatatgggtccttgggtttcctgtacacataagtcattaatccagtggttgaagttttgcacctggtggctcccaagagcgcttgtgttgtcatgaatgtgagatcacagacatttggcagatgaagcagtgatggccgttttacgctgcaatcctgagcggaacccaggaaatggctgataccgactgaagtttgttacatttgatgtaaacttttcagtttgtacatggaatntacctttatgtacctttagtgaggctacatctgtggtacaagtttggtgtttctgcgcttttaggataagaccaactgaatttggtaacctgggggagtagcccagataagcagttacattactttgatgcataaataaaaatgaaagccgggcacagtggctcatgcctataatcccagcactttgggaggctgaggcaggtggttcacttgccgtcaggagttcaagaccagcctgggccatctctaccaaaaagatgaaaattagccaagcgtggtggcgtgcacatgtaataggctacttgggaggcagaggcaggagaattgctt

SEQ ID NO: 62 - DNA, 661 bp, Homo sapiens
  misc_feature [331]..[331]: Chromosome 1, SNP identification no. = rs12123092
  misc_feature [331]..[331]: allele = a, in linkage disequilibrium with rs4654874, respectively
  misc_feature [331]..[331]: n is a, t, c or g
agtgttaatcgttatgactattactacttacattaataagccaaacttacaactatactttatgagacatactctaggcaccacagagttctcttttgctaagcaaagatttaatagtgaacagtgttaattatacattatatacaatatcaggaaaaaaaagagttgtaatttttgaggaaaatcgcttcagccttttgaggcctcctttgacataccagtggttgacaagacagaattaagaacagttaaaacagttaaaaagctgataaaattaaatcatcaaaggtagaaagttttccaacaggaaaaaagccactgaagttaacantcttgtggaaaagaacagaagaaagaatagggccaggtatggcgactcacgcctgtaatcctggcactttggaaagcccaggtgggaagatcacgtgaggccacgagttcaagaccagcctgggcaacacagtgaggccccatctctagaaaagataaattagccaggcatttattagcttgcctgtagtcctggctacttgggaggctgaggtggggagaactgcttgagcacacgagttcaaagctgcagtgagccaagatcacaccactgcgctgcagccttagtgacacagcaaactccatctcaaaaaaataataagtaaaagaa

SEQ ID NO: 63 - DNA, 661 bp, Homo sapiens
  HP1-BP74
  misc_feature [331]..[331]: Chromosome 1, SNP identification no. = rs12121807
  misc_feature [331]..[331]: allele = c, in linkage disequilibrium with rs4654874, respectively
  misc_feature [331]..[331]: n is a, t, c or g
ttctagaatttgatgtctaggatttatctgttatcttttgcagtactgtaattttttctagtccaaggacttatctgaatattgaacatttattgaacatgattgtactctatgatcttggaagcagtctttaataaaatacaaaatgattttttaaacctttgattcattaagtaattagcattcaatgtatctggaaacatcgtttaccctctataagaattccaaaacacatgaactggagcttgtatttaaaaaggaaaatgatggtgttcatttcaaggagtagaaaagacttaaagtgagggcgacacttagctacttctgaggntatactatactcaaaacctttaaatataagctacggttcagcagcttttaaaatttcatgtttattcatatttttcaaaatatatgtacattaaaaaaggaagatttacaacaggaaagattgccttacatgcaacacaaattccaatgaattcatgatgggatcacacatgattatgatctaattcaagccaatcttctcaagtccatttcccagccatactttaggctacagaagggatcccaggagacaaaagtggaatgaataagaaacaaacatcttttgcctctggcagtactcaaggggccagaagatgtacttcaaaaactt

SEQ ID NO: 64 - DNA, 661 bp, Homo sapiens
  HP1-BP74
  misc_feature [331]..[331]: Chromosome 1, SNP identification no. = rs10916859
  misc_feature [331]..[331]: allele = g, in linkage disequilibrium with rs4654874, respectively
  misc_feature [331]..[331]: n is a, t, c or g
ctcccaggtttaagtgattctcttgccttggcctcttgagtagctggaactacaggcacgtgccaccatgcatggctaatttttttgtatttttagtagagatggggtttcaccatgttggccaggctggtctcgaactcctgacctcatgtgatccacctgcctcccaaagtgctgggattacaggcatgagccacagtacccagcctgtttactgatatattttaaagacagagcaaaaataattgcttatagattagataaaggtgtctgataaagagaagagaccagcacaaagtcagggtttttggtttcagcacatggaaggatnatattgtcatgaactgaaatgaagataatgtgggaaatgcagggatttttggggggagagggagcagagtggggatcattaaatgttttcaacatttaaatcagacatccaagtgctgatgctgaacaggcatccgtatacacgaatctgaagttagaagggaggtatgggctagattcatacatttgtgaattaatagtttatagctggtatttacagttttgcaagtgaaaggaatcaccaagtgaatgtggacataaaagatgagaggcctaaggtataaccctgagggctcctttctattaagaggtaaagcagaaatccttagga

SEQ ID NO: 65 - DNA, 661 bp, Homo sapiens
  HP1-BP74
  misc_feature [331]..[331]: Chromosome 1, SNP identification no. = rs7548269
  misc_feature [331]..[331]: allele = c, in linkage disequilibrium with rs4654874, respectively
  misc_feature [331]..[331]: n is a, t, c or g
tctttgtcttttatttacctatgacctagaagccccctccctgatttgagttgtcccacctttccagaccaaaccaacatacaccttacatatattaatgtctcatgtttccctaaaatgtgtaaaaccaagctgtgcccagaccaccctgggcacaagttttcagaacctcctgaggctgtgtcacgggcacaatcttaaccttggcaaaataaactttctaaattgactgagacctgtctcagatattttggggtcacacaaaggagataaaagtgaaatatgatccccagtgttgcaggtggggcctagtgggaggtgtctgagttanagggatggcttcgtgaatggcttcgtgccttcctggccgtaatgagcgggttgtttaaaacaactggttgttttaagagtgtgagatctggttaagagtgtggcacctttccctcctctcttgctcccttttttgccatgtgatacgatagctcctccttccaccatgattgtaagtttcctgaagccctcactagaagcagacgcctgcactatgcttcttgtacagcctgcagtaccatgagccaaataaactttattctttgttaaagaatagtgaaatatgtttccatctttaaatgcatcatataacgcatttttgatccacaat

SEQ ID NO: 66 - DNA, 661 bp, Homo sapiens
  HP1-BP74
  misc_feature [331]..[331]: Chromosome 1, SNP identification no. = rs7548649
  misc_feature [331]..[331]: allele = g, in linkage disequilibrium with rs4654874, respectively
  misc_feature [331]..[331]: n is a, t, c or g
aaatatgtttccatctttaaatgcatcatataacgcatttttgatccacaattgtgtctgcctactaccactatactcagcatataagaagcatgaaaatatcagcacattaatttagaactttctgcttctataattcccttttcttttgcactatttcactagctctttaatttggcattctgatgaccactactgattttctgaaaatgtggcttctggactgaaacctcagcacttctaattgcatgcctcagtaatgcaagtaaatactggtactacactgtatcgggacaatgtgcattcaatatggtagtcttctgtagacagnaatctggattaaacataattttctagaagtcatctcacacaaacactctcagagtctgtgaattacaaatttaaacaaattgatatatctgcatgaatctacaactgagcaaatgtgacaatctaaatgatctgtcaagacgttaaatggcaaattttacgtatcaattactaacaaaattatctcagaattttatgctgcatgtttaaatgatggaaacattatgctatttctatgtacaggtgttattgaagcctgaattctcatgaaatatatatatgatgtatatgtatgtacatatgtatgcatatatctatcatatatatgttt

SEQ ID NO: 67 - DNA, 661 bp, Homo sapiens
  HP1-BP74
  misc_feature [331]..[331]: Chromosome 1, SNP identification no. = rs3736880
  misc_feature [331]..[331]: allele = a, in linkage disequilibrium with rs4654874, respectively
  misc_feature [331]..[331]: n is a, t, c or g
tcttactactaacaattgtgtaatacctgtttgatgactcctctatttaattctcttttcagtgcttgtttaaggagataaccccttctctccagctccagagaaggatacttatggatgatgtattttcgaatagcaaccactgatgcaccactcttctggaagcatgcctagaaaagatttattaaactagttgtttttttttattagatagagcctgacatatattttcaaaataaattattttggaagtgaatttgatgatagatgacaaaaacggtagggaagaatgaacttcagaagacttcagttcataatgactacagagaantaacagaattactaaatatttctactacaattttaaattgttcaaaacagcctaagagaccatactgaacacgaacaacattctatgtataatgaagaacctctttccattttaattccattctgtatttagaagatgaatctttggcatcaaaatgagaaaagcagaacaaacctatcacttacaggatcacagatctgtcccattttaaggcacgagcttaaggaatgagcatgccaggacatttccctgaaggctctgtatgaatgtcagcagaaagaagaatcaaagataatctgaataagtggcataaaaatgggtttacagatg

SEQ ID NO: 68 - DNA, 661 bp, Homo sapiens
  HP1-BP74
  misc_feature [331]..[331]: Chromosome 1, SNP identification no. = rs651085
  misc_feature [331]..[331]: allele = a, in linkage disequilibrium with rs4654874, respectively
  misc_feature [331]..[331]: n is a, t, c or g
tttcagtgcttgtttaaggagataaccccttctctccagctccagagaaggatacttatggatgatgtattttcgaatagcaaccactgatgcaccactcttctggaagcatgcctagaaaagatttattaaactagttgtttttttttattagatagagcctgacatatattttcaaaataaattattttggaagtgaatttgatgatagatgacaaaaacggtagggaagaatgaacttcagaagacttcagttcataatgactacagagaagtaacagaattactaaatatttctactacaattttaaattgttcaaaacagcctaanagaccatactgaacacgaacaacattctatgtataatgaagaacctctttccattttaattccattctgtatttagaagatgaatctttggcatcaaaatgagaaaagcagaacaaacctatcacttacaggatcacagatctgtcccattttaaggcacgagcttaaggaatgagcatgccaggacatttccctgaaggctctgtatgaatgtcagcagaaagaagaatcaaagataatctgaataagtggcataaaaatgggtttacagatggcaaagtgctgaaggagagttttgggtaatagtgaaggtgttctatttgaatttaa

SEQ ID NO: 69 - DNA, 661 bp, Homo sapiens
  HP1-BP74
  misc_feature [331]..[331]: Chromosome 1, SNP identification no. = rs651538
  misc_feature [331]..[331]: allele = g, in linkage disequilibrium with rs4654874, respectively
  misc_feature [331]..[331]: n is a, t, c or g
ccactgatgcaccactcttctggaagcatgcctagaaaagatttattaaactagttgtttttttttattagatagagcctgacatatattttcaaaataaattattttggaagtgaatttgatgatagatgacaaaaacggtagggaagaatgaacttcagaagacttcagttcataatgactacagagaagtaacagaattactaaatatttctactacaattttaaattgttcaaaacagcctaagagaccatactgaacacgaacaacattctatgtataatgaagaacctctttccattttaattccattctgtatttagaagatgnatctttggcatcaaaatgagaaaagcagaacaaacctatcacttacaggatcacagatctgtcccattttaaggcacgagcttaaggaatgagcatgccaggacatttccctgaaggctctgtatgaatgtcagcagaaagaagaatcaaagataatctgaataagtggcataaaaatgggtttacagatggcaaagtgctgaaggagagttttgggtaatagtgaaggtgttctatttgaatttaatgtgccctcttccatttccatcctattttacttatactccatttgactaatgcacctggaagaattaagtagctcattatgtc

SEQ ID NO: 70 - DNA, 661 bp, Homo sapiens
  HP1-BP74
  misc_feature [331]..[331]: Chromosome 1, SNP identification no. = rs589755
  misc_feature [331]..[331]: allele = g, in linkage disequilibrium with rs4654874, respectively
  misc_feature [331]..[331]: n is a, t, c or g
aaaaattctcaatatttttcagttactgagtcacaattagatttataagggcaaggactttgctagccttagttaattcaccactagcaggggcgcccaacagaggaaggtagtccttaaatgtttgttcaatgaattaacattttcagccttcaaataaaaactgtacttaatcgataaactgcatttaaaaattctaaagttaaaatatttgctatattaaatataatttttttaaaaaaattaacagtgttcaccaaatgtgattatattagaaaaacatgaacttataatgactttcctctctttaaaactcctttaggaagcagancaagatttatgatgtctagacagatatatgccattttcaaataagaaaaaaatgaacataataaatctaagatgaattgcttgaaataaaaacttgccttaatggcctcagttaagattgcatccatcttgggacgtggggaagaagccatcggtgtttgtttctgggccctggctagctggctggcagaaagggtagcccaggaaggaattgtttttttcactttcttctccttttctttagactgatctttctcactttaaaacaaagaattgttattatagaagataagctctctagaaagacgtataaagtcagaaggaggaaaag

SEQ ID NO: 71 - DNA, 661 bp, Homo sapiens
  HP1-BP74
  misc_feature [331]..[331]: Chromosome 1, SNP identification no. = rs1021077
  misc_feature [331]..[331]: allele = c, in linkage disequilibrium with rs4654874, respectively
  misc_feature [331]..[331]: n is a, t, c or g
agagaaaggaaaaaagggaaaagataaggaaaaaaaccaaaaagatcatgagaagaaaaataaagacgggaaaaggagaagaggtggttatacatgccataaaggagcattagtactccatgttgatgggtctatgtttctttccatttgttatgctcccaccactgactggccaatcttctctctaccaatacctgttatagatcaacagatcaccatttgcttctctgaaggcctccagatgatttctggatgaaccttccactgtctattctaaaggcccacgttttccattctcccacactgcactgatccccatgacactttatgnccagaatgctactctctggccattcctgtcatccccaaacatttttgtttttaattccaacataacattttcaccttccaaaaacctttatagagaagatgaaaccttactttgccctcatggtctggcaatgacataccaatagctactgattctctctaaatgtttccccaaaacacttagccatgaaaaaaaaaaaaaaacaattaagttcaaaggaatttatgggacactccaaattgcagtataacttttgatgttttaagctgtgtcaccattttactttacctggcttttcttcctccccttcagcaagcttgcttttgggag

SEQ ID NO: 72 - DNA, 661 bp, Homo sapiens
  misc_feature [331]..[331]: Chromosome 1, SNP identification no. = rs12123093
  misc_feature [331]..[331]: allele = t, in linkage disequilibrium with rs4654874, respectively
  misc_feature [331]..[331]: n is a, t, c or g
agcggggctagcctttcccgcttctcagtttaggcgcagctcaagagcaaacctttttttgaagaccgtagaattggaaaactagagagcggagaattcactgcctcgcactcgctcccattaagtctccagacggtacagggcagagtagtgactcgggactcagaactgaaaagttgaaacgggctttccgggctccctaatcctcacatgcagggagagttccccagaatgaaaaccctgagattagaagacgggattccctttgaattgtcatattgcgttgctatcagcgtacttaaacaacgtacatacgaaggaaaagtacagntcttcaaagctagtttggaaagattgtttttaaagtttcaggtgttgggggacaggggagggactgggtaataaatgtaaggaaataccagtagaattgtcccaagcttacagtagatgaccagtactcaaacgtatgtgccaaggtttataaagacttacgacaccatttaagcactcacccagtcgtctggccctgccattagcataattgtctcaccagctttccctgccacagccaccccactctatcagttcaaatttcacagccagcataaaaaattctttacgaggtgtgcgttatcattcatatcctgatggcattaccagt

SEQ ID NO: 73 - DNA, 661 bp, Homo sapiens
  misc_feature [331]..[331]: Chromosome 1, SNP identification no. = rs3856173
  misc_feature [331]..[331]: allele = a, in linkage disequilibrium with rs4654874, respectively
  misc_feature [331]..[331]: n is a, t, c or g
accagtagaattgtcccaagcttacagtagatgaccagtactcaaacgtatgtgccaaggtttataaagacttacgacaccatttaagcactcacccagtcgtctggccctgccattagcataattgtctcaccagctttccctgccacagccaccccactctatcagttcaaatttcacagccagcataaaaaattctttacgaggtgtgcgttatcattcatatcctgatggcattaccagtctttagtactctggtgtcatattccagctgttcagaaggggttttgctcttttatgccattcttcattctgctcactcccttcgttnttaacgtttctgttgtcttccttttcaaagacttccatttttatgtattcgtacatttaaaacatcctaccgttcttcttttaccctaaaatgtctttagacccatctcatgtaagaagcagactcagatgagagcaaactgggagatgtttcctcctccacagatttttgcttaaaacaacaacaacaaaacttaggccgagcatggtggtttacgcctgtagtccctgcactttgggaggccgaggtgggaggattgcatgaggcttggggccaggagttcgaggccagccagggcaacataattagaccccatctctaaataaataa

SEQ ID NO: 74 - DNA, 661 bp, Homo sapiens
  misc_feature [331]..[331]: Chromosome 1, SNP identification no. = rs4233274
  misc_feature [331]..[331]: allele = t, in linkage disequilibrium with rs4654874, respectively
  misc_feature [331]..[331]: n is a, t, c or g
cagcctgggtgacagaaggagactccacctcaaaaataaataaataaataaataattagctgggcatggtggtgcacgcctgtagtcctggctactcgggaggctgaggcaggagaatcgctttaacctgggaggcggaggttgcaatgagcagagatcccaccactgcactccagcctgggcgacagagcaagactccgtctcaaaagaacaaaaaaacaaccagtaatttaaaggaaaacatgagtcaaaatctgtggttgggaataagattgaattttaaaaatcagaatcacgaaattggatccatttatttaaaaaataaagagangaaaagagttttaaaaagatggtgatgaaaaggatcatttccttttataaatcaaaacgcaactgcatggtgatgagaaaatgcaaacttttcaaaaaccaatacatactggctctgagttttgttttttttgagacggcgtctcgctctcttgccaggctggagtgtagtggcgagatctcggctcattgtaacctccacctcccgggttcaagggattctcctgcctcagcctcctgagtagctggaactacaggcacacgccaccacgcccacctaatttttgtatttctagtagagacagggtttcaccatgttggccaggatggt

SEQ ID NO: 75 - DNA, 661 bp, Homo sapiens
  misc_feature [331]..[331]: Chromosome 1, SNP identification no. = rs1152999
  misc_feature [331]..[331]: allele = t, in linkage disequilibrium with rs4654874, respectively
  misc_feature [331]..[331]: n is a, t, c or g
gcttgtttggtatagctgtctctttgcccaaagtagttggcatcccctaaattaggaacaaagccagagctggatgtgacagaacatgcatttctaagtacctggtatttttaggagttcattatgattttgtaggaaaatagtcattttctttctaggtagggcaataaacaacttgaaaaggacactaagcattgatccttgtgttaaaaaaaaaaaaaaaaggattttgcaatgttctattgaatcccaggagaagtgggagctaaaagcctctattcccaggtctgttagcagtagggatagacacttaagacttcatagtattgcngggcacggtggttcacgcctgtaatcccagcactttgggaggccaaggcgggcagatcacgaggtcagaagattgagaccatcctggctaacatgataggtaaaaccccatctctactaaaaatacaaaaaaattagccgggtatggtggcgggcgtctgtagtcccagctactcggaaggctgaggcgggagaatggcgtgaacctgggaggcggagcttgcagtgagccgagatggtgccactgaattccagcctgggcaacagagcgagactccgtctcaaaaaaaaaaaaaaaaaaagacttcatagtattttctagggaaagtaa

SEQ ID NO: 76 - DNA, 661 bp, Homo sapiens
  misc_feature [331]..[331]: Chromosome 1, SNP identification no. = rs1152998
  misc_feature [331]..[331]: allele = t, in linkage disequilibrium with rs4654874, respectively
  misc_feature [331]..[331]: n is a, t, c or g
taactcatgcctgcgaccccagcactttgggaggctaaggtgggttgatggcttgagctcaggtgttcaaaaccagcctgggcaacatggtgaaaacccatctctacaaaaaatacaagaattagccacagtcccagctactctggaggctcccttgagcccaggagacaggttgcaatgagccgagatcacagcactaagctactgcctgggcgacagtgagaccctgtctcataaaaaaataaataaataaatggaagccgaggtttcagcaaccccagcagggctatactaatgctcctatttttccaatgccaatattccaaactanatccactacgtcattttccccaaaagaaaactcttggtggtgagagttatttttcggacaatactgcctcccagaaaaccaagtgccagtcttgcttctgacacttgctaggtacatgacttctgtgttactcagttccctacctggtaaaaggaagcagcaccaccttacatgtcagaagcctagtatgaagaccaattagatgccatcctgcattgcctaggaaattaatttactattagtttactaaggaaatcaggaagggcttattgtttctgtgttgtagatgcgaaagtacaagccgaaaggttctaaaagcagcatacaact

SEQ ID NO: 77 - DNA, 661 bp, Homo sapiens
  misc_feature [331]..[331]: Chromosome 1, SNP identification no. = rs3125161
  misc_feature [331]..[331]: allele = a, in linkage disequilibrium with rs4654874, respectively
  misc_feature [331]..[331]: n is a, t, c or g
aggttacagtgagctttgattgtgccactgcactccagcctgggtgacaagagttaagaccctgtctcttaaagcaaaaaagctgagtaatacttttaggtaaatgtaaagtctttaaatacatttgtttagaaaccataccagtttaaagtaaatgaattagggtatcagaagaaccaactgggggcagggggatgccacctaagtgaatatcaagagtttactcttccttctataggaagaagttgtgtgctgagaggaaggaggtatagactagaattgggagatctgtgctctaatgctaacattgctgttcacggaatatttgacnacctgcttggtatgggccttcctctcttctctagaaagggcttactcttgccaaccatatgagcacatccagaatcactttaaatactgcctaccaagcttaacaaagacaaaaggttttggtaataataggatattaccagcttttcaatgaagtaaaaatatcaagaatttctgaaatttcaagtcaccatgagttgaacttgtactatcagtattccttttcaatccttctgtcatatttacctcttattggtaaatacatgtcctctgacctgaagtcctgggaaactatctttgccaaatttcaaaaagccaccctgccatagct

SEQ ID NO: 78 - DNA, 661 bp, Homo sapiens
  misc_feature [331]..[331]: Chromosome 1, SNP identification no. = rs3121071
  misc_feature [331]..[331]: allele = c, in linkage disequilibrium with rs4654874, respectively
  misc_feature [331]..[331]: n is a, t, c or g
attcttgtagaaatggctgattctaggactgaggcagggaaaatacaagatatgtctgtggcatcttgtgatggcagaaagtacgtgctctaaaaacaaaagtatcagggaatgtcaagggacacataagccaacttgaaagagcccctaatggctaaagctggaacaatgtgaacaacaaaatcatgtactattgggttataattcaaagtatgaaatatacatgagcccatactgatatatacatacccatgtgtgtacatttatacatacacacatataaatacatatgagtgactaaacaaacaaatagagaagagagacatcttcnttgtgggaaaattccaaataatttaagtagacgcttcccactctagaaaggaagtaaagcttaattctctcttactcccatctctcttcccaagtgtgggttggatttagtgactggctttcatatagactagagtaagaaaggggggaaagaaaagtaactatagagaaacctggcaaacaccaacttagccaaataaagttatcatgtgagtatcttgtacctgctgatatatgagaagagaacttcatttatatggtatttgtgtttttattttttagagacagggtctcattctgctgcccaagctgaaatgcagtggcatgatca

SEQ ID NO: 79 - DNA, 661 bp, Homo sapiens
  EIF4G3
  misc_feature [331]..[331]: Chromosome 1, SNP identification no. = rs7520481
  misc_feature [331]..[331]: allele = t, in linkage disequilibrium with rs4654874, respectively
  misc_feature [331]..[331]: n is a, t, c or g
ttgtcttgagaaaacaaaaaacaggccaggtgcagtggctcatgcctgtaatcccagcactttgggaggctgaagaggatggatcacctgaggtcaggagttcgagaccaatctggccaacatggtgaaaccgtgtctctactaaaaacacaaaaatcagctgggtatggtggcaggcagaggctgaggcaggagaatcgtttgaacctgggaggtggaggctgcagtgagccaagattgcaccactgcactccagactgggcgacaagtgcaaaactccatctcaaaacaaaaaacaaaaaacaaaaaaagatacccttgcgtatcaganaaatgatctcttgaacatcaggactgatctggcactaagaacagatgagtcactgttttttttttttttttttttttgagactttgcactgtcacccgggctggagtgcagtggtgcgatctcagctcactgcaacctctgcctcccaggttcaagcgattctcctgcctcagcctcctgagtagctgggactacaggatccctgcctcagcctcccgagtagctgggactactcagctaattttttagtacttttagtagagatggggtttcactatgttggccaggctagtctcaaactctgacctcgtgatctgcctacctcagcct

SEQ ID NO: 80 - DNA, 661 bp, Homo sapiens
  EIF4G3
  misc_feature [331]..[331]: Chromosome 1, SNP identification no. = rs935918
  misc_feature [331]..[331]: allele = t, in linkage disequilibrium with rs4654874, respectively
  misc_feature [331]..[331]: n is a, t, c or g
caaaagagcaagaccctgtctaaataaataaataaataaataaataaataaatatgagacttcagtttaaaagaaaaaaaaagcaatcggaggtcaaggctgcagtgagccttgatagtgccactgcactgtaacctgagcgaaagagcaagaccctgtctaaataaataaatatgagacttcagtttaaaagaaaaaaaaggcaaaataatatatatataataaaatgaatatataaaaatgtttatagtttgaaaaatgaggttgaaaaatacttggcctgtatcttgacttacagtttgcttaaacagcttatggccttcatgttgtncttttttgcatatattggagcatcatggattggatgtatagttaaccaatactaaatcagaaaaattgtaatattgagccatgtttctaaaatcttatggagctgggtgcagtggtgcacactgtagtctcagctgctcgggaggctgaggcagaaggatctttgagccccagagttcaagtccaacttggcaacatagtgagaccccaagtcaaaaataaataaataataaaaccttattgggaaatataatttagagatgctacgtaagtggtagaaacggaacaatcagatgacagaactcaagactgtggttttcactttgtggat

SEQ ID NO: 81 - DNA, 661 bp, Homo sapiens
  EIF4G3
  misc_feature [331]..[331]: Chromosome 1, SNP identification no. = rs10753507
  misc_feature [331]..[331]: allele = t, in linkage disequilibrium with rs4654874, respectively
  misc_feature [331]..[331]: n is a, t, c or g
cagctgcttaagattaaataattgatttatgaggtgactaatctggggagctacagctggttatttgggatttataaacatcaaaaaaagtccaatacacagagtttataaattccacactgtgtcttttcctagatagctctgtatgtatctgctattaaagccattcaagaagcctcactagaatccctcttcataatagatcacagccatgctgcctgatacaaggaggcttaaagcagttgttgctcctgaaccaggaatgagaagtgtttcaagggcaagaagcacaaggttgagcccaagagagagaataaagaagagctgttgncaggtagaaaaaagtgaagaggtacaagtcctctacctgaagaaagttacagtgacaacggaaaatgccaggtttgaggctgttgctgtcatctgagaggtatgtattaattacttcatagagtaacttgtccaaggcatagctgaaaatatagttgaaccagaatttgaactcggccatctggctccaaagcttatactatatgagaatttagttttatttggaagtagggttgtgctgtttctacacatcaaagttaataagaatgtgagtttttagttattattattaatttttgagacagagtctctctctgtagctcaggttgaa

SEQ ID NO: 82 - DNA, 661 bp, Homo sapiens
  EIF4G3
  misc_feature [331]..[331]: Chromosome 1, SNP identification no. = rs4654873
  misc_feature [331]..[331]: allele = a, in linkage disequilibrium with rs4654874, respectively
  misc_feature [331]..[331]: n is a, t, c or g
tgcttaagattaaataattgatttatgaggtgactaatctggggagctacagctggttatttgggatttataaacatcaaaaaaagtccaatacacagagtttataaattccacactgtgtcttttcctagatagctctgtatgtatctgctattaaagccattcaagaagcctcactagaatccctcttcataatagatcacagccatgctgcctgatacaaggaggcttaaagcagttgttgctcctgaaccaggaatgagaagtgtttcaagggcaagaagcacaaggttgagcccaagagagagaataaagaagagctgttgtcagntagaaaaaagtgaagaggtacaagtcctctacctgaagaaagttacagtgacaacggaaaatgccaggtttgaggctgttgctgtcatctgagaggtatgtattaattacttcatagagtaacttgtccaaggcatagctgaaaatatagttgaaccagaatttgaactcggccatctggctccaaagcttatactatatgagaatttagttttatttggaagtagggttgtgctgtttctacacatcaaagttaataagaatgtgagtttttagttattattattaatttttgagacagagtctctctctgtagctcaggttgaaatgc

SEQ ID NO: 83 - DNA, 661 bp, Homo sapiens
  EIF4G3
  misc_feature [331]..[331]: Chromosome 1, SNP identification no. = rs10799665
  misc_feature [331]..[331]: allele = a, in linkage disequilibrium with rs4654874, respectively
  misc_feature [331]..[331]: n is a, t, c or g
gaatgagaagtgtttcaagggcaagaagcacaaggttgagcccaagagagagaataaagaagagctgttgtcaggtagaaaaaagtgaagaggtacaagtcctctacctgaagaaagttacagtgacaacggaaaatgccaggtttgaggctgttgctgtcatctgagaggtatgtattaattacttcatagagtaacttgtccaaggcatagctgaaaatatagttgaaccagaatttgaactcggccatctggctccaaagcttatactatatgagaatttagttttatttggaagtagggttgtgctgtttctacacatcaaagttantaagaatgtgagtttttagttattattattaatttttgagacagagtctctctctgtagctcaggttgaaatgcagtggcacaatcttggctcactccaacctccacctcccagattcaagcgattctcctgcctcagcctcccaagtagctgggattacaggtgcctgtcaccatgcctggctaatttttgtatttttagtagagatgggattttgccatgttggccagactggtctccaactcctgacctcaagtgatccacccgcctcggcctcccaaagtgctgggattacaggcgtgagccactgtgccagccagaatgtgagtc

SEQ ID NO: 84 - DNA, 661 bp, Homo sapiens
  EIF4G3
  misc_feature [331]..[331]: Chromosome 1, SNP identification no. = rs2320590
  misc_feature [331]..[331]: allele = c, in linkage disequilibrium with rs4654874, respectively
  misc_feature [331]..[331]: n is a, t, c or g
tgaaattatggatgaaacagcaaaggggccaattttgtaacagtctaaatcagcatttaccaaactgtgttccataggatatctatactctaagtgaggcaatgctgaattaaacaaagctaactagtttttatttattgctttactataggactgtcataaactttaatatgctaagtatgttttgttaatctcaaagaaaagggacatgaccatgtgcaaagtttgactatataaacaacttttgtggaaacactagtgtttcgaagaacagagtttgggaaccaccggtctatataacgtagcatccattccccactcacatccaaangtaggaatacttgagatctcagtttgttttattataatcatccttttattataatcatgagcatgtactatggggtaatgcagtctgacaagttacaatgggaaaatataactacttacagcactactgcaatgatagacacaaaagccagatgaacattaagcttctagaagcagtcatcttccagttacacgattctggagccaatctatcatcgccactaccctcaacagaccacagggctatcatatccccagaatatctcaggtgtagacctagcataaggtaacatttttacactgaaatcagaagtcttaaagagtcacagcc

SEQ ID NO: 85 - DNA, 661 bp, Homo sapiens
  EIF4G3
  misc_feature [331]..[331]: Chromosome 1, SNP identification no. = rs4654874
  misc_feature [331]..[331]: allele = a, g
  misc_feature [331]..[331]: n is a, t, c or g
agctaatggtttcaggcttttgtgctatgaattataaatatttctcaatgtcaagcaaatgggaattaaatataaaacttaggaaaatcaaatataaaataccagcactcttatgtaggctaaaaatcatagctgttcatttggaagtataaacaaacaactcaagactttgttaattatttccacatacaatatataataaagtacaaaagcaaatgaatttaactacaggagacatacacataattgcaagtcataaggaaagggaggaatgaattgaagagctaagagcaggtggtaattgtatgcatgccctttcagatctctacanttgtaaaacgtgtgcttttccactgcagttccaggttctagccaaagtatgccacccttttttcagaggcctacatctcactaaaacttttcacttaaaaagagctaccaccataggcagggtcaccattctgaagctgccacttcaaaacagtttgcagctcagccatattatctaactctgggcttcatgaatccttaattccaactttctgacctcacagcttgcaattatttgatgccgaggacggtgtctgtgctatggcaaatagatgtcaaataattgcaggttctctcattatgtgcatactttgggttcagttaatgtacc

SEQ ID NO: 86 - DNA, 661 bp, Homo sapiens
  EIF4G3
  misc_feature [331]..[331]: Chromosome 1, SNP identification no. = rs11805169
  misc_feature [331]..[331]: allele = a, in linkage disequilibrium with rs4654874, respectively
  misc_feature [331]..[331]: n is a, t, c or g
ataataaagtacaaaagcaaatgaatttaactacaggagacatacacataattgcaagtcataaggaaagggaggaatgaattgaagagctaagagcaggtggtaattgtatgcatgccctttcagatctctacaattgtaaaacgtgtgcttttccactgcagttccaggttctagccaaagtatgccacccttttttcagaggcctacatctcactaaaacttttcacttaaaaagagctaccaccataggcagggtcaccattctgaagctgccacttcaaaacagtttgcagctcagccatattatctaactctgggcttcatgaanccttaattccaactttctgacctcacagcttgcaattatttgatgccgaggacggtgtctgtgctatggcaaatagatgtcaaataattgcaggttctctcattatgtgcatactttgggttcagttaatgtaccactgatgaaatataatctagctggactccaggatttctaggttaaccacctgatcctgccaactcatgctctgtgggctagcagcataaattaagctgtttaatgggcccaagagacaactgtagccatgctggtctttcagcagtgtacctgctgctatttttatctcatatattttatctcattacaaataaa

SEQ ID NO: 87 - DNA, 661 bp, Homo sapiens
  EIF4G3
  misc_feature [331]..[331]: Chromosome 1, SNP identification no. = rs4654875
  misc_feature [331]..[331]: allele = a, in linkage disequilibrium with rs4654874, respectively
  misc_feature [331]..[331]: n is a, t, c or g
tttctgaggaatgtagcataatatctgggtaataagtaactatttataaatggatatcctcgtcactccaacagtattatttctaggaaattatagtttcaagtctgctgggaggaccatattcaatctgattgtgagggtgtacatacctttatttgctcttaccatttgcactggctagttactggactgaattggaggcttctcttttaaaactgggaaaccatcctggccttaaaaaccaataaccacagcaacttttgccaaagtgtcttactaactggttcaaatggccttaattcagagcaatctagcttattgctgaaagaanacttttttttttccccagacgtggtctcattctgtcacctaggctggagtgcagtggtgtgatcatggcttactgcagtctggacctcccaggtgcaatccttctgcctcaacctcccaagtagctgggactatagcggcacaccaccatgcctagctaatttttatatttttagtatagatggagtttcaccatgctgcccaggctggtcttaaactcctgggctcaagcaatcttcctgcctcagccttccaaagtgctagcattacaggtgtgagccaccatgcccagcctgaaagaaaacttcttttttgagagggagtcttgctc

SEQ ID NO: 88 - DNA, 661 bp, Homo sapiens
  EIF4G3
  misc_feature [331]..[331]: Chromosome 1, SNP identification no. = rs935917
  misc_feature [331]..[331]: allele = t, in linkage disequilibrium with rs4654874, respectively
  misc_feature [331]..[331]: n is a, t, c or g
ccaccagtgacaggcagataggcagaccttatcaaaccatccattgacaagaatcataatgaaaccaacctgaaatagactaaatcattaagaacaccaagttacataaccttctccatgaggctagagtgggcacacaagtgcttcctagccacaataaccatggtttattgaaagaatatggtttttaaatttaagacaatttttcagaattgttctcacaaagaaaagcttttttcctcaaagaacatttggggatcacatgtaaatgggctgctaaaggcctcagagtttccctgaggctaaggggtctctgttaccttacttacancatgatagagatctaacaataatattcagaaaaccaaaagataacctttatgccctagcacaatctataaaatgccatcacatcaaccaacatatcaatatattaattgcatcatatcaacatattacagtggatacaattttcatctatggaaaaaactaaatacttaaagaggtaagtactttgaaaattaactggtacccaagagcctagtaactgaataccactcttgaagaggatactgaccctttgaaaaagtcctgtttgctgagtttttctgactgtaccagctgatagagtaattggcccatgtgatccctggtgatctgg

SEQ ID NO: 89 - DNA, 661 bp, Homo sapiens
  EIF4G3
  misc_feature [331]..[331]: Chromosome 1, SNP identification no. = rs4654724
  misc_feature [331]..[331]: allele = t, in linkage disequilibrium with rs4654874, respectively
  misc_feature [331]..[331]: n is a, t, c or g
aaagttacaccaattgggagaagacacttcaatttgtctctgagatccatttagggactacagttaagagatacaatttatatagtgaaacaaattagaaagctatataaatactaaaaaactaaaactgctattacttcatgactaatatttaaaagaggctgaaaataatcttcaatttaaactgttttccattgctatattcgtcatcacaacatttaatactttttgaaaaccttgtatttatcacgtaatgttctaagtgtttacgtgtattaacttcttatttaattttcataatatcctgaaaaggtaggtacaacttatcccnatttaacagataaggaaactgaaacacaggttaaatacatgaagcaatttttagagcattatccgagcaagtcctctaagtatatacatgctaaatgcatacaaaaacaacaggttaccacggaagatgaagtcagctaaagataacctaataccttctctttggtttgtcttgcagtggctcaatgagaattttcacacatttgaggagctctacacagcatacacaatctaacagcaacgtcaagtgtgggatgttacagggacttgtaagaaattcagattgcttaaaatacagcaggaggacctcctcaccataacatttaataga

SEQ ID NO: 90 - DNA, 661 bp, Homo sapiens
  EIF4G3
  misc_feature [331]..[331]: Chromosome 1, SNP identification no. = rs2305463
  misc_feature [331]..[331]: allele = c, in linkage disequilibrium with rs4654874, respectively
  misc_feature [331]..[331]: n is a, t, c or g
cttccctcccatcccatcccaaattcaccacccaattatgttcctatcttagaaattatagtgtgtgaagattaaagaaatcaactttaggaataaaaggaatgcatccataaggattgctatcaaaacccttgttcttatcttgccacacatactggcaagcgggccagccttgagtagacataaaaagcagggttctcacctagttaaggtccttcgggaatcaaactctacaggcgtggatggcgtggaccctgagggtgctggaggttgcagggcagagaatctgtttaaactggaagcacttgaccgtaaggcatctacacatgtngaggatttagaaaaaaatacaaatcacatgactaaaatgcaaataatcagtcatctgcatccctaggtgaggcctgagaccaggcattcctaacaagcttaggtgacgcccatctcctggtccctctaccatattctgagaagcaaagtgttagagggaatttgcacataatagagtttagaagtctttatttatttcaaccattggttcctttaaaaacatagtaaacaggggtgggagtggcatataggaggaggaaggcaagcgaaaacagaacaaaactttaacaaagctaaccagcacaaatgctccaatctcatttgtgcacaa

SEQ ID NO: 91 - DNA, 661 bp, Homo sapiens
  EIF4G3
  misc_feature [331]..[331]: Chromosome 1, SNP identification no. = rs7543140
  misc_feature [331]..[331]: allele = g, in linkage disequilibrium with rs4654874, respectively
  misc_feature [331]..[331]: n is a, t, c or g
gattaaagaaatcaactttaggaataaaaggaatgcatccataaggattgctatcaaaacccttgttcttatcttgccacacatactggcaagcgggccagccttgagtagacataaaaagcagggttctcacctagttaaggtccttcgggaatcaaactctacaggcgtggatggcgtggaccctgagggtgctggaggttgcagggcagagaatctgtttaaactggaagcacttgaccgtaaggcatctacacatgtcgaggatttagaaaaaaatacaaatcacatgactaaaatgcaaataatcagtcatctgcatccctaggtnaggcctgagaccaggcattcctaacaagcttaggtgacgcccatctcctggtccctctaccatattctgagaagcaaagtgttagagggaatttgcacataatagagtttagaagtctttatttatttcaaccattggttcctttaaaaacatagtaaacaggggtgggagtggcatataggaggaggaaggcaagcgaaaacagaacaaaactttaacaaagctaaccagcacaaatgctccaatctcatttgtgcacaaatatgcatgtgggttttactgaataatgacattttttaaaatttaaagaaaaaaaggttgaaattactt

SEQ ID NO: 92 - DNA, 661 bp, Homo sapiens
  EIF4G3
  misc_feature [331]..[331]: Chromosome 1, SNP identification no. = rs1530946
  misc_feature [331]..[331]: allele = a, in linkage disequilibrium with rs4654874, respectively
  misc_feature [331]..[331]: n is a, t, c or g
tctatggtctgacagctcataatatatatgttgctatgctatgtaatatgctttcacacaaaccactcccaattaacaataaatatgtataacggttttgttctaggatacccatgtatagtacctccagtataactatctgaatacacaaagtttattagcaatttacatacttaaaaatattaaggtagtaatgttggaggtttgataccagcactgtttttatagtatccaagcacggaaagcataatatttaaaaatacaaatgttgttattaaataccgacacatttttcaaaatgctggaggacttctttaaacataaacttttngttaaaactgtctctagatggaaatggagatgggtaagactcaaattgtattcagcaatggaattcctactctgagatataaacaactagaagaaagtaccagaatcttggagaaaaggatcctagctaattacattattaagagagattcagaaggagaattttctatcatgaagcaaagctttgacaaaactgtgaagatgcaaatgacatagcccattttattccaattttcttaaagacttttcttaatacttcttgtcagttatcttctttcatgtagtattttcacattagttttgattgtcttcagtattttgctagcagggt

SEQ ID NO: 93 - DNA, 661 bp, Homo sapiens
  EIF4G3
  misc_feature [331]..[331]: Chromosome 1, SNP identification no. = rs4654880
  misc_feature [331]..[331]: allele = c, in linkage disequilibrium with rs4654874, respectively
  misc_feature [331]..[331]: n is a, t, c or g
gtttcatcatgttggtcaggctggtctcaaactcctgacctcaattgatccacccacctcagcctcccgaagtgctgggattacaggcatgagccactgcgtccggcctgctacaaagtgcccctttcttaaataaagttttctttcagctttctgtctctcttctttttctctaaattttaacagttaatggagaacacatttcataattgatatactatcttccatttgcttaacaaatgttcctcttttgcttgtcaaaagttttaccttaccagataaactgtacactttgagagggaagtaactacattttccacttccttttctngtctcaccaattctgagtatatagaagatgctcaataaagtcttattgcttactggcttttaagtagtgaaagaaatcatgctttgttcctgcattctctacttttactcagtaactttactcttcaggtgaaactgcttcacctaacaatcaccactctattctttgggctgttctttctgatctcattttatacctaaatacataattcttaatatgtattcctgaaacttccaagttctctaaaccctggtggattccggcctcacctggtcttctcttctctttggtcatgagttgctggaccttcctttgctcttcttgttcttc

SEQ ID NO: 94 - DNA, 661 bp, Homo sapiens
  EIF4G3
  misc_feature [331]..[331]: Chromosome 1, SNP identification no. = rs10916885
  misc_feature [331]..[331]: allele = a, in linkage disequilibrium with rs4654874, respectively
  misc_feature [331]..[331]: n is a, t, c or g
agaagaatcatctgaacctgggaggcggaggctgcagtgagccgagattgagccactgcactccagcctgggcgacagagtgagactctatctcaaaaaaaaaaacaaagcgcaaacaaaattgcaatatggtttgataatcagaataaggagaagaagcacgtaactggcaataggccttttgtcccttctcagaactctcccacggaaagtttgccaatccaaattctgagtcctgaagcaaaagcactatctttacacatgtaaacaacaggacatccttccccaacccaattcctttaaagagactggaccagcaggcttattattnttttttttcccactcaccagccttaggtctataacatcttgaagcatgaaccgaatcctagatgaggtttttctttctttcacaattttctccatctgattaaagtactggtccatacgtggctgcaagagacaaaatcattagtactcctgtctgagaaacttaaacgtaattttaccaatttacagttatttatttatgtagttatctatttatttttttagagatggggtttcactccgttgcccaggctggagtgcagtagcacaatcacggctcactgcagcttcaacctctcaggctcaaccgatcccacctcagcctctcgag

SEQ ID NO: 95 - DNA, 661 bp, Homo sapiens
  EIF4G3
  misc_feature [331]..[331]: Chromosome 1, SNP identification no. = rs6695218
  misc_feature [331]..[331]: allele = a, in linkage disequilibrium with rs4654874, respectively
  misc_feature [331]..[331]: n is a, t, c or g
ccgcctcagcctcccaaagtgctgggattacaagcatgagccaccgtgcccggctgaccctgttacttaaaaaaaaaaaagagagagagagagaggtggctgtgtcttttgccccttttcctaccttctctggtgagaataattaggacaagggttaaactttaggagtcacagaatgttaagctgaaaggacttacctcagagctttgtttacataaataagaagtaaacctcaatcttgtataaaccactgggttttctgtcacagctaagcataatcctagctgaatcagatgttatggagcgtttctgacattatttctttgaagcntttctaatttctataccccttaaatagcatacattattacagtatttttaatgatttcttatattatggttagatggctgtgtcatcaattagagtataaactctagaagcactactgggtcttcatttctgcactacccttaggccatagtttttctttgcatatttctgttcccaaattgggaaatggttacagaagaagaaaaaagaatatgggacaaataatctgaagaatctacaaactggcttttacacaatttgggaccctcctcatctctgactctgatggaaatgtaaggagcacgatggttgaacactgacaatgagacg

SEQ ID NO: 96 - DNA, 661 bp, Homo sapiens
  EIF4G3
  misc_feature [331]..[331]: Chromosome 1, SNP identification no. = rs7519685
  misc_feature [331]..[331]: allele = a, in linkage disequilibrium with rs4654874, respectively
  misc_feature [331]..[331]: n is a, t, c or g
ataaatatagtatgtttactgcttattgcttatgtgccatgagaatatactagttctccaaaagtttggaagcaagatccttacaaggtttccatccaaatccaataataattgttttctaatagttgtaatagctcaaggttacttgtaaccaaacacagagacattcttatgaacatatttagaatataaagacagtagactgcagcagggattctactaaaatattctaatttacagatgacatccctctgagcaccattttgaacagctatttcataatatgatacaacagtttttctgggatgacaaagtggctcccaaagttctnaaatgtatgtatggtctttgccctaggtataacagaagatctttgtgaaaactgggtacactgcatccatactcacaaaataattaatgttatcaaccagaatgcacttggtcagctgttgatcaaggctggatggctagagaaacttcctgagaactgacgatgatgatgctagaatatttgtactagaactgatggcacactctccaatgtattccctacgatgtatgaaagatcatttaacagatccagtaataatcaaccatgtgttacactgcatatttcctttcagcaggagacattatcttaggaagaggggaacattttcag

SEQ ID NO: 97 - DNA, 661 bp, Homo sapiens
  EIF4G3
  misc_feature [331]..[331]: Chromosome 1, SNP identification no. = rs2167811
  misc_feature [331]..[331]: allele = a, in linkage disequilibrium with rs4654874, respectively
  misc_feature [331]..[331]: n is a, t, c or g
acgtatattgtaataacatagctatcaaagaaaggataaagcaaagttagctcactaagcaataaagagaaaatcacaaaatgcaagagaaacaaaagtctgctatcccaaaataatggtcaagaggaatttcacatgaattggggcataaagaacatgtaatcatgcataaacttttcagatatattcacatggaagtattaaaactgaataactagcagaatgactacagatttacaaaaatgtatctctgaatgaatgaatacctagctatacagctccttgaagacttgttttggaatatgatcttaataccctctggggatggttnacagggctgtggaaatatggaaaggggccagtgagaacatatcctctgagaatagtgattcatggtgattttcttttttttttttttttgtccttaggggatggtaaatttgacagggctgtaagtgagcacttgttgtctgctggacactgggtggtcaagagacccactgagattggttagttggaacagaacatgaagagtggataccttaatctgcttgggctgctataacaaaataccatagactgggtggcttaaacaatggaagtttatttctcatagtactgaaagctgcgaagtccaaaatcaatgtactggcagattaag

SEQ ID NO: 98 - DNA, 661 bp, Homo sapiens
  EIF4G3
  misc_feature [331]..[331]: Chromosome 1, SNP identification no. = rs3890762
  misc_feature [331]..[331]: allele = g, in linkage disequilibrium with rs4654874, respectively
  misc_feature [331]..[331]: n is a, t, c or g
tttaagcaaaagatctaaaacaaatatggcaaaatggtaagatttgacacatttggacaatggatacctgagtgtgtgctatgttattttgtactgttggaaaagaaatgaattagctgggcatggtggcgcatgcctatcacgccagctacttgggaggctgaggcacgagaatcacttgaacccaggaggtggaggttgcagtaagccaagattgcaccactgcactccagtctgggtgacagagcgagaccctgtctcaaaaaaaaaagacagagaaaagaaaagaaatggagtctacccaattgctttttcaagatgacatgtccangggccagtgttgcccaaaagtgaaatgcccaaaattgagctgttagtatgtgtttcagcaatgctggcataagcagatttgtttccttcaagcccctgtttactatgctaatgtttcctgtgaagtcagacaggaaagatctactgtatacaacattttccaaacctctagaccacaggcatttaaaagaattcccttaaggtaattattagcttgaaaaataatacctcccaacagaatcaaagaaactgaagacagtgaataaaaaattgaactagtatctgggagtctgatctcaaccagggacattccctcccacccccacttcag

SEQ ID NO: 99 - DNA, 661 bp, Homo sapiens
  EIF4G3
  misc_feature [331]..[331]: Chromosome 1, SNP identification no. = rs10737452
  misc_feature [331]..[331]: allele = c, in linkage disequilibrium with rs4654874, respectively
  misc_feature [331]..[331]: n is a, t, c or g
tggccaggctggccttgaactcctgacctcaggtaatccgcctgccctggcctcccaaagtgctggaattacagctgtgagccactgcgcccagccttgcttttgtttcacaaagaaaacatgcaacctttaacactatagacaggtatccccaaacaccaaagttagtttttgtttcatttttgaacattaaataacaaatcatgtagtatctttttgggtctgccctcttttactcaaacttactcttgtgagaatccatgcccatgtagttgtacttcagattcactgtccttgtataaacatgctacgatttatccattctactatnaacaggcattttttcatttttctttcctgtataaaaaatgctacaacatttttgtatatatttcctagcatatgagatatgtatgtttattggttgtgtatatacctaagaattgaaatgctagttatggcagaaaaacttcagctttagtatataatgctaaacaatttccaaagtggctgttgcaatcagtatgcgagagttcttgttgtttcacgtttgtaaatatctggtacatttagcaatttgatgttattgcatagtacatgaacatcttcaacattattgcccaattgccctcataaatggttatattcgtctttaaaaaca

SEQ ID NO: 100 - DNA, 661 bp, Homo sapiens
  EIF4G3
  misc_feature [331]..[331]: Chromosome 1, SNP identification no. = rs10916891
  misc_feature [331]..[331]: allele = t, in linkage disequilibrium with rs4654874, respectively
  misc_feature [331]..[331]: n is a, t, c or g
atctttttgggtctgccctcttttactcaaacttactcttgtgagaatccatgcccatgtagttgtacttcagattcactgtccttgtataaacatgctacgatttatccattctactatcaacaggcattttttcatttttctttcctgtataaaaaatgctacaacatttttgtatatatttcctagcatatgagatatgtatgtttattggttgtgtatatacctaagaattgaaatgctagttatggcagaaaaacttcagctttagtatataatgctaaacaatttccaaagtggctgttgcaatcagtatgcgagagttcttgtngtttcacgtttgtaaatatctggtacatttagcaatttgatgttattgcatagtacatgaacatcttcaacattattgcccaattgccctcataaatggttatattcgtctttaaaaacatttaaaatgggatttttttttcaatctagtgggggtgaattttacagaactatggtttatcttttcttagtttatcacttccctaataatgaataacattgaatgtcttttttttttccttaaaaaaaaaaaaaaaccacgagatacaggtgcaggatgtgcaggtttgttacataggtatacatgtgccatggtggtttgctataccta

SEQ ID NO: 101 - DNA, 661 bp, Homo sapiens
  EIF4G3
  misc_feature [331]..[331]: Chromosome 1, SNP identification no. = rs4654725
  misc_feature [331]..[331]: allele = t, in linkage disequilibrium with rs4654874, respectively
  misc_feature [331]..[331]: n is a, t, c or g
cgtctttaaaaacatttaaaatgggatttttttttcaatctagtgggggtgaattttacagaactatggtttatcttttcttagtttatcacttccctaataatgaataacattgaatgtcttttttttttccttaaaaaaaaaaaaaaaccacgagatacaggtgcaggatgtgcaggtttgttacataggtatacatgtgccatggtggtttgctatacctactgacctgtcctttaagttccctcccctcaacccccatcccccaaaaagccctggtgtgtgttgttcccctctctgtgtccatgtgttctcaatgtgaaactaccanttatgagtgagaacatgcagtgcttagttttctgttccagtgttattttgctgaggatgatggcttccagcttcatccacgtccctgaaaaggacatgatctcatttctttttatggctgcatagtattccatggtgtatatgtaccacattttctttatccagtctatcattgatgggcatttgggttggtttcatgtctttgctattgtaaatagtgctgcaataaacacacgtgtgcatgtgtctttatagtagaatgatttatattcttttgattatacacctagtaatgggattgttgggtcaaatggtacttctggttctagat

SEQ ID NO: 102 - DNA, 661 bp, Homo sapiens
  EIF4G3
  misc_feature [331]..[331]: Chromosome 1, SNP identification no. = rs4654726
  misc_feature [331]..[331]: allele = a, in linkage disequilibrium with rs4654874, respectively
  misc_feature [331]..[331]: n is a, t, c or g
ttgtacttattgccagatcatttcaaaggccattttcatcaatatcactcctccattaaactacctaaacaccacttaactgcctatctgataaaattcaaaactgggaaagagcattaaagtgtgatccagaggatctgggatctagtcctaattttaatgagtcatggatgtcatggctaccacaatgaaaatgagagcccagaaatggagaattagtttgcttccatataactatggcacatcaggaggcactatggcaagtgattgagttaaataatccctgatttgaattctagcaatgccacttactagttacatcaccctgagnagttatttttccttttcaagctcagcttttggttcaataaagtggggctagtaacactgaccattcaggattagaataaccattaaaaataatatgtatatataaagcctctatccatattgcaacttagtaggtgctgaatagactatttttattataataatcatcctcattctatagccaacattcaaaaccttcacaaattggacctaaaaggtctaacatagtttcaatttatttagggcttactacaggccaaacactgggctagaaattttgtaatctcatttattttaattaattttatccttataatattacaagtggtat

SEQ ID NO: 103 - DNA, 661 bp, Homo sapiens
  EIF4G3
  misc_feature [331]..[331]: Chromosome 1, SNP identification no. = rs17449966
  misc_feature [331]..[331]: allele = g, in linkage disequilibrium with rs4654874, respectively
  misc_feature [331]..[331]: n is a, t, c or g
caaaactgggaaagagcattaaagtgtgatccagaggatctgggatctagtcctaattttaatgagtcatggatgtcatggctaccacaatgaaaatgagagcccagaaatggagaattagtttgcttccatataactatggcacatcaggaggcactatggcaagtgattgagttaaataatccctgatttgaattctagcaatgccacttactagttacatcaccctgagaagttatttttccttttcaagctcagcttttggttcaataaagtggggctagtaacactgaccattcaggattagaataaccattaaaaataatatgtntatataaagcctctatccatattgcaacttagtaggtgctgaatagactatttttattataataatcatcctcattctatagccaacattcaaaaccttcacaaattggacctaaaaggtctaacatagtttcaatttatttagggcttactacaggccaaacactgggctagaaattttgtaatctcatttattttaattaattttatccttataatattacaagtggtatgaattaatctcattttatggattaaaaacaggggcttaaagagatcagtaactattctaaggtcataaagttaggaagtggcagagtagaaactatct

SEQ ID NO: 104 - DNA, 661 bp, Homo sapiens
  EIF4G3
  misc_feature [331]..[331]: Chromosome 1, SNP identification no. = rs7545133
  misc_feature [331]..[331]: allele = t, in linkage disequilibrium with rs4654874, respectively
  misc_feature [331]..[331]: n is a, t, c or g
taccgttactagacatcgacacatgtttgcgtaagccacagagaaactgggttcatcaatagccttctcaaagaccaggtcaataactcctttcagccgctcctctgtgtcaacagtaagtcctgacacttgcttcatcagttgattgaacatctgtggtgtcaatttatttaagatacttcgaacttttctaaaaagctcctagaagggccacaaaaaagaaaaaagcattagagtaactgtgacaatatggtgctttctgtaatgattaattttaaaaataatatataagttcaacttctcaaattattaacaaggactgtgaactagngacagaaataattaaactaatctattttaacaaatagtcaaaaattaccttcttttcactactgaggagaattctagaaataggtatatacacacttagctggtgggagcattatctgttaacatttctaagggcaatttgacaacgtgtatcaaaagctttaaaactgtgtatgtaacctttgaaccagtaattacacttttagaaatgtatttatatttagagatacgtaaaaatactttagccacataactcattacagaaaataactttgatgtaaaaaaatagaaatttgtctaaattatggtataatataaataatggtatgaa

SEQ ID NO: 105 - DNA, 661 bp, Homo sapiens
  EIF4G3
  misc_feature [331]..[331]: Chromosome 1, SNP identification no. = rs4654881
  misc_feature [331]..[331]: allele = t, in linkage disequilibrium with rs4654874, respectively
  misc_feature [331]..[331]: n is a, t, c or g
gtggcacatgcctgtagtcccagatacttgagatgctgaggagggaggatcgcttgagcccagcaggtcaaggctacagtgagctgtgacagagccactgaactttaaccttggtgacagagtgaaaccctgtctcaaaaaaaaaaaaaacatttcgctataactaaatatctagttgatgtccagtaaattctgtgttaggtacaaatgaagcacgaaacacagttattgccttctacagaatcaaaatctagttgcagggacaatacatttaaaaacgaagtgataaagcaagtactagggttgattagagaccagaaaggggaatagnttaggtacatgaggtcagaggaactggattagtcgaggaatgcctttagaaggaaatgagggccgggggtggtggctcacgcctgtaatccccgcactttgggaggccgaggtgggcagatcacgagttcaggagatagagaccatcctggcttacacggtgaaacctggtctctactaaaaatataaaaagttagccaggcatggtggacacgcctgtaataccaactacttgggaggttgaggcagaagaatcacttgaacctgggaggcggaggctgcagtgagccaagatcgcaccactgcactccaggctgggtgacagagcgag

SEQ ID NO: 106 - DNA, 661 bp, Homo sapiens
  EIF4G3
  misc_feature [331]..[331]: Chromosome 1, SNP identification no. = rs2290381
  misc_feature [331]..[331]: allele = a, in linkage disequilibrium with rs4654874, respectively
  misc_feature [331]..[331]: n is a, t, c or g
tgactacgccaagcaatgctagatgcaaagattgggtactaggtactcaaactggaggtaatcttttttgggggtaaaaaaaataacttcagaataccatcaatgtaatgttctccaccactacaacttttgaacaagaggcctttttgaaccagatgtttgacaaagccgttacttctaatgagaaagactagtcctaatttaagcttatcttttattagttgaataactgtggactggtcacttcaataattacaaaaattcacaggtaggtatcatcatagttacaaatctgctaaaactgggtttctacaatcccagggtaaaatgnaaatttaatatcatcactaagccttactgtagatcataaaagattccactcattatgctgggtcagaaatactaaaataagcccgttatatatcatcaatgagagtcaaactaaattactccctgaaaaaaaaggcttccttttatttgtctgctctgttcctgctggattcccactatacccttatgttaaaaccaatgtatgttgccatgttatactgccagcacactaagtagagataacagagtaagttaaaagttgcattttgtgtatcaaaatattcataattactatcttaaatgcttggaaataatttttcaaggttaaata

SEQ ID NO: 107 - DNA, 661 bp, Homo sapiens
  EIF4G3
  misc_feature [331]..[331]: Chromosome 1, SNP identification no. = rs4654883
  misc_feature [331]..[331]: allele = c, in linkage disequilibrium with rs4654874, respectively
  misc_feature [331]..[331]: n is a, t, c or g
caaactaaattactccctgaaaaaaaaggcttccttttatttgtctgctctgttcctgctggattcccactatacccttatgttaaaaccaatgtatgttgccatgttatactgccagcacactaagtagagataacagagtaagttaaaagttgcattttgtgtatcaaaatattcataattactatcttaaatgcttggaaataatttttcaaggttaaatatttgggttgatactaagctctgctaccttcaagcagacctgctgcatgttgacaacctttactttttctgatatatcattctgttagtgctgggcaaatactgccancagatttttttttttttctttctgagttgcactgaagggctagccattagatttcaagagagaataaaaacttcatacaaagcacacatagatgagaatcatttctcacttaaggccccaatgctgcccttttgaattcatttaacgcttcagagaaaaaagtctagactttaatgtcattcattacataaaaatacagtttctaggcgataacacagtctggggcctaagctgataagctcaaacacctttacacatcaatcattctcagaattattcctttatgcttcaccatctgccccaattagaaatggtagtatcaagaatgca

SEQ ID NO: 108 - DNA, 661 bp, Homo sapiens
  EIF4G3
  misc_feature [331]..[331]: Chromosome 1, SNP identification no. = rs4654727
  misc_feature [331]..[331]: allele = c, in linkage disequilibrium with rs4654874, respectively
  misc_feature [331]..[331]: n is a, t, c or g
attaataacttactaaatggttggctaaacctcaggtaaacaattatatcacaagatatttaatttaatccatgcatttgtacataaacattgtcaagaacaaatgtttctggatgcaatgaaaggaaattatgtcaaaaccaattaagagccatagatgcacattaggagacaaagtcagaaaatgcccattaccaaaacctactgcaaacaccaatgaataaatatgccttgagatttgaatctggaaaatggcaatatgatttattccacacctctttacctgacccaagacaaatatgtgtgagtttcaaatgagcaacagagagangtgagaaagtaacaataatgcttcaaaggaaaaaaaactttgaaaagctaactgataaattgttagtccaggataaaatagttaaaattataacccacgtgaaagcacccaagaaaaaattttaaattataattgtatctctggttataactaagataaagacactgttctcaaatatttatctagctattaatagatctactatacttacaaattcttaatatgttcaattaatcaatctctaatgtgcccatatttacactctgagaatgaattcactgtttggaatagcaatgcctggaaaactgtggtgtagtgaacttaggagac

SEQ ID NO: 109 - DNA, 661 bp, Homo sapiens
  EIF4G3
  misc_feature [331]..[331]: Chromosome 1, SNP identification no. = rs2275468
  misc_feature [331]..[331]: allele = t, in linkage disequilibrium with rs4654874, respectively
  misc_feature [331]..[331]: n is a, t, c or g
aatcagcaaaggctggtgtaaagtctggtcctcgaggcaaaattcgaggatccagagttcgcattggcaatttgggttggttgatctgcatgaaaaagcaaaagaaagcttaatacatgttccagagcattccctgccacaaaagataacaaaaatttttactgaaaagttacatcagctgaaacggtaagcaccagctttggaacccgcagaagtccaatctcatccatggcagcttctcctgggctactcttagagccattaggctaaaacaatggttttctgatacgctgggaatgatttaggccttaaatttccaagtaggggctanacataatcagcagactggctcactagatactgaggaccaactgaatggcacaagacaagatattttgagatcctctatactagggtcaaattttagaattaaaaaaaaatattcatcaggatatagagcacttgcctatacgaatcctgctactgctcattttagttttgatgctgtagacttatggttagtaaagaatgtactatgagtggacaataagtcttagaggagacatgtttcataggtgatgattcatttaaaatttcactgtctgccttgttaatctgagatatctgactttgaataagcatgtaatgtgaccatggacaa

SEQ ID NO: 110 - DNA, 661 bp, Homo sapiens
  EIF4G3
  misc_feature [331]..[331]: Chromosome 1, SNP identification no. = rs6704421
  misc_feature [331]..[331]: allele = t, in linkage disequilibrium with rs4654874, respectively
  misc_feature [331]..[331]: n is a, t, c or g
atttaggccttaaatttccaagtaggggctatacataatcagcagactggctcactagatactgaggaccaactgaatggcacaagacaagatattttgagatcctctatactagggtcaaattttagaattaaaaaaaaatattcatcaggatatagagcacttgcctatacgaatcctgctactgctcattttagttttgatgctgtagacttatggttagtaaagaatgtactatgagtggacaataagtcttagaggagacatgtttcataggtgatgattcatttaaaatttcactgtctgccttgttaatctgagatatctgacnttgaataagcatgtaatgtgaccatggacaacataaagttaagcagatcagtgagaaatcaactaattagtggccaaagtcataaacagataaggcagcaggacaggcaggaatattttctaagaggataattgaatttggtggatataacacttgacttctgaggtactgaagtagcctcaaattagcaccattaatcagtcattcagctgtcctcacataagtatctaggagagaagacttagataccaccaatagaagtaagaagacctgttgctataagaaagtaaaatagtataaatgagttctggataagcagctgctggacat

SEQ ID NO: 111 - DNA, 661 bp, Homo sapiens
  EIF4G3
  misc_feature [331]..[331]: Chromosome 1, SNP identification no. = rs17410008
  misc_feature [331]..[331]: allele = c, in linkage disequilibrium with rs4654874, respectively
  misc_feature [331]..[331]: n is a, t, c or g
gctatacataatcagcagactggctcactagatactgaggaccaactgaatggcacaagacaagatattttgagatcctctatactagggtcaaattttagaattaaaaaaaaatattcatcaggatatagagcacttgcctatacgaatcctgctactgctcattttagttttgatgctgtagacttatggttagtaaagaatgtactatgagtggacaataagtcttagaggagacatgtttcataggtgatgattcatttaaaatttcactgtctgccttgttaatctgagatatctgactttgaataagcatgtaatgtgaccatgnacaacataaagttaagcagatcagtgagaaatcaactaattagtggccaaagtcataaacagataaggcagcaggacaggcaggaatattttctaagaggataattgaatttggtggatataacacttgacttctgaggtactgaagtagcctcaaattagcaccattaatcagtcattcagctgtcctcacataagtatctaggagagaagacttagataccaccaatagaagtaagaagacctgttgctataagaaagtaaaatagtataaatgagttctggataagcagctgctggacatctttactaacccatttatgccggaggc

SEQ ID NO: 112 - DNA, 661 bp, Homo sapiens
  EIF4G3
  misc_feature [331]..[331]: Chromosome 1, SNP identification no. = rs4654729
  misc_feature [331]..[331]: allele = t, in linkage disequilibrium with rs4654874, respectively
  misc_feature [331]..[331]: n is a, t, c or g
aggacacaaaacacagaaacaacttatttaagataatgaactgtctatgcagttagatactaagttttttctcctgcctataatttcatctaaaaaaaaatcacagttttcttattttaattaataaaactcatcaaaatcagactccagattacttcctgatagcagattggatccttcttacattagagattcctaatgtgtaggttatagacccgctgatgggtctttgagaatattccaaatgttttccaccatatctttattaccctattatatttattaaaaagtagacagcttattgggatctaaatttcaaactgtttttttnccaatgactattgtcttttttccaattactgctgttaaatattacaagggcaaaaggtagttggtcaattatagtcagggcctatactgtaaaactgatggatgaaaagaattaaaatataatataaaatataagtaacataaattatgcaatatacaaaatattaaaacataaaataaattaatataaaaatataatttgcatagtctaaaaatagcaatagtgtttccattttcttaagacacattggtgatggctacaagtactctgtgacctggtacaagcctagatctttttctttatttttgaacacagtatacaagcctaagt

SEQ ID NO: 113 - DNA, 661 bp, Homo sapiens
  EIF4G3
  misc_feature [331]..[331]: Chromosome 1, SNP identification no. = rs3767247
  misc_feature [331]..[331]: allele = c, in linkage disequilibrium with rs4654874, respectively
  misc_feature [331]..[331]: n is a, t, c or g
aaaaaaaaaaagagagagagagaaaaaaaaaagagaaatctgggttatggagtatcacacctattttcagaaggcgaaaaagaattgaagttattccctagattatttttgaccatcttagcgtcagatatcaaacacaaatggctctgtaaaggcctcatgaatcttcaaaactccttgaggcaaagttctctgtgaactcttttcacgatgggtatgcactctgaaaacaatcctctgaaacaactactcagaggtgttctaattgataaattcacacgaggagaagagccaaaaactggagctggttcagcagaggatagtgtaaagnagtgtcatatatagcagaaaaaagttcaccccaaataatctatgaaattatgtttaaaacaatttttgagtgacaaatacttctttgttagatagtattaaaacagatataatactagtaaattttcttttaccatataacagatcatggttgaaaagccaataaattgtttaatgttatcaacagaaacagatggtttttagactctgtttctaataatggaaataaaaagttcatgcaaatatgcacaaacaccaccccacacctattcccccgactaattcatggaaaaagatagtatataaaaaccctcaaaagacagacagacat

SEQ ID NO: 114 - DNA, 661 bp, Homo sapiens
  EIF4G3
  misc_feature [331]..[331]: Chromosome 1, SNP identification no. = rs4654887
  misc_feature [331]..[331]: allele = t, in linkage disequilibrium with rs4654874, respectively
  misc_feature [331]..[331]: n is a, t, c or g
atagtatctcattgtggttttgatttgcatttctctgatggccagtgatgatgagcattttttcatgtgttttttggctgcataaatgtcttcttttgagaagtgtctgttcatatcctttgcccactttttgatggggttgtttttttcttgtaaatttgtttgagttcattgtagattctggatattagccctttgtcagatgagtaggttgatttttgcaaatttttatgctattggaacaaaatgtttttcttcagagctgttttgtaaaacgtctaatggacaaattaacagacatgtttaatcattgggctttagggagattctntgtcttctctctatgtaagttttaaaactgtgctacagtttactgttcctacagttaattggagggaaacaatttttgatgtgttacatcaaaaattctgtaactggaaaggacttcatcttaagatttcaaaaagagcgcaccttacagtaacatttttctggtatctgtaggatgtaatacaagtcatccccataaatggaagagtctcttagtttttcatttactttttatgtgggcttaactggattcaaattgttactcctgcaaattaagacctaacaactatccctatacaacctaagagataaacactggacttggagactg

SEQ ID NO: 115 - DNA, 661 bp, Homo sapiens
  EIF4G3
  misc_feature [331]..[331]: Chromosome 1, SNP identification no. = rs10916900
  misc_feature [331]..[331]: allele = g, in linkage disequilibrium with rs4654874, respectively
  misc_feature [331]..[331]: n is a, t, c or g
cactgcactttagcctgggtgaaagagtgagacttggtctcaagataaaatttttaaaaaattaataaagctgttttattttctacatttgtggagataattttctgggttggcctgaagcgcctgaattgtgcagattagctgaagatcttgtggccacataacggctaagtaagagactctgaattacaaaaaagtctcccttgtagctccacatgcttttggaatacaacataaactccctagttccaaggtttgaaattaatgtgtccagagtctgggtctcttagattgaagtgacacaaaactgagactgcgaagactttccaantatagacacttcactaatgctcagggaacagccccggtgcattgccacagagttgtgcataaacaaagtagaatgttctaataatggaactttcagtgagagttcccatccttatcacctggttttaatcccttctcatccattcttgatatattttgacaatttttacttttttccaagttttgagatctacaagttggcactaaatcattctgattagataatatgcaagaactttgtccctctagagttcctataggctgtgaatcctattctgtcccaaatcaccacctcttttcctttcacagatcttcatgggaatctaggaaa

SEQ ID NO: 116 - DNA, 661 bp, Homo sapiens
  EIF4G3
  misc_feature [331]..[331]: Chromosome 1, SNP identification no. = rs6699704
  misc_feature [331]..[331]: allele = g, in linkage disequilibrium with rs4654874, respectively
  misc_feature [331]..[331]: n is a, t, c or g
tttaagccattatgtttgtggtgattacaacagcaatagaaaatagaaaatgggtgggttttcattttcattcggttcaaaatattttataatttctgatttcttctttgacctctgcgttatttaaaagtgtgttagtttctaaacatatgggggattttccagagatatttttctcactgatttccaacttgaatccttttaaagttattaagcctcgtttctggaaccacaatatggtctatcttggtaaatcttcaatttgtatttgaaaagaatgtgtatctactgtttgaatgtttagtcaattaaatcaagttggctgactatnctattccagctcctaggtccttactagttttctgtttactggttctaccaattctgtgttttccagttatgtcgattccttatctctactttttgaatatgtgaaatacagttatagcaaccgtatctaataaccctctaatgattttgtctgctaattctaagcatgtcagttgtgagtttcaatcgatttgttttctcctcatcatgggtcatattgttttcatggtgtcactgggccaaaaagcaagaagatatcatcaggtctgtgactcctctggaggctctgtggaagaatctatttccttgtcttttttatctgttagagact

SEQ ID NO: 117 - DNA, 661 bp, Homo sapiens
  EIF4G3
  misc_feature [331]..[331]: Chromosome 1, SNP identification no. = rs10916903
  misc_feature [331]..[331]: allele = c, in linkage disequilibrium with rs4654874, respectively
  misc_feature [331]..[331]: n is a, t, c or g
accctaaatataccatatgcataaagaaaaaaaatcttctaatttttccgttgatcaaatacctattttgtgcagagaacaattccatatgttgttatttggaaatgaaaaagcaaaagccaagaaaagccaatacaattttgatgtagaatttaaaggtagtgggcttgtaatattaggatattataaaactaaagtaacgaaggtaattgtgctattgatgcaaggttaggcaaagagaaaagaagtggctcaatagaaaccattaatctgaatgcagtgttgaagcggtgtatcagcttaaccaacagtgtgcctcattatataaacngacctcagtccttgaccattccgaaagaacagctgttggattccaaaccatgattttaaggtcatggattatgtcacaggattgcaatgtgagacatctgtaccagggactagataccagaccctcaaattataccaagatctgagctggtgattccacagccatatatgctaaactggaagaatactgttgaattcaattttttgtcattatactccagcttctgatattgccaggtgaggagataatgcttacttaagtatgcagcctaaaagcccccgcttagctaaatgtttggactcttttccaaagtggcatggaaagtagaag

SEQ ID NO: 118 - DNA, 661 bp, Homo sapiens
  EIF4G3
  misc_feature [331]..[331]: Chromosome 1, SNP identification no. = rs11805006
  misc_feature [331]..[331]: allele = t, in linkage disequilibrium with rs4654874, respectively
  misc_feature [331]..[331]: n is a, t, c or g
gctaagaataattattagggtttgagttctttgaggataaggattgtattttgttggtctcttcaatctacccagcaaccaatacagtgcctggcaaatctgttaatgaataaatgacctgcaatcaaaattaaacccaaggttaatgtctctctagaacaacaatactggttaaatctctttgtgtaggtagtattacagtattcccatttcagagatgaggaaactgaagaacagagagattataagtttcccctttacagagagtaaaggttggggctagaactgaaacacagatctaacttcaaaacgcttccccactcaatacccnacctctcaagtctgccttatccttcactttcttgcctgaattccagcttcatttttatcttggttaaagttgtcttttgcttttgtagcatgacaggatgtgcagtttgttgccccaacagcacagtatgtcattaaaaaaataaaatggcaaagtgacactaagtaggtttgctccaaaaagttcagtggaggacagtccattaagcaattgtcgacactgagaacaaagatgactccaatgagaccactggcatatcttctaggcctctgtttttactgctctgtgttttaggcacttttgcattttaataagacacttttgaaccac

SEQ ID NO: 119 - DNA, 661 bp, Homo sapiens
  EIF4G3
  misc_feature [331]..[331]: Chromosome 1, SNP identification no. = rs6692677
  misc_feature [331]..[331]: allele = t, in linkage disequilibrium with rs4654874, respectively
  misc_feature [331]..[331]: n is a, t, c or g
atattactgcaaaatttataattaaacttgcttctggctttaattatgacaaaagtaattcatatgaacaaaaagatttcacaacaaacgaggaaaaactgaaaaagtcttgtcttccccatcttgctcttaggtctctctccccagagaaaatcattattaagtatttcctacttatcctcagaaaatactggtgtatatgcaagcacatatatgtgtgcattatacatgtgaatgtgcatacaggtttctcctttatttatactatacgtactgttttacaccttggtatggctttaaaattagagtaaaactcatttgtaagatatanagaaaagccatgttttaggggttattcatgatttatacaatttatggaacatcagtgtataatatcatgtcaaagggaggttttccctacatgatcaggtatactgatttaaatatttcaaatatcactcaaatcttatttgaattctgttaaaaactaatataaattatgacagtctgggactcaataaatacctgttgaatgaatgacaactattaataacggtattatgttacaaaagccctaatagtttttggatgctattaatcatctcattgaatgctatcacataaataatgacttctatttttatttctatacgttttagca

SEQ ID NO: 120 - DNA, 661 bp, Homo sapiens
  EIF4G3
  misc_feature [331]..[331]: Chromosome 1, SNP identification no. = rs17450586
  misc_feature [331]..[331]: allele = t, in linkage disequilibrium with rs4654874, respectively
  misc_feature [331]..[331]: n is a, t, c or g
tcatgaagaaccactctgctttgccggcccaactggatatttcatatctgtgacatcgagcaatgcctctagaatgattgctacaggtgttttttgttttgtttttttgacagggtcttactctgtcacccaggctggagagcagtggtgtgaacatggctcagtgcggcctcaatctcaaaggctcaagcaatcctcccatctcagtctccagagtagctgggactacaagcacacaccaccatgcttggctaattttttatttttttgtagggacgaaaggtctccatatgttgcccaggctggtcttgaactctacaggtggtacatncaataccaagctgagaacaccctctcaaactgaggtaaaatttaactagtagtaaagtaataagacagaataaaaacaatacagtttttatgtatacactatataagtaattgttgtataaatttatttatacaacaatagcatgtgtcaaaagatgatataatttttggctgtacacaaatactcctgtatctccgatactgtcaattgtggtgttcttgttgaaatttacttcctcaatttctaagctataacttccctaagcaaatccttatatagatgctggtggcaccaccatatcatactcatttttcttttatttgagacagt

SEQ ID NO: 121 - DNA, 661 bp, Homo sapiens
  EIF4G3
  misc_feature [331]..[331]: Chromosome 1, SNP identification no. = rs12407731
  misc_feature [331]..[331]: allele = t, in linkage disequilibrium with rs4654874, respectively
  misc_feature [331]..[331]: n is a, t, c or g
tcccatctcagtctccagagtagctgggactacaagcacacaccaccatgcttggctaattttttatttttttgtagggacgaaaggtctccatatgttgcccaggctggtcttgaactctacaggtggtacattcaataccaagctgagaacaccctctcaaactgaggtaaaatttaactagtagtaaagtaataagacagaataaaaacaatacagtttttatgtatacactatataagtaattgttgtataaatttatttatacaacaatagcatgtgtcaaaagatgatataatttttggctgtacacaaatactcctgtatctcngatactgtcaattgtggtgttcttgttgaaatttacttcctcaatttctaagctataacttccctaagcaaatccttatatagatgctggtggcaccaccatatcatactcatttttcttttatttgagacagtctcactctgttgtccaagctggagtgcagtggtgtgatctcggctcactgcaacctccgccttccgagttcaagagattctcctgtctcagcctcctgagtagctgggactataggcgtgcaccaccatgcctggctatttttttctatttttagtagagacaggtttcaccatgttggccaggatggtcttgatc

SEQ ID NO: 122 - DNA, 661 bp, Homo sapiens
  EIF4G3
  misc_feature [331]..[331]: Chromosome 1, SNP identification no. = rs10916906
  misc_feature [331]..[331]: allele = a, in linkage disequilibrium with rs4654874, respectively
  misc_feature [331]..[331]: n is a, t, c or g
agaaagaagctcggtatgtattagcaccgtctccccactctcttctctccccaacccctggtgagcactaatttattttctgcttctatggatttgcctattcctgacatttcatacaaatggaatcatataaaatgtggtcttttgtgacttttttcacttagcgtaatgtttttaaggttcatccattgtacaccatgtgaatttcattccttatcatggtccgatatttcatggtatgtatatatcacattttgtttattcatgcatcagttgataaactgatttgggttgttaccactttatggctgccctattcattttccccccnattcttctgagctttctttgcctttcttcctaattttccactcctgccaaagcaggaagttaatgatggtattaccatcctcaactcaactacagattttccttcactgttctaaggaggccttctcctttaccaatcacagcagaggtcaccttgagatgtgtctactgtgaagataaatgacataatgggtacaaaaacttttaatcaacattatacatgcaaacggcctatcctaagggattttccaccatctcatgtcccagattttattaaaaacatttcagaaggtatcaactccttgagcttcctttctttggaagataaatt

SEQ ID NO: 123 - DNA, 661 bp, Homo sapiens
  EIF4G3
  misc_feature [331]..[331]: Chromosome 1, SNP identification no. = rs6698440
  misc_feature [331]..[331]: allele = t, in linkage disequilibrium with rs4654874, respectively
  misc_feature [331]..[331]: n is a, t, c or g
cactccaggctggagacagagcaagactctgtcttaaaaaaaaaaaaagaaagtaggtagatggtttcttctaacataaggcggtttcatctacaatatcagtatctgttggttttcaacaaatattgaaaatgtgtaatttagggtagccactatcatcaattatcttagctagatcatctggataacttcctgtggcttctctatcaccacttgctgcttctaccttgcacttttacgttatgatgacatctttcctcaatctcatgagccaagctctgctagcttcaaacttttcttctgcagcttcctcacctcactcagtcttcanagaactgaagagacttagggcactgttttggatgaggctttgacttaagggaatgttgtggctggtttgatctatccagaccactgaaactttctccatgtcagcaaaaaggctgttttgcttttgtatcatttgtgtgatcactggagtagcactttaaacttccttcaagaacttttcctttgcattcacaactttactgtctcaaggggcctagctttcactctgtctcagctttcgatacatattcctcactaagcttaatcatttctagcttttaatttcaagcgggagacgtatgactcttcctttcacttgaacacttagaag

SEQ ID NO: 124 - DNA, 661 bp, Homo sapiens
  EIF4G3
  misc_feature [331]..[331]: Chromosome 1, SNP identification no. = rs10916907
  misc_feature [331]..[331]: allele = c, in linkage disequilibrium with rs4654874, respectively
  misc_feature [331]..[331]: n is a, t, c or g
aatagtgaaaagaatagtagaagacatggtagactattcttaaacagtttgggtcagaagaaaaagataccatttaagtggcagctaaatggttatatgggactcagagagcgtctctggcatgagacagacaataagaaggtggtagagaggcagtgaatacatacgagactgtaagagacaactaagagagtctgatgaaggtttcaatatagccaggtttgtaagggggcagaaagttaaaaaaaaggcgtacccagtgtcctcaatgttctcaataaagaaggagacgaggtcatgtgctgcaggtgagtagcactgggcagagtanaggattttcaacagaaaaaccataaaaataatggttgggatggacagtgtgaatttgtagttgcattcacaccactgtaagtggtgtgatcttctccagtagtgctctgcctactggagtttaatagacaaagtaggagttatagtactgattcaagggttttgataggtatgtttttcaaaaggaaaaagaggaaaatcacagattttgtacagggtagctcaaataatccccctcgtctttgctcaaatcttacctcctactgaggcctatgactctgatcatattatttaaatactacaacctgctgcccctttgcattcctcaccc

SEQ ID NO: 125 - DNA, 661 bp, Homo sapiens
  EIF4G3
  misc_feature [331]..[331]: Chromosome 1, SNP identification no. = rs10442633
  misc_feature [331]..[331]: allele = t, in linkage disequilibrium with rs4654874, respectively
  misc_feature [331]..[331]: n is a, t, c or g
catgagccaccgcgcccggcctcaactgatgcatttttattcactcagaaatatgatctagaatagttacaagaaaatgttttgcagcagaactaaaagataccatatcccttatgttataactttactgctttaaccaactatctctataccaactgatatgttatttatgtatcaggtttctgaagccagctttgaggtgtttcatcctcaggcagagacaagtaaaaactattctcaaaagtcaccaccaaaagactcataggcaaaccagactgttttggtgttacaatttattaacttctcaaagtaaacggctgttatgatttantaacttctcaaagtaaacaaggtataataagtgaatattatgtgaataagtgcaaataaattatagtcattaagcatatgaccacgtcaggtggatatacttaaagactggaggtaattttaattttcattgttaacttttgtgacaaaaccattaaaaaatattcggacagaaatgaatgggtcagaaatgcttctgaggctttataatttacaaactgctggccaggtgtggtggctcatgcctgtaatcccagcactttgggaggctgaggcgggcggatcacaaggtcagtagttcgagaccagcctgaccaacaaggtgaaaccc

SEQ ID NO: 126 - DNA, 661 bp, Homo sapiens
  EIF4G3
  misc_feature [331]..[331]: Chromosome 1, SNP identification no. = rs12133780
  misc_feature [331]..[331]: allele = a, in linkage disequilibrium with rs4654874, respectively
  misc_feature [331]..[331]: n is a, t, c or g
tgtgtgtgtgtgtgtgtgtgtgtgtgtgtgtgtgtgtgtgtgtgtgtgtgtgtgtgtatgttcgttctagatggaacacaccatatataacaaatatgtatttatcaaaatatctttgatgaaaataatttccagctcactggagtaaataagtcacccagattacataataccactgtgaaagcttatcagactaacaccctttatgaccactgactgaaacctagatgcagtaaatttaaaaatagggcagggtgtgatggctcgcatctgtaatcctagcactttaggaggctgagacgggaggatctcttgagcctaggaatttgcnataagcctcggcaacatagtgagaccttttgtctacaaaaaattaaaagattagccaggtgaggtggcgcagacctgtagacccagctactcgggaggccaagatggaaggatcgtttgagcccaggaggtcgaggctgcagcaagctgtgatcatgccactgcactccaacctgggcaatagagcaagacgctgtctcaaaatgaaaaagggaaaagaaaagtggggagaaggagagagggggagcggggtggggggacagagagagagagaaaaagagaaattgattctcacattaaatatctaataagagtatgtcaattcaattat

SEQ ID NO: 127 - DNA, 661 bp, Homo sapiens
  EIF4G3
  misc_feature [331]..[331]: Chromosome 1, SNP identification no. = rs3767248
  misc_feature [331]..[331]: allele = g, in linkage disequilibrium with rs4654874, respectively
  misc_feature [331]..[331]: n is a, t, c or g
aggggtgctggcagcaagatgagcgctctccacagtcccataaaccacagggctgtgctcggggacctggctgggcagctgctgggatttgaagtacaaaaaagggtgataatgagcgtgcgaacataaaaactagcaacatggaacccaagcaagtagggaagacagtagagcacaggagatcacaaaattaaaaaaggaaagcaaggaaaaaatatatagtccaatttaataaattcaaaagtacatgggaagtcagggaagataaagaaagaggcagcagaaaaagaggaaggaaaagaaatgattactattaaccacagcaagagangacagcacaacaatcattagcacaatttattccccagtgttccttctaaggacaagccgacttgtcaacctaacaatagacgacacatctgagaaggaatttaacaccctcccaaagaccaagaaggatttggtcaacttcatgtataaattacctagcaaagcaggacaaacagaaaatgtaatgaggctgaaaagcggttacagattcaagaaaacaatattgaaaaatgattcctgctacttatccatgtaatcatacaggtgaaatgcaactttgaaagtatgtaataaagcaattttaccataaaatgtctacaggttctgggtc

SEQ ID NO: 128 - DNA, 661 bp, Homo sapiens
  EIF4G3
  misc_feature [331]..[331]: Chromosome 1, SNP identification no. = rs6700459
  misc_feature [331]..[331]: allele = c, in linkage disequilibrium with rs4654874, respectively
  misc_feature [331]..[331]: n is a, t, c or g
gtgttgtggctcatgcctgtaatcccagcactctgggaggccaaggcagacagatcaccagaggtcaagagttcgagatcagcctggccaacatgatgaaaccccgtctctaccaaaaatacaaaaattagccaggagtggtggcaggtgcctgttaattccagctattcgggaggctgaggcaggagaattgcttgaacccaggaggtggaggttgcagtgagccgaggtcgcgccactgcactccagcctaggcaacaagagcaaggctccgtctcgaaaacaagcaaacaaacaaacaaacaaacaaacagtctataacaaaggagtnccttatcttcccaaagaaaaaataatgatgaactattttactaatcaataagtcagaaaaatcaggaaacataccaagtactgtgacacaaaacatcacatccaatgctgtatgcattttgatacatatgaagaaattaagctagacagttaagaatatatttaaggaatttcaaagccactgcattttagtcactttcactattggtgggaatgaaaacttataaaatcattctggaaaggcaatcactaccaaaatataaaataactcaataaagatgctaaggaagtcagagttaaaaggtcagggtcatttagcaagtcttcgcac

SEQ ID NO: 129 - DNA, 661 bp, Homo sapiens
  EIF4G3
  misc_feature [331]..[331]: Chromosome 1, SNP identification no. = rs12137408
  misc_feature [331]..[331]: allele = g, in linkage disequilibrium with rs4654874, respectively
  misc_feature [331]..[331]: n is a, t, c or g
actacaataggcatcaaccacatagatcagttctttctatactaattctttctatactaatatggtttgactgtccccacccaaatctcatcttgtagttcccataatccccattacacacctcaaaaattctatgaatatggacttttgtatgtttttgtatggacagttagtcaatagtgaagagacactggatagtattttgtggggaaacggtgtgatatgatttatgttttaaaaagatcactcacttgggctgttgtgtacagaatcaacagaggagaggcaagacagaagcagagagatgagtgagaaagttcctgttgtctanggagagcaaagtggcttaggctacaataacagcagtgaaggtggtgggaatgagtcaaatgggacttgctgatgtaatgactgtggagagtgaaattaagaggatttaaaggtgagtcctaggcttagaacctcagcaacttaggtagactacagtataatttacaaaaaaaaaaaaaaaaaaaacaaggagagcacatcaaacacctgttgaaatattttattttattcaattttttgagacagggtctcgctctgccactcaggctgaagtgcagtagcatgaccacagctcactgtagcctcaaactcccaggctcaagcaatcctc

SEQ ID NO: 130 - DNA, 661 bp, Homo sapiens
  EIF4G3
  misc_feature [331]..[331]: Chromosome 1, SNP identification no. = rs6697555
  misc_feature [331]..[331]: allele = t, in linkage disequilibrium with rs4654874, respectively
  misc_feature [331]..[331]: n is a, t, c or g
tggctcacgcctgtaatcccagcactttgggaggccgaggtgggcggatcatgaggtcaggagatcaagaccatcctggccaatgtggtgaaaccccgtctctactaaaaacacaaaaattagctgggcatggtggtgcatgcctgtaatcccagctactcgggaggctgaggcaggagaatcgcttgaaccagggaggcagaggttgcagagagccaagattgcacaactgcactccagcctggtgacagagcaagactccgtctcaaaaaaataataataataatttttattactgcgtaacagatgtacacagtttcagtgtacccanaaaaatttaacacattcacataattcaaagataaatatttgtcttttctttatgctaggagcatttgaattcttctctgctagctatttcaaaatgtacaatggattatcgtaaactatagtcaccttactgatctaccaaacactagatcttatttcctctatcaaaccatatagtgtatacaaattcattttaatctatgaaacagcataacaaagcaaggatctctgctcatcatgacgaacagagaataggacacttttcaaatgtcccatttaaaaacttttgagagaatccaccccagtttagatacctatttaaagtctacaa

SEQ ID NO: 131 - DNA, 661 bp, Homo sapiens
  EIF4G3
  misc_feature [331]..[331]: Chromosome 1, SNP identification no. = rs10916911
  misc_feature [331]..[331]: allele = t, in linkage disequilibrium with rs4654874, respectively
  misc_feature [331]..[331]: n is a, t, c or g
atttttctttttttgataattttaggcaatatgtcatctggaagttttcaaattatcacaatgtccaaaaaatttcccaatgtatttactgaaaaaaattatcatataaacgaacccattttgttcaagggtcaactgtaattaataaatggtcatggaatttaaggtttgcaggtatcaacttcataagcagctcaacaaaagactgaataacctgctgactttagtaattttcccaaatggtaggagagattgtatctttcctaagatacgctatcaatccataatttcctaccccaaagccccatagcataggactctctcccatgtnataactgtgtttcattacaataataattctagaagcaggggggaaaaagagtatatcaaggaagaaaggtacataattcatttttaaaaattaagtgatctttggccgggcatggtggctcatgcctgtaatcctagagctttgggaggctgaggcgagcagatcacttgaggtcaggtgttcgagaccagcctgggtcaacacgatgaaaccctgtctctactaaaaatacaaaaattagctggcgtggtggcacatgcctgtaattccagctactcaggaggcaaaggctgcagtgagccgagattgtgccaccgcacttgcactcta

SEQ ID NO: 132 - DNA, 661 bp, Homo sapiens
  EIF4G3
  misc_feature [331]..[331]: Chromosome 1, SNP identification no. = rs6669077
  misc_feature [331]..[331]: allele = c, in linkage disequilibrium with rs4654874, respectively
  misc_feature [331]..[331]: n is a, t, c or g
taatcctagagctttgggaggctgaggcgagcagatcacttgaggtcaggtgttcgagaccagcctgggtcaacacgatgaaaccctgtctctactaaaaatacaaaaattagctggcgtggtggcacatgcctgtaattccagctactcaggaggcaaaggctgcagtgagccgagattgtgccaccgcacttgcactctagcctgggtgacagagtgagtgagactccatctcaaaaaaaaaaaaaaaaaattaagtgatttttgatccaccattcatcctatttggaagtagacaatcttgacatggcatcatgtatttatttttacnctaccgggtttcaatgaagactattaggcataatagctagcatatttctaaatacagggatattccttatgccttactgtcatcatcaggagttgagagatttgatactgagcgagtaacaaaattcttccttctttcccactttaataggtaagaactaaaagggaactctcagattatttcgtacaattcctcattttacagatgaaaaaataggggttttaagaacttaatgttctgacccaaggtcataaatctaagtaacacagtgaaaaccagcagcaagtgttctcgtgagccatgatatccagccatgcacctccatctacg

SEQ ID NO: 133 - DNA, 661 bp, Homo sapiens
  EIF4G3
  misc_feature [331]..[331]: Chromosome 1, SNP identification no. = rs6697284
  misc_feature [331]..[331]: allele = a, in linkage disequilibrium with rs4654874, respectively
  misc_feature [331]..[331]: n is a, t, c or g
ttagatattataagtaatttagagattatttaaagtatatgggaggatgtgcactgtttatatgcaaatactacgccattttacataatgaacttgaacaaccacgaattttggtactgtggagggggcatctttgaacaaatcccctgtagataccaagggatgactgtaattaaagaagacactctgcactcaagaagctcatttatgtagttctaaaaggtaagaagtatacctgttatacatcctaatatgctctcaataacacaggaaatcatctcaagcaacactgtttggtaaaaatgttaaattctcaaccttaatgtttgcnttaacaaaaggtgcagcacttaaatcctaaggttccatgtgaaatgtgaaatactcatttaatgatgaggtttctacaagaatgcagctccttttggcatcatgcgatagttcattaagaagagtggcagcacctcacctgtgctctgattgtgaaaacaatacataaatatattaccaataaaaatttaaaaatattataatttgcaaagagaaaaaacatgtctgtttaaataccatttagatattcgaggctgcgagacaactgatggaaatgaaaagtacagaaagtggctatagaagaaagaagagttcagtagaggttagtgaa

SEQ ID NO: 134 - DNA, 661 bp, Homo sapiens
  EIF4G3
  misc_feature [331]..[331]: Chromosome 1, SNP identification no. = rs2271115
  misc_feature [331]..[331]: allele = t, in linkage disequilibrium with rs4654874, respectively
  misc_feature [331]..[331]: n is a, t, c or g
atatttgacaggtttcccagtttgcacctttaactcacttatatgcctataaatttgctacacagacactcatctgtacatatgtcattttatttaaccttatagataagaattcgggatccaaaccagggaggtaaagacataacagaggagattatgtctggaggtggcagcagaaatcctactccacccataggaagacccacgtccacacctactcctcctcaggtaagacagagtgagctgtaatggatggcactatttgttcactaacctctactgaactcttctttcttctatagccactttctgtacttttcatttccatcanttgtctcgcagcctcgaatatctaaatggtatttaaacagacatgttttttctctttgcaaattataatatttttaaatttttattggtaatatatttatgtattgttttcacaatcagagcacaggtgaggtgctgccactcttcttaatgaactatcgcatgatgccaaaaggagctgcattcttgtagaaacctcatcattaaatgagtatttcacatttcacatggaaccttaggatttaagtgctgcaccttttgttaacgcaaacattaaggttgagaatttaacatttttaccaaacagtgttgcttgagatgatttcctgtg

SEQ ID NO: 135 - DNA, 661 bp, Homo sapiens
  EIF4G3
  misc_feature [331]..[331]: Chromosome 1, SNP identification no. = rs6700718
  misc_feature [331]..[331]: allele = a, in linkage disequilibrium with rs4654874, respectively
  misc_feature [331]..[331]: n is a, t, c or g
atgagaatcgcttgagccccagaagcagagggtgcagttcagctgagatcgcgccactgcactccagcttgggctacagagtgagactccatctcaaaaaaaaaaagaaaaagactggtgttaaaggagagtctagatgtgagaactgagcttaaattcctcacactgagtaaaaccttagcccactaaaccctcccagttctaaaggtggagtacatgttgtcatgtagcaaacctagctcagtgaataattaaagatgatattatgcaaatggtatgaacaacttctaattacatgcccatacaaatcctccaggtgaagtggtgtgantataagggaagaataaaaaaaaaaaaggcacagtaatttgtgaattgagatgaataatgactacgtaaacttatctgataagtgaatagattttagatttaaaataagaaaaagtaataaaaatctcttacagtttttttctctctcttggctggaggcggctgttgctgcgtaggcactatgataggtgctgactgatacaccggctgacttgggtaaaaaggcgttcctaaaaagttggaaaaaattaaataggcattcagttattttgtcaaacactacagaactagcaatgacactgtgtctctgcacaatccccttaaaagggta

SEQ ID NO: 136 - DNA, 661 bp, Homo sapiens
  EIF4G3
  misc_feature [331]..[331]: Chromosome 1, SNP identification no. = rs4654893
  misc_feature [331]..[331]: allele = g, in linkage disequilibrium with rs4654874, respectively
  misc_feature [331]..[331]: n is a, t, c or g
gtgaagggtattgcgtatcactttgaaatagcagtttcccaagacaatatcaaccaaggtaacagaaaacttttcccttctctaaaagaagtaaagccacgtaacatttggttgctttgcctacttcacctcaaaactgaaaaaaaaaaaccttcttgggctacttgaatcaaatcaattctgctgtaatcttaactgagacaatcccaattttaggaaactggttaatggataagttatcctgttatattaagattatttaataagtttttgctttgttggttatataacagatcaatgcttactgaatctcaaaacttaatttttctantatctactaattttatcccttattattcaccttccatggaataagagaaatgtaatatgaagtaaaaatttgttgaatgaagtaagtaatttttatcatttttagttcagcattggcgcatatgccaataatcttggcaacccagctctctctaaattaaaaacacttttaatttttcaaggcattttcattggaactaatacccaaaacctcccccatgccatagatcttatcacaattttgcggagaatcacaggttcactgagttatatttagttatggcatgtatattctccaagtgcctgccagtcactgttctaggggctgggg

SEQ ID NO: 137 - DNA, 661 bp, Homo sapiens
  EIF4G3
  misc_feature [331]..[331]: Chromosome 1, SNP identification no. = rs12021529
  misc_feature [331]..[331]: allele = t, in linkage disequilibrium with rs4654874, respectively
  misc_feature [331]..[331]: n is a, t, c or g
acaattttgcggagaatcacaggttcactgagttatatttagttatggcatgtatattctccaagtgcctgccagtcactgttctaggggctggggatatagcagtgaacaaaacaaaaatctctactttcatggaaattgcattctactaagaaagacattaacaaaatctttaaggtgtaaggtggtaggaaatgtttggagaaaaagagattgtgaaaggaggataaggtatattcatgccactggcaaaaatccagtaaaaatctaggtaacagtgaactggtggaagatgtcagaactctgaaacatgattctttccagtagaatnatcagcttgtaaagaagatgtcattaactaaatatatttctataatactcctcttgtaagccactctctaaaaagtaacttttctgtctttttttttttttgagatggagtctcgctctgtcacccaggctgagtgcagtggcgtgatctcggctcactgcaagctctgcctcccgggttcaagccattctcctgcctcagcctcccgaatatctgggactacaggcacccgccaccatgcccggctaattttttgtatttttagtagagacggggtttcaccatgttagcctggatggtctcaatctcctcgcccgcctcggcctccta

SEQ ID NO: 138 - DNA, 661 bp, Homo sapiens
  EIF4G3
  misc_feature [331]..[331]: Chromosome 1, SNP identification no. = rs7540023
  misc_feature [331]..[331]: allele = t, in linkage disequilibrium with rs4654874, respectively
  misc_feature [331]..[331]: n is a, t, c or g
accaaaggggcaggccacagagagtaggtgatggagatgaaaagaaagcacaggaggcaaagttggtaacataggaacctgggatgcaatacaactacaggaaccatcttctagttatctccactgacacagttttggtgacaacatttttttgttggctgctaaaaggaacaataaagcagtaaacctcccattactggactgcatttctcgtaattacaaagcaaacagaatctatcatgcatcaatgcatgtgatctgtaaacaacacttcaggaacaaacttaagtatttttataatgtagttaatatcaggagccacaagaatganacaagcctcaagtagagaagagtcattatctgttcaacttactgggcattgctaaataacacaggcagaggataaaaatcttaatactgaaagatcctttgaaatcaactgtagagggcagcccagccaagataaagggcgtatcaaatgaacacaggtgatcatctattatggtaacactatcatcaaataatgtcaaaatactcctatgttgcctgaagaaatagggtgttacggggtggtaaggagaggagaaagaaaatgaatccattaacttatgcagagtaagaaaaatagatacgggcaatgttttccaaaaattttaacagt

SEQ ID NO: 139 - DNA, 661 bp, Homo sapiens
  EIF4G3
  misc_feature [331]..[331]: Chromosome 1, SNP identification no. = rs10916919
  misc_feature [331]..[331]: allele = a, in linkage disequilibrium with rs4654874, respectively
  misc_feature [331]..[331]: n is a, t, c or g
tacatcattttcttacacataattctactgttcagttagtagactacagcacagtggaaacataacatatatacactgggaaaccaaaaaattcacgacttgctttattgcagttatttgcttgattgtcgtggtctgaaaccaagtctgcaatatctccgaggcatgcctatatttattaacttgcaaagcaatacaaaatatgcttcagtatataggtcagcctactagaagatgaaaaactaacatctgcaattagaaatttccttggtgaatatcttttaaaagtctgaagtactcttgaagaacagtgctatgatttgctggcaanttagaaagggacaagctttaaagagtccacataatgggacatcactcaggtgtcaatttgataatctgttaatccatggtaatttataatggagattattccattctaaattttttctatatttcccggcatgtggtcaatattatataatttaggtttcactaagaatcgggatatggaagccctagagctgagttgttcaatacaggagccacaagccatacttaactacttgtactaaaaattcagttccgggtcaagcacagtggctcacgcctttaaacccagcactttgggaggctaagatgggcggatcgcttaagctcagga

SEQ ID NO: 140 - DNA, 661 bp, Homo sapiens
  EIF4G3
  misc_feature [331]..[331]: Chromosome 1, SNP identification no. = rs10799677
  misc_feature [331]..[331]: allele = c, in linkage disequilibrium with rs4654874, respectively
  misc_feature [331]..[331]: n is a, t, c or g
gccatgtatatagctagtagagctacagcagtgaaaagcacaagtacagaacattttcatcatcacagaaattctattacacagtgctaccctagaggtttatgtcaggaacaggaggtgttctgtcagatcataagggagagtcttggaaatgagcatccttataaaatacttcactcatgctaaaaaatagcttgggaaaaggggaaaggcaggtagtctcactgctaaaggaaactgacacctaccaaggacttatttcatttcagacactgtgataggcaggtactttatcctcaccacacccataggaaatatatgcagttattanaacatctcagtattatatcatttattagcatattttacccattttgaagatcagaaacttgaggcccaaagataatttgtagtgaagctgaaattgaatcccagttttactgactcccaacatatattttcttcattatttatgctgctactatacaactccttgtgaatgagataccagataaaaccacccatcactcacttgtaccaagctccaaaaaacaaaaagttcataagatcataatttaagatgtcataaggtcgtatagatgcttgagatggcttgctattcatatccatttaactctgttgtgccaggtctggcccattt

SEQ ID NO: 141 - DNA, 661 bp, Homo sapiens
  EIF4G3
  misc_feature [331]..[331]: Chromosome 1, SNP identification no. = rs10799678
  misc_feature [331]..[331]: allele = t, in linkage disequilibrium with rs4654874, respectively
  misc_feature [331]..[331]: n is a, t, c or g
ttcttgagtaaagatccccaacgtctctctcttttaggagtatttgccttgtccctggattaaaatttaagccatgcttctatggcactggactaaattttcaattataaacactcttttacataagaaactaatatttttattattagtagtagtaatactaattctatgtcctagttactatgtgccaaacaccccgctaatcattttattttcattatctaatttacttttcataatagtttcaacatggtattactgtctccgttttacaggtgagaaaactaaggtggagagcagtaaatgatttatccaagaacacttggttaanatggaagaatcaaacctagatctagctgatggcgaagtccaagctcttaaagtattaatactttacaatattatctctgaattaaaaaaaataccctgaggttttatttcactatgaaacccaaacaatagccatccaccccatatagccatcctcctgcaaagtacctttaataactcagatttgctttgcctttacatcctccagattggaaggaatacattttgaaaaacagagtcaggtattaaatcactggaagccttcaactaaacaatatccatttactcagtaataagaattgtaaatatgataacacaggcaaatactggt

SEQ ID NO: 142 - DNA, 661 bp, Homo sapiens
  EIF4G3
  misc_feature [331]..[331]: Chromosome 1, SNP identification no. = rs12123300
  misc_feature [331]..[331]: allele = c, in linkage disequilibrium with rs4654874, respectively
  misc_feature [331]..[331]: n is a, t, c or g
tccattttacatatgaggaaacaaagatgcagaaaaagacttgcctaaccagctggttacatagtaaagcttgtaatatgaacagactaaaccaaagctctttcagcagaagaaaatgtttcagaataccccataaaaagctactggggggttggagggagaaccctgcaagtccttctgtcttgccacctctaaatagattccaataggatagaagtatgaaaccaataggatagaattaatattatttcatttaaaaaattaaaattatttcatttaaaaaaccaataggataaagttatttaaattaattaagatatctattttctangtgttctaataataaaaataattctatccagcaaatggatgtacatgatttttaatcaatttattactagatctaagttagtaactgagtttaagtggttttagaaatactaatgctattttatacacatcaatacaggttatatcggaatgttaacagaaaacccatagaatgctgcctgcttcattcagttaaatttaacttactacaaatatccacaaaatctataaacacttagtatctaaatttttcaaaattgtaaaatttaaaaacaatgcttggcaagaaaaaaaaaactgtagcattttttaaatgtgccataaacagagg

SEQ ID NO: 143 - DNA, 661 bp, Homo sapiens
  EIF4G3
  misc_feature [331]..[331]: Chromosome 1, SNP identification no. = rs2874367
  misc_feature [331]..[331]: allele = a, in linkage disequilibrium with rs4654874, respectively
  misc_feature [331]..[331]: n is a, t, c or g
aggcacaaagagtcagaaacaccacaacaaaaaccaaaatttcacacaatatgccaaaagaaaaaaaacccacagtggggaaataaaaaacaacacacaaaacagtcaaagctttgctgcaggacagtgacagacaggtactaagattcaacaggttaacagcactatcagaatagtttgtcatttatcaactgggagagaaacaggctatgctgttaggcatgtaaggtactctctgataggattatttaaaaaaaaaaaaaaaccctaaaataaggcaaaagcaagtttgaaaaattaagtggttatattaagacaaacatgaaaatcnagtatgctgtatgtaactgatacagctggaggaaatgagaaagcttttacattacaagacctagccaggagataattataaagtccagcaggaagtaaaaaacgtaacacaattaactgcaaattttcttaagttaaatgggatatcttatccatgaaatggaagtttcagtatcttaatttcttggagttaaagaaaaatcttttatgactttacacacacacacacacacacacacacacacacacacaagtttaagtttaaatgcggttaactaatataatttaatacaaggcatgtcaaggcaaacagctagtaaagaacatcagt

SEQ ID NO: 144 - DNA, 661 bp, Homo sapiens
  EIF4G3
  misc_feature [331]..[331]: Chromosome 1, SNP identification no. = rs11302414
  misc_feature [331]..[331]: allele = a, in linkage disequilibrium with rs4654874, respectively
  misc_feature [331]..[331]: n is a, t, c or g
cctcaccagatgggacagctgtgagatggatgagactagactatgacaacttgggacgtaaacagaaaatgcaatcctgccaaatttcagaccccaacttcaccctcccagcacaaaaaaaaaacaaaaaacaaaaacaaaaaaaaaccccataacaaaataaagaaaatcaaacctaaaacaagaagcaagagtagtctggggtctgctagtcttgcacttgttttagggtatgtaatggaatgttatgtgtgtgatttttagtaatggggtgggtaatggtcactagcagagcagatggcaaaaattgtatagaggatagtatctgaanagtttatgaccacagaaaaatggctgacaactacagacaatttcctccttaatattcaattataaaattgaaagggagtaaaaagaagcctcgaaatttatcttttaaattcaaatttatctgaaagggatatctcacttcaagtttaaaataaagaaaaatctaaacccccaaattcttcctgactaattcccaatagagaacacccacccaatttgttattcttttccccactatgcctggcagaaactgccatgctaggttagactttcagagaggaagcaatcaatgcatttctgttcatcagccaataaatggatgtggtcaaaa

SEQ ID NO: 145 - DNA, 661 bp, Homo sapiens
  EIF4G3
  misc_feature [331]..[331]: Chromosome 1, SNP identification no. = rs12130664
  misc_feature [331]..[331]: allele = t, in linkage disequilibrium with rs4654874, respectively
  misc_feature [331]..[331]: n is a, t, c or g
tcacaatgtatgccattataccactagcaatatggaatgcttaacggtggcacatgacaaagaaattttgccaatagatcattcaacgatcgttcagagcatttttccattctctgtggatgcctttagaaacttcttaggaacagtatgacttgttacctatcattgctgtaagcagtgcaactgtaaaagatgcctctactcttttgatctcttctctgcatttaatgacttattctagaataatttccttaatttactaccatgctttgttgaaaaacaatgcaaaatttcagtgggaacatactttgaccatgtttcatgtcaaatncacagaaaactagggacagatcaatgaaggatcatttcaataataatcagagcatctgtttgtactttcccttttcgaataatttcaaagtcatcccaaatatttacttcttcaaggacatatgggtgaacatacagaatttactctgcaatccagtatactgtccaagttgatgagttacagacatctgttctcactttcattattaattttatgtttcaataaacctttttgaatgctttttatttgttggggagataagaacacaatagtgacagcaaaccaagcaaatgatgtaaattaataatgttactgaagaaaagccaatga

SEQ ID NO: 146 - DNA, 661 bp, Homo sapiens
  EIF4G3
  misc_feature [331]..[331]: Chromosome 1, SNP identification no. = rs6661116
  misc_feature [331]..[331]: allele = g, in linkage disequilibrium with rs4654874, respectively
  misc_feature [331]..[331]: n is a, t, c or g
atcagttgaacccaggaggcgaaggttgcagtaagctgagatagtgccactgcactccagtctgggtgacagagcaagactctgtctcaaaaaaaaaaaaaaaaaagaaaaagaaaaagaaagaaaaagaaaagaaaaaagaaaacatgtaacaaaatttactatcttaaccactaagtatacagtactgttaactatatgcacatagtacaacagatgtctagaactttttcttcttgcaaaaaacaaactctataaccactgatttccatttaaattgtatttatatacattttaatccttagaatgtaaatagccacatacatagccnatggctaacatactgcacaacacaggtatagcaaactgttaattcccatgttttgcttttatgagttctatattttatatcactctaaacttctgcaactctactttcatagaagtacaataatatccaacaaacaagaccacaatataaaacgctggagacagtgacagagacctatcactgaatttcctacacagtcttaagcatagcacttgttttcctcagctaataaagactgaagctttaagctactgattatcacagtgtggtccacagagtcctgggcatctctgtaatgctattaaagcaggtgtgggaggtgaaatattt

SEQ ID NO: 147 - DNA, 661 bp, Homo sapiens
  EIF4G3
  misc_feature [331]..[331]: Chromosome 1, SNP identification no. = rs12070677
  misc_feature [331]..[331]: allele = g, in linkage disequilibrium with rs4654874, respectively
  misc_feature [331]..[331]: n is a, t, c or g
taaccactaagtatacagtactgttaactatatgcacatagtacaacagatgtctagaactttttcttcttgcaaaaaacaaactctataaccactgatttccatttaaattgtatttatatacattttaatccttagaatgtaaatagccacatacatagcccatggctaacatactgcacaacacaggtatagcaaactgttaattcccatgttttgcttttatgagttctatattttatatcactctaaacttctgcaactctactttcatagaagtacaataatatccaacaaacaagaccacaatataaaacgctggagacagtgncagagacctatcactgaatttcctacacagtcttaagcatagcacttgttttcctcagctaataaagactgaagctttaagctactgattatcacagtgtggtccacagagtcctgggcatctctgtaatgctattaaagcaggtgtgggaggtgaaatattttcgtaaaataaatactaagatgtcacaggcctgtgctgatattttcaacaatgatagaaaagcaaggtggatgtagctactagtaaatcttaaatatatactcaggaaatctgagatttcactaagtaaatcttacatatacttagtgaaaaccaaggcaatgatag

SEQ ID NO: 148 - DNA, 661 bp, Homo sapiens
  EIF4G3
  misc_feature [331]..[331]: Chromosome 1, SNP identification no. = rs6681064
  misc_feature [331]..[331]: allele = g, in linkage disequilibrium with rs4654874, respectively
  misc_feature [331]..[331]: n is a, t, c or g
agaaagaatccacagatcctctaaaagaagtggcacgccgctgtaaattccacaagacaggtgagaaaccgtgagttccccaagtgtaaaagcaggaaaacccgcctccgaacacacattcccactgaaaaaactgaaaatccagattacaggagaaggatttaaccttacctagaactaaagcagatttagtgcggaatatgaaagtagaagcagtagcaagaagagctttgtaagcactcacattctccagctagagtccagggaagctatccctgactatatctcagaggggccctcagggaaggaagccggcagaatctgggagggntcacagtgtgaaagaagctgccaactcaactgtgtaataatttcaaccagacgcaaactctctcaagcagttaagaatctgcggcagccaactaaatgccccatcgagaaaaagccacactcaaaacaatataggaaattttttaaaatattaaaataaagaacaataatttgtaaggcagccacagaaaaaatttttttaatgtatatatgtatgtatatttagaggttgcccttgctccaatccctcctcattgaggccaagttgggaggaatccacctaattctaagatgctccatcatgacagaaggaaaagagtggaacttgttt

SEQ ID NO: 149 - DNA, 661 bp, Homo sapiens
  EIF4G3
  misc_feature [331]..[331]: Chromosome 1, SNP identification no. = rs6659152
  misc_feature [331]..[331]: allele = g, in linkage disequilibrium with rs4654874, respectively
  misc_feature [331]..[331]: n is a, t, c or g
aattactggcttgagccaatgcgcctggcccaaacaaagtctcgctctggggtacagtggcgtgatcccggctcactgcaacctccaccccctaggtccaagcgattctcatgcctcagcctcccgagtagctgaaaccacaggtgcacacaaccacacccagctaatgttttatattttttagtagagacaaggtttcaccactttggctaggctggtcttgaactcctggcctcacgtgatccgcctgcctcagcctcccaaagtgctggaattacaggcatgagccaccatgcctggccccaatcataaagttttaattagactccangaacacaggtaatggaatttccaaagcagagccatccatcctgggagcaagaacagaggaaaagacctgctgagttagattcagggacgagaactgggaagaaagagaaattgagtcgggggggggaagggaactagtgggccaggtgcagtggctcacgcctgtaatcctaacactttgggaggccaaggcagaaggatcacttgaagccaggagtttgagacaagcctgcacaacatagcaagacctcatcactacaaaataaaccattagtttgatttttttaaaacaaagagaactagtggttttataaaaataaagttatagtag

SEQ ID NO: 150 - DNA, 661 bp, Homo sapiens
  EIF4G3
  misc_feature [331]..[331]: Chromosome 1, SNP identification no. = rs6426658
  misc_feature [331]..[331]: allele = a, in linkage disequilibrium with rs4654874, respectively
  misc_feature [331]..[331]: n is a, t, c or g
agtcacagtatgtgttttattctacattacgaccatccaattattcttactctgttacttcaaaaacagatatttaatgagcagtactctacacaaattgaagtacactttaatattattcatcacccattcaacagctgtatttgtgatgccattctatcaaccaaactctaaaaatatttatcactataaaacagaattatagtatgagacaattttgccaagtaaaccaatttcacataatactctgtaaactgaaatactatcttagtgattgcagtgatggaccatacaaagtggctgctgacatggcactggcagaggtggggtncggccgcaggccacaggtgctcaggtatagacaccaaggcgaatggtacatggggcctgtggccctgggatggtaccaggttcccgtacttcggcagtaggctcagattggcaccaccggagatcgtgtccccaggatctgccccatgtcagggtgtctgctgagcctggcactcctggtggctgggcctgggcccagaatctgctcccagaggcgccaccctggcagggtcgtaagccaggcaagggggagccctggggctgcagggggaccctgcaacgacatcacccctgccctggatgccagtccaggcccggtgagggcctggag

SEQ ID NO: 151 - DNA, 661 bp, Homo sapiens
  EIF4G3
  misc_feature [331]..[331]: Chromosome 1, SNP identification no. = rs6685914
  misc_feature [331]..[331]: allele = g, in linkage disequilibrium with rs4654874, respectively
  misc_feature [331]..[331]: n is a, t, c or g
cagcccagccaggtatgcataggctcagggcagcactgacccgctgggtcccttccagcttggcccctccaaactttgggtgccaaagaccacaggagagtggccaagatagggcaggggggcagttcagcgatagcctgtgggcatcccttggcacaagtaacctgggggccataggcagtggtgggaggcaaatgggctcctgtgccagaaggggcgagtcctcagtgaggccccaccttttgccagggaggttctgaaggctaggggtgggctacccatcccatggaccagagtggggacttgtggtgccttttctgggctgcccacngaccaactggcatgcaccacctcccctgtaaggcccataaaagcctcaggctcaaccagagcagggcagaggaaggagagacatcaggatgaccagctgtagagaggagctaccctctctagggcctcctctctgctgagagctgcaaacactggaatgacctgcctacagagagaagccacctgctccagggcctcctctctggctgagagcaacagacatcaggacgaccaaaggcagagaggagccacccactgcaggcctcctctctgctgagagctgcagagacaatgggacaacctggctgacgagaggagccacccactctag

SEQ ID NO: 152 - DNA, 661 bp, Homo sapiens
  EIF4G3
  misc_feature [331]..[331]: Chromosome 1, SNP identification no. = rs6684976
  misc_feature [331]..[331]: allele = a, in linkage disequilibrium with rs4654874, respectively
  misc_feature [331]..[331]: n is a, t, c or g
aatttaactgtgttgttattacagttctgttaaagcgaactaaatatggtctgagaaggactccgtacttttaaatctgagtccctgtggatgaaccctaactcagcttaaaaggcagacaagactgaaaacctaaagagtatgcagctgtaaaaacagctgagtcttggccaatcccagcagccatacttcaaccaatcatagactgctgagtgttcaaacaaggcaaacgtcaccctgtaaccaattcaggtgtttctgtacctcacttctgatttttttttttaacactttccctttttttggtctataaatttgttctgatcagaangtacccctagagtctctatgaatttgccgtgattctgggggatgcctgcaccagtcattcactgctcaattaaactcctttaaatttaattcgactacattttaattttaacagttatgaatatgtttcacagtccagatgtcttatcacatttactttgtatttcccctttcctgactttctctcagggatgtcagctgctttctgcagttattaatctctagattacctccgcatcctcctttttatttttattttttgtagagaccaagtctcactatgttgcccaggctcatctcgaactcttgggctcaagctatccttccacct

SEQ ID NO: 153 - DNA, 661 bp, Homo sapiens
  EIF4G3
  misc_feature [331]..[331]: Chromosome 1, SNP identification no. = rs6668370
  misc_feature [331]..[331]: allele = t, in linkage disequilibrium with rs4654874, respectively
  misc_feature [331]..[331]: n is a, t, c or g
gtctgctcacttcccccacaacacgctctgaatcacatatacatttttgcaggaactatcacaagcactttaaattgaagagtcaaactgcacaatttcttcattattcttaaaacttacctgttctgtttctcatcctaaaatttactgacacatgctaatctctgcagctgaactgaattagcaattttcagaaccataaaaatctaaaaatctgaatgtcacaaccagataaaaaataaattagtggcactaaagtgagtttttcccccaaatctgtgggaaataaatgaagtgtgatattcccaagaggtaaactggcaagaaaaangctgacagagtttttcatgacttcttaaaacagatgagaggtagccagagaaataaacaagagtctcccaggatgcatccaaaagaaacagctgttcaaatgtaaaagacaaaatcctaaaccttttgcctttgacaggatttaagtgaaaatgaacatcatcaacaaaagactgagcctacataaaacagaagtaaagaaatgcttacaaaatcacaatcagtttggttcttacaaaattctttagcttgctgtaatagtgctgaattaatacttagataaaatgtgggttccagccatgtgaatttgccaaacagaatgtaaaactta

SEQ ID NO: 154 - DNA, 661 bp, Homo sapiens
  EIF4G3
  misc_feature [331]..[331]: Chromosome 1, SNP identification no. = rs6703227
  misc_feature [331]..[331]: allele = c, in linkage disequilibrium with rs4654874, respectively
  misc_feature [331]..[331]: n is a, t, c or g
cattagattaggcaaaatggtggcaaaacagaccacaaaagaatgcaacacaatatttggtggccattctccctggtattcatgtactctggtttctaaaggcacctggtaaaatggcatatagaacagcacttgaggatttaacaagtgagatgctaggagaccatcttttcttaaatgcaaactatgcatttgcgagcagcctatctttcagaaaacttaagtcctttgggccaactgcttgggtcaaatcacaacttgaaacagtaagaatttcaaatggaaaactaagctatttcccttacatgccagttatcaactgcttgtcttncatatcaaaattcactgtttgcctgtaataagaaaatggatctgagctctataaatattttaacatttcagctgacacaacattaagttttgtcagtagaaggctctagagatatgtagaaggaaagggttttgctccctggttcctggttcctggttcctggttgctcctgcagcccagatagcttctccaaaagatggcttctctagtgactagctcccctcatggacatagcttcatcagagcaagatttctgcttcagtgcacagcaagcaacagtacccagcagccaagagctacccctggtattccctcaggaagacacgcagc

SEQ ID NO: 155 - DNA, 661 bp, Homo sapiens
  EIF4G3
  misc_feature [331]..[331]: Chromosome 1, SNP identification no. = rs964466
  misc_feature [331]..[331]: allele = t, in linkage disequilibrium with rs4654874, respectively
  misc_feature [331]..[331]: n is a, t, c or g
ctgtaataagaaaatggatctgagctctataaatattttaacatttcagctgacacaacattaagttttgtcagtagaaggctctagagatatgtagaaggaaagggttttgctccctggttcctggttcctggttcctggttgctcctgcagcccagatagcttctccaaaagatggcttctctagtgactagctcccctcatggacatagcttcatcagagcaagatttctgcttcagtgcacagcaagcaacagtacccagcagccaagagctacccctggtattccctcaggaagacacgcagcacagtggcttttctaagaaaccnccctgcgaacagctttccctcggcaccctagagggcagaattctcacaagttctgagggtggattttcagtaacttccactgaaatggcaccactcccattcagaaagccacaccgtgccctctccaacaaggtcaagatcttagcccagggtaggggtagcagtctctcacctaaaactaccacaaaaaataagacgtaggtttggtaggccttttttggatgtagaggcaacatatatactacatctgaatgtgccaccttaaccgactacagagtcacctaggaagtttccaattttgagtagggaacacaatatacgaaggttata

SEQ ID NO: 156 - DNA, 661 bp, Homo sapiens
  EIF4G3
  misc_feature [331]..[331]: Chromosome 1, SNP identification no. = rs10493006
  misc_feature [331]..[331]: allele = a, in linkage disequilibrium with rs4654874, respectively
  misc_feature [331]..[331]: n is a, t, c or g
tgtgggaaacagatatgcagtaaggagccttttagccattgtgccctgcatcagctcttggctataagagattggtgctggagaagaaagctttccccaatacttcatagggcacatttccagcaagttccagaacaaagagtttcagcaagttctgaacagcaccacagtggctcttctaccacagcctttggctcaaccctacagagaaaggctccctatctgagcctctactcagccctaaggtaagcgtttgctctttatatcttatattcttgagagtgcatagtttttctctcctgattagactcagattaatacaccttaatantaagttgagaggttgtgttcagtctaagaaacccaacacaggaacctcatttaaacaatcaggagctcattttgttttgttttcaatgtttaaaactccaaattatataggaatgatttagactaagtttaggtatagcactaagttcttgacaaacttatattcattaatagggctatttcagtcatggtttggcaaactgtacattccttttccaaacattctatagtctaaaatataattaatcagcacatggccaggagatcaaggccaatctgagcaacatagcaagaccccatctctacaaaaaatttaaccaaaagaaaaaaa

SEQ ID NO: 157 - DNA, 661 bp, Homo sapiens
  misc_feature [331]..[331]: Chromosome 1, SNP identification no. = rs6426665
  misc_feature [331]..[331]: allele = c, in linkage disequilibrium with rs4654874, respectively
  misc_feature [331]..[331]: n is a, t, c or g
accaaatttgcccatgacaattaaatcatagtaaatttttaaaatactattgataaaaaatattaaaatacattgtatgtttatcaattaaactaacaaaagtaagttaaaataaaatctttgccccattattggcagggatctaaggaaacaggacacagataaaatactgtgaatgggttactttactatcttcccaggattacagagcaatgtgtcaccaagtgcttcaaaaccatcaccccaaaattatttcactttagagtacataccctaaagaaaatctcacctcaaaaattaggaacttaaagatatatccagtgcatttcanatgatggcaaaaacaggtagaaatagcaaccaatgagaaaatgaagtaacacaactgaactaaatacataaaaaatataaacctgtacactagtatcaacagaaatatatgaaataattaggaataataaaggaaaaatacatctgcagagttgtaaagactgtaagctatgtttcttacagaactgtaaagaggtactgacatatactaaagaatactgaaagaacaatttaaattattacacataaaattagtatccattggtttgtcagaaaactattatattgccccataaaacacaaatgtttgagagaaagagaaaaagcattg

SEQ ID NO: 158 - DNA, 661 bp, Homo sapiens
  misc_feature [331]..[331]: Chromosome 1, SNP identification no. = rs10916927
  misc_feature [331]..[331]: allele = c, in linkage disequilibrium with rs4654874, respectively
  misc_feature [331]..[331]: n is a, t, c or g
tgtttttattctatatattttatataatatgaatgaaaacatactgctttaaaaagtatagtaattaatcagttactaaaagaataacaggaaactccaggattcctatcaagtaaattaatttttcagcaacaaatgattcctataaaggtaaaaggcacatggtttatatgtgtgacatcccttattttctaaatcccaagataaagtttatttagtgaggtcatctcaaaacatttcagcagctgcaactcatacacagaaataacaaagttcaattctgggtagttttgaaagatcccaaagcttttcttatgtgggtaatttctanactttatgctcctcaagcagcagaatagataagtcaagtatttttcccttcattaatattttgtatcatcctagttcttccttcaggtcatttatttccccaaatctacagatattgagaactaaataaaagctggtctgctcaactaaaaggagcactacagtggatatgaggaaggaagttttacttatacatgacaccatttgaattctgttaatatcattgccaatccccaaccaccaagaaaaaaagagaaagaaaaagaaaatggcattcctccttgctctactcttacctatacttaataggttgaattacatgaaattccag

SEQ ID NO: 159 - DNA, 661 bp, Homo sapiens
  misc_feature [331]..[331]: Chromosome 1, SNP identification no. = rs6658526
  misc_feature [331]..[331]: allele = t, in linkage disequilibrium with rs4654874, respectively
  misc_feature [331]..[331]: n is a, t, c or g
agccagggctgctttacagcgtaaagggaggaagccaagatagtaaaaacatttttatttctttcactgctaatagaatcgtgtagcactatattatgattccaaggtcctttcccagttcaacagcaaaaccttgatcagttaggaatgactgtcttgaataaaaaaaaagagtggtaaggtttgtctattctactaaatccaatcatttagtaaaactacacaaaattagtaacagtctacacaagcataacaaattaactccttactttttcaaggaatacatatattacaggccaattgctgtccttgtggtcagaagcaggaacanttgacaactcctcagaagatgtggagtgaagacttttaacatcatctgaggagtgatggcttttaacagacactcacattctctttcttatgttcaaaatccatagtcagagctttccaccaagacaaggttgtatgcgagtctggagattactgatatacattcagtgactgcaatggaattagtcatttaccaacttacaacttaattttttaaaactaatgccttactattttcctgttgatcttcagtcagttgctaatcaactagttatttaactgatccaaggtaagtgaattctattttaattccaaggtattaataaatctc

SEQ ID NO: 160 - DNA, 661 bp, Homo sapiens
  misc_feature [331]..[331]: Chromosome 1, SNP identification no. = rs1354792
  misc_feature [331]..[331]: allele = c, in linkage disequilibrium with rs4654874, respectively
  misc_feature [331]..[331]: n is a, t, c or g
tattttcctgttgatcttcagtcagttgctaatcaactagttatttaactgatccaaggtaagtgaattctattttaattccaaggtattaataaatctcagattttagtattcaactataagcataaattcaattatattatcaaaaccacaatattaagttcctctgacacagatccaaatcatgtaagatgtgtgatatatgcctccattctgaggctgagtcacgaattatcactttccaaacacaaacttgaaagaaggaacataaacagaaggtaaacagattcaaggcatccaagtaggctaaacagcatcaataaaagagcanggggttgtttctaccaaaaaaaaaaaaaaaaaaatttagcatggtggtgtgcacttgtagtcctagctctagggaggctgggagagaaggattaagcccagaagttgcagcaagctatgatcatgctactgcactccagcctgggagacagactgaaactctatcttaaaaaaaaaacagtggtggggcggcggggggaagaaaaaaagaaaaaaatgagaatgggttttggtgtcagagacctaagtttgaattctggctctactatacagaaactatataagcaaattacttaagtttagtttcctcttctgtaaaagtgaaaagtaa

SEQ ID NO: 161 - DNA, 661 bp, Homo sapiens
  misc_feature [331]..[331]: Chromosome 1, SNP identification no. = rs12567861
  misc_feature [331]..[331]: allele = c, in linkage disequilibrium with rs4654874, respectively
  misc_feature [331]..[331]: n is a, t, c or g
agtgagccgagatcgtaccactgcacctgcactccagtctgggcgacagagtgaaactctgtctttaaaaaaaaaaaaaaaaaaaaaaaaacagaatacttcacatgaacttgtagattcaaaacagacctgtattcaaattacatgtctccaagtcccattttcctttgttgtaaataaaggttgtcataagtattaaataatatcatgaatgtaaagcatttagcacagtgtctgggacactgtagtcactcaataaatgttaaaagatccaccaaagttcaaatccaacctctaccacacactacctggataactttgggcaggatangtcacctctgtgtctatttgccaactaacaatggggaatgtaattatacctacctcatacagttgtcataaggattgagttaatacacataaaatgcttagaaaagtaactgttacacagtaagtgttacttatagtaataaagaaaatgttctacagattgagtatccctatctgaaaaatttggaaccagaaatgtttcagatttcagattttggaacacctgcaaacagttaccagttcagcacccccaatctgaaaatccaaaatctgaactgctccattgagcatttcctttgagaataatgctggtacacaaaaagtttcaggt

SEQ ID NO: 162 - DNA, 661 bp, Homo sapiens
  misc_feature [331]..[331]: Chromosome 1, SNP identification no. = rs10916930
  misc_feature [331]..[331]: allele = t, in linkage disequilibrium with rs4654874, respectively
  misc_feature [331]..[331]: n is a, t, c or g
agcacagtgtctgggacactgtagtcactcaataaatgttaaaagatccaccaaagttcaaatccaacctctaccacacactacctggataactttgggcaggatacgtcacctctgtgtctatttgccaactaacaatggggaatgtaattatacctacctcatacagttgtcataaggattgagttaatacacataaaatgcttagaaaagtaactgttacacagtaagtgttacttatagtaataaagaaaatgttctacagattgagtatccctatctgaaaaatttggaaccagaaatgtttcagatttcagattttggaacaccngcaaacagttaccagttcagcacccccaatctgaaaatccaaaatctgaactgctccattgagcatttcctttgagaataatgctggtacacaaaaagtttcaggttttagaacatatcagattttgaatgttttgattagagatgctcaacctgtataaactgttctgttgagtttttcaccagttaactcctctgcctaggtttggtcaatttttgttatctatttcatggctcattacactatgtagctgtaaccttatcctccacctcaaaggctttaactgatgtatgtacactcattccaatatcttgtaagatgcagtccaaa

SEQ ID NO: 163 - DNA, 661 bp, Homo sapiens
  misc_feature [331]..[331]: Chromosome 1, SNP identification no. = rs6426667
  misc_feature [331]..[331]: allele = a, in linkage disequilibrium with rs4654874, respectively
  misc_feature [331]..[331]: n is a, t, c or g
tgtacttaaaacaacgtatcaccatcttgcctggtaaaatgagcactcttaaagacaaggatcatagtgtccaccactgctttctcacattaccaggcacaaaaccttgcatatagctctcattcaatatatgttttctaaattaagtttatctcaatattcttaaaagctctgcaacatctccaatgtttagtcccctggaaaagcaagctccaagaggccagaggatctttcagttattttgtacttaggaaaacacagaaaagtaacttcaaacacattttaggctgtcacaacaggaaaggctgttctctatttagaaagaaaggcnaaacagaaaaaagactgagtctaactcgtaggaatttttaccgggggagaggagggggtaggaaagcagcagcagcatctggatttcacaaatatttgatgacactgactgtgaggtttgtcgaaagaaaagaggatgagctaatcatgggtaagaatgagattttttttgttgttttacgtaaaaggtgagcacaggaagaatagagaaatgaaatatactcaatcatggttatcttataaatcattatagaattcagtcaaagatgatctttcaaagtaatgcaagacttgaactcagctaactgtcctatattaaaattttggaaaa

SEQ ID NO: 164 - DNA, 661 bp, Homo sapiens
  misc_feature [331]..[331]: Chromosome 1, SNP identification no. = rs6426668
  misc_feature [331]..[331]: allele = c, in linkage disequilibrium with rs4654874, respectively
  misc_feature [331]..[331]: n is a, t, c or g
aggagggggtaggaaagcagcagcagcatctggatttcacaaatatttgatgacactgactgtgaggtttgtcgaaagaaaagaggatgagctaatcatgggtaagaatgagattttttttgttgttttacgtaaaaggtgagcacaggaagaatagagaaatgaaatatactcaatcatggttatcttataaatcattatagaattcagtcaaagatgatctttcaaagtaatgcaagacttgaactcagctaactgtcctatattaaaattttggaaaaataaatttaagaccacaaaggaaaacggcaagccacaacttattactgcnaatacaatattatttttcaataatctaggaaaattttaaggccactgtggaaaaccatttgcatctagtgattgaatcaggatagaattattaccaatttgcatatcaggcagtggcaactaagactgtggaaaaaaaaagtttgatgcttactttctctaattgctacaataatgtataaacatgatttttgttaaaaaaaagaaaaagtagtgccctctttacccttcaaatcccactccactccctatggcaaaatgattaatactctgaagcacattattacaaacctttctatacacttacaaatgtgtaaaaataatagcaaca

SEQ ID NO: 165 - DNA, 661 bp, Homo sapiens
  misc_feature [331]..[331]: Chromosome 1, SNP identification no. = rs6692244
  misc_feature [331]..[331]: allele = a, in linkage disequilibrium with rs4654874, respectively
  misc_feature [331]..[331]: n is a, t, c or g
agaccacaaaggaaaacggcaagccacaacttattactgctaatacaatattatttttcaataatctaggaaaattttaaggccactgtggaaaaccatttgcatctagtgattgaatcaggatagaattattaccaatttgcatatcaggcagtggcaactaagactgtggaaaaaaaaagtttgatgcttactttctctaattgctacaataatgtataaacatgatttttgttaaaaaaaagaaaaagtagtgccctctttacccttcaaatcccactccactccctatggcaaaatgattaatactctgaagcacattattacaaanctttctatacacttacaaatgtgtaaaaataatagcaacaacacaataataaatattcaatgacatgttttcctctccacttatcaaaacattagagatctttccaagtcaataaacatacctacttcattcttgttctaaatgtttaagtagtacttcatggtgtagatataactacattcttcttaactattaattttttaaaactccttaatgaaaagaactatataacctactaacattttaagagccaaacatgtatgtgcaaacataaaataaaaaacaaactaccttctttttgctaagtttcagatatgtcaattaatataa

SEQ ID NO: 166 - DNA, 661 bp, Homo sapiens
  misc_feature [331]..[331]: Chromosome 1, SNP identification no. = rs7521711
  misc_feature [331]..[331]: allele = g, in linkage disequilibrium with rs4654874, respectively
  misc_feature [331]..[331]: n is a, t, c or g
agtgctcaaaaggaaatgctctactggacagcacggttctgagccaccaatcatcaggaggctcccaccttaaggccttggagctctgcaatatctattgggaaggtttatgctcttcctcttcatccatgaacagctgaatacatttcatggttcaggtatcacctaaaatggcatcttctcacaggaactgtaggcctcacagcatggacccctctaagtctccctgggcacacgccacatgcagatttcggtgctttcccaaccttcttggtataaaggtcgacaattctattaccaagggctcatgacagcctagttttgttagagnctgtattgtagggaagtctatgatggtattgtcacatgctggatcattctgagtgcctgtagacaacgtccctggaagagatatttttattttttaatggagacaggttttcactttgttgtccaggctggagtgcagtggtgtgataatggctcactgcagccttgacctctgaggctcaaatgatccttccaccttctctcatatcttaacagaaatgatcagttttaaatcttgtttctctatttctaaacactacaattttcattattttttactttcatatgtttttctaccaccatctagtagagtaccatagatggtattgaa

SEQ ID NO: 167 - DNA, 661 bp, Homo sapiens
  misc_feature [331]..[331]: Chromosome 1, SNP identification no. = rs1567128
  misc_feature [331]..[331]: allele = g, in linkage disequilibrium with rs4654874, respectively
  misc_feature [331]..[331]: n is a, t, c or g
agatcacatcattgcactccagccagggcaacaatagcaaaaactccgtctcaaaaaaaaaaaaaaaacaacaaaaagacactgccgagaaagcagagaaaggagaatgctcgcactgctgctgggaacataagttagtaaggccactaaggagaacagtataaaggttcgtgaaaaaactacaatagatctaccatatgatccagcaatctcactgctgggtacatatccaaaagaaaggaaatcagtgcattaaaattataagtgaattctacagcatttagaatttatagcattcatttatttattaatgaattcagtgcagagatanctgccacccgtgtttactgtagcgctattcacaatagccaagatgtggatcaatgtaagtatccatcaacagaataatggataatataaatgtgtcatatatacacaatgaaatatcactcaaccacgtccatttgcaacaacagaaatggaagaggaggtcatgatgttacatgaaataagccaagcaaagaaagaaaaatatcatgtctttactcctatgtgggagttaaaaaaaaattcatctcatgtaggtacagagtagaatgatggttaccagaggctgggaagcatggaagggtggtgagacatatgaagactggttggttaa

SEQ ID NO: 168 - DNA, 661 bp, Homo sapiens
  misc_feature [331]..[331]: Chromosome 1, SNP identification no. = rs10799719
  misc_feature [331]..[331]: allele = a, in linkage disequilibrium with rs3117048, respectively
  misc_feature [331]..[331]: n is a, t, c or g
ggaccaagtaccaggggctctctcgaaggaggaaagataaaatcacaaaataatagttcccgttatttatcaactgcccattccagctgtaggctatttatatgatctctaatcttcaccaaaaccctgcagtgtaggaattgccattcccacctgacagaggaggctcagagaggcgaactcacccgcccagggtcacacagcaatcagtgatgaagctaggataggcctcagggctatgcctcctgcctatgacactgtcccaaagtgcaacctgcagaatgaaacggtgcggaattgatggacgggagctaacagccacagcaaggcngctctgggctcttttctgggcggtctgaagcctttcagctccttagccagggtcctcctggtctttctaaaaccaagtgtcctgggcttagaaacccaaactatgagagggcagtggagggagcaggagagagtcctgttgctagagagggtgcatccccccaccacttgaagtatgaagtaaaggtggcccctggggcttctagtacctgtcagggcacaaggtgggtcttctgggagatgaggtggaggtgtggggggaaggaggaagcacctgaagccaacgtaaggtggagcctcttggaggaaggtggccctgcctaaaaccccc

SEQ ID NO: 169 - DNA, 661 bp, Homo sapiens
  misc_feature [331]..[331]: Chromosome 1, SNP identification no. = rs6658920
  misc_feature [331]..[331]: allele = t, in linkage disequilibrium with rs3117048, respectively
  misc_feature [331]..[331]: n is a, t, c or g
accagatactcccctaaaacccagagcaacaggacaccctccttcatggctcagggaatgggccctggtcaggagctaggagctggtcctaaggctatctcaggatgccacagatgcctccagggatgctctgaggttcctgcaggcctggcacagatgagcatcatggaagggaagggagagtggttctgggggcagcaagactcaaaggcctcacattcccaggcctcaaagagccaccttgttctcagggctttcatgacagcacccccgacccggccaccccagcagccacgagccacacccctctcaaggctgctattgacacagncctgacgccaccaggctgggcagtgaggccggcggctccccgcgaagtgagttccacacatacttctgggtttcagtcagccagctctgggtgctggggcagctggccccgggagcaggagggggtggcagggccaaagaggccaaggcccaggcggaagcaacattccagcagggccgggaccctcggcgcagcctccctcttcttggcaggagcaggagcgagaggagaaaaaggccagggtaggccctgggacagggagaggtaggcccagcagatacttgggaagctgccggggaaccaagtcatattcacttcctcctccagtct

SEQ ID NO: 170 - DNA, 661 bp, Homo sapiens
  misc_feature [331]..[331]: Chromosome 1, SNP identification no. = rs10917067
  misc_feature [331]..[331]: allele = a, in linkage disequilibrium with rs3117048, respectively
  misc_feature [331]..[331]: n is a, t, c or g
gggtactgaactgagctgcccaccccacctgcaccattttccatgtaaatcactcacacaccaactttgagtcacataaatcacagccccagagccagaaccacaccaactcacacactcaggcccagacagacagaccctgccaaagccccatcacagatgctcgggtgggtggtaaaatcacagccccatgatctgtctctgacccaaccgcaggcagcaaacagcaccaagcccccagacctattcactgcctactcttcagctcccctcttctgcctgaaatttccagggcagcccgaggctgatgggtggagaggaaaactatgtntgtgtagctttgaggaaaaccttttgagtaatgatagaggaggagaataaaactgaagtttccattgtttcctgtgagagttgctaggttccagaaactcatggctgggtttgcagccaggagtgaggtgagctgtggacagaaggaaatgcccagctcactgggcggcaccaggcctggctccggaagctatgttccctgtgataggggtccgcaggctcccaagcacattggggcctctcatccaggcatctgggggattgaaaaaacactggcatcctgacccccatcccagatagatcccctatctccaaaagatatctccaaaat

SEQ ID NO: 171 - DNA, 661 bp, Homo sapiens
  misc_feature [331]..[331]: Chromosome 1, SNP identification no. = rs7544500
  misc_feature [331]..[331]: allele = t, in linkage disequilibrium with rs3117048, respectively
  misc_feature [331]..[331]: n is a, t, c or g
ttatgagacagggcctcactttgtctcccaggctggagtgcagtagcataatctcagctcactgcagcctcgacctcccaggctcaagcaatcctcctacctcagcctcccaagtagatgggacgaaaggcgcacgccaccacgcccagccagtttttgtattttcagtagagacgggatttcgccatgtcacccagactggttctgaactcctgagctcaagcaatcctcccgccttggcctccaaaagtgctgggattacaggcttgagccaccacgcccagccaaaaagctgcatttattttctagagtcacagaagtgacatcaaantgtctgtttgaaaaggaccacaccagatttgtttaaatatacaaaaaaatttaatttcatgcagctatacccaatgataccaaaggatgcagagaccattggactgggcaactgataccatagatgacctttgaggaaatttctccctttgcttactatttactggaaagagcatgttccaggtttactctgccctgtttagaacactggtattgtggggcagcccaaactcatgttaaataccatccttgcttttcctaatttactacatattttggagaccaagatttactcctctttctcttggaatttgtttaataaatagtaaga

SEQ ID NO: 172 - DNA, 661 bp, Homo sapiens
  misc_feature [331]..[331]: Chromosome 1, SNP identification no. = rs10917075
  misc_feature [331]..[331]: allele = t, in linkage disequilibrium with rs3117048, respectively
  misc_feature [331]..[331]: n is a, t, c or g
gaagggcatctgtgtccagcctcaggcaactgttggcactgtgtcctgagcctatacctggccttgagccaacttgcctgccagactggaaaatctctcctgggcctggacctggccctcccccggctgcagccttatacccaccagagcacaatgagtcacgcgtcctcctcacctaacaccctcaaggatatggggcccctgctcacccactgccaaaaacagcacttccccaagtccacatgtggcaggcacaagccagggcagatctgagctcaggagcactgggcaggagtgtcttggcaggagtccctgccagggagagcttccngcccgccaagctacctgagggctttgcaggtagagcagccaatctgggaggcagcagggctcccatcttgatggggcccgggaaagtccctgtaaggagggtgcaggaggacggtcacaggcaggcttatgtacaaccttgctgagagaacagcgcccacggaaggtaggacggcaagtaagaggcttgtgctgtgacctggggcaaacaggtgaacttctccaaacctcaatctcctgttctgtgaagtggaggtggggaggggacttccggaacactgttgacttgactggctcgcaatcacagcgagtgttcacaacgtgctccccg

SEQ ID NO: 173 - DNA, 661 bp, Homo sapiens
  misc_feature [331]..[331]: Chromosome 1, SNP identification no. = rs12410694
  misc_feature [331]..[331]: allele = g, in linkage disequilibrium with rs3117048, respectively
  misc_feature [331]..[331]: n is a, t, c or g
cctggctaacatggtgaaacctcgtctctactaaaaatacaaaaaattagccgggcgtggtggcgggcgcctgtagtctcagctattgggaggctgaggcaggagaatggcgtgaacccaggaggcggagcttgcagtgagtgagccgagatcgcgccactgcactccagcctgggcgacagagcaagactccatctcaaataaaaaaaacaaaacaaaacaaaataaatttttctgttcacttgaattttttcacagtgatacacttgaatagaaaatgcaggggtaggatgcagcagaaagagccctggcttgcgtctggagtcctggnttctattgtcagtgctatgccgttgaaccactctatgacattgacaagtcccagcctttctctgggccacactagccagtctctactggcctttccagagctcatacttaattagataattttcattgacttcaatccacacaagtgttatctactagatgtctgtttatttacatatcaaatctcctcccaccagccactgaggccctagagggtaggggctgtctccccagagcctggtacaggccctggcactttgtgggttcatggaaggaggagaggacagatgaatgattgccagcctgtgtctcagaacacctctgcccctga

SEQ ID NO: 174 - DNA, 661 bp, Homo sapiens
  misc_feature [331]..[331]: Chromosome 1, SNP identification no. = rs12410759
  misc_feature [331]..[331]: allele = g, in linkage disequilibrium with rs3117048, respectively
  misc_feature [331]..[331]: n is a, t, c or g
ccactgaggccctagagggtaggggctgtctccccagagcctggtacaggccctggcactttgtgggttcatggaaggaggagaggacagatgaatgattgccagcctgtgtctcagaacacctctgcccctgaagggtttggggttcctggacaggaacaggaagccttggatctccttgagactggtgcccactcatgcacctcctcctgcctgtgcccctggatgccctgagaggtgagggaggtggcaggagtaaagggtaactggattggaggctcagaggctcagaggcctccacttcctgcagtggagaccctgcccaagcctngctccagccctgacctctgactccaccaggagagtgccaggaaacagaccttaaggccggaaaccttccttgggcttggcctggacccaagctcctaccgggcatgggctgagccctgcctggacccagtggaccaaaaagcccacccttcttgctcagcctggcagagctgctctgctgtagcaacttggggacagtctttgcctctgaaaccaccaccagcagttccaagcagcctgccctggcagggaaggtgctggggtcaggagctctgggttcagttcccacctctacttctcagtgtctgggaaagcatgggcactttgccac

SEQ ID NO: 175 - DNA, 661 bp, Homo sapiens
  misc_feature [331]..[331]: Chromosome 1, SNP identification no. = rs8179387
  misc_feature [331]..[331]: allele = a, in linkage disequilibrium with rs3117048, respectively
  misc_feature [331]..[331]: n is a, t, c or g
cttgaacctgggaggcagaggttgcagtgaactgagattgtgccactgcactacagcctgggtgacagagcgagactccgtctcaaaaaaaaaaaaaaaaaaaaaaaacacagagagaggttaggtgtcttgaaaaagatcacacaattatggttgaacaggaattcaaaccaaatctacgtctgtctgatacaacttcccacatttcaaccagagcagagggtccctggtacgatgccgcagagctgtggaagcacaaaggcaggaaggacgggtcccaacggagaggtgctcagggagggcttcctgggggaggtgacagtcccaaccngcctagaaagatgaatattgaagagggcagcagtgggaggcatctgggagggagacatttgggccaaggcttggaggctggccgactgagcccctgcccccaaatcactcatcgaccccttgactcctccctgccattccctgcatttctctttcttccagctcccctctgatctctggggtccatccttctctttttaccttctttctcttgagttctgtcctatctcctcattccccagtcatccattcattcacttgttaattcatccactcatctaacacaaactgagcaccagctctgtgccagggcattggaacctgagtgagg

SEQ ID NO: 176 - DNA, 661 bp, Homo sapiens
  misc_feature [331]..[331]: Chromosome 1, SNP identification no. = rs6699127
  misc_feature [331]..[331]: allele = a, in linkage disequilibrium with rs3117048, respectively
  misc_feature [331]..[331]: n is a, t, c or g
gacaacgccccggccgtgattagcgtttttttttttttgagacagagtctcgctctgttgctcaggctagagtgcagtggcgtgatcttagctcactacaagctctgcctcccagattcacgccattctcctgcctcagcctcccgagtagctgggactacaggcgcccaccaccatgcccggctaatttttttgtatttttagtagagtcggggtttcaccgtgttagccaggatggtctcgatctcctgatctcatgatctgcccacctcggcctcccaaagtgctgggattacaggcgtgagccaccgtcccagcatcgtgattagcntttttatgaagggttatctatgctacagccattgtcttaagaacttgctgcagaatttaagaacttgctggtcaggcaggtgactcatgcctaaatcccagcactatgtgacagtaacaccctgtatgtacaaatttttttttttttttgagacagagttttgctcttgttgcccagactggagtgcaatggcgcgatctcagctcactgcaacctctgcctccagggttcaagtgattctcccgcttcagcctcccaagtagctgggattgcaggcatatgccaccatgcccagctaattttgtatttttagtagagacggagtttctc

SEQ ID NO: 177 - DNA, 661 bp, Homo sapiens
  misc_feature [331]..[331]: Chromosome 1, SNP identification no. = rs12745683
  misc_feature [331]..[331]: allele = g, in linkage disequilibrium with rs3117048, respectively
  misc_feature [331]..[331]: n is a, t, c or g
tggcgggcgcctgtaattctagctactcggaaggctgaggcaggagaatcgcttgaacctgagaggcagagtttgcagtgagctgagatcatgccactacactcctgcttgggtgacagagtgacactctgtcccaaaaaataaaataaaataataaaataataaaatgaactgcatcttcaaactaacaagacacgctcctagccagtcacaactcacggccatgagatgtttctggcgaaggaagcggtttagtaattcctgcaaggcaaactcctatgatggcaggatgtccaggtgtcctgataccacatcacaatatccgcttttnagacagttacagtcatgctttgatgtatttccacactaaaataccaaggataattttctttaaatcaacaaagtactaaattttcctttaaaaaggttattgtatttatggctgggcactgtgactcatgcctgtaatcccagcactttgggaggctgaggcaggtgggtcacttgaggtcaggagttcgagaccagactggccaacatggcgaaatcccatctctaataaaaatacaaaaaattagctgagcatggtggcgcatgcccgtaatcccagctactcaggaggctgaggtggaagaattgcttcaacctgggaggcggaggt

SEQ ID NO: 178 - DNA, 661 bp, Homo sapiens
  misc_feature [331]..[331]: Chromosome 1, SNP identification no. = rs11582921
  misc_feature [331]..[331]: allele = c, in linkage disequilibrium with rs3117048, respectively
  misc_feature [331]..[331]: n is a, t, c or g
ctaatttttgtatttttttgtagagatggggtttcaccccattgcccaggctggtcttgaactcccaggctcaagtgatccacctacctcagcctcccaaagtgctaggattacaggtgtgagccactgcacctggactcagattttgtctttcttgaaaacctccttcgacctcagcccatccgctcctccactgcccccaccctggttacctggagaacctctgcagaacccacactagcctccctgatggcattctggctcctcttcaaaccgtttcccactcagcagccagagacatgcttcaagacataagctggatcatgttctnctgtggaaaacccttcaaaggcctcctgtggccttgtgtgcctgccctgcaggaatctccagccccgcttctctgctcccatcccagagaagctccagtccttaaatttattccttgctgtattgtggctgggcaggggcaggctggatttcccaggcacctatgacagcaggcttctcccacttccggtgggagattgaaaggccggagggagagagaaacctccctcctgtcctccaaaaggtacttctctccctacacttcctccacggctcccaccagacgtgcctgggctgggcccagctttggcgaggtgacctctgctcctgg

SEQ ID NO: 179 - DNA, 661 bp, Homo sapiens
  misc_feature [331]..[331]: Chromosome 1, SNP identification no. = rs6698084
  misc_feature [331]..[331]: allele = c, in linkage disequilibrium with rs3117048, respectively
  misc_feature [331]..[331]: n is a, t, c or g
taggattacaggtgtgagccactgcacctggactcagattttgtctttcttgaaaacctccttcgacctcagcccatccgctcctccactgcccccaccctggttacctggagaacctctgcagaacccacactagcctccctgatggcattctggctcctcttcaaaccgtttcccactcagcagccagagacatgcttcaagacataagctggatcatgttctcctgtggaaaacccttcaaaggcctcctgtggccttgtgtgcctgccctgcaggaatctccagccccgcttctctgctcccatcccagagaagctccagtccttanatttattccttgctgtattgtggctgggcaggggcaggctggatttcccaggcacctatgacagcaggcttctcccacttccggtgggagattgaaaggccggagggagagagaaacctccctcctgtcctccaaaaggtacttctctccctacacttcctccacggctcccaccagacgtgcctgggctgggcccagctttggcgaggtgacctctgctcctgggctccagctaccagcatctcctctctctgtcctaccatcttgggagggagctgtactactctctgggttcccacatcttccctgctggcttctctgcacctccct

SEQ ID NO: 180 - DNA, 661 bp, Homo sapiens
  ELA3B
  misc_feature [331]..[331]: Chromosome 1, SNP identification no. = rs6688236
  misc_feature [331]..[331]: allele = t, in linkage disequilibrium with rs3117048, respectively
  misc_feature [331]..[331]: n is a, t, c or g
gacagagtttcactcttgttgcccaggctgaagtgcaatggcacaatcttggctcactgcaacctctgccacccgggttcaagcgattctcctacctcagcctcccaagtagctgggattacaggcatgcgccaccaagcccggctaattctgtatttttagtagagacagggtttcactatgttggccaggccagtctggaacttgtgacctcagctgatgcacctgcctcagcctgtcaaagtgctgggattacaggtgtgagtcactgcacccagctgaaatttacttacattaaataatgttaacaattcaattcctcagtgcttgncatatttctttttttcttttcttttcttttctttttttttttttttttgagacagggtcttgctgtgttgcccaggctggagtgcagtggtgtaatctcagctcactgcagccttgacctcctaggtccaagcaatcatcccacatcagcctcctgtgtagctaggactacaggcatgtgccaccatgcccagctaatttttatatattgttgtagagatggggtctcactatgttgcccaggcttgcctcgaacttctgagctccagtgatcctcctgtcttgacctcccacagtgctgggattataggcgtgagccaccatgcttggc

SEQ ID NO: 181 - DNA, 661 bp, Homo sapiens
  ELA3B
  misc_feature [331]..[331]: Chromosome 1, SNP identification no. = rs12049408
  misc_feature [331]..[331]: allele = g, in linkage disequilibrium with rs3117048, respectively
  misc_feature [331]..[331]: n is a, t, c or g
acgcctggctaattttttgtatttttagtagagacggggtttcaccgtgttagccaggatgatctcgatctcctgacctcgtgatctgcccgcctcggcctcccaaagtgctaggattacaggcatgagccaccgcgccctgccatatgaaaaattcttaagtctgagtggctaagacttttttctcagagttttttctggcgagagggtcaaagacgggtgcagaactcctgcaaatgcagtataggagtgaagcacaatatgatggaaacctcaacccatcttcacagggcttctggggtgagtagagagaaaagggagacccagacanaaggactggagtgacacgcaggcaggtgaagacagagggcagtggttctcaaaatgtggtacctgggctggcagtatcagcatcacctgggaacctgcagcaatgtgaattattggccaggcacggtaatcccagcactgccggaggccgaggtgggtggatcacttgagctcaggagtttgtgaccagcctggccaacatggtgaaaccccatctctactaaaaattaaaaaaaattagccaggtgtggtgacgcgcacctataatcccagctactctggaggctgaggcaggagaattgcttgaacccaggaggtggaggttgtagtg

SEQ ID NO: 182 - DNA, 661 bp, Homo sapiens
  ELA3B
  misc_feature [331]..[331]: Chromosome 1, SNP identification no. = rs7520526
  misc_feature [331]..[331]: allele = g, in linkage disequilibrium with rs3117048, respectively
  misc_feature [331]..[331]: n is a, t, c or g
gcctaggtaacatagtgagatgcccatctacaaaaaaaacttttttaaattagccaggcatggtggcactcgcctgtagtcccaactacttgagaggctgaggtgggaggattgtttgagcctgggagttcaagctcacagtggctgtgatttttgccactgcactcaagcctgggcgacagagcaagatgttgtctttttttttttttttgagacaggatcttgctctgttgcccaggctgcagtgcagtaacgccatcacagcccactgtagccttgccctcctgggctcaagcaatcctcccatgtcagcctcccaagcagccaagantacaagtgtgtgccacaatgcctagctaattttaaaattttttgtagagatgaagtctcaccatgttgcccaggcttgtctctaactcttgggctcaagtgatcctcctgccttggccttccaaagtgttgtgtttacagatgtgagccactttcctggactagaccttgtctgttaaagaaaaaaaaaaaaatggccgggcttggtggctcatgcctgtaatcccagcactttgggaggccgagccgggcggatcacgaggtcaggagatcgagaccatcctggctaacactgtgaaacctcgtctctactaaaaatacaaaaaattag

SEQ ID NO: 183 - DNA, 661 bp, Homo sapiens
  misc_feature [331]..[331]: Chromosome 1, SNP identification no. = rs4394607
  misc_feature [331]..[331]: allele = t, in linkage disequilibrium with rs3117048, respectively
  misc_feature [331]..[331]: n is a, t, c or g
ctggctcctcttcaaaccgtttcccactcagcagccagagacatgcttcaagacataagctggatcatgttctcctgtggaaaacccttcaaaggcctcctgtggccttgtgtgcctgccctgcaggaatctccagccccacttctctgctcccatcccagagaagctccagtccttagatttattccttgctgtatcgtggctgggcaggggcaggctggatttcccaggcacctatgacagcaggcttctcccacttccagtgggagattgaaaggctggagggagagagaaacctccctcctatcctccaaaaggtacttctctcccnacacttcctccactgctcccaccagacatgcctgggctgggcccagctttggcgaggtgacctctgctcctgggctccagctaccagcatctcctctctctgtcctaccatcttgggagggagctgtactaatctctgggttcccacatcttccctgctggcttctctgcacctccctcaccgagacagccaattccccagattaaattccctatacttcaaatacttgagatttctgttttctggtttgactctgactgacaaaggcagacttccatcctgaggaggaagccagcagccggtgtggggcagagccagtggaacggcaga

SEQ ID NO: 184 - DNA, 661 bp, Homo sapiens
  misc_feature [331]..[331]: Chromosome 1, SNP identification no. = rs12405048
  misc_feature [331]..[331]: allele = g, in linkage disequilibrium with rs3117048, respectively
  misc_feature [331]..[331]: n is a, t, c or g
tggtggctcagatctgtaatcccagcactttggtaggccgagtcaggcagatcacttgacctcaatagtttgagaccagcctgggcaacatggcgaaaccttctctctacaaaaaatattttaaaattagctgggcgtggtggtgcgtgcctgcagtcccagcgactcggcaggctgaggtgggaggatcgcctgagtcaggaaagttgaggctgcactgagctcctatcatgccactgcaccccagcctgggcgacagagtgagacttgtctcaaaaaaaaaaaaaaaaaaaaaaaaatcctaattgtttcacttaggcagagtgtcctnttgtttgcatctgaaaatatttgtattttgtggaagagacctgtggtggctgtccccaatattggctctccccctttcttttctttctttttttttttttttttgagacagagtcttgctctgtcacccaggctggagtgcagtggcatgacctcactgcaacctctgcctctgaagttcaagcaattctgcagcctcagcctcccaagaagctgggactacaggtgtgtaccatcacgtctggctaatttttgtatttttagtaaagacgggggtttcaccattttgcccaggctggtcttgaactactgacctcgtgatctgtctgcc

SEQ ID NO: 185 - DNA, 661 bp, Homo sapiens
  misc_feature [331]..[331]: Chromosome 1, SNP identification no. = rs12566806
  misc_feature [331]..[331]: allele = c, in linkage disequilibrium with rs3117048, respectively
  misc_feature [331]..[331]: n is a, t, c or g
gctgtccccaatattggctctccccctttcttttctttctttttttttttttttttgagacagagtcttgctctgtcacccaggctggagtgcagtggcatgacctcactgcaacctctgcctctgaagttcaagcaattctgcagcctcagcctcccaagaagctgggactacaggtgtgtaccatcacgtctggctaatttttgtatttttagtaaagacgggggtttcaccattttgcccaggctggtcttgaactactgacctcgtgatctgtctgcctcggcctcacaaagtgctaggattacaggcatgagacactgcaccctgnttgttaagaggactttttattgtgtacaggggctgtgcagaatggaaaccacacttgcctgtctcccaggaagccaggtgaggctgtgtgctgatttctggctgtggcagaagagatgcctacaaatttcaggttgaccatgtaaaggtgaagttatccccttccctttttttcatctggaatgtggttgacctggaggagccatttcatgctctatttttagattggtgtaaaagcgtaattgcagtttttgccatcacttttaatgccagggaagccagaagaaagtatcacaaactgggtggcttaaacaacagaaactgattgtct

SEQ ID NO: 186 - DNA, 661 bp, Homo sapiens
  misc_feature [331]..[331]: Chromosome 1, SNP identification no. = rs12032777
  misc_feature [331]..[331]: allele = a, in linkage disequilibrium with rs3117048, respectively
  misc_feature [331]..[331]: n is a, t, c or g
ttaaagttccaacagcttagattttgaatatcttattttcacagaaactacagggcaacaaggcaccagagtcccggacttaggaccactgtgtgtgattcaccgtgaacactggcatattaaaggctctgagaagtcctgtaggaaaggacaatttgaactttgtttgagctcatattttccaatcccatctgacctttagttcttcactgagtgcccactgggttatattctgggagccgaggccacagcagtgaacaaagcacacaaaaccccccgccccatgggggctccgttctagtgggtccatttatcatcaaacatctattantatctctagaatgtgcccatcaggacaccatccagatgctgctgcgcttttccaggccacacagaggggacaccctccaggtgcatcctgcatgaatatcaggctcaaccgtgctttcagggtaggaagcggagggcatttgaagagtcctttcccttccttcattcatttgttgtctccttgaataaatgctgttgaaaacctaccatgtgccaggctcccttctaggtactgggaatcggaagatgaataagataaagttttgatcctcaaagagcttcctgtggggtgggaactggaaagaatggaactcccccagtcccgggaaaa

SEQ ID NO: 187 - DNA, 661 bp, Homo sapiens
  ELA3A
  misc_feature [331]..[331]: Chromosome 1, SNP identification no. = rs12751986
  misc_feature [331]..[331]: allele = c, in linkage disequilibrium with rs3117048, respectively
  misc_feature [331]..[331]: n is a, t, c or g
cacaccacctgtccagccacctgttggagggaacgctaggtcctccctttggctgtcacttgtccatctgcagcaggcgaggactgtggccttggaccatgggagacctggagttccaccacctgttctgggagtggggcccaatcagcccccctgcttaccttctgccctatattagagccccaggctctgtgcccttttcctatcatcacaaaactcatgatgctccggctgctcagttccctcctccttgtggccgttggtaagaccccaacctgtctgtgtgctccctgggctgccctggactaggaatccttgaaatctaccactngctctgagtcccatgacatgctatgcctggttccacaggagggggtctcagcttgtacccgggggcatgactgtaggggctttcagcttatgatggagcaggagagtggaggggaagctgtggatggtgaaagacccccaaagggctgtggtggaagtccttgatgggggcagtaaacaaagtcaaacggttaagagtttggactgtgtggttggacttcttgggttggaatttccacagttctacttaccactccaactctcctctcactccccctacctggctccatattctatgctctggccttttcctggtctctctgccatatta

SEQ ID NO: 188 - DNA, 661 bp, Homo sapiens
  ELA3A
  misc_feature [331]..[331]: Chromosome 1, SNP identification no. = rs4344303
  misc_feature [331]..[331]: allele = t, in linkage disequilibrium with rs3117048, respectively
  misc_feature [331]..[331]: n is a, t, c or g
gagcttgcagtgagctgagatcctgccactgtactccagcctgggcgtcagagtgagacttcgtctctaataaaaaataaataaataaataaacaaaaattagccgggtgtggtggcaggtgcctgtaatcccagctacttgggaggctgaagcaggagaatcacttgaacctgggagccgggagacggaggttgcaatgagccaagcttgcgccactgcactccagcctggacagcagagcgagactccatctaaaaaaataaaaataataaatgataaaaaaatgagcgagctaaggctcagaggtgtcaagtaatgtcagagtttctngaaatccctagaattcagaaccagttccgtaaacctcagacatggctcagccacccactcctctctgacggttccagggtgactctggaggacccctcaactgccccacagaggatggtggctggcaggtccacggtgtgaccagctttgtttctgcctttggctgcaacttcatctggaagcccacggtgttcactcgagtctccgccttcatcgactggattgaggaggtgaggagggcagggcggcccggagggctttagggtggtggctcttctgagaggtgacaggtgagaaacatcggatcctggggagggcctgaaaggatcc

SEQ ID NO: 189 - DNA, 661 bp, Homo sapiens
  misc_feature [331]..[331]: Chromosome 1, SNP identification no. = rs3117048
  misc_feature [331]..[331]: allele = g, a
  misc_feature [331]..[331]: n is a, t, c or g
tgaggcaggagaatcacttgaacccaggaggtggaggttgcagtgagccgtgattgcgccactgcactccagcctaggagacagagtgagactccgtctcaaaaaaaaaagagctggagtgagagtaaggatgggaagagagttgtaggggacggctgagatgccagaagtggtttaggagaaaaatggggccagtttgtaacgtgtaggggcagtggatgggaaaagaaaaaaaaaagagaatttgaaggagtattgttgatacaatcactttggagagcaatttggcaattggtaaagttgaaaatgagcatgtcctcccagtcagcangtccatttcttggaatataccctagagaaactctcctacatgtgcaccaggagacatgtccaaggacatccactgaagcactgttcacaatcacaaaaaattagctctgctttaaatatccatgaggaaggaataaagaataataaaaatttaggcaatgggatatgctacaaacagcagcaacgaactagagatagacctcaaaaacacaacattaaggccaggcggggtggctcatgcctataatcccagcacttttggaggctgaagcaggcagatcacttgaggtcaggcattcgagaccaccctggccaacatggtgaaacccca

SEQ ID NO: 190 - DNA, 661 bp, Homo sapiens
  misc_feature [331]..[331]: Chromosome 1, SNP identification no. = rs2501299
  misc_feature [331]..[331]: allele = t, in linkage disequilibrium with rs3117048, respectively
  misc_feature [331]..[331]: n is a, t, c or g
tgctgcccatgtgtggagagaactgggtcatcacagctcccagcctccctctgaggatgggtagaggtcccttgggggcccgctggccagccacattatgaaattacatatatcccactgccctttactctgaaactattttggagaattatccaagggttcttcctgactcattgggaggaagtggacactcagcctttgcaaccctactgtgccttggcaacgcctgacagttacatgtcagcaggcactgtctgtctgactcaataacaatgataaatgtgtgtggtttcagaacttcctccccacctcccaccaccctcatgatgcngaagtctctgttcagcttgactccatttcttccctgctctcactctgcccttgccataccagttctcaggctttgcaagacctggagcttgcaggcagatcacctgaggtcaggagttcaagactagcctggagaacatggtgaaatcccgtctctactaaaaatacaaaaaaattagccaggcatagtggcgtgtgcttgtaatctcagctagttgggaggctgaggcaggagaatcacttgaacccaggaggtggaggttgcagtgagccgtgattgcgccactgcactccagcctaggagacagagtgagactccgtctcaaaaaaa

SEQ ID NO: 191 - DNA, 661 bp, Homo sapiens
  LOC441882
  misc_feature [331]..[331]: Chromosome 1, SNP identification no. = rs7545179
  misc_feature [331]..[331]: allele = g, in linkage disequilibrium with rs1773026, respectively
  misc_feature [331]..[331]: n is a, t, c or g
gacagagtctcgctttgtctcccaggctggagtgcaatggtgcgatcttggctcacttcaatccctgcctcccaggttcaaacaattctcgtgtctcagcctcctgagtagctaggattacaggtgcctgccagcacacccggttaattttttttttttttgtatttttagtagagatggggttttaccatgttggccaggctggtctcaaactcctgacctcaagtgatcttcccaccttggcctcccaaagtgctgggattaccagcatgaaccactgcgcccagccatggtatatttttaaaaactcactcgagattctgtgtggagnatgggttgcagggggcaagaatgaaagcagagagacaagtcaagagaccattgccatcatccaggcaagagttaatggccctgtgacctaggagcctagccatggagatagacagatgtgggcagattcagggtaggtcctgatgtggtgtcaacaacagggctagctgctggggatgagcaaagagaggaatcgggaatgagtttcaggtttgtggatggagcaactaagtggatggtgtcatgctgtgtgctgaaacttcccctgatacggagacacttggaggggagcaggttgggatggacacggcagggctggaaatcaggagtt

SEQ ID NO: 192 - DNA, 661 bp, Homo sapiens
  LOC441882
  misc_feature [331]..[331]: Chromosome 1, SNP identification no. = rs7537510
  misc_feature [331]..[331]: allele = t, in linkage disequilibrium with rs1773026, respectively
  misc_feature [331]..[331]: n is a, t, c or g
caggttcaaacaattctcgtgtctcagcctcctgagtagctaggattacaggtgcctgccagcacacccggttaattttttttttttttgtatttttagtagagatggggttttaccatgttggccaggctggtctcaaactcctgacctcaagtgatcttcccaccttggcctcccaaagtgctgggattaccagcatgaaccactgcgcccagccatggtatatttttaaaaactcactcgagattctgtgtggaggatgggttgcagggggcaagaatgaaagcagagagacaagtcaagagaccattgccatcatccaggcaagagntaatggccctgtgacctaggagcctagccatggagatagacagatgtgggcagattcagggtaggtcctgatgtggtgtcaacaacagggctagctgctggggatgagcaaagagaggaatcgggaatgagtttcaggtttgtggatggagcaactaagtggatggtgtcatgctgtgtgctgaaacttcccctgatacggagacacttggaggggagcaggttgggatggacacggcagggctggaaatcaggagtttgctttgactaagttaactttgaattgcttgtttgacctctaagtgaagatgacaaataggcagttgggtat

SEQ ID NO: 193 - DNA, 661 bp, Homo sapiens
  LOC441882
  misc_feature [331]..[331]: Chromosome 1, SNP identification no. = rs10914729
  misc_feature [331]..[331]: allele = c, in linkage disequilibrium with rs1773026, respectively
  misc_feature [331]..[331]: n is a, t, c or g
gcctagtgttccctggaaatatgcttatgtttgggcaaagttgaattagaagcagcagatgagggagttaaggtccagaggcaggctctgccagagaccagaccagggtctagtggggcagacagaggtgacaagtgacaccacagtgaattggtggaacttgtaagaattcttggagatcctcgggaatgagaacgtggtaggatttcctgaagtcttgcaggtgaagagctcagatggtagctgcttacctgttaaaaggaagtgtggcttgctggcagaggaaacaaaaagacatctgagtcactgctcttgttacaggtttgtcatncccatccaccaggagcaggcactctgccgcctttgcctgagaagtgcccagctcagaatagctgtggcctgaataaatgaacagagtgaatgtctaacagaccttgttcacatgatctaaagaggggactctaaataataaagtctgcaggccaaaaggacaaaagatcttgagaaaccaggaccagatgactcctaagagtccaacctacgagccctttttggggatgggagagtggtgtgttttgctgctcccttgagtgagagaatattttgcttctcttcccaggaccgtcgagaaccccgtcattcccaggcagagcatctcagc

SEQ ID NO: 194 - DNA, 661 bp, Homo sapiens
  LOC441882
  misc_feature [331]..[331]: Chromosome 1, SNP identification no. = rs10914730
  misc_feature [331]..[331]: allele = a, in linkage disequilibrium with rs1773026, respectively
  misc_feature [331]..[331]: n is a, t, c or g
ctggacagaaaaggaaccccaactcagacaatagagtaattgggttactctcagcctggcctctttcacttccccaaaagggctgatgctgctgcctccctgcaggtctatatatagggaaatctctgaaagttctgcccggctgcccctggctgcattcccatttgttctgtggatgaataaaaatatctccttgttctacagctcttgttgagacctctctgcctattctcatgatgtttggaataacaggaaacaagggcaccctttcctcaaggctctttgggaattacatctgaaaacaccaaagtcacaaaggcaatgacaacanaggaatttgcagtcaaaccccaactaacccctggatgcccaaatggggaagtcataactgaggttttctcactttttgcagaggaagaaactgtctcaaggactttggccagtcactggtcttccctgggctgcagttcttcatctggagaactggggtcagggggaacacgcacacaaaaactgggtggttaggattaggagagaacgtagtggtggcagacagtatcttctcaacaagtgctagttatttttattagtaaaaggaattctgggtagccaaaagagggaattctgggaaataaaacatttctggttatgttgtttacag

SEQ ID NO: 195 - DNA, 661 bp, Homo sapiens
  ZNF31
  misc_feature [331]..[331]: Chromosome 1, SNP identification no. = rs6425820
  misc_feature [331]..[331]: allele = c, in linkage disequilibrium with rs1773026, respectively
  misc_feature [331]..[331]: n is a, t, c or g
gagagagtcctggtagacaaatgcagacagaacgcttgcaaaccaaatcctgatgggtgctgaaccagagagaacctggaacaggttcaggctctgttgcttatttctacacggcactaaagggcagttggcctcttgaggacttcgttagttttttctcttctgtagaatgccaggctttaattagacaaaggctaagggaaaccatagaataattcgaggctgtattgagggcgaggcgcgccctcttgtgtcctaatgatgtcctctcctctctctgcacactcgcctcccttcttcctcttagggcagatgatgctgaagtggacangtccttacctgaccctgcaaagctgcctctccagcttcagatcctgacactctctcaaatgtttccggctcccttggcaccccacactgttgcactgtccctccccatctcaaaccctcctacttccacatatggtctcttcctcatgcagtgtaggacctttggagtcacatgcctagggggtgacaaatcgcagccctggttcttattggctctgtgatcttgagtaggtcacttcgtttctctaagtctcattccctctttgtaaagtggagcaaacaataccaatctcatagggctactgtgagacttcaacaccaaggagtattt

SEQ ID NO: 196 - DNA, 661 bp, Homo sapiens
  ZNF31
  misc_feature [331]..[331]: Chromosome 1, SNP identification no. = rs10798954
  misc_feature [331]..[331]: allele = t, in linkage disequilibrium with rs1773026, respectively
  misc_feature [331]..[331]: n is a, t, c or g
ttccattctcccgtactgtcatcttaagagtttggatgactagcacacatagaggaggctataagacatggttaagaaaaatgattggagaaaagggatctcggcttagaccctaactctaccacttgctagttgtgtaaccttaagtgaatcttcataaacactcagtttccctttaggtaattgaggatatagtgcagtcataccttatcagataataatattctaagggtgaaaatcactttagccaaaaatcacagttagtttgaaaatcctttggcaaggagccgtttcagaaactaacacgctgcctttcaataaataaactaancagcacagctgggctttcttgtttgaacattagatgagaattcgcttgtattagggactgtgcggtatgaaagacactttactcacacttagtggaaagagaggcacgagggaatcaagaccaacctggtgaatagcgaagtcctaggtgccaccaccacatgcttattctcgaacagatagtgaacgcaactggctgcactatttaaatcatgctctttctctctttcttttttttttcttctttttctgagacagagtcgtgctctgttgcccaggctggagtgcagtggcacgatctcagctcactgcaacctccgcctcctgggtt

SEQ ID NO: 197 - DNA, 661 bp, Homo sapiens
  ZNF31
  misc_feature [331]..[331]: Chromosome 1, SNP identification no. = rs7531293
  misc_feature [331]..[331]: allele = t, in linkage disequilibrium with rs1773026, respectively
  misc_feature [331]..[331]: n is a, t, c or g
aaaacaaatggacaagtagcagaggagcttgtttttttcaggtgcaaatgtagcttgtgatcttacattgcaagatatataacttagttgcattctctgcaagtaaaatttttcaagtcttaataatgggatgaaatatagttataatattcctcaaagtgaacctgaaaaaggttggtgcctacaggactaaatggcccctaaggtaatttcctaaaagggatctttcagctctgctattttgtgattgttacttgtttcttctgtcatcaccatcttgttgaatccccctctctgtcagatgccccctctccatcaggtgcacaggganttttaaaaaacaggctttattttttagagcaattttaggctcaaactcacagcaaaattgagcagaaggtacagagagttcccatccctccccgacaagcctccctaactatcaacatccctgcaccagagcaatatgtttattaccattgatgaacctacagtgatacatcattatcatcactcaaagtagcagtttatgttagggctcttaatgttattcattctgtaatgtatgacattaagagccctattataaactgtatctaccatcatagtgacatagtaacatgtatctaccattgtagtgacatacagagtagcttcactg

SEQ ID NO: 198 - DNA, 661 bp, Homo sapiens
  CSMD2
  misc_feature [331]..[331]: Chromosome 1, SNP identification no. = rs903217
  misc_feature [331]..[331]: allele = t, in linkage disequilibrium with rs1773026, respectively
  misc_feature [331]..[331]: n is a, t, c or g
aggaaaacattctaattttagtttctttcaaaatcagatgaaaaaaaaaaaatgactaggataataatggctctgtaataaagaatccaggctggattatattcatttttgtagtgacacagttgtgaaatctcatttttgatacttttttttaatggaggaagggttggcaaacatcatcacacagccctgttcccccgccctgttactcactgaccgcacaggcctcgttgcttccttagtagggtgtttattttaatttcagcttttctccttggcattatttaaaaaaaaattaccatctagtcactcatttgcaatgtgtgtgtgnctgttcagggtggctcttgctttctttatgctccagctgtgggcagaagtggtcagaggggccctgctggagacctgtgggctgggcagtgggttcagagcctgctggcaaggggccaatgctgagggctggccagatgtggagccaccaaccccagccgacccggaggtgacagcatggcgcacaccagcacctggaacccagcagaacccaggtgtggagcaagagtgactgtgtggaggtcagcggcattcttgtttctttcttacactgttcaataattcatgcagtgaatcagattcatcactgatcatctccaagccccgattt

SEQ ID NO: 199 - DNA, 661 bp, Homo sapiens
  CSMD2
  misc_feature [331]..[331]: Chromosome 1, SNP identification no. = rs2794599
  misc_feature [331]..[331]: allele = c, in linkage disequilibrium with rs1773026, respectively
  misc_feature [331]..[331]: n is a, t, c or g
agtcagggactcagcagatgcagctcctgaatacaaacaatttatggaaagagcttttccccatctttttacgtctctccaaaacaaacatttaaataagggttcccccttattccagtgggattgttttagcatgccaaaattactcctcaagtttcatctgtatgcccaatctttattttttccttctcagaactcttatcaatagaaggcaaaagagaaaaagaaaaatcccctctgatgatgtaaatcggggcttggagatgatcagtgatgaatctgattcactgcatgaattattgaacagtgtaagaaagaaacaagaatgccnctgacctccacacagtcactcttgctccacacctgggttctgctgggttccaggtgctggtgtgcgccatgctgtcacctccgggtcggctggggttggtggctccacatctggccagccctcagcattggccccttgccagcaggctctgaacccactgcccagcccacaggtctccagcagggcccctctgaccacttctgcccacagctggagcataaagaaagcaagagccaccctgaacagacacacacacattgcaaatgagtgactagatggtaatttttttttaaataatgccaaggagaaaagctgaaattaaaataaaca

SEQ ID NO: 200 - DNA, 661 bp, Homo sapiens
  CSMD2
  misc_feature [331]..[331]: Chromosome 1, SNP identification no. = rs2131776
  misc_feature [331]..[331]: allele = g, in linkage disequilibrium with rs1773026, respectively
  misc_feature [331]..[331]: n is a, t, c or g
cagaggatgtatatatccagttggttctgtttctctagagagaaacagactagtacatgccgatgttctgccaagcccaggggtgaggagcagtttctggagccagtcagcctgggattggatttcgaccccaccccttctgagctgtgtgaccttgctcaagttagtttctatgcagctcagttttctcatctgtaatggggctcccacaagcttctacctcacagggcgtgcagggattcaatatattagatccacaaagggcctggttcagtgcctgttacacaatgatgctcaatgcacagctctcctcttactgggtgtgtctatntggtgtgtgcgactccgttgggtggagcccctggcacgcataggtccctgtctgtgcttgtcatggcctgtcttcctcccacacccctgctcaccggctgctggaggcggggctctcggtggcggtggtggcggccaggccgggtggctatactgctgtgcacactgtgctgactgtgaactccgcctcgctggccatgatgtctgtgggctggatgttgcggtcgtacattgggttctcaaatgtggcccgaacattggtgttctcgtggccagcatagccattgaaaggaactttgggtcttctcctggcgataaaagaggaagtgcc

SEQ ID NO: 201 - DNA, 661 bp, Homo sapiens
  CSMD2
  misc_feature [331]..[331]: Chromosome 1, SNP identification no. = rs1690557
  misc_feature [331]..[331]: allele = c, in linkage disequilibrium with rs1773026, respectively
  misc_feature [331]..[331]: n is a, t, c or g
caaagtggcggccaatggactcggggtctgactccagcagcctgaggtctgtaaagtcccaaagcagaaaagtcaagtcacgagacacagtctgaggctccgttggctaccctccccgactatacactcttgggaagcagggctgccactcagggtgctcctcactcctgctcagcacgggaggcaggtgtgcccagggctgcccgcctgcctccacgtgcacactcagtccttgggggcagggtcctgcatgcatctaccttgtgctgctcagatggcacccagaggaccatccgcagaggagcctgaaaccatggctcaacagaaactnttacaagggtgcagccctttagaagtctctaaagttcttttggctgtagcagccttttatcagatgaaaccttacaggcacaacaaaatataagacagatgaaggtgaaactgttctggttgaagctgaagcatctccttctgaaaggctgcctctcctccttcctcaccctcccctgcagactgggaaggctcagaagaacacaagtagaaactgtggccccagtaggcaccctgctaactgaggggctggggctctgagaggggacaggatgtctgctgtggagccagaacaaaaactgtgattttctaaggcctttgcagcgtgcct

SEQ ID NO: 202 - DNA, 661 bp, Homo sapiens
  CSMD2
  misc_feature [331]..[331]: Chromosome 1, SNP identification no. = rs10753287
  misc_feature [331]..[331]: allele = c, in linkage disequilibrium with rs1773026, respectively
  misc_feature [331]..[331]: n is a, t, c or g
acctctgcctcccaggttcaagcaattctcctgccttagcctcccaagtagctgggattacaggcatgcaccaccatgcccggctaattttgtatttttagtagagatgaggtttcaccatgttggtcaggctggtctcgaactcctgacctcaggtgatccgcccaccttggcctcccaaagcgctgggattacaggtgtgagccaccacacccggccaaaagagtagattttaaatgttctcatcacaaaaaaatgataattaggtgagatgatgggtatgttaattagcttgatttatttattccataatgtatacatatagaataanatcacattgtactctataaatatgtttattatttgtcaattaaaattaaaatatttaaaaagatatagagagggaactagaaaggagtgacagaagaagggaggagaaaaggaaaggtgtttaaaagatggagaaatggaagaggggagaagagagagaaaactgacatgtcagtatagcatggtgaattggaacatgggcaaatgaagtcagacagacccagagtctaatcttagctctgtcacttatcagttgtctgatcatgtgcaaaagccttgactttctccctgtataggctatgcctgtattcctatacatggtggccatccc

SEQ ID NO: 203 - DNA, 661 bp, Homo sapiens
  CSMD2
  misc_feature [331]..[331]: Chromosome 1, SNP identification no. = rs2794593
  misc_feature [331]..[331]: allele = t, in linkage disequilibrium with rs1773026, respectively
  misc_feature [331]..[331]: n is a, t, c or g
tagaggaagggcatgaaaactatctataaatctggatggctttccctacccacctccccagcccaggcagacttcagaagaaagtgagcctgaaggaagcagaaacttcatctggaagaaagagccagcaacttccaactggaagctctggaactgttgattactacagcccctcctggcataggactggccagtgtgtggtcatacaaacacattgacccaggccatacccagggagcttcctggaaatggttacagtttaagataggtctggggtctttccaagtatcacatccagaactggacacagactgcagatgtggcctgaccnataccaaattcttagagactatcacatcctttcatgaaccttctacttttatttaccacattaacatgtgtattatgcaggaaacgaggctagatttggcatcagaaactcaatttgagtaccattttggtcactgaccagctgtgtccttggacgaatgagcttcgcctcttaagcttcagtaaaatagagatcataataattgccatagagaatgattacaaggataaatgacaattttagtagctatcactgattaggtgcttttacacatgcaacatcatgtaacatacaatttacaacattagtcatttaacccctagaataacc

SEQ ID NO: 204 - DNA, 661 bp, Homo sapiens
  CSMD2
  misc_feature [331]..[331]: Chromosome 1, SNP identification no. = rs2641953
  misc_feature [331]..[331]: allele = c, in linkage disequilibrium with rs1773026, respectively
  misc_feature [331]..[331]: n is a, t, c or g
ttttaatatttgtaaaagtagtgtcatgccacctttgtcacttgatagtatgtttctaagattcatccatgtcatgcagagctgtaattcattcattttctttgctgtataataatccatcacgtgactatacccacaaatttcctgtttcttggtgacatgtgcaagagtgcctctgggatatgtttgcagaggtggaacttttgggtcatagagtgtgtgaatgtttaactttacacaccaggaccaagctgttttccaacctagcctcactcttgactacatttccttatcctccctcacggggctgcagacttgctagctggcctantttccaggcccccaggctgctaagcacttccctcagcactcctttgcaccagcccttcgttcagccaggaatgtcaccctgctctgcacagggctagcccttctcatcatggaggccgtagttcaaatgtcacccttccctaaccacctttcctaaaatggtaacccaccccgttcacacccctttatatcaatcaccgtgtcgtgtctactgctctcagaagctagctcgtttatttatttatcatcttcagccaggcagctcccttcaaacaggcacccagtctgtcctgttcccactgtattcctagctcctagaacagttcagggc

SEQ ID NO: 205 - DNA, 661 bp, Homo sapiens
  CSMD2
  misc_feature [331]..[331]: Chromosome 1, SNP identification no. = rs1773026
  misc_feature [331]..[331]: allele = c, g
  misc_feature [331]..[331]: n is a, t, c or g
gggatgccctgtctcctcacaggatcccagttggacattacccattctaaatttctttttttttaagtcagggtcttactctgtcacccaggctggagtgcagaggcacagtcatggctcactgcagcctcgaactcctgggctcatgcaatcctcccacctcagccttctgagtagctgggactacaggcatgagccaccacacccagcttgcccattttaaattttgttttgtcaaatccctggcatcagtcctgtccttgcccacactgtccttatgcaccgctgcaacttgggctatgaagattcaccttattcaaagtgccccctntaagaggaagtatccagagggctcagttcctaaatgaggctaggacccagggaaagggagttttctgtttgaagaacctaaggtatattaatgaaccacatgagacaattgatttgtctgctgaggggtacatcttatcacctgctgttgtacctacgaggcctctgtaggcccaacagcacctacacaggactcctagggacaacagcctggaagcagggtcttatggcccatgaaagggtcatgcctatgtcatcatatcattgagggtggggcttggtgagctctggtctcaaaaccaaagtgaacttgacacgggatttcagaggg

SEQ ID NO: 206 - DNA, 661 bp, Homo sapiens
  CSMD2
  misc_feature [331]..[331]: Chromosome 1, SNP identification no. = rs1773027
  misc_feature [331]..[331]: allele = c, in linkage disequilibrium with rs1773026, respectively
  misc_feature [331]..[331]: n is a, t, c or g
cacctcagccttctgagtagctgggactacaggcatgagccaccacacccagcttgcccattttaaattttgttttgtcaaatccctggcatcagtcctgtccttgcccacactgtccttatgcaccgctgcaacttgggctatgaagattcaccttattcaaagtgccccctctaagaggaagtatccagagggctcagttcctaaatgaggctaggacccagggaaagggagttttctgtttgaagaacctaaggtatattaatgaaccacatgagacaattgatttgtctgctgaggggtacatcttatcacctgctgttgtacctangaggcctctgtaggcccaacagcacctacacaggactcctagggacaacagcctggaagcagggtcttatggcccatgaaagggtcatgcctatgtcatcatatcattgagggtggggcttggtgagctctggtctcaaaaccaaagtgaacttgacacgggatttcagagggagtcgaaatcacagactaggactttgacagggagaatcttgtcacatttcctcatcctatctcttccctccatctggatcccacagtgactcacttttcccagaaaagaactgggactacccttgagagaagcaagaaattggagctgtgaggctac

SEQ ID NO: 207 - DNA, 661 bp, Homo sapiens
  misc_feature [331]..[331]: Chromosome 1, SNP identification no. = rs12059241
  misc_feature [331]..[331]: allele = c, in linkage disequilibrium with rs1333827, respectively
  misc_feature [331]..[331]: n is a, t, c or g
tgctggatagaagcatagaagttcttaaactcatgagagtataagccatgtctcagggagagagcagcagtgggaaagagggaaaagacagaatcctgggggggcccagagctcacatattgatcttatgatccttccttcaagagatggtgctcatgggaactgcaaggccaagggccagagacaatgcagtggaggtaacctggagggctcttgggaggagggtgccagccttgtgccagcaagcacatgccatgatgatgccacacttcttttatccatcttctgtaccccccaaacccaaccctaggaggacaatggatctgcccanaaatgactaaatattaacaaactgttctgctccaccaggagacagggaaaggaatgggtgctccaggcatcagtgactgatggagggtgcagcacatagaagtcaaccgctatgtttactgctggtatcaggtgtggctgcaataagcaaagccaaatgcctgagcagagctgctggacccaaaagctcagaaagaaaggaacagtgggtcgacagctgcggccttagctccatcttaccttcctctgtcgttggatatcccttgtggagtctatggaagtagaaggctttgagggcctggaagcagaggaccggggagacagagccagg

SEQ ID NO: 208 - DNA, 661 bp, Homo sapiens
  RIMS3
  misc_feature [331]..[331]: Chromosome 1, SNP identification no. = rs12059305
  misc_feature [331]..[331]: allele = a, in linkage disequilibrium with rs1333827, respectively
  misc_feature [331]..[331]: n is a, t, c or g
ccttccttcaagagatggtgctcatgggaactgcaaggccaagggccagagacaatgcagtggaggtaacctggagggctcttgggaggagggtgccagccttgtgccagcaagcacatgccatgatgatgccacacttcttttatccatcttctgtaccccccaaacccaaccctaggaggacaatggatctgcccagaaatgactaaatattaacaaactgttctgctccaccaggagacagggaaaggaatgggtgctccaggcatcagtgactgatggagggtgcagcacatagaagtcaaccgctatgtttactgctggtatcagntgtggctgcaataagcaaagccaaatgcctgagcagagctgctggacccaaaagctcagaaagaaaggaacagtgggtcgacagctgcggccttagctccatcttaccttcctctgtcgttggatatcccttgtggagtctatggaagtagaaggctttgagggcctggaagcagaggaccggggagacagagccaggaagctgcctggaccagtcagatttcatggctcaagaacactgctgtgaccatagagttctcaaacaggagtcagaggcccaggccatatctttcatgctctttttctgaaatgtactgctctcccctgcctc

SEQ ID NO: 209 - DNA, 661 bp, Homo sapiens
  RIMS3
  misc_feature [331]..[331]: Chromosome 1, SNP identification no. = rs17412556
  misc_feature [331]..[331]: allele = t, in linkage disequilibrium with rs1333827, respectively
  misc_feature [331]..[331]: n is a, t, c or g
cttttccatctccctgcagccactgcagaaacactgctggacaaccttctggccctgaatgatgtgccatctctccagccaggtggagggcaactcatctacaacatcaagcaaaggcagcaatttcttgcagagtttgcacagtgctagaggcaaccagagagacacaaaagaggagcatcactaaagccccattgctttctgggctgaggaagatggggaatatgaggtattaggagggctggaaccccaggggaagaggagctcagcaactcctgggcagcagggcatggaagagggaccctggttgcatgtcagggctcctggtaangtaggctaagattgtgctacatttcatttccaaagaagtacccttggaggtctttattgtctttaaaaatggaggcttctgctctcctcaaggctggcagtaaagaagagatcaggcatgcttccctggtgggtggcatgaccatgggaggactggcttgacctcagtgttctaaccggcagtgattccacagaggatgagctctatgggtggcctttcttggagctcctgggttctgcctcagcccccatgaaatgctggcattgcctgggacttgctgcatcccaagagcctcctaagtgctcctttcctagtagaattgggtggtag

SEQ ID NO: 210 - DNA, 661 bp, Homo sapiens
  RIMS3
  misc_feature [331]..[331]: Chromosome 1, SNP identification no. = rs661221
  misc_feature [331]..[331]: allele = t, in linkage disequilibrium with rs1333827, respectively
  misc_feature [331]..[331]: n is a, t, c or g
ctttccaaacacgacctcatttcatcctgcagatgatcctgtggagtaggtgtgattctcttcactttacggaaaccgagtctcttacagatgaagtcacttgcttggggtgagcccaggccaggtgactgtcatcccaattacttgagagcaacaaaggccttctgcacacttggtattgttagcccttctcaacagtcctgggagggagggatcttcatgctcgtttcatagatgaagaacctgaggtcacgtggggataaagcacagtggtggatcagtctctgggctcagtcctaggttcagattccagctcagcactcattagccncgggtagatgtgactattaaacagaggattgcatgtagggagccttacatagggcctgccacataaacagctactcactaagtattaacaatcatggtggtggctgctgatcttgcctgaggccatggaggtgagagagaagaggctagagccaggggctgtctgggccatccaacttctcatctagggctgctcctctgggctgagatggttctgtggcaaggggccttggagttgcaaatttaaactgcagagccagacatggtggctcacaaccataatcccagagactcgggagactgaggcaggaggatcacttgagtccaagag

SEQ ID NO: 211 - DNA, 661 bp, Homo sapiens
  RIMS3
  misc_feature [331]..[331]: Chromosome 1, SNP identification no. = rs2780946
  misc_feature [331]..[331]: allele = t, in linkage disequilibrium with rs1333827, respectively
  misc_feature [331]..[331]: n is a, t, c or g
ggggttcttctgcagaccttttctcaaagccaaagacaatttgggtcaacccagcagtccctctctgtcttgttttcctaatggcctctccagctctccacacacgtcctctccatgttcagccccacctagagaaggtgggtttgtttgagagtggccaggcttcccatgggggctttcctatagagcctccagaggtatcagaggtgagttgtgaggtctgggtgtgatagggtctgagggtgcctgaaagagggaaagtcagtctgagaatcccagagaagatgaactttccagaagagagtgggaagaggcacacttaacctttggngcaagggctgaaatcgagtgggaaggtgggcgtcaggggagcctgatgagggtgaggcgagggccccagctgcggatctgcggctctgcgtggtggcgccatcatgactctgcctgcagccatctttctagtctgctctgtcagtgtcactgcccggagcagggccaggtgtcaggctgcagaccagctctgaggtcagctcagccatgcccctgcctccagtcagagccctgctcatcctccccatcaaccccccatgccaagagagtgactttggcaggactcttagagaagccccattcataatctgaccttgttccctctctgtgc

SEQ ID NO: 212 - DNA, 661 bp, Homo sapiens
  RIMS3
  misc_feature [331]..[331]: Chromosome 1, SNP identification no. = rs7555073
  misc_feature [331]..[331]: allele = t, in linkage disequilibrium with rs1333827, respectively
  misc_feature [331]..[331]: n is a, t, c or g
tccccatcctggccttggaagactgtccccccaaatcactttgggcatgaagaagcctttgggtctgaagctgaatcagctggatttctgggcttggtcccctggagccagactcccggggtccaacacctccacgaccttctaatcttaatctcactccttagtcctatctcagccccttccttgtcccagcccaatttctagatccctaagtccccatctccctgactctctagtaccaggcctaaactgcatattcacagaggccatgcccactctagggctctgataacctcaagccccttccccacctataatagctttccccagngagaaaccacatcacagcttgattgctggaaaagaccagcccacgtgctactgtcgacggctttgtataaatctattttaaggcctggaaaagtcccccacccccagccccaactgggagccttgatgagcattctccctggatcctccggagcccccgccccctcaccatcccatccagctgcctatttgaaggtttctggggaagttgttactctgaacaaaataagccggaagagattttaaaacaaaaccagctggtgtctgggctgataccacaaagtgaggaggtcttggtggggagggctggctcctctgtgatgtggggtct

SEQ ID NO: 213 - DNA, 661 bp, Homo sapiens
  RIMS3
  misc_feature [331]..[331]: Chromosome 1, SNP identification no. = rs850010
  misc_feature [331]..[331]: allele = t, in linkage disequilibrium with rs1333827, respectively
  misc_feature [331]..[331]: n is a, t, c or g
gctttggacttttctgcagtatccccttcacatagaaggaccccaccagagtctgcacaggctggagccagttctgttctccctgttattatttgctatgaaaataataaccaccaatacttactgaatatttcccctaagcctgacaggcacttcctgtgcattatttaatgtaatccttagaacaatcctatgagctaagtgcttttatttcacatcttgctgagatgttcactgaaacctcaggatgtttgtttggtcacaagtccacgcagctagtgtgtagaggcctttggaattcaagcccgggccatgtgactccacagcctcngtcctctccatcaaaccggtcacctgcaaggtttttcatagccatgtgctaataggaatagtctcttttattgagccagaacctgtgcatgctcttgacatttgtttgtgcatttaaccttatagcctcagagaggtcaagtgactagcccaaggtcacgcagctaggaagtggtgggactgcagtagattcatccaggtctgatgtgggatccttttgtttcctgcccatcttcagagctgcctgaggccctgccaccccggggaccatgtttaacggggagccaggtcctgcctcatctggggcctccaggaatgtggtgcggagctc

SEQ ID NO: 214 - DNA, 661 bp, Homo sapiens
  RIMS3
  misc_feature [331]..[331]: Chromosome 1, SNP identification no. = rs664350
  misc_feature [331]..[331]: allele = c, in linkage disequilibrium with rs1333827, respectively
  misc_feature [331]..[331]: n is a, t, c or g
aactcctgacctcaggtgatccgcccgcctcggcctcccaaagtgctaggattacaggcatgagccactgtgcccgaccatgatataatgttaaatgaaaaaatagtaggatataaaatgatatttgcagtatgagttcagttattttaaaaactgcatggaagggtggctggaagggaataggctaaaatgcctctcaagagtacgataaagggtgattttcttgctgctttggacttttctgcagtatccccttcacatagaaggaccccaccagagtctgcacaggctggagccagttctgttctccctgttattatttgctatgaanataataaccaccaatacttactgaatatttcccctaagcctgacaggcacttcctgtgcattatttaatgtaatccttagaacaatcctatgagctaagtgcttttatttcacatcttgctgagatgttcactgaaacctcaggatgtttgtttggtcacaagtccacgcagctagtgtgtagaggcctttggaattcaagcccgggccatgtgactccacagcctcggtcctctccatcaaaccggtcacctgcaaggtttttcatagccatgtgctaataggaatagtctcttttattgagccagaacctgtgcatgctcttgacatt

SEQ ID NO: 215 - DNA, 661 bp, Homo sapiens
  RIMS3
  misc_feature [331]..[331]: Chromosome 1, SNP identification no. = rs636579
  misc_feature [331]..[331]: allele = c, in linkage disequilibrium with rs1333827, respectively
  misc_feature [331]..[331]: n is a, t, c or g
taaaaaggaatttgacaatagattctaagaatccaaaagacatttatgaccctggcatcaggtaggatgcttttggaggtaacagagaactctgattcaaactggcttaagcaatggaaaatgtattgtctcacatcattggaaggccagcgcagggcgggccctaggtatggcctgaggtactttctgtctgagcgctgtctgttcacagtagcactggctttgtcctagggcttagccctctctagggtgtaggaaagagaaggacagagagagaaagagagagagccccccacctttcttgtaagcatgggatccaaatcttcccccncttggacaagtaagagttgctaaggtgaatgccattcacagattgccttaaattaatcaagatctgcctctaaaacaaggggtgggtggtacctggacaaaaccagccctctgtgaggaagcagaaagggggagcggatgctagggaagctcctagcagtatttgtaccccctgatccagtcgttccatttcgaggaatcagtcctaaagaaataagcagacaaaatccatgtagaaagatgcttaggctgggcgtggtggctcacacctgtaatcccagaactttgggaggccgaggtgggtggatcacttgagatcaggagtttgaga

SEQ ID NO: 216 - DNA, 661 bp, Homo sapiens
  RIMS3
  misc_feature [331]..[331]: Chromosome 1, SNP identification no. = rs474419
  misc_feature [331]..[331]: allele = a, in linkage disequilibrium with rs1333827, respectively
  misc_feature [331]..[331]: n is a, t, c or g
gccttccagaaatactgtaaggagtaaattagacctacaccgtggcagagtcacaggatcagataagccttctcccaccttccaccaaaacaccgtgcagatacctcaaaaacacacacactggcactagaattggaaactcgaagagatcatcataggccccagtccagggggactttccattagctgcagggttgatgggggatagagaaatacaatccaggactctgcacacgtcacagggcgaatgagatcggtccaggcagccacagagaaggcaaaatgaggcgttaattcatccactctgtcagctatactttgccaggctggnaggagccatgctgaccaggtgaccattctcagctgtctggggactgtcttcctttatttgccacaatggtgcttttcctctttcacccattctccctcccctttctgtgtccttttgaataggcagactctctcagtgttccaggcccgggggcccagggtcaagtgaagtgccctgaaccctggcatggtcagctgccccaggaaaaccactgtgggctaggacagagccagtagggtgctgggtgcagagcatgctggagaggctggccttgttgggttcttcctgagcagaggatactgacttcagcttgggactttgcagccaaac

SEQ ID NO: 217 - DNA, 661 bp, Homo sapiens
  RIMS3
  misc_feature [331]..[331]: Chromosome 1, SNP identification no. = rs620268
  misc_feature [331]..[331]: allele = a, in linkage disequilibrium with rs1333827, respectively
  misc_feature [331]..[331]: n is a, t, c or g
cccttttcaccccctgggggtggtactctcttgcttcccagaggctgtgctagggaagcactttgcttctccagctatggtccggttgggatttctactgccctaacttagatgctcatgacagctgtgggaacctgggccagaggggcttttctcatatagacactttccttttagttttctcaaagggcccagagacccagggcagagtctgagcttaagggccgggcctccatttttggttgaagggacaggggatgctaagcattctgtctctttgtggaaacaggagacctgggttcaagtccaggccttgcctcttcttagctgnctagtatgaacaagtcctttacttctctgagactcagttttcttatctacaatacagagataaccacatgccttccagaaatactgtaaggagtaaattagacctacaccgtggcagagtcacaggatcagataagccttctcccaccttccaccaaaacaccgtgcagatacctcaaaaacacacacactggcactagaattggaaactcgaagagatcatcataggccccagtccagggggactttccattagctgcagggttgatgggggatagagaaatacaatccaggactctgcacacgtcacagggcgaatgagatcggtcca

SEQ ID NO: 218 - DNA, 661 bp, Homo sapiens
  RIMS3
  misc_feature [331]..[331]: Chromosome 1, SNP identification no. = rs1333827
  misc_feature [331]..[331]: allele = c, a
  misc_feature [331]..[331]: n is a, t, c or g
atcaaagtttctgtgctgctgtggcaatagctgggagtcagcaggaagaacttcagagtgaggtctctgtgactcactgggatcataggacggtttccttccctgcggtgccatgacctgggctgagaaagggacagtctgctcagaagcagggaattggtgaagggacttgcgtgggaagggtatagtttatttagcaatcgtttggaatcaccaacatgtgacacggtgtgctctgtgtcctgcctgctcctaaccactctgccacagtctccaccaccttcccttttccatccctgtggtctgatggctcaggggttgctatgcagtngatggccctccttttaggttccctatctgtaactttggcatgtctttcctgagctagacctgctgccggagaagaaactagatctctaattctgagacctctgctacaatgtgcattcagagactcaactctcccagtcaaaaggacttttagagattacttaacctgaccccttcattttacacccagatgagacagccgaggcccagaggagttcacataaggaatctgttcacgttcgaatcccacatcctgattcctaatcctcctaagctgccctacccaggacttctgacccacaaggtcagtcctaggaccttgggtccagtg

SEQ ID NO: 219 - DNA, 661 bp, Homo sapiens
  RIMS3
  misc_feature [331]..[331]: Chromosome 1, SNP identification no. = rs528992
  misc_feature [331]..[331]: allele = a, in linkage disequilibrium with rs1333827, respectively
  misc_feature [331]..[331]: n is a, t, c or g
actgaggggcccagggtagcctggtagggccctgagacctgctgttgtcaggattcaggagagagtttggagggcccttttagggtactgagaccccagggtagaggccaaacatccaagggctaaaaagaaaacacaaagcttattcctggggagctgggcaggtctcttttggcatggagttttggcaggagtgggggcagtagctgtctccctggaggatagatcaaagtttctgtgctgctgtggcaatagctgggagtcagcaggaagaacttcagagtgaggtctctgtgactcactgggatcataggacggtttccttccctgnggtgccatgacctgggctgagaaagggacagtctgctcagaagcagggaattggtgaagggacttgcgtgggaagggtatagtttatttagcaatcgtttggaatcaccaacatgtgacacggtgtgctctgtgtcctgcctgctcctaaccactctgccacagtctccaccaccttcccttttccatccctgtggtctgatggctcaggggttgctatgcagtggatggccctccttttaggttccctatctgtaactttggcatgtctttcctgagctagacctgctgccggagaagaaactagatctctaattctgagacctctgct

SEQ ID NO: 220 - DNA, 661 bp, Homo sapiens
  RIMS3
  misc_feature [331]..[331]: Chromosome 1, SNP identification no. = rs627178
  misc_feature [331]..[331]: allele = t, in linkage disequilibrium with rs1333827, respectively
  misc_feature [331]..[331]: n is a, t, c or g
aaaaggagggtccgggaggagtgaagaaaaaaggagaaagaatgcctggccctcttgcctctgtggcagaaggatgcattcagtccaccaggtacctctgatgtatcagactctatgagccaggcggcccctgccctcacggaggtgacattctagtggggacatgacccagagcaggtaattacacatggcatgtgtgtagaaaggagggacttgggctctggaacctatcactgaagttgctctcctgcagtctgtaatctgggaaaggttcctggaggtggcgacatcttagctgagtcatgaagggtgccaaggaattgtagaggcnaagaagggatgaggaaggggaactgtgtgtctgaggccctgttgatggtgagaacaggcttggcgtggtagagggagggcagtgtgggcaggcccaggacagcctggcccgatttcctagtctagcaggatactaaagacttgggaatttatcctcaggccaatggcaacccctaaagggttttaagcagaaaaggcaagatcagatttccccagaatgttagggtctatggccctcaggcagagccttcttgggagtgactttttgccctctcctacccttttccctgtgcagcagcctcggtcccagggaaccggttgtttatgtggc

SEQ ID NO: 221 - DNA, 661 bp, Homo sapiens
  RIMS3
  misc_feature [331]..[331]: Chromosome 1, SNP identification no. = rs500789
  misc_feature [331]..[331]: allele = t, in linkage disequilibrium with rs1333827, respectively
  misc_feature [331]..[331]: n is a, t, c or g
caggcctaaagctgctactctctgggcttcccaacttcctgcccaggtgctgagctctgtggggtctgtcaggggtctgggtgatgtctgcagctgcagtagcagctggccctttaaggagggaagaaaacaattatctggcctgggcattgcatcagctggagcctggagggtccctggggaggggggagcaggctggtggttgatttcattagtgccatgtgagaactctcacctgccccactccccagccacaaccttctcccccaggcaacagctgcctcagtgcctcctcccactccaggggcaccaccttggagaggtctctgtntgtaccccccagtcaatgtcatgggccccagaagaggagggaagtgtctctcacattggccttttgctgactgtggcactgtctctcctgttagcaatctgctgacttggggtgcagggtgcgtctcctgtactggcattttgctgacgatgggggtgtttctcccacactggcattttgttgacccaggggaggagtgacttctacactgtcctcactgacagtggggctgtctcctacactggtatatcactgacctcacagaagagctttaccagctggggtgtgtgtgaactgaaggcggaggttagaaacaagtgctctctggtt

SEQ ID NO: 222 - DNA, 661 bp, Homo sapiens
  RIMS3
  misc_feature [331]..[331]: Chromosome 1, SNP identification no. = rs518437
  misc_feature [331]..[331]: allele = g, in linkage disequilibrium with rs1333827, respectively
  misc_feature [331]..[331]: n is a, t, c or g
aggttgatctcgaactcccagcctcaagcaatccacccaccttggcctcccaaaacactggtacaggcatgagccaccgcacccagctcccatttacattttaattcatgccctcagcagggagactactggttttacatgcctccagcaaatattaattattctgtcctctctgtcagtgggtggaattcaaaacactggagcccaagagtggaactgaccagtcctaagcaaggttaaatatacaagttggggcaggcacgaccctaggaaagacttcatacagtatcctcccgggctgcagaagaacccaggactccaggagtctatntggaagtttatataggcagatgccaggccctagaacagagtttctcaacctcagaaacctgctgacatttcgggcctgacaattctctggcgcaggggctgtcctgtgcattgaaggcgtgtagcagcatccctggtctcttctcatgagacgccagtagcaacctcctcgttgggaaaaccaaaaatgtctccagacatggtcgaatgttccctggggggcaaaatcgccccaagtttaaaaccattgctctagaagtagagagcgcaggggaagcaggttaacttgggcttcagggccggccactctacttccttctgtctgaaaggg

SEQ ID NO: 223 - DNA, 661 bp, Homo sapiens
  RIMS3
  misc_feature [331]..[331]: Chromosome 1, SNP identification no. = rs518312
  misc_feature [331]..[331]: allele = c, in linkage disequilibrium with rs1333827, respectively
  misc_feature [331]..[331]: n is a, t, c or g
ctggctaatttttgtatttttagtagagatggggtttcaccatgttggccaggttgatctcgaactcccagcctcaagcaatccacccaccttggcctcccaaaacactggtacaggcatgagccaccgcacccagctcccatttacattttaattcatgccctcagcagggagactactggttttacatgcctccagcaaatattaattattctgtcctctctgtcagtgggtggaattcaaaacactggagcccaagagtggaactgaccagtcctaagcaaggttaaatatacaagttggggcaggcacgaccctaggaaagacttcntacagtatcctcccgggctgcagaagaacccaggactccaggagtctatttggaagtttatataggcagatgccaggccctagaacagagtttctcaacctcagaaacctgctgacatttcgggcctgacaattctctggcgcaggggctgtcctgtgcattgaaggcgtgtagcagcatccctggtctcttctcatgagacgccagtagcaacctcctcgttgggaaaaccaaaaatgtctccagacatggtcgaatgttccctggggggcaaaatcgccccaagtttaaaaccattgctctagaagtagagagcgcaggggaagcagg

SEQ ID NO: 224 - DNA, 661 bp, Homo sapiens
  misc_feature [331]..[331]: Chromosome 1, SNP identification no. = rs1505550
  misc_feature [331]..[331]: allele = g, in linkage disequilibrium with rs7555416, respectively
  misc_feature [331]..[331]: n is a, t, c or g
gtcagaccagagcgtctcttaagctcacagcccattggccgagagtcaatggccctaaccttccttcaaagggaggctagaaaatgcgggtgcacctgggcaatatttggtgagcgctactctctctgctgcataagtgaactaagtcattttgcttgctgagatcttgaagctgtattatatgcattggactttacaactggacttagactgttgtaagccagaggatcatggagggattgacaattctcatgcagaagtttctctgaattaggttgttcttgccctctttgcaatgatgcctttgacttcataacaaattaagactagncatggtcatttttggaaaatttttacacagagaatgtaaagtaacatttggcagcttcgtagatgcttttggagatggagtctcactttgttggcataggatgaccagcttgctggcctgggtagagataagctaaatgtaacagggagaagaaaaattgaaaataataaatggatcagcaagactggcttcttctggagactctgggattgaagccttacactctacctccctttgttaccatttataggtttgccaagaccgcatccattgtgcatcaaggttagccttcattcagccagcctgaggtgcagagcatggggtgggtcg

SEQ ID NO: 225 - DNA, 661 bp, Homo sapiens
  misc_feature [331]..[331]: Chromosome 1, SNP identification no. = rs10493711
  misc_feature [331]..[331]: allele = a, in linkage disequilibrium with rs7555416, respectively
  misc_feature [331]..[331]: n is a, t, c or g
tcatttttttatggagacggggtctcattatgctgcccaggctggtcttgcactcctggcctcaagcgattctcctgcctcagcccttcaaagagctgaaattacaggtgtaagttatagcacccagcccatggtcttgggtggttggatgatgctttttattaaaatgctttcccttgcatggtagcatttaatcttcacacaagccctgtgaggaatctaattcagttatcattatcttgtgcatgagaaaacaataaatcagtggagaagttgtatgttggtttagcttctaaagctgaagcttctagttctgtcagtccggtgatanagatagaataggatgcacaatcctagcccaggggtagttattattttgttgattatgtacataggagtatccaaacttagaatctactctatgagcagtccaggaaaatcaaatctatactatatctccattgaagtcagtaccattgtcttatgtcttcactttaggttctggcttatctaactgagtgaatggaaactcctcaagagggtttctggatatacagtcagattgtcagtttatatacatctttattttacagaagtatgttatcctctcatcacaaatctaaacacgactattcaaaactggctttttgctaaacaagag

SEQ ID NO: 226 - DNA, 661 bp, Homo sapiens
  misc_feature [331]..[331]: Chromosome 1, SNP identification no. = rs10493712
  misc_feature [331]..[331]: allele = c, in linkage disequilibrium with rs7555416, respectively
  misc_feature [331]..[331]: n is a, t, c or g
tgtatgttggtttagcttctaaagctgaagcttctagttctgtcagtccggtgataaagatagaataggatgcacaatcctagcccaggggtagttattattttgttgattatgtacataggagtatccaaacttagaatctactctatgagcagtccaggaaaatcaaatctatactatatctccattgaagtcagtaccattgtcttatgtcttcactttaggttctggcttatctaactgagtgaatggaaactcctcaagagggtttctggatatacagtcagattgtcagtttatatacatctttattttacagaagtatgttatnctctcatcacaaatctaaacacgactattcaaaactggctttttgctaaacaagaggcagtaacaatcaggacatcctgttaaaacagacacatcccaaatgataggacagaaataagaatgaaatgccttctatgaatctactctggtgaatgtaatttcagtaaccaaaagggttacaaagtgaaaaatattcaggggaagctttgttaaaggaagtagtaatgggatatgggagcatgttattctcagtttgtgggcatgaacccagacttaattactggtaaccaaaaatctattacatttggaaattttagaagctctgatggaa

SEQ ID NO: 227 - DNA, 661 bp, Homo sapiens
  misc_feature [331]..[331]: Chromosome 1, SNP identification no. = rs10874295
  misc_feature [331]..[331]: allele = g, in linkage disequilibrium with rs7555416, respectively
  misc_feature [331]..[331]: n is a, t, c or g
gtcagattgtcagtttatatacatctttattttacagaagtatgttatcctctcatcacaaatctaaacacgactattcaaaactggctttttgctaaacaagaggcagtaacaatcaggacatcctgttaaaacagacacatcccaaatgataggacagaaataagaatgaaatgccttctatgaatctactctggtgaatgtaatttcagtaaccaaaagggttacaaagtgaaaaatattcaggggaagctttgttaaaggaagtagtaatgggatatgggagcatgttattctcagtttgtgggcatgaacccagacttaattactngtaaccaaaaatctattacatttggaaattttagaagctctgatggaataatttaggatggaatgcttctgtttagtggatcactgtgcactgacacttttattttttaaatgattttttcatgtgcatatgttttctttttttctttttttgagatggcgtcccactcactctgtcactcaggttggagggcagtggcgaactctcggctcactgcaacaacctccacctccagggtccaagcaattctcctgcctcagcctctcccgtagttgggattacaggtacgtgccacaaagaccagctaatttttgtatttttagtagaggc

SEQ ID NO: 228 - DNA, 661 bp, Homo sapiens
  misc_feature [331]..[331]: Chromosome 1, SNP identification no. = rs6659379
  misc_feature [331]..[331]: allele = a, in linkage disequilibrium with rs7555416, respectively
  misc_feature [331]..[331]: n is a, t, c or g
ttcttgttcagtctgaaattcagaagaaactcttgccaactttatgaataatgagagttcccctttccatgtcgaaattactggccctgttgctgatatccataaattaagcagttgggttgttggtttttttgtttttcctttttgcaattaagcatgcagtgctcacaatgcacaataggtcccctagaagtgtgtctaatctttctactcctgtttaaaaaaaaaaaaaacctggatacaggatcttaaacaaagagtcagttgcagtacatctgtacagagctggagagttgagtcccaagaggatttacattgggaaaatccccanagcaatagaagagacaagcacaaacatgtccacactccaaatagtgaggcagaaactgctcccaggccaacatgttgtttcaaaggactggaaggcttttgtttagtaaaacataattcaaatagcggtgttcaccatataacagtttgctgataatgattatttcaataaagagtgaatgtgtaaagttattttctaatgtaatatgccaatttaaaatgcccacacggcacatgtatacatatgtaacaaacctgcatgttgtgcatatgtaccctagaacttagagtataataaaaaatatatataaaaaaataaaatgcccacatt

SEQ ID NO: 229 - DNA, 661 bp, Homo sapiens
  misc_feature [331]..[331]: Chromosome 1, SNP identification no. = rs6696329
  misc_feature [331]..[331]: allele = g, in linkage disequilibrium with rs7555416, respectively
  misc_feature [331]..[331]: n is a, t, c or g
actgctcccaggccaacatgttgtttcaaaggactggaaggcttttgtttagtaaaacataattcaaatagcggtgttcaccatataacagtttgctgataatgattatttcaataaagagtgaatgtgtaaagttattttctaatgtaatatgccaatttaaaatgcccacacggcacatgtatacatatgtaacaaacctgcatgttgtgcatatgtaccctagaacttagagtataataaaaaatatatataaaaaaataaaatgcccacattcttgctatcgtggtgtcatgatttgaagataagatcaagcagtagaaagttgacntccccctccagtgaactctcaaaatagacctttaaccgaagctgtgagactctggctcctttctgataatgacagaccttaatcaccgtagtagttttaaaaattttagggtagcaagcaccaccaatatctttgttcaggtctaactacttatttagaagagaagttttctgcagtcggagtcattcaccctgggagttgtggcactctttggttcaccttcaccccagcatgacagagcaggcggcaacctggaacattcactgggggatggagtttggctgtgtttataagcaacacctgtgtttatctgtgactcgaggtgccaga

SEQ ID NO: 230 - DNA, 661 bp, Homo sapiens
  misc_feature [331]..[331]: Chromosome 1, SNP identification no. = rs11163442
  misc_feature [331]..[331]: allele = c, in linkage disequilibrium with rs7555416, respectively
  misc_feature [331]..[331]: n is a, t, c or g
gttacccccatttgaccactgttgtttaatctcctcattgttaaaccatgagaatattataatgtaatagctataacaccatttacataactcatcttctattgttggatatcagattatttctaattttgcaatattaggacaaaggctgtcaattttattacatgctttgcaccctcacatttatgttgatttccttgaggccaaagactattttatatactcttgacatgtatcgctaaattactttccaaaagccttgtgccagtttatactcccaatcacaattttattttatgtaattaaaaagttataggttaaagactatttntctttggtttatttgatatttcttttattaataaaaactctgaacagctttccttagtttccattgcagttgaacttttttgttttggtggtaagttttttgctcatctacctattgggtccttagtatttttcaagttgtatatatgacatctctggttaataagggtattaaccatttgagagtggtagattttaaaggacaaaactatacaaaatgcttacttgtttagtgaagagctaatattaagacattttcagtctgtaaagaattgacttgtcatggtttgatcagacctgcgaagacacggtaggtgatttcatggcctca

SEQ ID NO: 231 - DNA, 661 bp, Homo sapiens
  misc_feature [331]..[331]: Chromosome 1, SNP identification no. = rs11163443
  misc_feature [331]..[331]: allele = a, in linkage disequilibrium with rs7555416, respectively
  misc_feature [331]..[331]: n is a, t, c or g
gattatttctaattttgcaatattaggacaaaggctgtcaattttattacatgctttgcaccctcacatttatgttgatttccttgaggccaaagactattttatatactcttgacatgtatcgctaaattactttccaaaagccttgtgccagtttatactcccaatcacaattttattttatgtaattaaaaagttataggttaaagactatttctctttggtttatttgatatttcttttattaataaaaactctgaacagctttccttagtttccattgcagttgaacttttttgttttggtggtaagttttttgctcatctacctnttgggtccttagtatttttcaagttgtatatatgacatctctggttaataagggtattaaccatttgagagtggtagattttaaaggacaaaactatacaaaatgcttacttgtttagtgaagagctaatattaagacattttcagtctgtaaagaattgacttgtcatggtttgatcagacctgcgaagacacggtaggtgatttcatggcctcagtcatgttcttagacgaaatattgtttaagatcattgacagatcctttttttgttgacattgggaggtagatgtatgagaaaattaattgattggttatcaatcaatcaatcta

SEQ ID NO: 232 - DNA, 661 bp, Homo sapiens
  misc_feature [331]..[331]: Chromosome 1, SNP identification no. = rs1144349
  misc_feature [331]..[331]: allele = t, in linkage disequilibrium with rs7555416, respectively
  misc_feature [331]..[331]: n is a, t, c or g
gatatttcttttattaataaaaactctgaacagctttccttagtttccattgcagttgaacttttttgttttggtggtaagttttttgctcatctacctattgggtccttagtatttttcaagttgtatatatgacatctctggttaataagggtattaaccatttgagagtggtagattttaaaggacaaaactatacaaaatgcttacttgtttagtgaagagctaatattaagacattttcagtctgtaaagaattgacttgtcatggtttgatcagacctgcgaagacacggtaggtgatttcatggcctcagtcatgttcttagangaaatattgtttaagatcattgacagatcctttttttgttgacattgggaggtagatgtatgagaaaattaattgattggttatcaatcaatcaatctattgagatacatttatgaaggacttaagataaaaatgcctgtgagaaaacttagttttaattattttactcctgtacatataattttaaagagatattgccattaacgaacaaacttagagaaaactgtattgagaaatttaacccaccaaatttggaattgttgttaaaatgcattttaaataatgagttttccaaataactactctttattttttcatattctttttaaa

SEQ ID NO: 233 - DNA, 661 bp, Homo sapiens
  misc_feature [331]..[331]: Chromosome 1, SNP identification no. = rs10747391
  misc_feature [331]..[331]: allele = g, in linkage disequilibrium with rs7555416, respectively
  misc_feature [331]..[331]: n is a, t, c or g
taggctactgtgacataattgatgatcaagctggaatgtgagaattgcaatttagaaaagaacaagaattgagaaattctgacacattcattttttttcactatttgtttgttagaaacagttatattaaaggtgattaaaaaccataaggctagttttgttaaatatacttggttgatgacctctaaaaggaacatttgcttagttcaaataattggaagaataagcttttagggggctgcattacttgtattctattcattgaaatatggtggagtgacttctagtatctgcgtgtcaggagaaccgatgtattaacaaattccagggncagctgtgaagacgaaagctgtcagtaacttctcattaaattccaagcttcggcctagcatggagaatgtgctagtctctgtgatggatgatctttttcaaatgctgcatggaaatggctttctattgtgagtggttaatcttactgaattcaaatcaagactttctcagaattttgttgtatatccttttagttttgaaatctgggatatttaagactcaatttttttatttttatttttgaaagtgttctttttgattggaacaataattgtacatatttaaggggtacaacgtgttgttttgatacttgtatacattgagtaatgag

SEQ ID NO: 234 - DNA, 661 bp, Homo sapiens
  misc_feature [331]..[331]: Chromosome 1, SNP identification no. = rs1505547
  misc_feature [331]..[331]: allele = c, in linkage disequilibrium with rs7555416, respectively
  misc_feature [331]..[331]: n is a, t, c or g
gatcattgtaggtgtgcacctctttagccgttttggttaactttggcattaaaacaatctctgagaaaagtttgacctttcagagagatggtcgtctttcaaaattgcatcagtgggatattctcaggtaggattatgcaggagttcttctgttatggcaatgctttaatgaatgtaaaacctttcagatgctggatgacttgctgtgtctgattctcttcaccaggttgacagagtcaggatttttgccttttaatgaaatgagttatctcttgggtcctttgaaacctaattggcagaagggctgggtacaaccctgatagggagtgcntttcatagaaggattttttttttccagccttaaaagctaaaaagaagctttgtgccaaaaacctttatgatgtgcagttttctatcactaaaatgaccccgtgttttaattcaacaggttttaaacacacatttcttagaagctaagaagggacatttcagagtttattgggacctttcagaattatgaaaatatccagccctaaatgctaaaaacaagctttgtgccaaaaagctttattatgtcttgatttttttttaatttttaatttttattataagttccagggtatatgtgcgggatgtacaggtttgttacatagataaacgt

SEQ ID NO: 235 - DNA, 661 bp, Homo sapiens
  misc_feature [331]..[331]: Chromosome 1, SNP identification no. = rs11163444
  misc_feature [331]..[331]: allele = a, in linkage disequilibrium with rs7555416, respectively
  misc_feature [331]..[331]: n is a, t, c or g
tggccattttcagggtaatgattcttcctatccatgagcatggaatgattttccatttgtttgtattctctcttatttccttgagcagtcttttgtagttctccttgaagaggtccttcacttcccttgttagttgtactcttagttattttattctctttgtagcaattgtgaatgggagtttatttatgatttggctctctgcttgtgtgttgttggtgtataggaatgcttgtgaattttgcacattgattttgtatcctgagactttgctgaagttgcttatcagcttaagaagctttggggctgagatgatggggttttctagatncaggatcacatcatctgcaaataaagaaaatttgacttcctctcttcctatttgaatacctttatttctttctcttgccttatccccctggcctgaacttccaatagtatgttgaataggagtggtgagtgagagcatccttgtcttgtcctggttttcaaggggaatgcttctagcttttgcctattgagtatgatattggttgtgggtttgccataaatggttcttattattttgagatatgttccctcaaaacctagtttattgagcgtttttcacatgaagtgatgctgaattttatcaaagacattttctgcatctattgagata

SEQ ID NO: 236 - DNA, 661 bp, Homo sapiens
  misc_feature [331]..[331]: Chromosome 1, SNP identification no. = rs4376782
  misc_feature [331]..[331]: allele = t, in linkage disequilibrium with rs7555416, respectively
  misc_feature [331]..[331]: n is a, t, c or g
tcaacttggttctgttttccccatctctttaggtaccccaatcagtcataggttcagtctttttacataatcccatagttcttgaagattttgtttgttccttttcattatttttctccaatcttgtctgcctgccttttttcaacaagatagtactcaagctctgatatcctttctttcacttggtctatttggctgtttatacttgtgcttgcattgtgaagttctcgtgttgtgtttttcagttccataaggtaatttatgtttctttctaaactggttattctttttaacagctcctgtaatgttttatcatggttcttagctttgntgcaaggggttaaaatatatttctttagctcagtgaagttcattattacccatcttctgaagccttcttctgtcaatttgtctccacctaagcccagttctgtgcccttgctgtgtaagtgttaagatcatttggaggagaagaggcactctggctttttgagttttcaatgtttttctttgattctttctcttattcatgggtttatctacctttgatctgtgaggctgttgacctttggatgcagtttttgtggggtcttttttttgatgatgttgttgttgctttctgtttgtttttcttttagcagtcaggcctatcttctgtggg

SEQ ID NO: 237 - DNA, 661 bp, Homo sapiens
  misc_feature [331]..[331]: Chromosome 1, SNP identification no. = rs10874297
  misc_feature [331]..[331]: allele = g, in linkage disequilibrium with rs7555416, respectively
  misc_feature [331]..[331]: n is a, t, c or g
aaagatggcattctatccttcctctgggagctctgttccagaaaggcacctacctgatgccagccaaaatgctcctgtatgaagtgtctgaagacccctgttgggatgtctcacccagtcaggaggaatgggatctgggacccacttaaataagcagtctggctgccccttgacaaagtaggtgtgctgccccctcatctgggctgccccgactctccagagccagcaggcagaaaagactaagaccactgatccacaatactgcagctgtccctcctcctaggggcttctataagggagagcagaattctatccataaacccctggctgnggatgccgataatccctcagcgagaccccacccagtgagaaggaataggttgggatcttgcttaaagaagcatcctggccgtgaactgtcacagccactgcagtgtgctgtggggaaattctcctggtccaaaccgtctggtcttgctggcagcaacggcaagggaaaatggccgactggagccacagtgatggcggcggccttccccacctcgaaactcagtcttcttagggagtttctagccatctgtgctggctggcatggattacaagtgagtgggctttagcttcagcttttggggttctttgggactgggacctgcagattgag

SEQ ID NO: 238 - DNA, 661 bp, Homo sapiens
  misc_feature [331]..[331]: Chromosome 1, SNP identification no. = rs786371
  misc_feature [331]..[331]: allele = g, in linkage disequilibrium with rs7555416, respectively
  misc_feature [331]..[331]: n is a, t, c or g
agccactgcagtgtgctgtggggaaattctcctggtccaaaccgtctggtcttgctggcagcaacggcaagggaaaatggccgactggagccacagtgatggcggcggccttccccacctcgaaactcagtcttcttagggagtttctagccatctgtgctggctggcatggattacaagtgagtgggctttagcttcagcttttggggttctttgggactgggacctgcagattgaggctgcttggctctcttgcttcagccctcttcccatgggagtagatggtcttctgcctcactgaagttctagagctgtagtatgtgaaaactcntgtgtctcagtgcctgcctgagtggccacccacccaagcagctgcagtgagtttgtgcagctctgtgcttgggacccaaagccttggcagaatgggttcacgaggggaactcctgatctgcaggttgcaaagaccattgggaaagtgtggttttcaggattgggtagcacaatccttcaccaccttccttggctgggggagggagctccctttgccctgtgcagctcctggtgggccctcactccaccctgcttttcttcactctccatgagtcatgccaaccacctagtcagtcccagtgaaagaatctggatatctcaattgaagatg

SEQ ID NO: 239 - DNA, 661 bp, Homo sapiens
  misc_feature [331]..[331]: Chromosome 1, SNP identification no. = rs4001746
  misc_feature [331]..[331]: allele = g, in linkage disequilibrium with rs7555416, respectively
  misc_feature [331]..[331]: n is a, t, c or g
cttgggacccaaagccttggcagaatgggttcacgaggggaactcctgatctgcaggttgcaaagaccattgggaaagtgtggttttcaggattgggtagcacaatccttcaccaccttccttggctgggggagggagctccctttgccctgtgcagctcctggtgggccctcactccaccctgcttttcttcactctccatgagtcatgccaaccacctagtcagtcccagtgaaagaatctggatatctcaattgaagatgccaaattctcttgctattttcattcttctctatgggagccacagagtggagctgtttctatttgaccntcttgggctacagaccagagcggttcctattttgccattttggctgctcccagcagatggattcttagcaaaaacctagaggtcagctttttccttatagagtgcagtggatcttagggtgttctggataatatctgcctaaagtagacggataaaatgataagacttactagagatgatctcacaagtcttgaaatttagtaatgggtagaaaagcatagtgattaaagactgggaactttggacttaacatatttcagtgcaaattttacctctatccctcagccactgaatggctttgggcaaatggcttatcactctccatctttg

SEQ ID NO: 240 - DNA, 661 bp, Homo sapiens
  misc_feature [331]..[331]: Chromosome 1, SNP identification no. = rs786372
  misc_feature [331]..[331]: allele = c, in linkage disequilibrium with rs7555416, respectively
  misc_feature [331]..[331]: n is a, t, c or g
gaatgggttcacgaggggaactcctgatctgcaggttgcaaagaccattgggaaagtgtggttttcaggattgggtagcacaatccttcaccaccttccttggctgggggagggagctccctttgccctgtgcagctcctggtgggccctcactccaccctgcttttcttcactctccatgagtcatgccaaccacctagtcagtcccagtgaaagaatctggatatctcaattgaagatgccaaattctcttgctattttcattcttctctatgggagccacagagtggagctgtttctatttgaccgtcttgggctacagaccagagcngttcctattttgccattttggctgctcccagcagatggattcttagcaaaaacctagaggtcagctttttccttatagagtgcagtggatcttagggtgttctggataatatctgcctaaagtagacggataaaatgataagacttactagagatgatctcacaagtcttgaaatttagtaatgggtagaaaagcatagtgattaaagactgggaactttggacttaacatatttcagtgcaaattttacctctatccctcagccactgaatggctttgggcaaatggcttatcactctccatctttgttttcatgtctataaaatagaa

SEQ ID NO: 241 - DNA, 661 bp, Homo sapiens
  misc_feature [331]..[331]: Chromosome 1, SNP identification no. = rs3862244
  misc_feature [331]..[331]: allele = t, in linkage disequilibrium with rs7555416, respectively
  misc_feature [331]..[331]: n is a, t, c or g
tgcaaagaccattgggaaagtgtggttttcaggattgggtagcacaatccttcaccaccttccttggctgggggagggagctccctttgccctgtgcagctcctggtgggccctcactccaccctgcttttcttcactctccatgagtcatgccaaccacctagtcagtcccagtgaaagaatctggatatctcaattgaagatgccaaattctcttgctattttcattcttctctatgggagccacagagtggagctgtttctatttgaccgtcttgggctacagaccagagcggttcctattttgccattttggctgctcccagcaganggattcttagcaaaaacctagaggtcagctttttccttatagagtgcagtggatcttagggtgttctggataatatctgcctaaagtagacggataaaatgataagacttactagagatgatctcacaagtcttgaaatttagtaatgggtagaaaagcatagtgattaaagactgggaactttggacttaacatatttcagtgcaaattttacctctatccctcagccactgaatggctttgggcaaatggcttatcactctccatctttgttttcatgtctataaaatagaaatccaattcctatctctgagtgtttttaggattaaa

SEQ ID NO: 242 - DNA, 661 bp, Homo sapiens
  misc_feature [331]..[331]: Chromosome 1, SNP identification no. = rs3899791
  misc_feature [331]..[331]: allele = a, in linkage disequilibrium with rs7555416, respectively
  misc_feature [331]..[331]: n is a, t, c or g
aaggtggtctagtttgggaaagagctattattgtccatgctttaaggttaaactataaactaaattcctccctaaattagcttagcctatctccaggattgaacaaggacagcatgaagcttagaagcaagatggagtcaactgtgtcagatttctcttgctgtcataattttgcaaaggtggtttcatatttagtcattatttcttaagcaggaaagataaagaagttaaagtttactgaaaagtaatctacacaagtaatctaggagaagccatcatttttcacatggaattattgtgccaggaaaattcaccatttaccattctgccngtgtttctcctacatagctattcacaggttaaagctttatgtttcagactctgtaacattgggaaaatcattccactggttcatttatgagtctttgtaaattctgagaggaatttaaagtgttgtgtcaggtttagagtcaggtatttgaaagctttggcactcctgggttaagccatctcaaatataagatggaattaaagcaagggaaaaataataacacattaacttttaattcattgttgtcttagagcctgaaggcctctgagaggtttaacaaaagaccatgaagaataacatgcttgaaatacactccaaagaagaagaaag

SEQ ID NO: 243 - DNA, 661 bp, Homo sapiens
  misc_feature [331]..[331]: Chromosome 1, SNP identification no. = rs10747392
  misc_feature [331]..[331]: allele = c, in linkage disequilibrium with rs7555416, respectively
  misc_feature [331]..[331]: n is a, t, c or g
acaccctatgatttcatccccaaccaatcagcagcacccattccctagtctcccagtcatcaaattgtccatgcaaaccctaacctctgagcttttagggaggctgatgtgagtgataactccagtttttcccatgtgggctggcctctcatcagttaaattctttctcgactacaatgccatggtctcagtgaattcattttgtctgtgcagcaggcaggaaaaacctgttagatgattacaaattttctttctttattatttatctccatctacacatgacactaaaaaatcaccaatttaaataaattattaaaaatcatgattattncccccccaggctatatatagatagaagccaaaccacctgtgttgaagagacacctaaactcagtatggtacagtatgctaggtacagtcagagcagaaacagtatagctcaaccgtaaactatttattactttttaaaaatttttgtctagattttaatttaatgcccttaattttctaaatcttgacttagtttcttggatggtacatcctaattattgatcaattacatctttaaattcaatttttccaaacttgtgcctgaaatatattgatagctttatgctatgatattacacattgatgaaagggacaataacacccagagtgt

SEQ ID NO: 244 - DNA, 661 bp, Homo sapiens
  misc_feature [331]..[331]: Chromosome 1, SNP identification no. = rs786377
  misc_feature [331]..[331]: allele = g, in linkage disequilibrium with rs7555416, respectively
  misc_feature [331]..[331]: n is a, t, c or g
tgcagcaggcaggaaaaacctgttagatgattacaaattttctttctttattatttatctccatctacacatgacactaaaaaatcaccaatttaaataaattattaaaaatcatgattattccccccccaggctatatatagatagaagccaaaccacctgtgttgaagagacacctaaactcagtatggtacagtatgctaggtacagtcagagcagaaacagtatagctcaaccgtaaactatttattactttttaaaaatttttgtctagattttaatttaatgcccttaattttctaaatcttgacttagtttcttggatggtacntcctaattattgatcaattacatctttaaattcaatttttccaaacttgtgcctgaaatatattgatagctttatgctatgatattacacattgatgaaagggacaataacacccagagtgtctagttaccacaatggtcctggcaatgcagagattacacacttggctatgagctgaaagcataccttttgcatatcacttgagctgatggatattttgatttcatactcaggactgtcagcctgaaattttgatcataagtaccagaaggagtttcaaaattaccttgataaaattcttagacactgctagataaagtacattattgt

SEQ ID NO: 245 - DNA, 661 bp, Homo sapiens
  misc_feature [331]..[331]: Chromosome 1, SNP identification no. = rs10493709
  misc_feature [331]..[331]: allele = t, in linkage disequilibrium with rs7555416, respectively
  misc_feature [331]..[331]: n is a, t, c or g
cttggctatgagctgaaagcataccttttgcatatcacttgagctgatggatattttgatttcatactcaggactgtcagcctgaaattttgatcataagtaccagaaggagtttcaaaattaccttgataaaattcttagacactgctagataaagtacattattgtgttcagtgcaatgcattttactaaacagtctacatttacaacattgaatattttacaacaaaataagtgtaagttatgaataaatcaatttcatgtcagaacagtttatattacagaaagttgctccaacctgaagtacttagcatgtttgcattttagagcnttcaattcgactggaaaatagttcagtgttttagataattaatatgatgccctacaaaataggtaaaggtatttttaaagttaaaaaaaaaaactcagaaaaaaaaattggaagagaatttgttgtgattatggaggaggttggaagactagaattaaaacaaaactgccctaattgtaactgctgtgtttgtgatgggtgtaagacaacagtgatgaattatttcctctcttctagaactggctgcctgcttcctcccatgatttccagatatagaccaaaatgtactaatgatgcttctttgctgtattatataactgttgacctaca

SEQ ID NO: 246 - DNA, 661 bp, Homo sapiens
  misc_feature [331]..[331]: Chromosome 1, SNP identification no. = rs7555416
  misc_feature [331]..[331]: allele = a, g
  misc_feature [331]..[331]: n is a, t, c or g
tcatgaagagtttagaaaacaactttgtgctctaatagttgttcacaaaagattattaattgaactgctatttttttcctcaatggttatatattgcacttttcgttataagtgaaataaaacacttaaagacacacattggataaaaagcattactctcagcttttgcaacactctctgatttatttgagaccgtgtcctctatcctgtgtctggtcatttgagatctgccaggtaagtaaatgaacagactgagcataaacgtgtaaagctttctataattttgaaaacaatgaaactgtagaagacaatagaacttgcagcagtaacngtgaaatggcttaccaaagtgaattactgggttgcaccagatttcatctagctctttaacatatgtttatctatccaactatctatttatctatctaatgtgtgtgtttacacacaatacataaatgttatgcaaaaagtatatagaagcagatgtcacacaaagattaaatgttattttttatatgtctctaaagtctgtgtctcaaattaatacaatggattgtcagatttttccattgttccacttcaaagcatgcaattatattgccttaattggaagcactgatgtgttttcaccaaggatgtttatttgtattctgactactga

SEQ ID NO: 247 - DNA, 661 bp, Homo sapiens
  misc_feature [331]..[331]: Chromosome 1, SNP identification no. = rs786383
  misc_feature [331]..[331]: allele = g, in linkage disequilibrium with rs7555416, respectively
  misc_feature [331]..[331]: n is a, t, c or g
cactctctgatttatttgagaccgtgtcctctatcctgtgtctggtcatttgagatctgccaggtaagtaaatgaacagactgagcataaacgtgtaaagctttctataattttgaaaacaatgaaactgtagaagacaatagaacttgcagcagtaacagtgaaatggcttaccaaagtgaattactgggttgcaccagatttcatctagctctttaacatatgtttatctatccaactatctatttatctatctaatgtgtgtgtttacacacaatacataaatgttatgcaaaaagtatatagaagcagatgtcacacaaagattaantgttattttttatatgtctctaaagtctgtgtctcaaattaatacaatggattgtcagatttttccattgttccacttcaaagcatgcaattatattgccttaattggaagcactgatgtgttttcaccaaggatgtttatttgtattctgactactgagatataaatatgggactatttgctatttttagttttctactaacatggatttttttttaaaacaactttttatctttataaacagacacattgagtttatcgtcagttcaaaactctgaatttatggtcaatcttaaaatcttaactagtttttgtactgaaatggatctt

SEQ ID NO: 248 - DNA, 661 bp, Homo sapiens
  misc_feature [331]..[331]: Chromosome 1, SNP identification no. = rs3862245
  misc_feature [331]..[331]: allele = c, in linkage disequilibrium with rs7555416, respectively
  misc_feature [331]..[331]: n is a, t, c or g
gcagttgactgggtggaggtgcctctgctaccatggcaagatctgactgcttcagcctcttgagcctcctcttagatgtgcagccctcacccactgccctgctccagccacactgcctcctgtcagttggaacagtctaagctctggctttcatcaggtgcctgttgatatctttctcctggcttttcacaggactcatctccttagttctcatttcaagtgtcatctcctcagaaaagcttttttataactattcctctctaaaggaagacgttctttgtatttttaaacctgttctctgctgggttttttttttttctgactgcacacnctaatctgtaatgaccttatttatttggttgtgtaatataacctaatgcccctgagggcctttgtaccccttctgcctaggaaagtgccttgcgcataggagatgtgcagtgaataggatatttgttaaacaaatgaatgaatgaatgaatgaatgaatgaacgaacaagttattgttttaccactgtctcaattttgagctctttggactgaattcccattcagagaaagcgctaggggtcttgaagaaagacattgagaaaaatcaaatgaaatgttggcactatgatggtctcctaatgaaagctcgatatatactaattatttgtg

SEQ ID NO: 249 - DNA, 661 bp, Homo sapiens
  misc_feature [331]..[331]: Chromosome 1, SNP identification no. = rs796800
  misc_feature [331]..[331]: allele = t, in linkage disequilibrium with rs7555416, respectively
  misc_feature [331]..[331]: n is a, t, c or g
atagttataaaaaagcttttctgaggagatgacacttgaaatgagaactaaggagatgagtcctgtgaaaagccaggagaaagatatcaacaggcacctgatgaaagccagagcttagactgttccaactgacaggaggcagtgtggctggagcagggcagtgggtgagggctgcacatctaagaggaggctcaagaggctgaagcagtcagatcttgccatggtagcagaggcacctccacccagtcaactgccctgatgggctccatcagcacgacacaacctcagaggtgttggcttcattttttttcggtgaagcacattccatgcnaaatttactaaataggtgttttatggtatcccagtaacaggtattttaactattctttttcactgatggtcccaatcctataactaaaatgcagctgtaattacttaccacaaaacaacaaaaataacaataaaaaaaacagatccagaaaagttaagtaacttgccccaggctacaaggtcatgaatgaggaatagagcctaggcttcacctcaaagcttggaatctttccactataagactccatcttaaaaaaaacaaaaacaaaacaatcaaacaaaaaaaaaaacaaaactgtggggtggagtggcaggtagaaagatattattg

SEQ ID NO: 250 - DNA, 661 bp, Homo sapiens
  misc_feature [331]..[331]: Chromosome 1, SNP identification no. = rs786387
  misc_feature [331]..[331]: allele = a, in linkage disequilibrium with rs7555416, respectively
  misc_feature [331]..[331]: n is a, t, c or g
ttttctgaggagatgacacttgaaatgagaactaaggagatgagtcctgtgaaaagccaggagaaagatatcaacaggcacctgatgaaagccagagcttagactgttccaactgacaggaggcagtgtggctggagcagggcagtgggtgagggctgcacatctaagaggaggctcaagaggctgaagcagtcagatcttgccatggtagcagaggcacctccacccagtcaactgccctgatgggctccatcagcacgacacaacctcagaggtgttggcttcattttttttcggtgaagcacattccatgccaaatttactaaatagntgttttatggtatcccagtaacaggtattttaactattctttttcactgatggtcccaatcctataactaaaatgcagctgtaattacttaccacaaaacaacaaaaataacaataaaaaaaacagatccagaaaagttaagtaacttgccccaggctacaaggtcatgaatgaggaatagagcctaggcttcacctcaaagcttggaatctttccactataagactccatcttaaaaaaaacaaaaacaaaacaatcaaacaaaaaaaaaaacaaaactgtggggtggagtggcaggtagaaagatattattggtgcaccttcaatcac

SEQ ID NO: 251 - DNA, 661 bp, Homo sapiens
  misc_feature [331]..[331]: Chromosome 1, SNP identification no. = rs946950
  misc_feature [331]..[331]: allele = a, in linkage disequilibrium with rs7555416, respectively
  misc_feature [331]..[331]: n is a, t, c or g
gacattggtctgtgtgcaatgacattcctaatagacctaaagagctaagtggggatttctacttggtttgagactaaaaggatggaagctttgtagctcccccttggtattaacataattccccctttttgtattcaagttacatatgcatagttttatttttaaaaatagagcctctgttttctctctccagaaatctgagcactggtatcatattgtacttagttgttccatgggacaaaatggatcacaagtctgtgaattcaaatggtggcctattgctgctttttaaatcactgggatcctgaatattaatttcacatatgcacantttaaaccataattaaattgaacagcaatctgatggaaggttccatcttgtagtacttagactttattctcagactcctcagggatactatagttttctttttctgttcagcattctgcacttgatatatctcttttgggtcatatttttccatgaagttattttaatttaggagcatttttgtggaaataaattcctcacatttgggccactctaataggataagagttgtggagaggagtggaataggatgtacagtgagttttaaaaaaaacaacaaacaaaaaaaccaggttcctgactggtgtaatactgtgtgactttacttaa

SEQ ID NO: 252 - DNA, 661 bp, Homo sapiens
  misc_feature [331]..[331]: Chromosome 1, SNP identification no. = rs946951
  misc_feature [331]..[331]: allele = g, in linkage disequilibrium with rs7555416, respectively
  misc_feature [331]..[331]: n is a, t, c or g
cttggtttgagactaaaaggatggaagctttgtagctcccccttggtattaacataattccccctttttgtattcaagttacatatgcatagttttatttttaaaaatagagcctctgttttctctctccagaaatctgagcactggtatcatattgtacttagttgttccatgggacaaaatggatcacaagtctgtgaattcaaatggtggcctattgctgctttttaaatcactgggatcctgaatattaatttcacatatgcacattttaaaccataattaaattgaacagcaatctgatggaaggttccatcttgtagtacttagnctttattctcagactcctcagggatactatagttttctttttctgttcagcattctgcacttgatatatctcttttgggtcatatttttccatgaagttattttaatttaggagcatttttgtggaaataaattcctcacatttgggccactctaataggataagagttgtggagaggagtggaataggatgtacagtgagttttaaaaaaaacaacaaacaaaaaaaccaggttcctgactggtgtaatactgtgtgactttacttaattgagacttgttaaccgactgactctaatggaagaaaagaggaaagcacaaagagagaaaa

SEQ ID NO: 253 - DNA, 661 bp, Homo sapiens
  misc_feature [331]..[331]: Chromosome 1, SNP identification no. = rs946953
  misc_feature [331]..[331]: allele = g, in linkage disequilibrium with rs7555416, respectively
  misc_feature [331]..[331]: n is a, t, c or g
attttaaaccataattaaattgaacagcaatctgatggaaggttccatcttgtagtacttagactttattctcagactcctcagggatactatagttttctttttctgttcagcattctgcacttgatatatctcttttgggtcatatttttccatgaagttattttaatttaggagcatttttgtggaaataaattcctcacatttgggccactctaataggataagagttgtggagaggagtggaataggatgtacagtgagttttaaaaaaaacaacaaacaaaaaaaccaggttcctgactggtgtaatactgtgtgactttacttnattgagacttgttaaccgactgactctaatggaagaaaagaggaaagcacaaagagagaaaaattgtgttccgtagtggtatttttccagtttgtcttttttaaacatgtttttgtggagtcatgagttgaaaaatttctttgggcaactgtagtttcttaggatctccacacaataactttctccccatcagtcttggggagttctaccaggtggagagggttcaggatttggggtaagcatgtcattagaactttccagttgcctaggattggcataacctagagtagaaggtcccagacgaggactgcatctagtaacataacgatc

SEQ ID NO: 254 - DNA, 661 bp, Homo sapiens
  misc_feature [331]..[331]: Chromosome 1, SNP identification no. = rs2636201
  misc_feature [331]..[331]: allele = g, in linkage disequilibrium with rs7555416, respectively
  misc_feature [331]..[331]: n is a, t, c or g
acatatccactgctttcatgaatctactttcactgagtctgattattttatcacctgcttaagacattttctctcgacaccatctcctacagtggatctcagcaattttgacgtcatggtccatctgacactatgctgttgatgtgattctttagacactccactgtctttgggttagtccccatcaaatatgaccactttctagacttcatcatcacattgatcttgaaccatctgccctctctggacataacctgtttgcaaattgtttcctcttattttgaaaaatccataaagatcttttttttttgcccttattaggccccctggncattataactatttcaataattgcatctgatttacttgccccctcaagatgtttcataaggcattaatccataaatgaagacagagccctgatagcctaaacatcctgtaaagactcctcaatactgttatattagagattaagttatcacatgagttttggagcagacacaaacattctaatcacagcaccaatcatgaggagtaacgtgacagatgataaatgtaaagtcagagttgaaaggggtagtgaacttaactagttgttattaaaatagcttacttttgcaatgtaaaaggaagtgtgatcctgtgaacgtatctttaggtc

SEQ ID NO: 255 - DNA, 661 bp, Homo sapiens
  misc_feature [331]..[331]: Chromosome 1, SNP identification no. = rs2792460
  misc_feature [331]..[331]: allele = g, in linkage disequilibrium with rs7555416, respectively
  misc_feature [331]..[331]: n is a, t, c or g
ataattagccaggcttggtggtgcacacctgtagtcccagctactcaggaagctgcgttgggaggatcacttgagcctgggagattgaggctgcagcgagctgtgattgcaccactatgctccagtctgggagacagaacaagaccctacctcaaaataaacaaataacaaacagaaagcaagaacatcaaaaaatgcagcatgctgtgttggaggtgttctgtaattggtttggtggcagctacattgttatatacatacataaggcatcaatggtgtgggaataaagtgaagtagtaaagtaaatgtggctggcaatattcttgatganggagaaaaaaaatctagctagctgtgcataatgcaaaacttaattaaaaggccaacatcgggaggagccaagatggccgaacaggaacagctccggtctacagctcccagcgtgagtgacgcagaagatgggtgatttatgcatttccatctgaggtaccgggtccatctcactagggagtgccagacagtgggcgcaggccagtgggtgcgcgcactgtgcgcgagccgaagcagggcgaggcattgcctcacctgggaagtgcaaggggtcagggagttccctttccaagtcaaagaaaggggtgacggacgcacctggaaaatcggg

SEQ ID NO: 256 - DNA, 661 bp, Homo sapiens
  misc_feature [331]..[331]: Chromosome 1, SNP identification no. = rs2784743
  misc_feature [331]..[331]: allele = t, in linkage disequilibrium with rs7555416, respectively
  misc_feature [331]..[331]: n is a, t, c or g
acacaagcaaatacaaaataaataagcaaggaatttgaagccatcccagtactgtttattgtacatgacctaacctggggttgaaataagccctctctcaatatgtgcacaaaaagacaagcgcacatattgatcagaaaatcgtgtttcaatacactcattttcattttcaaagttgaaatttttattagatcctcaaaagtattgtattcaaattcactcaagagaaatctttataagagaaaatataaattgaatttcacgtgctacacctattttagggatttgggaataaaagataaaagaaactaattttctataaatcctggtntattatcaaaatggtacactaatttttatattaaattatttaactattagcatataataaaattaaaaatgatagttctgttttacagttacaaagcattgaatttgaatataatttaataataatatgtaaaatgcactatcatatgaagttgatctgattaacttcataatttgatatacttataaaatactattaaaaatatattaacatggttccctttaaaacattatttcctctgatatgactatgcccaatgctttaatgcatatgaccaaatgctttaatttattccctaaacattatcttgacactattggtttctataat

SEQ ID NO: 257 - DNA, 661 bp, Homo sapiens
  misc_feature [331]..[331]: Chromosome 1, SNP identification no. = rs785605
  misc_feature [331]..[331]: allele = g, in linkage disequilibrium with rs7555416, respectively
  misc_feature [331]..[331]: n is a, t, c or g
ccaacatggagaaaccctgtctctaataaaaaatacaaaattagccaggaatggtggcacatgcctgtaatcccagctactcaggagcctgaggtaagagaaacacttgaacctgggaggcagatgttgcagtgagctgagatggagtcattgcactccagcctgggcagcaagagagagattccatctcaaagaaaaagaaaaaaaaagaaaagaaaaaagaaaacttctagagaaggagcttgactggcatggctaaggtcaggttctacccctagacccgttgactctgatcaaagaggccatattacgatgtacgtctgaatattcncacctttctcagaaagagggagatcataccgttctaaaaagacattccaattgatgtccactacaacatccaagtgaatgctagtccaattgaacttaattaaaataatggcagtatagtaaccatttaccataagcaaagcatgttgctaaatgttttacctatgttgtttcattttatatttatgataatcctatgatgtaggttttcttatgtgtattgttatccccatatcacagaggagaaattaagacttagagagtttaagtgatgtattcagaatcatacagctagaaaatggcagagtgaaccctaactgcaaagtttgtg

SEQ ID NO: 258 - DNA, 661 bp, Homo sapiens
  misc_feature [331]..[331]: Chromosome 1, SNP identification no. = rs3850862
  misc_feature [331]..[331]: allele = a, in linkage disequilibrium with rs7555416, respectively
  misc_feature [331]..[331]: n is a, t, c or g
gcactggattctcataaggagcctgcaacctagatcccgtgcgtgcacagttcacaatagggtttgtgctcccatgagaatctaatgctggtgctgatctgatgggaggcagagcttaggtggcaatgcgagtgatggggagcagctgtaaatacagatgaagctttgcttgctcacctgctgctcacctccctctgtgcagcccggttcctgctgtaccatccgtggcttgggggttagggatccctgctctagggaatctagaggaaaagggacaagcagatcccccacagcagcatgatgtagcaagttaactaaagaattgaatgangtttcttctgaatgtgtgagaggcatattttatttttcataaaacaacaaaagaaattgggcaaaaaatactttcttatttaataatttggagtttatgcaaacaaaaaataatgcaagttttaaaaatgctaataaaatttgtatttctgaaaattgattcaaaaatatatatcattgtttaataaagaatagttgtaataataaactgtagttttactaaaatgataaaattcactggaggatataaaaaacaggcagcaatattacacaatctttagataggaaactgaaaaaaaaaaagaaaagaaacccaaaccacgaaatccct

SEQ ID NO: 259 - DNA, 661 bp, Homo sapiens
  misc_feature [331]..[331]: Chromosome 1, SNP identification no. = rs2636204
  misc_feature [331]..[331]: allele = t, in linkage disequilibrium with rs7555416, respectively
  misc_feature [331]..[331]: n is a, t, c or g
gaagtttcttctgaatgtgtgagaggcatattttatttttcataaaacaacaaaagaaattgggcaaaaaatactttcttatttaataatttggagtttatgcaaacaaaaaataatgcaagttttaaaaatgctaataaaatttgtatttctgaaaattgattcaaaaatatatatcattgtttaataaagaatagttgtaataataaactgtagttttactaaaatgataaaattcactggaggatataaaaaacaggcagcaatattacacaatctttagataggaaactgaaaaaaaaaaagaaaagaaacccaaaccacgaaatcnctagctaatgttgagtacacaaacacctagttctattttttaaatgctgttttgtttgtctgtttgttttgttttatgtcatgatttaagatgtcaattcttaaataaattattctctaaaactttagaatttcaaaattcttgttcatattgataccatgaggttctaccatgaaagtgaattttgatcatcctagtgttcacttactaataagtgtttatattatatatatatgtgtatatatatgtgtgtgtgtatgtgtgtgtatatatataaatatgcagtatggtatgagttttctcttaatgccctaacaagtagccacaaac

SEQ ID NO: 260 - DNA, 661 bp, Homo sapiens
  misc_feature [331]..[331]: Chromosome 1, SNP identification no. = rs3887286
  misc_feature [331]..[331]: allele = g, in linkage disequilibrium with rs7555416, respectively
  misc_feature [331]..[331]: n is a, t, c or g
acatgtgagatttcctggagatttaaatttgtttttattcagaacttttcactaacttcctatgcaaaataaggcaagttccttggtctttctgtgattcagttaatatctctattaaatggtggttaaattagctggtttataaaacaccttccggttctaaaatccagatataggatcccagtttatcataagagaaaaatgtacctaaaatcccatagagataccttggaaaagtagttcattacgctctatcagattgtctggattctaaaatatgatggacatctacaattcagaataagggcaatcttctgtgatttttaacaangatttgtggaagtgcatctggtaagattttatttgttcccatttacatggtgaatcacaattctggccatttcctgtctcttgcctgtataatttcaattaaacaaaacaaacctaagacaactagtccatcttcccaatggcaagataaatgctttaagactgagctataaggaacaagctcagaaaaggttattagaatttactataaccaatctggttctctatcattcagaaatagtcttatggtgtgggtcatgctgtttgcctcaaaacagatttttctagttacacagagctcatattgaaatgaaactggtgggggaaaaaa

SEQ ID NO: 261 - DNA, 661 bp, Homo sapiens
  misc_feature [331]..[331]: Chromosome 1, SNP identification no. = rs1687108
  misc_feature [331]..[331]: allele = g, in linkage disequilibrium with rs7555416, respectively
  misc_feature [331]..[331]: n is a, t, c or g
tgagctctgtgtaactagaaaaatctgttttgaggcaaacagcatgacccacaccataagactatttctgaatgatagagaaccagattggttatagtaaattctaataaccttttctgagcttgttccttatagctcagtcttaaagcatttatcttgccattgggaagatggactagttgtcttaggtttgttttgtttaattgaaattatacaggcaagagacaggaaatggccagaattgtgattcaccatgtaaatgggaacaaataaaatcttaccagatgcacttccacaaatcgttgttaaaaatcacagaagattgcccttnttctgaattgtagatgtccatcatattttagaatccagacaatctgatagagcgtaatgaactacttttccaaggtatctctatgggattttaggtacatttttctcttatgataaactgggatcctatatctggattttagaaccggaaggtgttttataaaccagctaatttaaccaccatttaatagagatattaactgaatcacagaaagaccaaggaacttgccttattttgcataggaagttagtgaaaagttctgaataaaaacaaatttaaatctccaggaaatctcacatgttggaaaaatctaggagaaaaaaaaacatg

SEQ ID NO: 262 - DNA, 661 bp, Homo sapiens
  misc_feature [331]..[331]: Chromosome 1, SNP identification no. = rs1856821
  misc_feature [331]..[331]: allele = a, in linkage disequilibrium with rs7555416, respectively
  misc_feature [331]..[331]: n is a, t, c or g
tgaaatacattcctcattttcagtgttttccctttctccattggtcaaacccatccagaagccagaaagcatggggccactgacagagtccttaaagcagagcagaggagggaagggagtaaatggacctgaaagagcaaatagaagatattgagcacagaagggagctgaaaaggaccatccatcacaggaccaagaaagtagacaaagaaaatgtacaatgccaagggaaaagcaataggttatcaactgaactaagtaggcaagaaaaatgattgagaagtcaccattctctcaacaaaatgccacaatgggatttacaagcaagaangtatctaaaagaatagtggaaaaaaatactgaaaaaagaggtgaagggaagggaattaacaattgtagttatgactactacctaccaaactttggactaggtagttttttaaacaagtgatagcttttaattttataactcagcagtgagaaagttttgattataacaattttaaagatatggaaactgcaacccataggggaacctgccccctctaccccactgtaagtgcacctgtatattaccacttcatctctaccaaacagtttaactaccaaagtacaggcttccctttagggcaagcatagtctagtgatgaatcattgctct

SEQ ID NO: 263 - DNA, 661 bp, Homo sapiens
  misc_feature [331]..[331]: Chromosome 1, SNP identification no. = rs1505546
  misc_feature [331]..[331]: allele = a, in linkage disequilibrium with rs7555416, respectively
  misc_feature [331]..[331]: n is a, t, c or g
atcattggtgggcacctaggtggattccatgtctttactattgtgaatagtgtggcagtgaacatatgtgtgcatatgtctttttggtagaatgacttaatttcctctgggtatatacctagtaatgggattactgggtcaaatggaagctatgtttttagttctaaaaaggacatttaatttctgataaacatcttttctttgtatgttttatattcttgaatacacttctactcagctcttaatttcaaatctttagaattttaagtaataaaaattttcaatagtagctatttcatttagaatgcactaaaataacctatcattttanctagtgtttgggttagtgatataaatttactgtatatttaaatatatacacacagaacataaaacctcaccataattctatcccagagatttatacctgggagcatcttatttataaagttcattgacaatcagccactattttctaaacaagaaatcgtgaaaggaagtaatcttacatcaaattttacaatttatattatatcattagccaggttctagcttttatactaagacatgaaaaaatgtacttacagattaggaactcatccactggagcacctaataactggatcagtgaaaccttgaaaccaaagcaatgtatattgag

SEQ ID NO: 264 - DNA, 661 bp, Homo sapiens
  misc_feature [331]..[331]: Chromosome 1, SNP identification no. = rs5003351
  misc_feature [331]..[331]: allele = a, in linkage disequilibrium with rs7555416, respectively
  misc_feature [331]..[331]: n is a, t, c or g
ctaaaaacatagcttccatttgacccagtaatcccattactaggtatatacccagaggaaattaagtcattctaccaaaaagacatatgcacacatatgttcactgccacactattcacaatagtaaagacatggaatccacctaggtgcccaccaatgatgagttggataaagcaaatgtggtatatatacacaatggaatactatgcagccataaaaaagagtgaaataatgtcctctgcagcaatatacatgcagctggagaccataatcataagtgagtcaatgcaggaacaggaaaccaaatatcacatattcttagttataagtnaaagcatgagttgaacaaccacctgttgggtactcactacctgggtgacagaatccataccccaaacctcagcatcacacaaaatatccatgtaacaaacctacacaagtacccctgtatttaaaataaaagttgaaatttaaaaaaagaattgaaatataacttttaggctgggtgcagtggctcacgcctgtaatcccagcactttgggaggccgaggcaggtggatcatctgaggtaaggagttcgagaccaccctggccaacatggtgaaaccccgtctttactaaaaatacaaaaggtagcctggcatggtggtgcatgcctgta

SEQ ID NO: 265 - DNA, 661 bp, Homo sapiens
  misc_feature [331]..[331]: Chromosome 1, SNP identification no. = rs1770686
  misc_feature [331]..[331]: allele = a, in linkage disequilibrium with rs7555416, respectively
  misc_feature [331]..[331]: n is a, t, c or g
tatgaaccaaagtaatcttttaaaaaattctctagaaacatagaaacatatttagtttttgctttttgagtgcacgtatcagtgcatgtcagattttttctgatccaatatctagtgtactattgactacaaattgaggaactaccagtactaattagcaactatagcacacatctaatagtactcctaaaacatgtgctgtagtgtaacacagaactctgaattttaacagaccacccaaaaataagagaaaatattatgtccgtctcataattgaccattatatcacttacattttcttataccgtgcttgtaaagtatttgctaaagnccatttgatttttctcagatgtgaaaaacagatttaatttttaaaagatatttcacgtcttcttttttttgtttgttttgagatggggtctggctctgtcacccgggctagagtgcagtggcatgatctcggctcactgcaacatttgcctcccaggttcaagcaattctcctgcctcagcaccccctagtagcagggattacaggcatgcaccaccatgccaggctaccttttgtatttttagtaaagacggggtttcaccatgttggccagggtggtctcgaactccttacctcagatgatccacctgcctcggcctcccaaagtgct

SEQ ID NO: 266 - DNA, 661 bp, Homo sapiens
  misc_feature [331]..[331]: Chromosome 1, SNP identification no. = rs10874302
  misc_feature [331]..[331]: allele = g, in linkage disequilibrium with rs7555416, respectively
  misc_feature [331]..[331]: n is a, t, c or g
ggatcatctgaggtaaggagttcgagaccaccctggccaacatggtgaaaccccgtctttactaaaaatacaaaaggtagcctggcatggtggtgcatgcctgtaatccctgctactagggggtgctgaggcaggagaattgcttgaacctgggaggcaaatgttgcagtgagccgagatcatgccactgcactctagcccgggtgacagagccagaccccatctcaaaacaaacaaaaaaaagaagacgtgaaatatcttttaaaaattaaatctgtttttcacatctgagaaaaatcaaatggactttagcaaatactttacaagcacngtataagaaaatgtaagtgatataatggtcaattatgagacggacataatattttctcttatttttgggtggtctgttaaaattcagagttctgtgttacactacagcacatgttttaggagtactattagatgtgtgctatagttgctaattagtactggtagttcctcaatttgtagtcaatagtacactagatattggatcagaaaaaatctgacatgcactgatacgtgcactcaaaaagcaaaaactaaatatgtttctatgtttctagagaattttttaaaagattactttggttcataagtattctctgggaaacataaatgt

SEQ ID NO: 267 - DNA, 661 bp, Homo sapiens
  misc_feature [331]..[331]: Chromosome 1, SNP identification no. = rs1770685
  misc_feature [331]..[331]: allele = a, in linkage disequilibrium with rs7555416, respectively
  misc_feature [331]..[331]: n is a, t, c or g
agagtatgcattttgtgccctactcatatatttaagctctccctatgtgcctttaacttacaccatcagcacttaatatacagataactcattttaaaaatgaaagggttattgtgttataatttttataatttctcctcactaatgctttatacagtacatttaaagcacccaataaaatacatcccagggatttctgcatctcacaaactttacagaaatttcttggccggtgactaaaatgctggcctacatgagattgaatataataactactgaatggagtaagcaatgaaattattcttacatatatgcactctcatgtcaaggnttttaaagctctttacgtatgttaagaatttgaaaaatcttcttttaatctgaaattaggttctgagtttttattcatcttcaatctaaataaccttgtatcactagcagggtttgcaatcctttccctcataggtcataaacatactaaagctctctactcagagtttggtccttcaggtatccatttacctttcatcatacagaaaatggcccatagatgcttattctttgtgttttcttctataaacaatttttaatccccagtagtcctctctgatcttcttttatgatttaatcttttaaaggctttatgaaatttctgttaaag

SEQ ID NO: 268 - DNA, 661 bp, Homo sapiens
  misc_feature [331]..[331]: Chromosome 1, SNP identification no. = rs1361477
  misc_feature [331]..[331]: allele = c, in linkage disequilibrium with rs7555416, respectively
  misc_feature [331]..[331]: n is a, t, c or g
aaatggatacctgaaggaccaaactctgagtagagagctttagtatgtttatgacctatgagggaaaggattgcaaaccctgctagtgatacaaggttatttagattgaagatgaataaaaactcagaacctaatttcagattaaaagaagatttttcaaattcttaacatacgtaaagagctttaaaaaccttgacatgagagtgcatatatgtaagaataatttcattgcttactccattcagtagttattatattcaatctcatgtaggccagcattttagtcaccggccaagaaatttctgtaaagtttgtgagatgcagaaatccntgggatgtattttattgggtgctttaaatgtactgtataaagcattagtgaggagaaattataaaaattataacacaataaccctttcatttttaaaatgagttatctgtatattaagtgctgatggtgtaagttaaaggcacatagggagagcttaaatatatgagtagggcacaaaatgcatactcttattttccattttctctggccactttcaggcacaatacatatcaattaactttctaatccattaataaggatggtttctcacctgcacgtgctcaaatggaagtctagaaatatcccagttcaagactgcagtgggttgtt

SEQ ID NO: 269 - DNA, 661 bp, Homo sapiens
  misc_feature [331]..[331]: Chromosome 1, SNP identification no. = rs7546730
  misc_feature [331]..[331]: allele = t, in linkage disequilibrium with rs7555416, respectively
  misc_feature [331]..[331]: n is a, t, c or g
gggttgttatcttgcctttttcctttagtttatgatttattgctgaaatgaagccatactgtgtctagtgtaactgtacactttatttgagggtgtagaattattatatcttaataaaaaaggtttttctgtttatgtactttgtgacataggtgaatttacccagaaaacttataataagaaaactgcacaagttactgggcgtctgaagatgtcaggaggcatcatggaatttttaatgtgctggaaagtaaaagaaccacttgctgagtttaagtaagccctataatatctatcccatgccagagctaacttctgagagtaaagtacntgtattcatcagaaacctaaaatgggtgaaaatgaaccaagaccatggaatcttcatatgaaatagtgttaccatgagcaaatgatgaaagaattctttaatgtgcaaccactcagacacttctgccagtagttatagaagagaaactgaagaaatcatgtcacactctgaaaatataaataaattataaaaaagaaaaaaaagaagtaagctaagagaaaaaagagctggggactagtactttttaaggtttaagtttaggagctaagccttgtcagtttttattggttaataagattgagggaataggtggcaagtacagacggtaaa

SEQ ID NO: 270 - DNA, 661 bp, Homo sapiens
  misc_feature [331]..[331]: Chromosome 1, SNP identification no. = rs1032882
  misc_feature [331]..[331]: allele = c, in linkage disequilibrium with rs7555416, respectively
  misc_feature [331]..[331]: n is a, t, c or g
tttgaaggccgttagggttgtacccaaaatatagtctctttaccgtctgtacttgccacctattccctcaatcttattaaccaataaaaactgacaaggcttagctcctaaacttaaaccttaaaaagtactagtccccagctcttttttctcttagcttacttcttttttttcttttttataatttatttatattttcagagtgtgacatgatttcttcagtttctcttctataactactggcagaagtgtctgagtggttgcacattaaagaattctttcatcatttgctcatggtaacactatttcatatgaagattccatggtcttngttcattttcacccattttaggtttctgatgaatacaagtactttactctcagaagttagctctggcatgggatagatattatagggcttacttaaactcagcaagtggttcttttactttccagcacattaaaaattccatgatgcctcctgacatcttcagacgcccagtaacttgtgcagttttcttattataagttttctgggtaaattcacctatgtcacaaagtacataaacagaaaaaccttttttattaagatataataattctacaccctcaaataaagtgtacagttacactagacacagtatggcttcatttcagcaat

SEQ ID NO: 271 - DNA, 661 bp, Homo sapiens
  misc_feature [331]..[331]: Chromosome 1, SNP identification no. = rs1344337
  misc_feature [331]..[331]: allele = a, in linkage disequilibrium with rs7555416, respectively
  misc_feature [331]..[331]: n is a, t, c or g
gtagacatttggaaattcacatctagaacttctgggagatattggggctggaaatatttatttagatgtcatcaggatgtaggtggaagttaaagttggaagagtggactaaatcctctgagacactgtcaagtaagacaaaacattctaggaaagaatcgcaaaaaagatatacactttgaaggccgttagggttgtacccaaaatatagtctctttaccgtctgtacttgccacctattccctcaatcttattaaccaataaaaactgacaaggcttagctcctaaacttaaaccttaaaaagtactagtccccagctcttttttctcntagcttacttcttttttttcttttttataatttatttatattttcagagtgtgacatgatttcttcagtttctcttctataactactggcagaagtgtctgagtggttgcacattaaagaattctttcatcatttgctcatggtaacactatttcatatgaagattccatggtcttggttcattttcacccattttaggtttctgatgaatacaagtactttactctcagaagttagctctggcatgggatagatattatagggcttacttaaactcagcaagtggttcttttactttccagcacattaaaaattccatgatgcctcctg

SEQ ID NO: 272 - DNA, 661 bp, Homo sapiens
  misc_feature [331]..[331]: Chromosome 1, SNP identification no. = rs1032881
  misc_feature [331]..[331]: allele = t, in linkage disequilibrium with rs7555416, respectively
  misc_feature [331]..[331]: n is a, t, c or g
aaagcatctggaggcacatgtaaagtagacatttggaaattcacatctagaacttctgggagatattggggctggaaatatttatttagatgtcatcaggatgtaggtggaagttaaagttggaagagtggactaaatcctctgagacactgtcaagtaagacaaaacattctaggaaagaatcgcaaaaaagatatacactttgaaggccgttagggttgtacccaaaatatagtctctttaccgtctgtacttgccacctattccctcaatcttattaaccaataaaaactgacaaggcttagctcctaaacttaaaccttaaaaagtnctagtccccagctcttttttctcttagcttacttcttttttttcttttttataatttatttatattttcagagtgtgacatgatttcttcagtttctcttctataactactggcagaagtgtctgagtggttgcacattaaagaattctttcatcatttgctcatggtaacactatttcatatgaagattccatggtcttggttcattttcacccattttaggtttctgatgaatacaagtactttactctcagaagttagctctggcatgggatagatattatagggcttacttaaactcagcaagtggttcttttactttccagcaca

SEQ ID NO: 273 - DNA, 661 bp, Homo sapiens
  misc_feature [331]..[331]: Chromosome 1, SNP identification no. = rs1032880
  misc_feature [331]..[331]: allele = t, in linkage disequilibrium with rs7555416, respectively
  misc_feature [331]..[331]: n is a, t, c or g
cctcaatgcagttaagtggcaactatggcattatctggaagataaatgataaagatcccaactagagcaatattgtcagaaaaaaagagaggacgtgggcttagtaaaatatttgggaaatataattgaaaagtttttctgatggactggatttagggagatagaagggagaggagacaagcttgactttcacacttttagcttgggtagttgggtgtacagtgatgcatcagctaagacaatgaacacacggagcgccaaaatagaaagaacaggaagcaacaaacaggttgagtctgagatgcctgtaaagcatctggaggcacatgtnaagtagacatttggaaattcacatctagaacttctgggagatattggggctggaaatatttatttagatgtcatcaggatgtaggtggaagttaaagttggaagagtggactaaatcctctgagacactgtcaagtaagacaaaacattctaggaaagaatcgcaaaaaagatatacactttgaaggccgttagggttgtacccaaaatatagtctctttaccgtctgtacttgccacctattccctcaatcttattaaccaataaaaactgacaaggcttagctcctaaacttaaaccttaaaaagtactagtccccagctcttttttc

SEQ ID NO: 274 - DNA, 661 bp, Homo sapiens
  misc_feature [331]..[331]: Chromosome 1, SNP identification no. = rs2174499
  misc_feature [331]..[331]: allele = c, in linkage disequilibrium with rs7555416, respectively
  misc_feature [331]..[331]: n is a, t, c or g
aatgggtggggacatgtatgtatcaatttaagaaatattactgagagttatgtctaatacagattagagaagaggacagcctcaatgcagttaagtggcaactatggcattatctggaagataaatgataaagatcccaactagagcaatattgtcagaaaaaaagagaggacgtgggcttagtaaaatatttgggaaatataattgaaaagtttttctgatggactggatttagggagatagaagggagaggagacaagcttgactttcacacttttagcttgggtagttgggtgtacagtgatgcatcagctaagacaatgaacacacngagcgccaaaatagaaagaacaggaagcaacaaacaggttgagtctgagatgcctgtaaagcatctggaggcacatgtaaagtagacatttggaaattcacatctagaacttctgggagatattggggctggaaatatttatttagatgtcatcaggatgtaggtggaagttaaagttggaagagtggactaaatcctctgagacactgtcaagtaagacaaaacattctaggaaagaatcgcaaaaaagatatacactttgaaggccgttagggttgtacccaaaatatagtctctttaccgtctgtacttgccacctattccctcaat

SEQ ID NO: 275 - DNA, 661 bp, Homo sapiens
  misc_feature [331]..[331]: Chromosome 1, SNP identification no. = rs6691688
  misc_feature [331]..[331]: allele = a, in linkage disequilibrium with rs7555416, respectively
  misc_feature [331]..[331]: n is a, t, c or g
gacatctaaataaatatttccagccccaatatctcccagaagttctagatgtgaatttccaaatgtctactttacatgtgcctccagatgctttacaggcatctcagactcaacctgtttgttgcttcctgttctttctattttggcgctccgtgtgttcattgtcttagctgatgcatcactgtacacccaactacccaagctaaaagtgtgaaagtcaagcttgtctcctctcccttctatctccctaaatccagtccatcagaaaaacttttcaattatatttcccaaatattttactaagcccacgtcctctctttttttctgacantattgctctagttgggatctttatcatttatcttccagataatgccatagttgccacttaactgcattgaggctgtcctcttctctaatctgtattagacataactctcagtaatatttcttaaattgatacatacatgtccccacccattctcctcaaaatctttacattgttcccaaatttctaaacaagttgtccaaactccttatcttgtaccgtatccaccagcaacactggattcagtggttattccatgagtaagccgtgattttatgcttccttttcttactcaagaaattccctgtttacaattaccttctgtccaatttc

SEQ ID NO: 276 - DNA, 661 bp, Homo sapiens
  misc_feature [331]..[331]: Chromosome 1, SNP identification no. = rs785608
  misc_feature [331]..[331]: allele = g, in linkage disequilibrium with rs7555416, respectively
  misc_feature [331]..[331]: n is a, t, c or g
acttattctttaattccactcttttccttttatgagactgcaagatacttgaagatgacacctttgtataactagtgccatatataggattcaacacatagcagggtctcagtaaatgtttgatgagtgaactaatcttataatgagaggaagatgtgaaaataagggcctgagagatttaagtagctcctgtggactatggcaaaagtcattgaataagaagaagtaaaatgatttctaaatagtattgaaggtttagctgagactggaaaccatatctttattaagggtctagtcagcaggtgcactgctgtaggcaaggcagtgcaangaagaagagaagagagtttaagcttatgttgacaacaatatggatgaaataattgtcccagaggtctcagacagtagttgataaatgaagcaacattgaacaattgatcaaggtgagcctgagaccatgagcgttggtctcaaccatggttctgagaccaggaacacaagtaatgttctaggataataatcacataatttccaagtttctcataaaatatatggggatgttagtattataaaactggtggcagaaataccagagaaaaactcgctttgggtctggatttctgactattgaactgagtaaatttataggtggtcaggagca

SEQ ID NO: 277 - DNA, 661 bp, Homo sapiens
  misc_feature [331]..[331]: Chromosome 1, SNP identification no. = rs785610
  misc_feature [331]..[331]: allele = c, in linkage disequilibrium with rs7555416, respectively
  misc_feature [331]..[331]: n is a, t, c or g
ctgagaccaggaacacaagtaatgttctaggataataatcacataatttccaagtttctcataaaatatatggggatgttagtattataaaactggtggcagaaataccagagaaaaactcgctttgggtctggatttctgactattgaactgagtaaatttataggtggtcaggagcagcatggaaattgtaattcaaagggaaagaatgagctacaggatccaattggaagtaaatgttactactttctggccttattattttccgtctgctggatgtttgtgataggcataaattttttttcataaaaatagctaacttttctttacntacttaactgtccatctactattccatttctttccttatctttatagcaaaactccttgaaaaaattttactcattttctctactttctcttttccattgtcccttgatcccaagattttgctcctatgactccattgaaactcatcttttcaacttcactaaagatctctaagttactacatctaactcataattcttggtcctcctcttaactggcttattggcatcatgatgaaattgatcacttcttcttccttaaaatgtttatttttcacttgacttccaggactcctcatttctttgttttccttcagtttaattggctgttt

SEQ ID NO: 278 - DNA, 661 bp, Homo sapiens
  misc_feature [331]..[331]: Chromosome 1, SNP identification no. = rs785612
  misc_feature [331]..[331]: allele = a, in linkage disequilibrium with rs7555416, respectively
  misc_feature [331]..[331]: n is a, t, c or g
tatgttttcagattgagtatctcttttaactctagactcaactgagcactttacatttcaactcggatgggcaattgacatctcacacctaatacatccaaaaccacatgcctaatctttcttttcaacctgctcttcctgcaatagttttcatctcagttaatggtaattctgttcttctagttgcttaggttaaagttgttgaataatctttgacctacctcttcttctcacaccccacatttaatcttattgcaaaacctattagccatacttgtcaaatacatctcaagcatgatgacttttaccatccctccactctcttttctgnccaaagctcccaacgtcttccatctaatacattgcagtggccttataaatggtttcttggcttattttgaactatatgcagtatagcagccaagtaagcctgtataaatgacaatcaaaaagcctaatagccctgtgccccaaaccatccaatagcactttttctatcccttgaattccccttctggttttgtctaacatgattcttgccctcactgtgcctcttggcctcactctggcctcattagggttcttcagacataccaggcaaactcttgcctcactgctttgatacttacagtttcctttgcctagaatgttcttctttaac

SEQ ID NO: 279 - DNA, 661 bp, Homo sapiens
  misc_feature [331]..[331]: Chromosome 1, SNP identification no. = rs785613
  misc_feature [331]..[331]: allele = c, in linkage disequilibrium with rs7555416, respectively
  misc_feature [331]..[331]: n is a, t, c or g
gctcttcctgcaatagttttcatctcagttaatggtaattctgttcttctagttgcttaggttaaagttgttgaataatctttgacctacctcttcttctcacaccccacatttaatcttattgcaaaacctattagccatacttgtcaaatacatctcaagcatgatgacttttaccatccctccactctcttttctgaccaaagctcccaacgtcttccatctaatacattgcagtggccttataaatggtttcttggcttattttgaactatatgcagtatagcagccaagtaagcctgtataaatgacaatcaaaaagcctaatagncctgtgccccaaaccatccaatagcactttttctatcccttgaattccccttctggttttgtctaacatgattcttgccctcactgtgcctcttggcctcactctggcctcattagggttcttcagacataccaggcaaactcttgcctcactgctttgatacttacagtttcctttgcctagaatgttcttctttaacaaacacaaataattcaatctctgacttcttcaacttcaccttcccagtgaggcatcccctggctacctgtattagtcagttctcacaccactaataaagacataaccaagactgggtaatttataaaggaa

SEQ ID NO: 280 - DNA, 661 bp, Homo sapiens
  misc_feature [331]..[331]: Chromosome 1, SNP identification no. = rs785614
  misc_feature [331]..[331]: allele = c, in linkage disequilibrium with rs7555416, respectively
  misc_feature [331]..[331]: n is a, t, c or g
ccatacttgtcaaatacatctcaagcatgatgacttttaccatccctccactctcttttctgaccaaagctcccaacgtcttccatctaatacattgcagtggccttataaatggtttcttggcttattttgaactatatgcagtatagcagccaagtaagcctgtataaatgacaatcaaaaagcctaatagccctgtgccccaaaccatccaatagcactttttctatcccttgaattccccttctggttttgtctaacatgattcttgccctcactgtgcctcttggcctcactctggcctcattagggttcttcagacataccaggnaaactcttgcctcactgctttgatacttacagtttcctttgcctagaatgttcttctttaacaaacacaaataattcaatctctgacttcttcaacttcaccttcccagtgaggcatcccctggctacctgtattagtcagttctcacaccactaataaagacataaccaagactgggtaatttataaaggaagaggtttaataaactcacagtttcacgtggctggggagcttcacaatcatggctgaaggcaaaaaagaagcaaagtcacgtcttacgtagtggcaggcaaggtagtgtgtgcaggggaactcccctttataaaaccc

SEQ ID NO: 281 - DNA, 661 bp, Homo sapiens
  misc_feature [331]..[331]: Chromosome 1, SNP identification no. = rs785615
  misc_feature [331]..[331]: allele = a, in linkage disequilibrium with rs7555416, respectively
  misc_feature [331]..[331]: n is a, t, c or g
agcatgatgacttttaccatccctccactctcttttctgaccaaagctcccaacgtcttccatctaatacattgcagtggccttataaatggtttcttggcttattttgaactatatgcagtatagcagccaagtaagcctgtataaatgacaatcaaaaagcctaatagccctgtgccccaaaccatccaatagcactttttctatcccttgaattccccttctggttttgtctaacatgattcttgccctcactgtgcctcttggcctcactctggcctcattagggttcttcagacataccaggcaaactcttgcctcactgctttgntacttacagtttcctttgcctagaatgttcttctttaacaaacacaaataattcaatctctgacttcttcaacttcaccttcccagtgaggcatcccctggctacctgtattagtcagttctcacaccactaataaagacataaccaagactgggtaatttataaaggaagaggtttaataaactcacagtttcacgtggctggggagcttcacaatcatggctgaaggcaaaaaagaagcaaagtcacgtcttacgtagtggcaggcaaggtagtgtgtgcaggggaactcccctttataaaaccctcagatcttctgaaacttatttg

SEQ ID NO: 282 - DNA, 661 bp, Homo sapiens
  misc_feature [331]..[331]: Chromosome 1, SNP identification no. = rs785617
  misc_feature [331]..[331]: allele = g, in linkage disequilibrium with rs7555416, respectively
  misc_feature [331]..[331]: n is a, t, c or g
aatttataaaggaagaggtttaataaactcacagtttcacgtggctggggagcttcacaatcatggctgaaggcaaaaaagaagcaaagtcacgtcttacgtagtggcaggcaaggtagtgtgtgcaggggaactcccctttataaaaccctcagatcttctgaaacttatttgctatcacgagaacaacacaggaaatacccgcctccatgattcaattacctcccaccgggtccttcccttgacacctgagaattatgggagctacaattcaagatgaaatttgggtgggggcacagcaaaaccatatcactacttgatctaaaattcnaaaacttcccatttctcctcctctctcttccatttttttcccttagcacatttctatttaacaagacttagcattttctaagagcaaatcactgtcctaaacactgatgaaatactaactttttaaataataataacaatgctttgaactcaacatcattagttccattttacagatgagaaaagtgaaacccagagaggttaaatgacttgcccaatgtcaagatggattcaaactctgtaggttgtgctcttaactatcacattaggcagtctctcaccatgcaaacacttcatacaagttactttttgaatttttggaatttctgtc

SEQ ID NO: 283 - DNA, 661 bp, Homo sapiens
  misc_feature [331]..[331]: Chromosome 1, SNP identification no. = rs785618
  misc_feature [331]..[331]: allele = c, in linkage disequilibrium with rs7555416, respectively
  misc_feature [331]..[331]: n is a, t, c or g
aactcacagtttcacgtggctggggagcttcacaatcatggctgaaggcaaaaaagaagcaaagtcacgtcttacgtagtggcaggcaaggtagtgtgtgcaggggaactcccctttataaaaccctcagatcttctgaaacttatttgctatcacgagaacaacacaggaaatacccgcctccatgattcaattacctcccaccgggtccttcccttgacacctgagaattatgggagctacaattcaagatgaaatttgggtgggggcacagcaaaaccatatcactacttgatctaaaattcgaaaacttcccatttctcctcctctntcttccatttttttcccttagcacatttctatttaacaagacttagcattttctaagagcaaatcactgtcctaaacactgatgaaatactaactttttaaataataataacaatgctttgaactcaacatcattagttccattttacagatgagaaaagtgaaacccagagaggttaaatgacttgcccaatgtcaagatggattcaaactctgtaggttgtgctcttaactatcacattaggcagtctctcaccatgcaaacacttcatacaagttactttttgaatttttggaatttctgtctccttgactagaatgtaagctctat

SEQ ID NO: 284 - DNA, 661 bp, Homo sapiens
  misc_feature [331]..[331]: Chromosome 1, SNP identification no. = rs785619
  misc_feature [331]..[331]: allele = t, in linkage disequilibrium with rs7555416, respectively
  misc_feature [331]..[331]: n is a, t, c or g
aaggcaaaaaagaagcaaagtcacgtcttacgtagtggcaggcaaggtagtgtgtgcaggggaactcccctttataaaaccctcagatcttctgaaacttatttgctatcacgagaacaacacaggaaatacccgcctccatgattcaattacctcccaccgggtccttcccttgacacctgagaattatgggagctacaattcaagatgaaatttgggtgggggcacagcaaaaccatatcactacttgatctaaaattcgaaaacttcccatttctcctcctctctcttccatttttttcccttagcacatttctatttaacaagactnagcattttctaagagcaaatcactgtcctaaacactgatgaaatactaactttttaaataataataacaatgctttgaactcaacatcattagttccattttacagatgagaaaagtgaaacccagagaggttaaatgacttgcccaatgtcaagatggattcaaactctgtaggttgtgctcttaactatcacattaggcagtctctcaccatgcaaacacttcatacaagttactttttgaatttttggaatttctgtctccttgactagaatgtaagctctatgaaggcaggatttgtgccagttttcttcagttccgtagtaccag

SEQ ID NO: 285 - DNA, 661 bp, Homo sapiens
  misc_feature [331]..[331]: Chromosome 1, SNP identification no. = rs785620
  misc_feature [331]..[331]: allele = g, in linkage disequilibrium with rs7555416, respectively
  misc_feature [331]..[331]: n is a, t, c or g
ttaactatcacattaggcagtctctcaccatgcaaacacttcatacaagttactttttgaatttttggaatttctgtctccttgactagaatgtaagctctatgaaggcaggatttgtgccagttttcttcagttccgtagtaccagcacctagaataatgtctggcacatattaaatattcaataaatatcagttgcatgactgaatgaatgagtgactgaataaagagtttctgtctttatgagactaatcatacttaactaaggaaacataaagtccatgaagtatttagctcaaagtgaagtgctaaattgcaggttactgtgtgcncagggactgaccactctatggacaatttgttgctgctgcatatgataaattggtgtaggaaagaattggttggattctgagtataatgtgaattttgagaaggaagaggaagctttctgtgggcaggagaagcttcattcatctcttgatatttggtactgaatctctcctttctcttcatagcaagctccttggaagaataatccatgctgcctccacgttcttgcctctcactctttcttccgtgctttgcaatagggcttccatatgcataattcaatggaaattgcaacaacaaaggccagtggtatttttaaccatcaattgcag

SEQ ID NO: 286 - DNA, 661 bp, Homo sapiens
  misc_feature [331]..[331]: Chromosome 1, SNP identification no. = rs785621
  misc_feature [331]..[331]: allele = g, in linkage disequilibrium with rs7555416, respectively
  misc_feature [331]..[331]: n is a, t, c or g
gactaatcatacttaactaaggaaacataaagtccatgaagtatttagctcaaagtgaagtgctaaattgcaggttactgtgtgcgcagggactgaccactctatggacaatttgttgctgctgcatatgataaattggtgtaggaaagaattggttggattctgagtataatgtgaattttgagaaggaagaggaagctttctgtgggcaggagaagcttcattcatctcttgatatttggtactgaatctctcctttctcttcatagcaagctccttggaagaataatccatgctgcctccacgttcttgcctctcactctttcttccntgctttgcaatagggcttccatatgcataattcaatggaaattgcaacaacaaaggccagtggtatttttaaccatcaattgcagtggcactctaaatttctcattttaattaacttgcctgtggtatttgaccagatcattgtttctccaattttgaaactcatttgattttcatataactcattgacaatttatttgagtcttttgtgagttctttctatgtgtagctattcttctcattttactagttcactgtaggtaatttcttctcccaatattttaactaacatttaaatgattttgacattcatactcaaggtgttcaaaat

SEQ ID NO: 287 - DNA, 661 bp, Homo sapiens
  misc_feature [331]..[331]: Chromosome 1, SNP identification no. = rs785622
  misc_feature [331]..[331]: allele = t, in linkage disequilibrium with rs7555416, respectively
  misc_feature [331]..[331]: n is a, t, c or g
ggttactttagagtcttctctctcctccctcatatatctatatatggtcggtaattaggccctgttgatttattgtctcaactatatcttgttttggtacatacctctttgttctttagtataggcatttagaatcttttctctggactcctacagtagtttcctactttgcttctcttctaccactacaacctgtccagttcaactttcttgtcactaccagctttaattttctaacctcaagttagagcatattattccattagttaaagaaattattgattcctcatgtactttaaagagtttttgataaatggcttgttcatgatcnggccccctacatacctccacaggcttatttaacattaaatctgatatttaattgctggaaccactaacaattccttaaatagagtatatgtttttcatctctctggatctttaatctatgcttataaagctgttcacatttttggtctcaaatgaatttgatcaagcacagggttcttaatttctccagacaattgttttgagtctttcctttatgccttatgtatcttgtacctaccatttctacaagagtggtcattttcatgaatgtttgtcagttttattataggtatatagacaataaagaccatgtacccacacagtgcatgga

SEQ ID NO: 288 - DNA, 661 bp, Homo sapiens
  misc_feature [331]..[331]: Chromosome 1, SNP identification no. = rs12060840
  misc_feature [331]..[331]: allele = g, in linkage disequilibrium with rs7555416, respectively
  misc_feature [331]..[331]: n is a, t, c or g
ccagtagaaaaatattaaagtaataaaactgtagattgatgaaaaataaaaaaattaaaatgctataaaaattgaagaatgaaaggatgggaattgtcatcacgatgaaaaagaagaaacaggtaaacattactgtgggtttttagcttgagataatagagaattagtgggattagtaagatgccaaagattttttgatatggaaagtcattccggaaagagagagaaaatatggacaatgataggaagaggctaagaaaactggaaaaaaaagggtgaggaggagggagtgtgagaaaagagtgtttgactgatggggagagtgagaaanggaatggacaaatgcagtgccgtgagctcacatgttgtataggacatagggcagaaattatgagactagatttctggcttagtaccttaccttaactatccggatggcctttagcactcatttaatcactctgatgcggactctcatgctaattatgaggcttggcttttatgaagcttacacatctgttgttaagtcagttttgaacttgttgggttggaggaaaacatgggaaagccatgcatggatattctgtagcattagtgaattgaaggtttgctcaagtataagtcagagccggagatggagagttgagagccaaggtagaga

SEQ ID NO: 289 - DNA, 661 bp, Homo sapiens
  misc_feature [331]..[331]: Chromosome 1, SNP identification no. = rs785626
  misc_feature [331]..[331]: allele = t, in linkage disequilibrium with rs7555416, respectively
  misc_feature [331]..[331]: n is a, t, c or g
tggagagttgagagccaaggtagagactgtgatgtattctctgaaatccatttccatttcctctttggtatatcttgacctcatacttcagtctcccttccagttaagtgtaatcgtatcactgagttatggccaatgtaatgtaggaacaaagtgatgggtgcaactttcagactgggtcctagaaacaaaaataaaaacaaaagagacacaaaactcttgcataatttttaagctcactctctctctctatcatctattaaccagaacacagaagatctagtgaaggatcctgaggttctcatgggtggaatggggcaattgcagaagngctgccccaggaggcaactgataaggaacacatgggtgggatcagcacatgagcaatccaaaaacgtagcaattggtctttcatgagtaacacagacatcatacacagagaaggtatagttgaagatagtgatttaaatcattgaaaaactcaaaagattaaagaatagagaactaagggcagagtcctgggacacacaattgaagaatgcaaaagatagaatgtaaatcaatgagaggaaagtagcaaaacaatttaagatggttcactatcactgaaatcaaggcagaaaagaatctcaagaaaggaataggttaagatcagtgagaa

SEQ ID NO: 290 - DNA, 661 bp, Homo sapiens
  misc_feature [331]..[331]: Chromosome 1, SNP identification no. = rs9659679
  misc_feature [331]..[331]: allele = g, in linkage disequilibrium with rs7555416, respectively
  misc_feature [331]..[331]: n is a, t, c or g
aattgcagaagtgctgccccaggaggcaactgataaggaacacatgggtgggatcagcacatgagcaatccaaaaacgtagcaattggtctttcatgagtaacacagacatcatacacagagaaggtatagttgaagatagtgatttaaatcattgaaaaactcaaaagattaaagaatagagaactaagggcagagtcctgggacacacaattgaagaatgcaaaagatagaatgtaaatcaatgagaggaaagtagcaaaacaatttaagatggttcactatcactgaaatcaaggcagaaaagaatctcaagaaaggaataggttaanatcagtgagaatgtgccacttagaatgactagaaacaggttagtgctacattaactgaacataattcgtggaagtttaaaacaggagtaacctgagcctctttgaagatggaaacataagagccagtaagaacaggtgaattgaagaagctagggagaggtccatggagttaaattatcacagaaagtgggaatgagtgttttacagtacaggtaaatggagtaaattaagagaggaagagagaaactgtctttgaagggaaagatgagagagcagagaaccaccctgacacaaaaacatgttttttgttttatttcttcaagataataa

SEQ ID NO: 291 - DNA, 661 bp, Homo sapiens
  misc_feature [331]..[331]: Chromosome 1, SNP identification no. = rs1505540
  misc_feature [331]..[331]: allele = a, in linkage disequilibrium with rs7555416, respectively
  misc_feature [331]..[331]: n is a, t, c or g
ccttctcaggacagttgtgctaaaataaatgggagcctaaatgactcaacttcccaaaggaaccttcatgtacagaacaataccagaggtttaaggcaataaattaatgctttaagatacccccagtttaatttacattatttgtagggtttaaggtaggagccaggtgtcaaaatagataacaaattaatcatccatttgtttatccatttattcaacagacatttgttgcatgctaatttcttatgttcattgtgaaaattgctgggagtataacagtaaacaggtaaagatctgcagtttaatatttcatagtgttgactgcccaacntctccctttttatgtttggagaatttctcctcttatgagacctgtatcttcaagatagatgtcagaaacttaattttcaaaccttttctttgcaaccagggcccaataatttgatttaggtttctcccatcagatatttccaagcaagattttgattaggaaacatagtaggaagaaggaggcacatttcagaatcatttcctggtgagaatgacagggagagaggcagtattacatgggttccaacagtggcaccatggggtccacacaggcaggaaaaactaaggtacctgttcctagcagcagtggaaaactgtgtcttgctggcaa

SEQ ID NO: 292 - DNA, 661 bp, Homo sapiens
  misc_feature [331]..[331]: Chromosome 1, SNP identification no. = rs10874304
  misc_feature [331]..[331]: allele = c, in linkage disequilibrium with rs7555416, respectively
  misc_feature [331]..[331]: n is a, t, c or g
ctccctttttatgtttggagaatttctcctcttatgagacctgtatcttcaagatagatgtcagaaacttaattttcaaaccttttctttgcaaccagggcccaataatttgatttaggtttctcccatcagatatttccaagcaagattttgattaggaaacatagtaggaagaaggaggcacatttcagaatcatttcctggtgagaatgacagggagagaggcagtattacatgggttccaacagtggcaccatggggtccacacaggcaggaaaaactaaggtacctgttcctagcagcagtggaaaactgtgtcttgctggcaatnttccaatgtaatttgggtactgtcctggttggacagcctgcaataattctttgaccttcctaaagatcctgtgaaatgcctaattatgtctcacagtgtgtctccccttttaccagtgatagaacacccaatagaacacttgctatgatcttgctttccacctcaccgcagctgcttatgcccacggtcacatatgtaacgcgccattaccaaaaccccatttcaagtgtcccattctttgattgccactttcccctccaggtcactgcttcaatttttcccactccagtaacccctagaatggctggtcctgctcatttcactatctgt

SEQ ID NO: 293 - DNA, 661 bp, Homo sapiens
  misc_feature [331]..[331]: Chromosome 1, SNP identification no. = rs996725
  misc_feature [331]..[331]: allele = t, in linkage disequilibrium with rs7555416, respectively
  misc_feature [331]..[331]: n is a, t, c or g
ggacatttgtttatttctaataattataatgacttgtataaaatatttggtcgcatcatatcttcttgttttctttagcagggaggtgggagtggggggtggcctcaaagggaaaatatcgaaaaccaacttagtttcgtaaccaaagcatcacaatgctttcaaatggctaggagtcgatcaatttggagaggtagctagtcaactgtagcattaatatgactcacacaaaaaaatctttaataatctctgtaaaagagtaaatagagcttcaatgaaatttggaaacgatgactttatttgtaagaagaatcagaaaaaaatggaccangcagtgttggagcattaataaggcttgcagcttagtgagatttaagtgtaaagagagacaaactaatcagaaacacagaaatacaataggcagaaatggcagctgaggtatagagagagggctgcaggactcatgggcaaatctctccttagtttagagagtgctaggaggagggtagctaaagacaggcattttagtttgcaaagctcttcaggacgttatcctaatctcactctcctggggaaacagtgcacacaaaacattttgcatggaaagaggtgtctgtattttctgagggcagcctctcaggaaagaaagggagctggccac

SEQ ID NO: 294 - DNA, 661 bp, Homo sapiens
  misc_feature [331]..[331]: Chromosome 1, SNP identification no. = rs1770679
  misc_feature [331]..[331]: allele = t, in linkage disequilibrium with rs7555416, respectively
  misc_feature [331]..[331]: n is a, t, c or g
taacattgtaaagtttgcaacaggctaatggtttacaataaccctgggggaaaaaggattaattttaatgtccccattttacaaatgagaaaacagagaagttattttaaactctctgtttaaaactgtaaagtttttccaaccggaaggggcattatgggtcatctgttgccagtactctcgttctgcaaataagggatcttaggtaggtgactttcccaggatcaattttccactaagtggcaagcctctcatgactgctgtgtagacagtaggagacatagcagctgaattcttctgagcactagctccattccaggaatagagccantccctcaggacaagtgtatgcattattttttggcctctatttgtaacagctgaatgtaatcaagtggccccaagtagccctaggtatcaataaaaggaacctttctgggacgtttgaacagcaattaacaaaaataatttgtagaagattgagacctcgatggccttttagacctatctggtgtccctcctacctgactgtcaactctctctcctgcttatcggtctctgggatgtccctccaggagtggagcacatctactaccagcgggttttcaattgccccagctttgcatcttcactgtctcactgcctcatcacagctcctact

SEQ ID NO: 295 - DNA, 661 bp, Homo sapiens
  misc_feature [331]..[331]: Chromosome 1, SNP identification no. = rs12039636
  misc_feature [331]..[331]: allele = c, in linkage disequilibrium with rs7555416, respectively
  misc_feature [331]..[331]: n is a, t, c or g
ggcttaaacaacagaaatgtattttttcacagttttggaggctggaaggccaagagcaaggtgctagcagagactgtttctggtgagacctcttttcttgccttgcagatggctacttttttgctgtatcctcagagggcctttctactgagtgcatgcaaacctggtgtctctgacttttcttgtaaggacaccagcccttataaggggagtaaggcactcatatggggggagtaaggctccacttttatgacttcatttaactttccttatctctttaaaagctctatctgcaaacacagttacatggggggttaggacttcaacctangtatttaaagagttcagtccataacagaaagtaatgagcttatttcagcagttcagcatcatttaagtctagtcagtgaataaaataatagaaaatttgtaaaacacttgaatgtcaagctattcatctaaagttaataaatcacagggcactggtgagccatttaaaggtctgtccaatggcctactgtgatcaaatttgctcttcatcaggatcattctggttgcagggtgaaggatgaatagaggtggggtcagtggcagaggcaagatcagacacagagagagtaagagtgtggcggttggccaggccagtgacattggtggcttg

SEQ ID NO: 296 - DNA, 661 bp, Homo sapiens
  misc_feature [331]..[331]: Chromosome 1, SNP identification no. = rs804675
  misc_feature [331]..[331]: allele = t, in linkage disequilibrium with rs7555416, respectively
  misc_feature [331]..[331]: n is a, t, c or g
ttgtagagcagtatttttaggcatgttcacaaagtatatatgctggcaaggaatagccaaagaaaatgaaaacactatttcagaaagatatctgtactcccatgttcatttcagcattattcacagtagccaagataaagaaacaaccgaagtgtctgtcaacagatgaatagattaagaaactatgatatatgtatatacacacacacatatgtatctcacactatatatatttatatctatatatagagagagatatatgtacacacacacaatggaatattattcagccttaagaaaaaaacaaaatcctgctacttaggacagcacngatgaaactgtacaacattatactaagtgaaataagccagacacagaaagacaaatgctgtatcatctcacttaaatgtgaaatctaaaatataaaattcataagaatggcaagtgaaatggtggttaccaggggcgtgaggtggcagaaatggggagatggtagtcaaagggtacaagctttccatcatgagatgaatgtgttctggacagcaatatacggcgcagtggccatagttagtaaggatgcattgtatacttgaaatgtgctaggagaatagatgttgtgttttcactacacacacacacaaaagtatgtgagatggggcga

SEQ ID NO: 297 - DNA, 661 bp, Homo sapiens
  misc_feature [331]..[331]: Chromosome 1, SNP identification no. = rs1876081
  misc_feature [331]..[331]: allele = t, in linkage disequilibrium with rs7555416, respectively
  misc_feature [331]..[331]: n is a, t, c or g
ttctcatagcgtagggaaaaggtttgtagagcagtatttttaggcatgttcacaaagtatatatgctggcaaggaatagccaaagaaaatgaaaacactatttcagaaagatatctgtactcccatgttcatttcagcattattcacagtagccaagataaagaaacaaccgaagtgtctgtcaacagatgaatagattaagaaactatgatatatgtatatacacacacacatatgtatctcacactatatatatttatatctatatatagagagagatatatgtacacacacacaatggaatattattcagccttaagaaaaaaacaanatcctgctacttaggacagcacagatgaaactgtacaacattatactaagtgaaataagccagacacagaaagacaaatgctgtatcatctcacttaaatgtgaaatctaaaatataaaattcataagaatggcaagtgaaatggtggttaccaggggcgtgaggtggcagaaatggggagatggtagtcaaagggtacaagctttccatcatgagatgaatgtgttctggacagcaatatacggcgcagtggccatagttagtaaggatgcattgtatacttgaaatgtgctaggagaatagatgttgtgttttcactacacacacaca

SEQ ID NO: 298 - DNA, 661 bp, Homo sapiens
  misc_feature [331]..[331]: Chromosome 1, SNP identification no. = rs7413734
  misc_feature [331]..[331]: allele = c, in linkage disequilibrium with rs7555416, respectively
  misc_feature [331]..[331]: n is a, t, c or g
ggaataatgccctttagattagcatgtgtatgtatacgcttacagctttatgaatgttagaaatctgacttaaaggcccattgcacccttgaaatgtctcatgtcaaagagcccagtttctggtttctattctgcacttctaagtgatttttggattctttggaatgccttgcctgcaatggctgtgccattcttacagctcaatccatgccttccatgcaacttgatttctaattagttgttgcctgcttggaaatgaaagccatttttgcaccttgaagggcaatgtgaacttaatgaaaatatgctgattcaagttaaagatgtttcngttatgagcaagggcattgaaggttaaccctgaccttctcagggaaattgctatgctgtgtttcagttaagattatgtattaccatatttctttcagctaaatcaggcacataatttcagggtgaaaagagctgtttttttcagagtcacttaaacatgagttggtttaaaaagccacaaaaataaatccttagcagcaataacaatactaggatagaatgtgatgtgcttatcaagagctgcattggtgtagggcatctgccttcctatttgtttttctctggttagagaaataatgtccccactagcaataacttctgaaatgtcttt

SEQ ID NO: 299 - DNA, 661 bp, Homo sapiens
  misc_feature [331]..[331]: Chromosome 1, SNP identification no. = rs708664
  misc_feature [331]..[331]: allele = g, in linkage disequilibrium with rs7555416, respectively
  misc_feature [331]..[331]: n is a, t, c or g
agaggcatctaggcagcacatcacaatgtccactacaggatacttcaagatacataaagacatttcagaagttattgctagtggggacattatttctctaaccagagaaaaacaaataggaaggcagatgccctacaccaatgcagctcttgataagcacatcacattctatcctagtattgttattgctgctaaggatttatttttgtggctttttaaaccaactcatgtttaagtgactctgaaaaaaacagctcttttcaccctgaaattatgtgcctgatttagctgaaagaaatatggtaatacataatcttaactgaaacacagnatagcaatttccctgagaaggtcagggttaaccttcaatgcccttgctcataacggaaacatctttaacttgaatcagcatattttcattaagttcacattgcccttcaaggtgcaaaaatggctttcatttccaagcaggcaacaactaattagaaatcaagttgcatggaaggcatggattgagctgtaagaatggcacagccattgcaggcaaggcattccaaagaatccaaaaatcacttagaagtgcagaatagaaaccagaaactgggctctttgacatgagacatttcaagggtgcaatgggcctttaagtcagatttctaac

SEQ ID NO: 300 - DNA, 661 bp, Homo sapiens
  misc_feature [331]..[331]: Chromosome 1, SNP identification no. = rs7415124
  misc_feature [331]..[331]: allele = t, in linkage disequilibrium with rs7555416, respectively
  misc_feature [331]..[331]: n is a, t, c or g
agccatttttgcaccttgaagggcaatgtgaacttaatgaaaatatgctgattcaagttaaagatgtttccgttatgagcaagggcattgaaggttaaccctgaccttctcagggaaattgctatgctgtgtttcagttaagattatgtattaccatatttctttcagctaaatcaggcacataatttcagggtgaaaagagctgtttttttcagagtcacttaaacatgagttggtttaaaaagccacaaaaataaatccttagcagcaataacaatactaggatagaatgtgatgtgcttatcaagagctgcattggtgtagggcatcngccttcctatttgtttttctctggttagagaaataatgtccccactagcaataacttctgaaatgtctttatgtatcttgaagtatcctgtagtggacattgtgatgtgctgcctagatgcctctataaggagcacttgttggtccagctgctgggaatgctgtagaggaaagcttttggctgtcagccccttccgggattgccttagcttcagagagtggtcctacccaagggcaagctttccaggcagcagccagcatcagatgactgatcaatgtgagtggagggacataacggcatggccacctcagcccaatctggggtaatttt

SEQ ID NO: 301 - DNA, 661 bp, Homo sapiens
  misc_feature [331]..[331]: Chromosome 1, SNP identification no. = rs11163456
  misc_feature [331]..[331]: allele = g, in linkage disequilibrium with rs7555416, respectively
  misc_feature [331]..[331]: n is a, t, c or g
ttcctatttgtttttctctggttagagaaataatgtccccactagcaataacttctgaaatgtctttatgtatcttgaagtatcctgtagtggacattgtgatgtgctgcctagatgcctctataaggagcacttgttggtccagctgctgggaatgctgtagaggaaagcttttggctgtcagccccttccgggattgccttagcttcagagagtggtcctacccaagggcaagctttccaggcagcagccagcatcagatgactgatcaatgtgagtggagggacataacggcatggccacctcagcccaatctggggtaattttgaanggccatgtagttttagggttgtctgtgaagagataagagaaaatataacttcacttaaattcacccagttatcacctgtgcttcgtctgtctctctatgtgcacatgtgtgcattgcaaaacttttaatttcaggcattgtgatgcaccactctgaaatacataagcatttattttctaaaagtgagaatgttctcctgcatagtcacagtaatattgtcactctcaagggctagagcattgataatatacaatcatcatacatacaactcatatgctaatattcccaatgtcttttatggctgattcccccccactgaaaatcatcagt

SEQ ID NO: 302 - DNA, 661 bp, Homo sapiens
  misc_feature [331]..[331]: Chromosome 1, SNP identification no. = rs709738
  misc_feature [331]..[331]: allele = g, in linkage disequilibrium with rs7555416, respectively
  misc_feature [331]..[331]: n is a, t, c or g
atatcaataacctatctgatacataaatagcttctaaaagttgaggagaaaaaaaccaaaacccaaaagaaaatggttgaacttacatgccttctgatgcaatgcaccgaggacacagcatcacttatgtagtattattcccccaaatgttgcatatgaacttaatcatgaagaaacaatcaggcaaatccagattatatgacattccacaaaacaactgtcctgaactattaaaaacttcagtatcgcacatgatttttcttccataaaaggtggagaaattgatgtagattaaagaagactgaagagagaaatgcaatatctgatttantgatgattttcagtgggggggaatcagccataaaagacattgggaatattagcatatgagttgtatgtatgatgattgtatattatcaatgctctagcccttgagagtgacaatattactgtgactatgcaggagaacattctcacttttagaaaataaatgcttatgtatttcagagtggtgcatcacaatgcctgaaattaaaagttttgcaatgcacacatgtgcacatagagagacagacgaagcacaggtgataactgggtgaatttaagtgaagttatattttctcttatctcttcacagacaaccctaaaactacatggccct

SEQ ID NO: 303 - DNA, 661 bp, Homo sapiens
  misc_feature [331]..[331]: Chromosome 1, SNP identification no. = rs785586
  misc_feature [331]..[331]: allele = t, in linkage disequilibrium with rs7555416, respectively
  misc_feature [331]..[331]: n is a, t, c or g
actgcaacctccacctcccaggttcaagcaactgccctgcctcagcctccccagtagctgggactacaggcacacgccaccacgcctggctaatttttgtattattagtagagatggggtttcaccaaattagccaggctgttcttgaactcctgacctcgtgatccacctgcctcagcctcccaaagtgctgggattgcctggcagagatagacattttaataagtagtgttgacacactgaatatccttttggattacaggtaaaatgggattcatacctcacaccatgcatgaaaacaaattccaaatggataaggtatgtgtattanggttctccagaaaaaacagaaccaactgaatatgtatatacaaatatagagaggtttgttttaaggaattggatcatgcaattgtggaggcttaccaagtccaaaatctgatgaggtagtctggccggttggagcctcaggaagagtttcagtttgagttaaaaggcaacctgctggtagaattctttcttgctaaggggaggtcagtttttgctctattaaggccttcaaatgattgcatgaagcccatttatatcatggtgggtaacctgctttactcaaagtctattgatttaaatgttaacctcacctaaaaaacaccttcacaga

SEQ ID NO: 304 - DNA, 661 bp, Homo sapiens
  misc_feature [331]..[331]: Chromosome 1, SNP identification no. = rs1934763
  misc_feature [331]..[331]: allele = t, in linkage disequilibrium with rs7555416, respectively
  misc_feature [331]..[331]: n is a, t, c or g
aatagttattcaagtgtgttcataacagcttaatacataatagaccctaactggaaacagctcaagtgtccctcagcaagcaataaagtatagtttatttataaaacggaatactactcagcaattaagagaaatgacacacacacaatatggatgactataaagacgtactaactgaatgaaagaaactttacacaaaagtgtacttacttagtgtatgattccatttacatgaagtcctaaaacaagcaaaagtaatttatgataagaaaaaaaattaaaatagcatttacctttgggacaggagtatatataagtgaggatttactgngaaaaagaattttactggagtcagagagtgtccagatttctcaaaactcattggatactacattcaagatttgtgactttcattacaaacaaatttattccaggaaaatagggaacactaacaaatttttaactctatttgatgttatgcatactgaagtatttgggagggtgatagtgatgtcttcaatttactttgaaatgtatcgtaaaataagatgaactgagagagggatggatagatggatgagtattcactgtaagttttctgaacatttgaaaatttttcatgataaaatgtaggagagaaaagaaaagcagtaaaagagca

SEQ ID NO: 305 - DNA, 661 bp, Homo sapiens
  misc_feature [331]..[331]: Chromosome 1, SNP identification no. = rs7536542
  misc_feature [331]..[331]: allele = c, in linkage disequilibrium with rs7555416, respectively
  misc_feature [331]..[331]: n is a, t, c or g
aaatacttcagtatgcataacatcaaatagagttaaaaatttgttagtgttccctattttcctggaataaatttgtttgtaatgaaagtcacaaatcttgaatgtagtatccaatgagttttgagaaatctggacactctctgactccagtaaaattctttttctcagtaaatcctcacttatatatactcctgtcccaaaggtaaatgctattttaattttttttcttatcataaattacttttgcttgttttaggacttcatgtaaatggaatcatacactaagtaagtacacttttgtgtaaagtttctttcattcagttagtacgtntttatagtcatccatattgtgtgtgtgtcatttctcttaattgctgagtagtattccgttttataaataaactatactttattgcttgctgagggacacttgagctgtttccagttagggtctattatgtattaagctgttatgaacacacttgaataactattttgtggatgtatgttttcatttttcttgggtaaatatctaagagtagaattattggggtacagggtaagtgaatgtttagttcaatagggaactatcattcttttatctaataagtgcaagttccagttgcttcaaatttgacgttgtaagtctttttaattttag

SEQ ID NO: 306 - DNA, 661 bp, Homo sapiens
  misc_feature [331]..[331]: Chromosome 1, SNP identification no. = rs10782780
  misc_feature [331]..[331]: allele = g, in linkage disequilibrium with rs7555416, respectively
  misc_feature [331]..[331]: n is a, t, c or g
atcatattaaatttatattcttttgagaaaataaatttcaggagtaattttttccagtgacaatgcttttcatttgtccaaatctacttttgtatctttcaggaatctttttaaagtttcctcttttttccacatttcttattaagctgactcctaaatttttatttttgtgttgttattataaatgggttttctctttcactgtatctttacttggttattttatttattactaatgtctgttaatgtataatagtcacatattgattttaatcttgttatcttaataaattattttcttctgtgagctactttcattatcgctctcatnagttttctaggtatagtgtcttatcacttgtaaatagagcaaatttacgagtttttttagttcttatgattccaatagttttcaattttcttattgcattggttcttgcctatagtaaaatgttaaagaacagtgatgattttttggaattcttatcttgtttataacattagtgagaatgtctttattattatttacctattcaacaagaatattggctttagggttaaataatgtatttttctatataagtctagatagctaaatagctgatcgagatatacaatggatacatacatagagatattgatctatctatcaatctatcta

SEQ ID NO: 307 - DNA, 661 bp, Homo sapiens
  misc_feature [331]..[331]: Chromosome 1, SNP identification no. = rs10782781
  misc_feature [331]..[331]: allele = t, in linkage disequilibrium with rs7555416, respectively
  misc_feature [331]..[331]: n is a, t, c or g
aaccagtattttcacgtatttgttttattgtttttctattttctattttgtcctttatcttaattgcattttatctcattcagttaccttcttatggaagcatttttattgtgcattaaatatatgtaatgccttctaattattgctttaaatgtattccatgaattctacaatgcagtgtttcttttactactttttaagaaataccacaatttaagttgtatttactcttttacctaagatttgtgtaatagaaacttaaaacatttccaggtggacaggccttaatttttttcttttttgttactttctactttcattgcctagtgangagagaatcttttgtatggactatgctaaaattattgaggctttctttgtgcctagtggttacacagaacgtttttgtgtatgcttcatgttttatctacaatgaggtatattttctattatcagattgcaacattacataaggtattcgtatgatgtacctcattaggattatgttgtttagtccatccgtatctttatacatatctttgtccacttgaccagatttgatcagagacttgtatgttaaagtctcctattagtatgtttctgcctatttttccctgaatatctcatagtttttgctttatgaaggtagttaccatggtat

SEQ ID NO: 308 - DNA, 661 bp, Homo sapiens
  misc_feature [331]..[331]: Chromosome 1, SNP identification no. = rs709741
  misc_feature [331]..[331]: allele = g, in linkage disequilibrium with rs7555416, respectively
  misc_feature [331]..[331]: n is a, t, c or g
acacaatggaagtttacaatgctaaaatcacaaatgttaatgcagacataacagttttatctatgtaccaaataccatggtaactaccttcataaagcaaaaactatgagatattcagggaaaaataggcagaaacatactaataggagactttaacatacaagtctctgatcaaatctggtcaagtggacaaagatatgtataaagatacggatggactaaacaacataatcctaatgaggtacatcatacgaataccttatgtaatgttgcaatctgataatagaaaatatacctcattgtagataaaacatgaagcatacacaaaaangttctgtgtaaccactaggcacaaagaaagcctcaataattttagcatagtccatacaaaagattctctcatcactaggcaatgaaagtagaaagtaacaaaaaagaaaaaaattaaggcctgtccacctggaaatgttttaagtttctattacacaaatcttaggtaaaagagtaaatacaacttaaattgtggtatttcttaaaaagtagtaaaagaaacactgcattgtagaattcatggaatacatttaaagcaataattagaaggcattacatatatttaatgcacaataaaaatgcttccataagaaggtaactgaatgagata

SEQ ID NO: 309 - DNA, 661 bp, Homo sapiens
  misc_feature [331]..[331]: Chromosome 1, SNP identification no. = rs10874306
  misc_feature [331]..[331]: allele = t, in linkage disequilibrium with rs7555416, respectively
  misc_feature [331]..[331]: n is a, t, c or g
ctttccctagcatttttttttttgagaccttttgttttgactttgtgtctttttacagcaagtttaaaaaagtaggcttttgttgtgttcagcctggtaccccttttctttgattttctttcttgcattattatgggttattttcttggctttctcttatgtgtgtggatttctttcagataatttggaagtttgcctcttcggttctttcagtgattacatttatatcataattttatgtaatatactaactactactcttcattgttaggcagtaactattaaatctccattttgtgcaataacaaaattgttgtaatttccccatccntccctttatttctactatcaaattacagatgaacacagtcttttccttgctttactactttgttccattatatactttttaaaaatgttatctctattacatttatatcagtcttttaaaaatatattttaatcactagctactaaagatgaggaaatagagtacttacaccactttccatttttctcctccttttgtatccacattttggttaatatgtttttgacttatttttatggtttgcaatattttcttttgcttttctacccataagtttatcagcactttggtcttagtcttggggttaaacgaattcaatattctaaccaa

SEQ ID NO: 310 - DNA, 661 bp, Homo sapiens
  misc_feature [331]..[331]: Chromosome 1, SNP identification no. = rs709743
  misc_feature [331]..[331]: allele = c, in linkage disequilibrium with rs7555416, respectively
  misc_feature [331]..[331]: n is a, t, c or g
aactaatagagccaaacaaaagacaaatagagaaactgtaaaggattggttagaatattgaattcgtttaaccccaagactaagaccaaagtgctgataaacttatgggtagaaaagcaaaagaaaatattgcaaaccataaaaataagtcaaaaacatattaaccaaaatgtggatacaaaaggaggagaaaaatggaaagtggtgtaagtactctatttcctcatctttagtagctagtgattaaaatatatttttaaaagactgatataaatgtaatagagataacatttttaaaaagtatataatggaacaaagtagtaaagcaagnaaaagactgtgttcatctgtaatttgatagtagaaataaagggaaggatggggaaattacaacaattttgttattgcacaaaatggagatttaatagttactgcctaacaatgaagagtagtagttagtatattacataaaattatgatataaatgtaatcactgaaagaaccgaagaggcaaacttccaaattatctgaaagaaatccacacacataagagaaagccaagaaaataacccataataatgcaagaaagaaaatcaaagaaaaggggtaccaggctgaacacaacaaaagcctacttttttaaacttgctgtaaaaagaca

SEQ ID NO: 311 - DNA, 661 bp, Homo sapiens
  misc_feature [331]..[331]: Chromosome 1, SNP identification no. = rs698006
  misc_feature [331]..[331]: allele = c, in linkage disequilibrium with rs7555416, respectively
  misc_feature [331]..[331]: n is a, t, c or g
gttgatctttgtattagttaagattcgtaatacttccttagccctccagtattaagaagccaaagaacatagcagagtacttatagctctgtctttctgctcataaaaatccctcaaaaacactaactgaagacataaaaatacaaattattttacctttccaaaattatagagcactctaaccctaaccctcaaaatttatggaagaactgcaaaatgtagcaaagactagacaggtgtggggaaacatcaaatgcgaaaacctgtagatctcaagcaaaaccagaagagcgtagtcatccttaagtagggattgcatcctcagaagccnaagaaataacattttttgtttaaaatcttttctgtttaaaacaaaagaaatagaacacccaggctggtgggaaaagcttcacgagatgtcatttggtaccatggtgtatcaggaattccacaaggaaacagacatacatgacattattgaagagattggagacagattggagaggaaaacctgaggaggagtttggaggcttttatagctattcacctttcctggccatgtaaaagtcatggttaaaataaatctgttcgctcatccaaggtgacaccttgaatatccttgtacataaaggtgaattcctactagctgacatgcatttcc

SEQ ID NO: 312 - DNA, 661 bp, Homo sapiens
  misc_feature [331]..[331]: Chromosome 1, SNP identification no. = rs698007
  misc_feature [331]..[331]: allele = t, in linkage disequilibrium with rs7555416, respectively
  misc_feature [331]..[331]: n is a, t, c or g
atagcagtttcataaactacgaatacctcagggtctcagcataacccatgttgatctttgtattagttaagattcgtaatacttccttagccctccagtattaagaagccaaagaacatagcagagtacttatagctctgtctttctgctcataaaaatccctcaaaaacactaactgaagacataaaaatacaaattattttacctttccaaaattatagagcactctaaccctaaccctcaaaatttatggaagaactgcaaaatgtagcaaagactagacaggtgtggggaaacatcaaatgcgaaaacctgtagatctcaagcaaanccagaagagcgtagtcatccttaagtagggattgcatcctcagaagccgaagaaataacattttttgtttaaaatcttttctgtttaaaacaaaagaaatagaacacccaggctggtgggaaaagcttcacgagatgtcatttggtaccatggtgtatcaggaattccacaaggaaacagacatacatgacattattgaagagattggagacagattggagaggaaaacctgaggaggagtttggaggcttttatagctattcacctttcctggccatgtaaaagtcatggttaaaataaatctgttcgctcatccaaggtgacaccttg

SEQ ID NO: 313 - DNA, 661 bp, Homo sapiens
  misc_feature [331]..[331]: Chromosome 1, SNP identification no. = rs1857814
  misc_feature [331]..[331]: allele = a, in linkage disequilibrium with rs7555416, respectively
  misc_feature [331]..[331]: n is a, t, c or g
acggaatgcataaaatatataaattgtcatgaaataataaatgtatataaaattcatgaatacctgaaaacacattgtaaacattatgatattattaattaaaataatttcatatttttcagtgaccaaagtacatgagatgaacttttaaatagtattaaataagtaaagtagggttgttatagaatgcagccctaattagactctgctcattttgatcttcatttaaacatctcctaattctcttcttacagggaaacatagattataaactaaggtaaggctataatgagtcagacaaattttgagtgcttattatttcatagaaganggaatatcaagacagattcttgcaggtgaacatatgaactttgagctgtaacaaatatcaacagggcagttctggtctagacttgctctgggtacatgccagccccttcacttaaaaaatacaataacctcaataaatctggatttgtccatgcctgacttgaatatgagttgcaatcccaggaaattcctgattgaattcccagggatccagactaatgaatcatggtattggacatttgaacatggatgttgactttgccaaatggagaggtcaagcatagggttaaaacctaagtacattttccggaaataaagacctgctctgggc

SEQ ID NO: 314 - DNA, 661 bp, Homo sapiens
  misc_feature [331]..[331]: Chromosome 1, SNP identification no. = rs786082
  misc_feature [331]..[331]: allele = a, in linkage disequilibrium with rs7555416, respectively
  misc_feature [331]..[331]: n is a, t, c or g
ttatgtttctacccagcttgataaactggagccagtaggacaagactggacttcttagtagtgcaagactagactagactccatgttctgagaaaggcaatctgatcttagccagtctaatcaaggattaaatctctaaaaatccctctaattggggactggtttatgtcagtctatgctggaaaacatcattccttctaatggtaaaaagatgaataagcaattctagagcagtggttttgtaaacactcaaggggttcaccttgcccactgcctagacagagctgatttatcaagaaaggggaactacaatggagaaagagtttttcangcagagccagctgtgcagaagaccagagttttattattattcaaatcattctccctgaacatttggggatcagagttttaaagataattcggtggataggtgcttgggaagtgggtagcgtcaattgttgatggaatcatagggggtcaaagtaaatttttgttgctgttggtgtcttctgttcctgggtgggatggcagaactggttgagccagattaccagtttgggtggtgtcagctgatccactgaatgcaaggtctgctaaatatctcaagcagcctaaaaaattttaggttttgcagtaatgatattatccccaggagccattt

SEQ ID NO: 315 - DNA, 661 bp, Homo sapiens
  misc_feature [331]..[331]: Chromosome 1, SNP identification no. = rs1505543
  misc_feature [331]..[331]: allele = t, in linkage disequilibrium with rs7555416, respectively
  misc_feature [331]..[331]: n is a, t, c or g
tttttgcatattaagaccaatgctttccaacaagcactgccagagtctaaccagagtctctgaattccaattccaaatgtcttatcaatcaaatatgattggtccagcatgattatgtttctacccagcttgataaactggagccagtaggacaagactggacttcttagtagtgcaagactagactagactccatgttctgagaaaggcaatctgatcttagccagtctaatcaaggattaaatctctaaaaatccctctaattggggactggtttatgtcagtctatgctggaaaacatcattccttctaatggtaaaaagatgaatangcaattctagagcagtggttttgtaaacactcaaggggttcaccttgcccactgcctagacagagctgatttatcaagaaaggggaactacaatggagaaagagtttttcatgcagagccagctgtgcagaagaccagagttttattattattcaaatcattctccctgaacatttggggatcagagttttaaagataattcggtggataggtgcttgggaagtgggtagcgtcaattgttgatggaatcatagggggtcaaagtaaatttttgttgctgttggtgtcttctgttcctgggtgggatggcagaactggttgagccagatt

SEQ ID NO: 316 - DNA, 661 bp, Homo sapiens
  misc_feature [331]..[331]: Chromosome 1, SNP identification no. = rs6667706
  misc_feature [331]..[331]: allele = t, in linkage disequilibrium with rs7555416, respectively
  misc_feature [331]..[331]: n is a, t, c or g
cagtgggcaaggtgaaccccttgagtgtttacaaaaccactgctctagaattgcttattcatctttttaccattagaaggaatgatgttttccagcatagactgacataaaccagtccccaattagagggatttttagagatttaatccttgattagactggctaagatcagattgcctttctcagaacatggagtctagtctagtcttgcactactaagaagtccagtcttgtcctactggctccagtttatcaagctgggtagaaacataatcatgctggaccaatcatatttgattgataagacatttggaattggaattcagagacnctggttagactctggcagtgcttgttggaaagcattggtcttaatatgcaaaaaaactgaaaagggcagcaaaatggttttcattaaaccatgggttctttgtcctgcttttctaaagttagagaaagtaatcctaagagttttggaggtatctacatttttagtaaaatctccaagtttttacataggcagaatatgctaatcaagaaatgggtccatttctacctataaaccgtgactcatgacactcaaaatggttaatgttaatctatgagagagaagtatggtcactaaaatgacaaatcagagttatatttttgtttgtgttcc

SEQ ID NO: 317 - DNA, 661 bp, Homo sapiens
  misc_feature [331]..[331]: Chromosome 1, SNP identification no. = rs786081
  misc_feature [331]..[331]: allele = g, in linkage disequilibrium with rs7555416, respectively
  misc_feature [331]..[331]: n is a, t, c or g
cattaaccttcttgtattccactggtgagttgtactaacctgcaaccaggctgtgtttcttcaaatattatgtttttaaaagttatcttggtggggaggacagtatcctttattatatttgaagaagaaaacaatattgggacatctttattttcatcattgtacacactgaattgtttgaatccatttgtttaaatcagttaaatctggctgcaccagagagctttctgcaccagaaagctttttttttttttttttgagacagagtctcgctctgtcacccaggctggagtgcagtgatgcaatcttggctcactgaaacctccacctnctctcgggttcaagcgattctcgtgcctcagcctcttgagtagctgggattacaggcatgcaccaccacaccaggctaatttttgtatttttagtagagacagggtttcaccctgttggccaggttggtctccaactcctgacctcagctgatctgcccgcctcagcctcccaaagtgctgagattacaggcatgagccaccgcacccggccaagagagtttcttatggcaacttaatttgctattccctaaaatagaaggatagcatgttttcatcttttgttgctttaccctagagacttcccaaataatattttaagaataaagaga

SEQ ID NO: 318 - DNA, 661 bp, Homo sapiens
  misc_feature [331]..[331]: Chromosome 1, SNP identification no. = rs786080
  misc_feature [331]..[331]: allele = a, in linkage disequilibrium with rs7555416, respectively
  misc_feature [331]..[331]: n is a, t, c or g
tttcaatcctattgagatttctacccttcaaaagaaaggatgtggattattagactcttggcagggggtacagaaaaatctatgttgctctaggtccaacccagcagtggcggattaagatgtgattgaatggattggcaatcatcagccccacactcagaacctccaggttcctccaggatacccaacaagcctcttttcccagtagaattcccctttgccgctcccatttcttctttaattattttcattaaccttcttgtattccactggtgagttgtactaacctgcaaccaggctgtgtttcttcaaatattatgtttttaaaagntatcttggtggggaggacagtatcctttattatatttgaagaagaaaacaatattgggacatctttattttcatcattgtacacactgaattgtttgaatccatttgtttaaatcagttaaatctggctgcaccagagagctttctgcaccagaaagctttttttttttttttttgagacagagtctcgctctgtcacccaggctggagtgcagtgatgcaatcttggctcactgaaacctccacctcctctcgggttcaagcgattctcgtgcctcagcctcttgagtagctgggattacaggcatgcaccaccacaccaggctaattt

SEQ ID NO: 319 - DNA, 661 bp, Homo sapiens
  misc_feature [331]..[331]: Chromosome 1, SNP identification no. = rs786078
  misc_feature [331]..[331]: allele = c, in linkage disequilibrium with rs7555416, respectively
  misc_feature [331]..[331]: n is a, t, c or g
tccatctgcaagccacacacagagcctgctcctgtgcccacacttcgaatggctggccagaccccacactggctcactcacaaaccccctcccctcagggactgagcacacagttacagcagccacgggatatgtgctggagtgcaagccaggcatggctcagtgggctgagtagacaagacaactcttgcagcatgcctgggatgagaaagacctgggcagggtgttgtcagccagaggtgtggagctggtaaagtggctgaggaaaatctcgcatcattactcctttcatgcctatcaggggtgcctggattcttatgcctaatctctngctattagcattcttttccccttcagatcagtcctctcatcaggtctctttcccaggcacagaacacagctgtctacaggggcagtctcctgtctcagttcaaacactaccagagcctaactagcatctctcagttccaattccaaatgtcttctcatcaagtctgattggtccagcctgggtcagttatctatccagcttaataaactgggtcccatgggtcaagaccacaatcctctccatcttcagagaaaggcaacctggtcttggcagagtcttctcaggaatgctatattttcaaatctcctagagtcagttgctatttgattg

SEQ ID NO: 320 - DNA, 661 bp, Homo sapiens
  misc_feature [331]..[331]: Chromosome 1, SNP identification no. = rs7513231
  misc_feature [331]..[331]: allele = g, in linkage disequilibrium with rs7555416, respectively
  misc_feature [331]..[331]: n is a, t, c or g
gactctaggagatttgaaaatatagcattcctgagaagactctgccaagaccaggttgcctttctctgaagatggagaggattgtggtcttgacccatgggacccagtttattaagctggatagataactgacccaggctggaccaatcagacttgatgagaagacatttggaattggaactgagagatgctagttaggctctggtagtgtttgaactgagacaggagactgcccctgtagacagctgtgttctgtgcctgggaaagagacctgatgagaggactgatctgaaggggaaaagaatgctaatagccagagattaggcataanaatccaggcacccctgataggcatgaaaggagtaatgatgcgagattttcctcagccactttaccagctccacacctctggctgacaacaccctgcccaggtctttctcatcccaggcatgctgcaagagttgtcttgtctactcagcccactgagccatgcctggcttgcactccagcacatatcccgtggctgctgtaactgtgtgctcagtccctgaggggagggggtttgtgagtgagccagtgtggggtctggccagccattcgaagtgtgggcacaggagcaggctctgtgtgtggcttgcagatggaccaggcatgttgcaag

SEQ ID NO: 321 - DNA, 661 bp, Homo sapiens
  misc_feature [331]..[331]: Chromosome 1, SNP identification no. = rs786077
  misc_feature [331]..[331]: allele = t, in linkage disequilibrium with rs7555416, respectively
  misc_feature [331]..[331]: n is a, t, c or g
ctttccagacagcttctcaagacaaactcactgtttacacacataatcagtttacgccttgaattgatatgaaaaactcacaaagtaaacctaccactttggggactccctgactgacttcaataggaaacttttagctgtaaaatagcattttcagtttaacacttggacactcaacctgcgtgaactgctttatttcttcctcaaacaaccatattcacattttctagataattattcccaatacccagttcactttgtgtttggaggcactgcttagaatcatatcattttagagtcagagaggatcagatagaacatatgccccaancttctcattaatagatacaaatccaaagctccaaaaacatactcaaggttacacagctagtgagtctttaagaaaggactaacattccatatgctctgactttggttccagtactctgtccctaattatgcttttctgtttgtgttggagattgccagcccttcttaccactcatctgtgtttctagtctcagttttgccattaattatcttttacaaccatgaatacattacttacaggcctcagttttgtcatgtgtaaaatgagtgagtctaattaaatatctataatctagtcaagctaagagatagcaggattctatgaccatcg

SEQ ID NO: 322 - DNA, 661 bp, Homo sapiens
  misc_feature [331]..[331]: Chromosome 1, SNP identification no. = rs786076
  misc_feature [331]..[331]: allele = c, in linkage disequilibrium with rs7555416, respectively
  misc_feature [331]..[331]: n is a, t, c or g
tgtgtgtaaacagtgagtttgtcttgagaagctgtctggaaagtatccagaatcagacagatgccacaatggcatttcttctttcagctagtaggactattggtgaaaggttaacagtaaatcatttggcctcctggatatttgaagaaatagaatgaactgaaataaatctctctccccaaacttctctttcccacctcccacctctcagctaatcatattatgcttgttgaatgagtgaatgtgaatatgagagatttttttttttacttccactcataaaggatatagaacaaagagattaccaatgaagtgagaagttttcatctcnaaaattttaagctcttgagaacacacataatatacactcatcagcatatatacatgggaccttgaacagcataaaattccccccgtaagatacacaatacaactaccaattccctctgctggcatatatagggataactttccagtaggccacatctgtatttgagttcctttatctgccccttcctgaggcctttctcagccagtgatgaagctctaattaccaaattcagtaacctttcctaggtctctttttcaggtatcacttttgctgatttgacacatttgccattttttcttcttggaactctcttttttttttttttttttt

SEQ ID NO: 323 - DNA, 661 bp, Homo sapiens
  misc_feature [331]..[331]: Chromosome 1, SNP identification no. = rs786074
  misc_feature [331]..[331]: allele = a, in linkage disequilibrium with rs7555416, respectively
  misc_feature [331]..[331]: n is a, t, c or g
cacactgtatttacccagatgctaaaacttaaaattattcaattgcaaaaataaaagcaaacaaacaaaaagcatacattcacatatatggactattgagtaatctttgtctttattcaagatggtgtagggaatattaaagttggatttacatcaatttctccatatcagataccccacatcaaaccaaggttaaatattctgcctccaaaatttctttcaccattactttttctatgcacccccagcctcctcctcctcctcacatcactgaatgatcgtttaaagttaactataccaggagttgatgaaacaaccaaagagcttagtnggatttgagggaaaagaggcaagggcaaacttttaggaatggccacatctagaaggtgagaattggaagaagaattgatgaagacaggaagggtagtcaggattaactgaatcaaggaattgcaatgacgtacaaactgagggaaaaagagttccaagaagaggctgagtgtggtggctcacacctgtaatcccagcactttgggaggccgaggtgggtgaggtcagaagttcaagcctagcctgaccaacatgatgaaaccccatctctactaaaaatacaaacatcagttaggtgtggtggcatgtgcctgtggtcccagctactcgg

SEQ ID NO: 324 - DNA, 661 bp, Homo sapiens
  misc_feature [331]..[331]: Chromosome 1, SNP identification no. = rs2236390
  misc_feature [331]..[331]: allele = c, in linkage disequilibrium with rs17113360, respectively
  misc_feature [331]..[331]: n is a, t, c or g
aaaaaaatcagccttttaaacagagattgattctgacagcttttattttatgtgatttccaagaattgatataggaatgcttcttaattgaaatagttctccttttttggtttttattttattgtcctttacttcttgacatcttgtacattaaatcaaaggctgttttagagacatgaaatgacagctttttcagagtccgattctggatcctgatagatctgcatttctcaaagcagacaagttgctctcgccagccttggagaagcttcctgcatgatgggcacgtcacctagaaacaacataaactgcaggttaatcaccgaggaanggctcatgtcaattccccactgccctgcttcctgtctaagaggaataaaaccaagagtgactgtttctttgctatttaatttaacagaatctgaactcaactttagtttgaaattatatttcctcttggccaggatggaaaggctactcatgtcatttagtaacgcgttgtaaagaaaaatcaaagcgtcctcatggactgtttttccctgtcgtatctgccagtgatgagagaacacataaagtgaatgagacgtgacacaggcatgcacagagaacccatttgttacactgaaattctcaggaaaatgctatttgtgttactgtgatg

SEQ ID NO: 325 - DNA, 661 bp, Homo sapiens
  misc_feature [331]..[331]: Chromosome 1, SNP identification no. = rs17113351
  misc_feature [331]..[331]: allele = g, in linkage disequilibrium with rs17113360, respectively
  misc_feature [331]..[331]: n is a, t, c or g
aaaaaaaccaggttaattcatgcaaccacactattgtaccttataaaattatattaatgtttgtaacacttctaagaaataatcttcatttattttaaaactgcaaatatggcaccttataataggaaatcaattcataactttatttatgacatcattttgctggcaacttgtttctcatgactattgttcatgatacctaattcattaaagtaattttctccttctttcagtgggtttcctacagactctatagccagtactcagtgcactgctgctctctgagataccccattttctcattgctcctttcttttggtatgtttgggancactctcattttgaaagtacaaggaaaattatctcataaaagaatgtaataacaacagaacttctgagatttcaaaaacgtagaattcttaagttattgaactatgggaaaagctgtaatttataaccagtaagttagtatgttgtacacatctgtgtactgtttcagaaaataaaggttgttaccatagcaactgccacataacatagaacatacgttatttgtgagatgccaggctccgtgttaaaaaaaaaaaatccctcctcatggctgctgcctggtgtttcaaggatttcagccttttctttactataataagggatcctcttt

SEQ ID NO: 326 - DNA, 661 bp, Homo sapiens
  misc_feature [331]..[331]: Chromosome 1, SNP identification no. = rs17113357
  misc_feature [331]..[331]: allele = g, in linkage disequilibrium with rs17113360, respectively
  misc_feature [331]..[331]: n is a, t, c or g
agcccttttccatgggttacaaggccctgcagaatttgccacctttccctgaacccttaaacttcatctcctactgttctccccctagcttgtttacagtgctttagaccgggatcagcacacttctcagcacagggccaggtaaatattttaggctctgcaggccatgcagtctcccttgcagctactcagccctgctattctagcatgaaagcacccatagataataaataagcagacgagtgtggctatgttccaataaaactttattgacataaacaggcagcaggctggatttggcctgtagactggagtttgctgatccttgttntagatttactcttttttcttttcattcctccaatttgccaaggctttccaaccagagggttcacctcagatcttccctgggctgcctcttctggccactgcatcctcactgtgaatgagagattaacccggctcctctatttaagtagtttgctctactcatctcctgcattattacctactttattgtcttcacagcctttatcacatgaaacctctcattaatgtatttgcttacttgtttatcaactgtgtctccctctgtaaggtgaacatcctgtgaggaggacactttttgcctcgctcactgtggtgtttctaccaactagag

SEQ ID NO: 327 - DNA, 661 bp, Homo sapiens
  misc_feature [331]..[331]: Chromosome 1, SNP identification no. = rs17113360
  misc_feature [331]..[331]: allele = c, t
  misc_feature [331]..[331]: n is a, t, c or g
ctgcactcactgagcaccttgaatgtcttgagacaccacctgtgggtgtcacagagaccacctggtgatgccattgcccctgctgccacctctatctgagcaccactgcctctgtcatgtgcccaagccttctgctgggactacccttgcttccagccccaccacggtgccaccacttcaatgagctaagctgcttctagtggatggtggagttagatgatcaccctctttcaattttctctcaaattagtgattctgaattagtgtggcttgtgctcccaaattgaataattttaaacttttacttaccaccatctctcttcctaaatgnagtacctgatgcttacgtgaggctcattgtgtgcctggcagtgtggggagagatttacatacattaacttgtgcaatgctcacaacagacccatattattttcatctccactgaggccagaggggttaactgactcactcaaggcaaccagcaagcaacagaacttagatctgaatccaggcaactggctttagatgcatgctattaatcacccatctacaaggacctagacatgtgtctatggggctaggcttgggatagatgcaagaaactgataccacactccaaagccctatttcacagttaccctgggggtaacaagcctagtca

SEQ ID NO: 328 - DNA, 661 bp, Homo sapiens
  misc_feature [331]..[331]: Chromosome 1, SNP identification no. = rs17113368
  misc_feature [331]..[331]: allele = c, in linkage disequilibrium with rs17113360, respectively
  misc_feature [331]..[331]: n is a, t, c or g
accatttgggaaatatcattcgaggaaatggcctgctactggcttatgactttgaatacaaacctaggggctgatacaattgtccactatgcatcaaagaggaaagaaatgggaaagctgagggactaggaaagaagctatagaacccagcataatatttattaagaccttggaattcttttcaagataaattacatttatatgcacttattatatgtatgtattaaatttacatcccagttaagtgtgatgaagttattctaagtccattgcccaaaagatgattatccacaagggcacgatgtggttttgtcattggtttcagcaagtnattgtaaggagcattttcctgaaggtggtgtggtggtcttctcattgctatgtatttgttcttcctaaaataagaaagatttctgcgatttaaaaaaatcacactacttaataatactctcgattaactgagtacctttgtagtttctcaggaaaaatataaaattgggttgtattattactttatgtttttctctttggcacggagtttccttttcagattccagggtaaatagaacaaaggatcagtttttataatttattttttttttcaagagcatcttctggtatctcattatttggagatagctgtgaaaagaaagatcgggaa

SEQ ID NO: 329 - DNA, 661 bp, Homo sapiens
  misc_feature [331]..[331]: Chromosome 1, SNP identification no. = rs17113374
  misc_feature [331]..[331]: allele = c, in linkage disequilibrium with rs17113360, respectively
  misc_feature [331]..[331]: n is a, t, c or g
gtattgctctctgtgcaataatttcctagagatgaatatgggaatgcacatttctctgtacactgattgatttattcactagttcatgtatttattgactcattaatcatggatttttggggtcacttactatgtaccaggcaatattatgtttaacactgggaacacacatagacaaaagcaaaattaaatcacgtatttaatgaatgtttattgtctacatgtaacttatggtttaatggaaccagaaattcttgacttctggtctcagccctcatccaaagagtgtgctgcccataagtccaaagccagattagttgtcctatatgtngtggcatctctcatttagccaaactgagtgtacactcatagatgcagactctcctgcatatcttaccaggagggcaaccctgtatcactgaagagatatgttatcttccacagtaaaattgtggttaaaagcatggaagtcagagttagacatgcaggagtcatatcctggctccgctgctcactagatgagcatccttattacaattgcagttttctcgttagtaaattgagtgcaacctgtaaagactgcagtgaggattaaatttaaataaataaatgctgacacctagtaagccctgacaaatggtggctattaataacattgtgc

SEQ ID NO: 330 - DNA, 661 bp, Homo sapiens
  misc_feature [331]..[331]: Chromosome 1, SNP identification no. = rs11590181
  misc_feature [331]..[331]: allele = t, in linkage disequilibrium with rs17113360, respectively
  misc_feature [331]..[331]: n is a, t, c or g
tttgtgaccttataatccccttcctcctacattccagcttcctcttctttattgttctctaaagcacttattaccattggacagactacatattttacttttgctgctgtttgttttctctgttcttctgttagaatataagtgtcacatgcggtgtggttttattctgtcatttactgctgtgtcccagagcctggcacagagccaggtactttgtgggttcagtaaatatttgtcagctgtttattgagtgactgacctactgaggaactggattatgataacaatgttctattctctttcgtggtgctttattttttacaaagagctntcatgtatgttattttccataactctcacccacttaggaagtagatagcaaaggtaagctcagaatggtaatgtgaactctctgggtcatttagtgaacttgggggctggaacccttttcttttgactccaaatccagtgtcctctccactgcatacaccaagcaaacatgtattgtttgcgtaaaacataacaaatactttgggatacaaagagtgatggaagtgttctgggctaagtgtcacaagcatctctgttgtgccattatcctagtctgaaatgcttggtggcaagagtcttgcctgccaaagcgaggacaggtatcatatat

SEQ ID NO: 331 - DNA, 661 bp, Homo sapiens
  misc_feature [331]..[331]: Chromosome 1, SNP identification no. = rs9428100
  misc_feature [331]..[331]: allele = c, in linkage disequilibrium with rs11578232, respectively
  misc_feature [331]..[331]: n is a, t, c or g
ctttctctctctcacacagacacacacatacaaagtacacacataaaaatatcagactttaaaaaaaaaaagttatctatttttaagcctggccatggatcccatgagaatattctggaaagagatacaaattgattatttcactggccccagcctaggatggtttttattaaagggaagggatttgggaagaggattaaggtgtctttaggcctgtggatgctgggtgatagaaaacctgaaatctgtaatgggacaatatgagcaaaacagaacttggtcaaaggaaaggaaaaggcaaggaagccggggagtcgctgagagaagtganatggaccagggtggattgatagaagtcttttcaaactcaatgaattctagaggcagtgtttagtaaatcttttgttagtttactagggtttgcccttggcaagctttatctttttgtttctaagaaataaaaataggaagagaaggctcgaaaagccttttggacagaaaatagcactgagaaaaacaatattttgatgagttagtgctaaatgaattagaaacatgtggactgaatttcccttgaaatacaaatggattgaataattaatggaaaaagcacttggcaaaatgtacttgaggtttttattgaacccgaaccaaaacattt

SEQ ID NO: 332 - DNA, 661 bp, Homo sapiens
  misc_feature [331]..[331]: Chromosome 1, SNP identification no. = rs6428739
  misc_feature [331]..[331]: allele = c, in linkage disequilibrium with rs11578232, respectively
  misc_feature [331]..[331]: n is a, t, c or g
gagaaggctcgaaaagccttttggacagaaaatagcactgagaaaaacaatattttgatgagttagtgctaaatgaattagaaacatgtggactgaatttcccttgaaatacaaatggattgaataattaatggaaaaagcacttggcaaaatgtacttgaggtttttattgaacccgaaccaaaacatttgaaaatattttgaaatatgtgaaaagtataatatacatctggatttgcccaaccctactaaggatacaggaaacattatttttatttaacatttatatgatagctgcagtgtgcctcaatcctaaggtattttttacaanagccctatggtgtaggttataattattattttcatttttggcaagaaatttcccagtacttgcacagtgggcttcaagtagaagtttttattagtctgtgttttttagaggtttttgttcgtaggaacattggaccagtagacacaaacctaggtccaagtcttggctttacttcttattgacaatcacattgtatatcttcttggtagattttatcattttgtagtttctcccttttcttactaatatattttgatttaaacacaatttttccagatagtactactactataccagctgtctttggtaactatttgcccaatatatctg

SEQ ID NO: 333 - DNA, 661 bp, Homo sapiens
  misc_feature [331]..[331]: Chromosome 1, SNP identification no. = rs11578232
  misc_feature [331]..[331]: allele = c, t
  misc_feature [331]..[331]: n is a, t, c or g
tcacaagccaaggaatgtgggaggccctttagaagctggaaaaagtgaggagccttgagaaaggaaagcagtcttgctgaccagtgtcttgatttcagctcagtgcaacccattttggacttctaacctacacactaggaaggtaacactttcgttttgtttaaaccactaaattggtggtaatttgttacagcagcaaagataactaatatatatatcataacattcttcattttgaaatattctttgcatattaattgtgtctcttataaacagcatttagctagtttcttaaaattaatttcaccactttctgtctcttggtagatangtaacctgttcacatttctgcagttcttgagcttaaactatttgtgccatagtattgctttttaaagtctattttatttcctcttttctaccttttgttgtttaatcacattttttcttccttttcctctactaggttttaaagttatacaatttatttacattattttgatgacaatcttacattaaaaaacaaagtcttttgaagtgtgtataatacacatataggaaaatgtacatcagagttatacagctatatgaattgtcataaaataaatacagacatgtaaccaccatctttcaaagtcttttgaagtgtgtataatacaca

SEQ ID NO: 334 - DNA, 661 bp, Homo sapiens
  misc_feature [331]..[331]: Chromosome 1, SNP identification no. = rs9428101
  misc_feature [331]..[331]: allele = g, in linkage disequilibrium with rs11578232, respectively
  misc_feature [331]..[331]: n is a, t, c or g
ttgggcaaaatcatataatacaaagcctattttataataaagtgtcaaatatctcatgtaatttattgaatggttataaggtacttaaagtatcatttctactaaatgcatatcacttttacaccattgtaaagttgaaaaatcataagtcaaactatcataagtcagggaccatatatatatacactgtggtacactcatgacttcacattttaacatgcagaattagagtttaaagttaaccaatatctttatctattcctaaataatataaggattgaggacagcatacgtctttcatattattacagcctaaaattttagttccacntttgtttaaatccattccccttggtcattatcattttttaacagatacaaagtatttagatttagtaagttgtttaccaatttctatgctacttgcacaccttgttttccaactctttttttcctttcagattaaaatttccttttggtaaggtataatcttttataatccttttagcaaagaactgggggtagtaaatgccgtctttttatgtctgaaaatgcaatttttgtttgcattctttaacaatgttttagctgcttatagaattctagatggacagttatttttcctcagccctttaaatattcttatttttctttaaacctg

SEQ ID NO: 335 - DNA, 661 bp, Homo sapiens
  misc_feature [331]..[331]: Chromosome 1, SNP identification no. = rs9428102
  misc_feature [331]..[331]: allele = a, in linkage disequilibrium with rs11578232, respectively
  misc_feature [331]..[331]: n is a, t, c or g
cttcacattttaacatgcagaattagagtttaaagttaaccaatatctttatctattcctaaataatataaggattgaggacagcatacgtctttcatattattacagcctaaaattttagttccacatttgtttaaatccattccccttggtcattatcattttttaacagatacaaagtatttagatttagtaagttgtttaccaatttctatgctacttgcacaccttgttttccaactctttttttcctttcagattaaaatttccttttggtaaggtataatcttttataatccttttagcaaagaactgggggtagtaaatgccntctttttatgtctgaaaatgcaatttttgtttgcattctttaacaatgttttagctgcttatagaattctagatggacagttatttttcctcagccctttaaatattcttatttttctttaaacctgtatctgttgttgctgatgagaattccgttgccattctaattgccatccccttgagagtaacctgttgcttctctctgatggcttttcgaatttttgatgctctgtactttcactacagcctgtctaaacgtggacttaaatttatttatcctgctacaaactaagtgtgctttttcattgaggtcacatttttctttaattct

SEQ ID NO: 336 - DNA, 661 bp, Homo sapiens
  misc_feature [331]..[331]: Chromosome 1, SNP identification no. = rs2490197
  misc_feature [331]..[331]: allele = a, in linkage disequilibrium with rs11578232, respectively
  misc_feature [331]..[331]: n is a, t, c or g
ttgatcaataagttttatgccaacatgagataatgacaatattaaaatggatgttttttcccaagctaaaacagcttcaaaatacctaaagatgttggatcatagtaaaatagctattaccttcagccagctttacaggatattctaccttacctagccttttcctgacctttaaggagggataaagcacaggtatgactgccaagcttccatctttcccatacctaccttcctgtcttcagaatacttcagtgttgcctgggctattattgctaccaggagtggccaagtttccatgctgctctgctgctttgaagtgccaacccatccntgatatttcattgctttaggttctgggtggaatcatggtttccttagcatggaccacagctgggctcttccccagggtctcctgagcacacaaactgcactcatttgcccagctacatctctccttcactccgctcgttgttttactacctctccctacattcactagtggaactttttcccaaataatgttaacaaacattcctttcctggttttagtttgcatgtcactacatgataaccctaatcatgtcaacatgatgtgaaaggatcctctccaatcacacagccgaagaaatatcttcaccagaccattctcttctttccccac

SEQ ID NO: 337 - DNA, 661 bp, Homo sapiens
  misc_feature [331]..[331]: Chromosome 1, SNP identification no. = rs2490196
  misc_feature [331]..[331]: allele = g, in linkage disequilibrium with rs11578232, respectively
  misc_feature [331]..[331]: n is a, t, c or g
tctagcacattgacagttatttgatcaataagttttatgccaacatgagataatgacaatattaaaatggatgttttttcccaagctaaaacagcttcaaaatacctaaagatgttggatcatagtaaaatagctattaccttcagccagctttacaggatattctaccttacctagccttttcctgacctttaaggagggataaagcacaggtatgactgccaagcttccatctttcccatacctaccttcctgtcttcagaatacttcagtgttgcctgggctattattgctaccaggagtggccaagtttccatgctgctctgctgcnttgaagtgccaacccatccctgatatttcattgctttaggttctgggtggaatcatggtttccttagcatggaccacagctgggctcttccccagggtctcctgagcacacaaactgcactcatttgcccagctacatctctccttcactccgctcgttgttttactacctctccctacattcactagtggaactttttcccaaataatgttaacaaacattcctttcctggttttagtttgcatgtcactacatgataaccctaatcatgtcaacatgatgtgaaaggatcctctccaatcacacagccgaagaaatatcttcaccaga

SEQ ID NO: 338 - DNA, 661 bp, Homo sapiens
  misc_feature [331]..[331]: Chromosome 1, SNP identification no. = rs9428108
  misc_feature [331]..[331]: allele = t, in linkage disequilibrium with rs11578232, respectively
  misc_feature [331]..[331]: n is a, t, c or g
tctctatcaaaatgcagtacccatgattataagctaaactccagtacagggttcaaatcctggctatgccccttactagctatgtgaccttggacaagtttcttgaactttctgtacaatggagataatagtagtatctgttgtacaggttgaatgtaataatgagtcactatttgtaaagctctagaatggtgcttattatttaagtattaaatgaaataaattaaaactgtacctttttagactttactcattgaatctgttgaaggcaggactgggcttctctctagggtcctcttcaggtttaacatgcttcagtcttttgctcaanatcataactgatctacctctccaccagtgaccataacagcttctctcaatagcatgcttgtaacccagttttctgtgtattccaatgaatctaatttgcaactgggaaaacagagagttgatgttggccagaatgtattcatttatttttttttcgaaacaaaagtctggatattgtgtagacatagtctttgattcaaaaaatattctgcctttcaaatacctagttttttttaccactgttgttaattattaatttttcaagcaattacatgtgttatgatctttggaattcaagtaaaatgtaagtaatatggcattgcattagcta

SEQ ID NO: 339 - DNA, 661 bp, Homo sapiens
  misc_feature [331]..[331]: Chromosome 1, SNP identification no. = rs9428109
  misc_feature [331]..[331]: allele = t, in linkage disequilibrium with rs11578232, respectively
  misc_feature [331]..[331]: n is a, t, c or g
cagctcaggaaaggaaggcccagaggagtggtttacttagatcatattgcttgttggccaagataggtctagaactctagtcttctgactgatgaaatggtgctctactagccacacagatggtaactaaaattcataataatcactttgagatccacaagattccaaattacctttgcaataacaataataaaagttaaaaattttaatacagtgttgatattaagattattttcttatattgcaatttcctgaaaattagtgatctataattgtgtaaggcaatatatttcaagcatggttaagaacactttgctctataataactctntaaaacagggcatttactataaaaatttaatttttgaacatgatatcaaatgctaatgttagtagataagaaatgtggtcttaaattttattaatttgataatatatttaggagtcttcaccattatcattaggtgcatttcttaagtatactacagaatagcttcagactttgtattacttgcttaatccaaggtctcttcttttaagggaagcaaatagtagaaaaacaaaacaaaattgtggccactgtattgtttcttatgttgttttgtttgcttgtttttaagaaacaatatcttggctggtttcaagcccctggcctcaagag

SEQ ID NO: 340 - DNA, 661 bp, Homo sapiens
  misc_feature [331]..[331]: Chromosome 1, SNP identification no. = rs6673532
  misc_feature [331]..[331]: allele = g, in linkage disequilibrium with rs11578232, respectively
  misc_feature [331]..[331]: n is a, t, c or g
ctgaaaattagtgatctataattgtgtaaggcaatatatttcaagcatggttaagaacactttgctctataataactctgtaaaacagggcatttactataaaaatttaatttttgaacatgatatcaaatgctaatgttagtagataagaaatgtggtcttaaattttattaatttgataatatatttaggagtcttcaccattatcattaggtgcatttcttaagtatactacagaatagcttcagactttgtattacttgcttaatccaaggtctcttcttttaagggaagcaaatagtagaaaaacaaaacaaaattgtggccactntattgtttcttatgttgttttgtttgcttgtttttaagaaacaatatcttggctggtttcaagcccctggcctcaagagatcctcccatgtcagcctcctgagtagctggaactataggcacatgccaccatgcccagctctcattttgtttaaaaaaaggtgaattcataggatactaagcctagagaaagcccatacttctttctcctttctggcaagttcacaggaaatgcagaggataaaacttcaggaatataattatgtaaggggtaaaatggtagatgtgaaatgtgaagttattctgctacttaaagttacagttttgatgt

SEQ ID NO: 341 - DNA, 661 bp, Homo sapiens
  misc_feature [331]..[331]: Chromosome 1, SNP identification no. = rs6665507
  misc_feature [331]..[331]: allele = t, in linkage disequilibrium with rs11578232, respectively
  misc_feature [331]..[331]: n is a, t, c or g
aaaaacaaaacaaaattgtggccactgtattgtttcttatgttgttttgtttgcttgtttttaagaaacaatatcttggctggtttcaagcccctggcctcaagagatcctcccatgtcagcctcctgagtagctggaactataggcacatgccaccatgcccagctctcattttgtttaaaaaaaggtgaattcataggatactaagcctagagaaagcccatacttctttctcctttctggcaagttcacaggaaatgcagaggataaaacttcaggaatataattatgtaaggggtaaaatggtagatgtgaaatgtgaagttattcngctacttaaagttacagttttgatgtggacaagagaaaaaaactagaaggtacagagttttgctacagagaagaaagaaacaattagaaaatgagagacttgtaattgcagaataaaaaccttggagtatatctggagagaaaaatatgatccaaataaatgtccaaatcatttaggatggatgatgctcttttttgatgatttataaagaatgtaaaatctctttctttggtccactctactatccagatcagaattttgttgatgttgttcaacaagacactctctctggtatcttaattatctctcacttcattgagtgcttggtgg

SEQ ID NO: 342 - DNA, 661 bp, Homo sapiens
  misc_feature [331]..[331]: Chromosome 1, SNP identification no. = rs10494209
  misc_feature [331]..[331]: allele = a, in linkage disequilibrium with rs11578232, respectively
  misc_feature [331]..[331]: n is a, t, c or g
atgttttggagacctctctgccttactagacttggaagtaacacaatggtggtcctagcataagctacaggttctagggcagatggaggttctttgggttctattcctgccatttttctactcttgtgcaagtctgtatagtaaaacacacaatggacaagagcctgaaggactggaatatgagccccaggtccagaaagctgctctctgtgtatattcttatatgctgattgtggaagtgtttgtttaccccacagtcttgctaatggtggagagcatcatctaagcttgtttttattaacttgcaaggggaaattgatactgtttttgngaggatttcttaaactccttatgagagtgaacagtttctgtgtcttaaactccttgtttcagtgaagtttcttctttttgatttgtcagttcatatgtttaatcaatttttctaccagcgcaacacgatatttttgtgccaaaataagatttttttttggtaaaattttgggttttctgcatgctagatgtgaagtgccactcttaccaaaagctctgtctgttgtcagaaaaattgtccaacaattggaaacaggcctctaattacagggtgtttttcagggcagtgctaggtgtgactttctactgattttctatcttacaactcttt

SEQ ID NO: 343 - DNA, 661 bp, Homo sapiens
  misc_feature [331]..[331]: Chromosome 1, SNP identification no. = rs10923544
  misc_feature [331]..[331]: allele = g, in linkage disequilibrium with rs11578232, respectively
  misc_feature [331]..[331]: n is a, t, c or g
tatgggaaattatagacatcttcaaagtgccctaaattattgtttaaaaaggctttaaaaatgagtaagaatttcactaccttcttgtcttgaattaaaaacttattctatgagtatgtactgagccccagcatgtagtgcaaatgaagttgcagagtagaggtaccgaatattggacagcctgtgttaagtactttggggaagagagaatatcttgggcttcttttaaatcccctacaggacctaataccaagagctcagtaaatacttgttgtttgattgactgtttgaaatatatacagtcagtgctgccaagaaactcacaatctantttattaagtggtgacaagttagtgatgcaacagggaaatttggggattatatcataaaagcatagcatggtaatttgtgaagcatgttattggtggtcatcttgtccatagcctctgcattagagagaatgggtcaattcatctgcctcatttatataataatattcactgccaaagtattaaatctttttttttggtctctttccacttgacattctatagtttcaacacttagttatataacagtgaatcacacctccatatctctagccttaatccgtctcttaaggtatggactacatttccaactacagaacatctggatttca

SEQ ID NO: 344 - DNA, 661 bp, Homo sapiens
  misc_feature [331]..[331]: Chromosome 1, SNP identification no. = rs10802020
  misc_feature [331]..[331]: allele = a, in linkage disequilibrium with rs11578232, respectively
  misc_feature [331]..[331]: n is a, t, c or g
tgaattaaaaacttattctatgagtatgtactgagccccagcatgtagtgcaaatgaagttgcagagtagaggtaccgaatattggacagcctgtgttaagtactttggggaagagagaatatcttgggcttcttttaaatcccctacaggacctaataccaagagctcagtaaatacttgttgtttgattgactgtttgaaatatatacagtcagtgctgccaagaaactcacaatctagtttattaagtggtgacaagttagtgatgcaacagggaaatttggggattatatcataaaagcatagcatggtaatttgtgaagcatgttnttggtggtcatcttgtccatagcctctgcattagagagaatgggtcaattcatctgcctcatttatataataatattcactgccaaagtattaaatctttttttttggtctctttccacttgacattctatagtttcaacacttagttatataacagtgaatcacacctccatatctctagccttaatccgtctcttaaggtatggactacatttccaactacagaacatctggatttcagaaagaaccttgtacaccacaagtccagatctgagctcattgtctgatccttctccatcctcagtctaggttactgaccactaggctgtc

SEQ ID NO: 345 - DNA, 661 bp, Homo sapiens
  misc_feature [331]..[331]: Chromosome 1, SNP identification no. = rs12135637
  misc_feature [331]..[331]: allele = c, in linkage disequilibrium with rs11578232, respectively
  misc_feature [331]..[331]: n is a, t, c or g
tgactgtttgaaatatatacagtcagtgctgccaagaaactcacaatctagtttattaagtggtgacaagttagtgatgcaacagggaaatttggggattatatcataaaagcatagcatggtaatttgtgaagcatgttattggtggtcatcttgtccatagcctctgcattagagagaatgggtcaattcatctgcctcatttatataataatattcactgccaaagtattaaatctttttttttggtctctttccacttgacattctatagtttcaacacttagttatataacagtgaatcacacctccatatctctagccttaatcngtctcttaaggtatggactacatttccaactacagaacatctggatttcagaaagaaccttgtacaccacaagtccagatctgagctcattgtctgatccttctccatcctcagtctaggttactgaccactaggctgtcatttactaatttgtgaccgtggttacattacttaaactctctaggcttagtttttctgacctgtaaaactgtataatattaagtttctacctcatatagatgttgcgaggattaaatgagttactgtatgtaaaacatttagaattgttcctggcacactctaactttcagtgagtatttgcttctatta

SEQ ID NO: 346 - DNA, 661 bp, Homo sapiens
  misc_feature [331]..[331]: Chromosome 1, SNP identification no. = rs6671887
  misc_feature [331]..[331]: allele = a, in linkage disequilibrium with rs11578232, respectively
  misc_feature [331]..[331]: n is a, t, c or g
ctctctttccctttctctctctctctctctctctctctctctctctctctctgtctctcgctatctctgcctttgttcctgtttctctcctgtctttgttcaggctgtggctacctcatgcctggactgtttgtacagcttcctcaccaatattcctggcatcggcttcttcctactgtagttcctgctctatatttcctccagagttaccttattttaaaaatccacacatgtgaccctgacttaaaaaccttgggttcctccctatttgccataggataaagtccaaattcaatatcatgcttactagagcctttattctcagaatctnagttattgtaggtaaaaaatggatgactgtaaatgatttcttatagtttaaatatctcctgttgaatctcccatcatttctatgccacaggcaactagaaatttacactgtattaggcagggttctctagagaaacggaactaataggagatatatacatatatatatgtatatatagtatatatataggagatattatataggagatatatataatatactatatataagcacttaataaactatgatatatatggtatatttatatgatatatatatatgtatatatgggagttaatattaagtattaactcacatgagcacaaggtc

SEQ ID NO: 347 - DNA, 661 bp, Homo sapiens
  misc_feature [331]..[331]: Chromosome 1, SNP identification no. = rs4129591
  misc_feature [331]..[331]: allele = t, in linkage disequilibrium with rs11578232, respectively
  misc_feature [331]..[331]: n is a, t, c or g
gatcccacaaacttctgttcaatgttctcaggaggaatctgcatgaagaaaacagaataaacaggtagaaagtagacagtttgatgcagcaggaaaagtgctagaataaagttagggagcaatgcagaagaaacatacaaagaaaagggcaactaactctagaggcccatggaaaaccttcaaggaaaaacaaacatgagttttctaggcagattaaagagaatgaaaagctttgatgtatgtggtggttaatactgactgtcaatttgattggattgaaggatgcaagatattgatcctgggtgtgtctgtgagcgtgttaccaaagganactaacagttgagtcagtgggctgggaaaggcagacccacccttaatctgagtggacaccatctatttagctgccagagtggctagaatataaagcaggcagaaaaaaaaaaatgcaaaaagactggactggcctagcctcccagcctatatctttctcctgtgctggatgtttcctgccctcaaacatcagactccataatcttcagttttgggattcagactgtgtctccttgctcctctgcttgcagatggcctattgtgggaccttgtgctcatgtgagttaatacttaatattaactcccatatatacatatatatatatcatat

SEQ ID NO: 348 - DNA, 661 bp, Homo sapiens
  misc_feature [331]..[331]: Chromosome 1, SNP identification no. = rs6666507
  misc_feature [331]..[331]: allele = c, in linkage disequilibrium with rs11578232, respectively
  misc_feature [331]..[331]: n is a, t, c or g
ttctaaaagaaccaccctactcctctgcctgatccatggctatagtcttgagttctatggggtaagtactatgatgggggcacatcaagcatgaaagcaagagctgtttgactcagtaagctggagttagggaagggagagagggaagtgcatgtcaaatgagacagcaattaagatctaagataagaaaacacccatcatacaaagagtttggagaatggcacaatctttccactgggacagtagggttgatgagatgattttaccagggatatgaccagtctggatgcttcccctgttcccccttgtcccacctggcattatcacaggnagaaaatagaaatgaacattggaagcagtgaccttattttaaaaaatgcacacttagcttatgaaaatcttgaagaaaacaattagcactagttactcaggtatatattttcctattgcaatatggtgatttgtatacatgcctatatcttcaataattctaagattatttaaaatttaagtgtttctcaggggcaagaactaaatgttattcatttttatacaccgaaagtcttgcacagtgtctgacatgtaacagtagtaaaaaatatgcttgtggaataaattactggacacgtggggaatgtatgaaaataatacacatggattg

SEQ ID NO: 349 - DNA, 661 bp, Homo sapiens
  misc_feature [331]..[331]: Chromosome 1, SNP identification no. = rs6690477
  misc_feature [331]..[331]: allele = g, in linkage disequilibrium with rs11578232, respectively
  misc_feature [331]..[331]: n is a, t, c or g
attttcctattgcaatatggtgatttgtatacatgcctatatcttcaataattctaagattatttaaaatttaagtgtttctcaggggcaagaactaaatgttattcatttttatacaccgaaagtcttgcacagtgtctgacatgtaacagtagtaaaaaatatgcttgtggaataaattactggacacgtggggaatgtatgaaaataatacacatggattgaattttaaaaaataaattattccttgtcctggtttctgatatgattaatgaataaataagatgtttcttggattctttctcgaggactgaccatgacccaagttgtnttcttgcaagacaaatataggtgttaaatgtctgaattgtgtaaatgtaaatatttaactagagttggggttatcaagaactcaatatttcaaagtgcagcgttcaagagaaactggtttgacagccaagaatggatctagaagttcaaagttggaatgcatgagacagagttcaccacatacagaagaacagggttagttcagaagctaagaaggtcagtgatatagtttggctgtgtctccacccaaatctcattttgaattgtagctcccataatccccacgtgctgtaggagggagacggtgggaagtaattaaatcatggggttg

SEQ ID NO: 350 - DNA, 661 bp, Homo sapiens
  misc_feature [331]..[331]: Chromosome 1, SNP identification no. = rs12743674
  misc_feature [331]..[331]: allele = g, in linkage disequilibrium with rs11578232, respectively
  misc_feature [331]..[331]: n is a, t, c or g
actctggttgggccccagcacagtattagttcttcaaaccttgtcaggggattttaatatgtagctagggttgagaagaactatcttaagtcatcatacagaaccccatgatgttgagtgacaactgtaactgaggactcctaacttcatactctagccttgacctcctccctgagctcaaacaaatatatatttgctacttgatatttttacttctaataggtatttcaaacatgatgtcttcaaaatagcattcatgtttttttatctcaaacccgtttctctcccaatgctctcatctcaataaatggcatcaacatttatgcacccngtgtccaaaactagaagtcatacttaataccacttcacccctcacaatccatttctcatccaaaagcaaatctgactgctttactttcctgaatccatctacttgtcaccatttcaaacacttgcccaattccaagtcatcacttcttgcctgtgactgtaactgctcttaaatgatcttgcttttattcttattttcttaaagtcaaatatccacacaagctactaaaatgctagtgctagttatgactcagtggaaccctggggttctatgggacacagtatagaatcctctggctagaaataataggagcaaggtgccagtagaagg

SEQ ID NO: 351 - DNA, 661 bp, Homo sapiens
  misc_feature [331]..[331]: Chromosome 1, SNP identification no. = rs12730090
  misc_feature [331]..[331]: allele = a, in linkage disequilibrium with rs11578232, respectively
  misc_feature [331]..[331]: n is a, t, c or g
acctcctccctgagctcaaacaaatatatatttgctacttgatatttttacttctaataggtatttcaaacatgatgtcttcaaaatagcattcatgtttttttatctcaaacccgtttctctcccaatgctctcatctcaataaatggcatcaacatttatgcacccggtgtccaaaactagaagtcatacttaataccacttcacccctcacaatccatttctcatccaaaagcaaatctgactgctttactttcctgaatccatctacttgtcaccatttcaaacacttgcccaattccaagtcatcacttcttgcctgtgactgtanctgctcttaaatgatcttgcttttattcttattttcttaaagtcaaatatccacacaagctactaaaatgctagtgctagttatgactcagtggaaccctggggttctatgggacacagtatagaatcctctggctagaaataataggagcaaggtgccagtagaaggtcttgtctttgtgcaccaagaaactagggccttccctcttcacttggcaatgccagccattgacctggacttgacaattcttgtaggcttcttcacctcatggtgcctttaaagttagcatcgtgggtggatatctggcctgttcccccaacactccagttc

SEQ ID NO: 352 - DNA, 661 bp, Homo sapiens
  misc_feature [331]..[331]: Chromosome 1, SNP identification no. = rs4659078
  misc_feature [331]..[331]: allele = g, in linkage disequilibrium with rs11578232, respectively
  misc_feature [331]..[331]: n is a, t, c or g
catgtgtgttgggatgaggatagaggcttctaagatagctagcccattgaagtacattgcatttcagaatttatattttttggtggactgctaatagcccatatccagaaggaatgtgataaacacagcaatgacaacaatgaaatcttatacaccaacaatgaaatcaaaacacttgcctggtgtgagtttcccttgactacatatagggaaggataaaaagaaaagcaaaatatttgaaatatctaattttattacaatagccaggactctacatatcaaaaaaatacctgaaaatatcagcttcaagtcatgggaataataaaaagtntatattctctgccttctgggaaatctcagaccttgaaattctgcagggaatctcccctcctccactgtttcacacatttctgaatctagcctaggatttccagattaagtaaggtcccagcagttgtggaagaaatgatccggtgattacttgtcatccataggaccatagagactgagtttaggaaactggacctaatttgttccaatgaaagcaggcattgacttgaacttgaaccagaaatatatgaaaagtccaggaactatgtatatattttctctcttctttcagcattctttttcccccatagccctcccagcttcctttgtt

SEQ ID NO: 353 - DNA, 661 bp, Homo sapiens
  misc_feature [331]..[331]: Chromosome 1, SNP identification no. = rs2474945
  misc_feature [331]..[331]: allele = c, in linkage disequilibrium with rs11578232, respectively
  misc_feature [331]..[331]: n is a, t, c or g
ccattactgataaatccattatatccatatgattttatatcagcatgacttatttctccaattagattagataattacttaaaggcagaaattctaattcctaaaactctcttttatctgctccttccatcacaaggaagcactaaatgctttctgaatgtattcatttaatcattagctctatgtaatggacactattttaggcaacatggatacagtggtgaataaggtggaatagtttttttccttatggagtctatagtctcctggctctgtaacaatttttcccacaataggttgcaatttttaatgaaccaaatgtgtaactagntattcgctgtcctggtcataccccttctacacaaatctgctgcacagacatgccatgtggctatgataaggcagagcccatgtgtatgctgaaatttgagcattcaaaagctctgattaagcagtagaagcttgttagtataattatagagcagagtatagaaagaaataggcatagaaagaattatggatgccatgattaattgagagaccattttgccttggttctgattagagttcccatgaagccctattctactttggtttccattcttaacttcttgagagttctatgttgacatttttccaaaaaaaagtttcctttgtttgg

SEQ ID NO: 354 - DNA, 661 bp, Homo sapiens
  misc_feature [331]..[331]: Chromosome 1, SNP identification no. = rs2474943
  misc_feature [331]..[331]: allele = c, in linkage disequilibrium with rs11578232, respectively
  misc_feature [331]..[331]: n is a, t, c or g
ttatacctcctaactaaaattttataacgtttgactaatatctctctaatccctcatcccactccccacgaccatccacccactagctcctagtaaccagagtttgcttctgtggaaatatacatatatgatagacgtattttccttctggccctctgaatttgacaagcttgagcctgacttattggttaaaacagtctattattttgatgccatcttgccatcacgttgttggttggtttctttgaggaatagtgacattctgatgtctcaacattggtctcttttgctgcagggttagaggcagctataactaaattggcctttgtgngtgggagtccatgctgttgatttcatgcagagtctcatctttgccatcatggcttcttcatctgtttgcccatcataccagctctggggtggctgctgaaaaactgtctaacacagcaagccagattgttttgtctacttagttgtttagagcttcttccatggtggatgctttctagtgcgagttaacataatgatgcaatgatcttcacacttgtgtccactctcatatggccatccatatgcttctactttgattctccttgttttgatcttccagtttttcttctttcaggttattgaccagttcatcaggccattcaccactgct

SEQ ID NO: 355 - DNA, 661 bp, Homo sapiens
  misc_feature [331]..[331]: Chromosome 1, SNP identification no. = rs2474942
  misc_feature [331]..[331]: allele = a, in linkage disequilibrium with rs11578232, respectively
  misc_feature [331]..[331]: n is a, t, c or g
aaaaacggtagttagtacccaataactcccaaaagatagggttccccagtaaccctaacttggaaaacaaaggtgggacctttgttttccaagttagggttactacttggactaagtagtttcctgccacttccccgatttagaccttgggacttatcttgccatgagctagatatccacagtgcactctgagtctgtttacccaggaagattatcaacctgcctgacaaagccagtcatgaggagaagggagaatgtcagagagtgtggtcggccttcagccaaacctctaatgggtttttaaacatagaggtaggaagcagaagaaagnccactgtccttcttaacttttgggttctctggaaagcagacactgagatggagctagaagtaaaaaaagatttatggggaggtgaaacttggaaaagaaaaaaggaggcaggattgggtgggagagccatcacagcacaatgcaaacctaacaaatgcctctgctagatcaaaaaagagacttggagcaaagattgaccattacagtgtgctgctttgggcagaaatggctaagccctgaactgccaacttgcttggtcattggcttggtcaccccacaaataccatgacctcacctcaaaagctgaagaagattctaaaggagatcaga

SEQ ID NO: 356 - DNA, 661 bp, Homo sapiens
  misc_feature [331]..[331]: Chromosome 1, SNP identification no. = rs2493800
  misc_feature [331]..[331]: allele = c, in linkage disequilibrium with rs11578232, respectively
  misc_feature [331]..[331]: n is a, t, c or g
ttttttctgagttgtagaagttctttattctagatataattcatttgttaataatacatgtagcaaatactgtctcccacctttggcttctcttacctctcttctaatggtatcatttggtaagcagatatatttaattttaatgtagtccaagatataaattgttttcttcatgattactcccctttgtgtctagtttaaaaaatctttgctaacctgaaaggccatgaaggtattctgcatgttatatgctgaaatcttgagccctcgtatcttgtacattaagatgtatcaagtcatctacagttaattttggagggtaaggtgtganataggggccaagacacacttttttcacatgcataaccaattacataagcaccctttatttaaataaagactgtcatttcctcactgctctgaaactgcatctttgtcataaataaaattttcatatatgtgtgattgttttctggaatctctgtcttatttatttattttataccagttgtatcaaatattacagctttgtaataaatatagttggatatctagtggtgttagacttccaattttgtttattttcttcaagattttctttggttatttttagcttatgtttctatatgaattttagaattatattgccaatttacattaa

SEQ ID NO: 357 - DNA, 661 bp, Homo sapiens
  misc_feature [331]..[331]: Chromosome 1, SNP identification no. = rs2474937
  misc_feature [331]..[331]: allele = g, in linkage disequilibrium with rs11578232, respectively
  misc_feature [331]..[331]: n is a, t, c or g
tccaatgagcataagttgtgaattttgaaaaggtccactttatgaattttgtttcttttatggttagtgctttctgagatgaatctaagaaggtattgtcaagggctttgaagatattctccttttcttctaagctttatagttgtagtttttatctttagagctatggtatatcttgaattaattttatatgtggcatgaaataggagttgtttctttctatgtggctttccagttgtttcagtgccttttgttgaattggctttcctttcctcattgaattgctttgtgcctatgacaaaatcattgtaggtctctctcgacttaccantctgtttcactgacctatttgtttatctgtgcattaataattgttgtggttttataaaaagacttaaagacagatagtacaggttcttcagctttttcttgtttcataggttgttttggctagtgtaggttctttgtgttccatatagattttgagattaacttggatatttctacaaaaggaacagctgagattttttattgaaatcaggctgaatctacagataatttcaggtgaatagaaatctcagcaatattcaatcttgcaatatgtaaacatacattctttataaatatacatcctatttaatttctctcatctccctatatt

SEQ ID NO: 358 - DNA, 661 bp, Homo sapiens
  misc_feature [331]..[331]: Chromosome 1, SNP identification no. = rs2493807
  misc_feature [331]..[331]: allele = c, in linkage disequilibrium with rs11578232, respectively
  misc_feature [331]..[331]: n is a, t, c or g
aagtaatattaactatgattttaaaattgagttttaaaatgaaggaccctcaccttgttatcaacccaccctagactaacagtttaaatactgttggacttggatgctaatccaagtagatttttaggtgtcttaaatcacacataaaatatttttagaaactgaccaaatgctagcccattaaagcaagtctcaataatttctaagaatgagtatcacataggttttatactctaaccaccactcaaataaggcaaaaatcaatgacaattaaaaaaacttataaataacatgtaagttggcaaatagttcatgacagatcctagacaanaaatagaattaaagagaaataacaataattcatatgaaaatttttacattacagctaaagcagtacttagaggcaaattaatagctttaattttagtggttatttcagaaaacttaaaaagactgaaaagtaatgtgctaacatacagcttaagaaattaggaagaaataacagaataaaaccaaagatagtagaagagaaaaggtaataaagaaggtaaatcgatggaatagaaaataaagaaattataaataaagtaaataaaaccaaaattgattctttaaaaagattaacaaaataccaatgtctagtgagatcgatcaagaaaaa

SEQ ID NO: 359 - DNA, 661 bp, Homo sapiens
  misc_feature [331]..[331]: Chromosome 1, SNP identification no. = rs2493810
  misc_feature [331]..[331]: allele = c, in linkage disequilibrium with rs11578232, respectively
  misc_feature [331]..[331]: n is a, t, c or g
ggttaaatagcaattttattgcattgtatttaatattggagatacttcattctttcaaacttacatgtctctattgaaacctagccattgtccttcaaaactcttaattttctacctcttatacaaaatactctctgatttttaaaaagtaattcaccagtcactgatgaatgttttacacacattattttgttcaagcccaacaacagcctaaaaaggaagtagtatctcaaccctcatgttgtagctgaaggcagcttagagagaagaaataatgtggccagtattacacagcttagaaactaagagatctgggatttgaaccaaatantctgtgtatactcttggacattatgctactgcctcttggcataattctctagccagaagtaatttctcttttctttaaattcccttagcacattaaatacttttggccattaatcatactctgtttcattattgaagtatgttttcattccactgcaggccatatcttatttatgactttccaagataaattgtaaaacagacttggattcaaatcccaatctcacttactggttgacactgtacaaaatcacgtaatttctctctctctgttttaactcgtagagtgaaaactataacattacatataggtattgtgaaaattaagtaa

SEQ ID NO: 360 - DNA, 661 bp, Homo sapiens
  misc_feature [331]..[331]: Chromosome 1, SNP identification no. = rs2493816
  misc_feature [331]..[331]: allele = t, in linkage disequilibrium with rs11578232, respectively
  misc_feature [331]..[331]: n is a, t, c or g
attgatatcctgtaccccagtcacccaggctggtgtcacttgaataaatgtgggttatagtggcaactatgtcctattacttgtcagtctctcaaaccaactacacagcttatcagcactgaatgaaagagaaagaagaactaagaaagaagtggaaaagacagaatctaaatcttgaaaggactgtcagggctatatatctcccgtttttcaatgaactttgcttcctgactttcagaatcgctttctctatcttgtttcttaactttgtacatgaaatcatgtttttgatgaactaattatactattgttcaatactgaggttaccaantacttggcatgctaatatggtttggctctctttcttcacccaaatgtcatgttgaattatggtcccagtgttggaggtgaggtctgatgggaggtgattggagcatgaaggtgactggagcatgaaaatggtttagcaccactgacctagtgctatctcatgatagagttctcacaagacctggttgttttaaagtgtgcagcacttcccactttgctctctttcttttgccagccatgtgaagatagtcctgcttccccttcaccttctgccatgattataagttttctgaggcctcctcacccatgcctcctgtacagcctgtagaac

SEQ ID NO: 361 - DNA, 661 bp, Homo sapiens
  misc_feature [331]..[331]: Chromosome 1, SNP identification no. = rs12066516
  misc_feature [331]..[331]: allele = c, in linkage disequilibrium with rs11578232, respectively
  misc_feature [331]..[331]: n is a, t, c or g
ttacttttcccttgaggatgggcatgtgggggaaaagggataatatatttactgagcagcctaagaaagctccttgggagataagtggcaggttatattggggctaagtcctaagataatttattatattctcaaaccctgaacaaaatccattttaatgaatgtgtaatagaattttctaggctatatccagccataatgctccaatagagacataatcacattaagggaaatgtatttctatttagtttttcttcacagaattactgcaatccaagcttcatccttcttaatcaagaaggtccacatcttaaggcatgaaccttcttantgcatttagtattaaatctggattcatataccaggttatagtcctaattttacttatccataaacatcaaattgttaattaattcccagaactgaaggttaaattgagctgttttccttatgactaattttcagtaaagccagaattttgaaagtaaccccttttttttttcaagtttcttatatgggttttctgttcttaaatgtttctttataacgagaaaagagattcattgttggaatgatggattttgctttttgttaaaaaagacagagtgctcagggtggggtctggccatttcctgccccaaaacacaactgtaaaagatca

SEQ ID NO: 362 - DNA, 661 bp, Homo sapiens
  misc_feature [331]..[331]: Chromosome 1, SNP identification no. = rs17038260
  misc_feature [331]..[331]: allele = a, in linkage disequilibrium with rs11578232, respectively
  misc_feature [331]..[331]: n is a, t, c or g
agtacctgcgattacaggcgcctgccaccatatccagctaatctttttgtatttttagtagagatgggttttcacccatgttggccagactggtcttgaactcctgacctcaggtgatctacccacctcagcctccaaaagtgctgggattacaggcgtgagccaccgtgcccggccccattgtattgttttgatatatttaaatttacttagattacactttaaattgtaattttttgaacaattgacctcctcactggaatataagcagtttgaggaaaggattctgtcttatttgttattgtacttccaaggaacagtgctaaggacnagagatatcaggtaagacaaaaatgaattagttcatgatagcacagtctaatggaagaggctaatctgtaaataaatacttgcaatgcaatttgctaataattctattaaaagtggatacagggcaatatggagacaaaggagagggaaaaactgattctgcctggagatttagtaaaatattaaaaaataacacacacacccacacccctcagctaagcaaactgcatgaacttctagtcctagaacccaccaatatatatatatatacatatacatatatatacacgtatacatacatatacacgtatacatatatatacatacacat

SEQ ID NO: 363 - DNA, 661 bp, Homo sapiens
  misc_feature [331]..[331]: Chromosome 1, SNP identification no. = rs10923569
  misc_feature [331]..[331]: allele = t, in linkage disequilibrium with rs11578232, respectively
  misc_feature [331]..[331]: n is a, t, c or g
gataacactgttattgtaaagataaagaaacagaacttgagtttttcaattttgtcatttggtatgaccacatggagttactgtgtttaaattttaaacaacaaaacagagtgaacctgtgaggtgtaatatttgtttggggaaagtaaatagttcatatgcgaaacttttatatgatttcgaaaaataattttttaaggaactaaatcatgtcctttgcaccaacacagttgcagctggagccatcctcctaagtgagttatcacagaaacaggaaaccaaatactgcatgttctcacttgtaagtgggagctaaacactgggtacacanggatacaaatatggaaacaataaatcctggggactccaaaaacaaagagggagagaggacagaagggttgaaaaattacctatccggtattctgttcactgcttaggtgatgggatcattagaagcccaaatctcagcatcacacaatatacccatgtaacaaacttgcacaaaactaaactaaaactaaaataaaataaataaaatattttaaaattgacatgtatccccctttacattgttatctatttatctttaggttaaagaagaaatgcagatgtataaaattacttcagtcatacaatttagtcatagtataaattgttccct

SEQ ID NO: 364 - DNA, 661 bp, Homo sapiens
  misc_feature [331]..[331]: Chromosome 1, SNP identification no. = rs4636400
  misc_feature [331]..[331]: allele = g, in linkage disequilibrium with rs12125340, respectively
  misc_feature [331]..[331]: n is a, t, c or g
aataaataataagcaaactaaaatcaatgtgaatttaacagaaagtgagatttaaaagatccttttccatttcaatcctcatttttcgtttatctttcattttccatagcactctcctccctctctttgtctctctttcattaccaaagtgtcagtctctatttctccctattgccagggtgactttcacctgaactctccgcccctttctcacctgtgcaagaatttagtggctcctctccttcaaatctgtgaccaggaaattaggtcaaagttgatggaaaagttttttctgtagcttgttttccagggcctagaggggtgaagcaangataagagcaggccagagagcaggacaaaggaatggagagaccatggagtacatgagcctggttgtgtgcacagttgggctaccagtacccaatatgagaagagggatggcttcgaaaggatagataactttatacccaaggcctcttagagatctgatcctagggccaggcgcggtggcttacgcctgtaattgcagctactcgggaggctgaggaaggagaatcacttgaacccaggaggtggaggttgcagtgagcccagactgcaccactgcactccagcctgggcgacagagcaagactgtctccaaaaaaaaaaaaagagctct

SEQ ID NO: 365 - DNA, 661 bp, Homo sapiens
  misc_feature [331]..[331]: Chromosome 1, SNP identification no. = rs6688400
  misc_feature [331]..[331]: allele = t, in linkage disequilibrium with rs12125340, respectively
  misc_feature [331]..[331]: n is a, t, c or g
tctaacgggaaaaacagacaataaacaagttagaaagtaaacaaggtaattaaagattctgactggcctaagcaacatggcaagactccgtctctacaaaagattttttaaaaattagccgtgtgcagtggcgtgtgcctgtagtcccagatattcgggaggctgaggcaagagaatcacttgggcctgggaggttggctgctgtgagccataattgcaccactgcactcagcctggttgacagagtgagaccttgtcttaaaaaaaaaaaaagaatgaaagaagattctgatttaagttctgtgaaggaaatacacagttaaagacaggngggtagagaagacccctttgggtgacagtactattgagatcttaaaaatgaggtcgaactcggccgggcgcggtggctcacgcctgtaatcccagcactttgggaggccgaggtgggtggatcacaaggtacggagttcaagactagcctggccaatatgctgaaaccccgtctctactaaaaaaattttaaaaagctgggcgtggtggcacgtgcctgtagtcccagctactccggaggctgaggcagaggaatcgcttgaacccagtaagtggaggttacagtgggccgagatcgtgccactgcactccagcctgggtgacagagcga

SEQ ID NO: 366 - DNA, 661 bp, Homo sapiens
  RBM8A
  misc_feature [331]..[331]: Chromosome 1, SNP identification no. = rs872786
  misc_feature [331]..[331]: allele = t, in linkage disequilibrium with rs12125340, respectively
  misc_feature [331]..[331]: n is a, t, c or g
tatctttccgcactaggcccgccccaatttgcgtgtttttaccgtgcagagggagggatttagagttagcctttgattggtcagcttgactggcgacctttcccctctgcgacagtttcccgaggtacctagtgtctgagcggcacagacgagatctcgatcgaaggcgagatggcggacgtgctagatcttcacgaggctgggggcgaagatttcgccatggatgaggatggggacggtgaggacagtggagacggctggtgggaagcggggaaggtgcgagagaaggctataataggaaaatttactcttttttcctcggtcgtaaggntgggaatcgaggaaccgggtcttgggtggattagagattccgcccccttcaggagaagggagggcgtgaccgggaaggcactaagactggaggcggtgtgggtcggcttgctggtagtgtattgggaaagagacgattgttacaaatgactgtcatagttacttattcttttatcttctggggttccagagagcattcacaaactgaaagaaaaagcgaagaaacggaagggtcgcggctttggctccggtgagtgtggggaaaatggggtagagtggcctagtagggcaggagctacgggttttggagtccccacccacctcataggaa

SEQ ID NO: 367 - DNA, 661 bp, Homo sapiens
  ITGA10
  misc_feature [331]..[331]: Chromosome 1, SNP identification no. = rs2274617
  misc_feature [331]..[331]: allele = t, in linkage disequilibrium with rs12125340, respectively
  misc_feature [331]..[331]: n is a, t, c or g
tcattttcccggctttggctttcttgctgattcagctaaaattcctcctctgacccagctttctcctcattctcaggccctgatgctaagcagttactgccctctccttaccagcacatggaagtgtagctgctcacaagtgacattccccacactgagccggagcctccgaggggacaacctctggccagagccatcaaatgctgcacgtgccccagcagtccattcatccagtgatgcggtgaacctcatgtctgaatgaaggaggcaagagtgagggtggaaaggggtctagtgaggaaggcatgcaaggaattgagagttgcctgtnatgcattttagtcactcacagaattggtgatcccagcgaccaggagtacgggaggtcacttggaagcaaagggctgcagtcagacagactgcctcttggcctcgccgcctacagtccctctgaaccacactgatggcctgtggggtcacctccagtgatggggtcagatggacaatgggccgggagctgggaacagtgtggaaaagaaattctagcagtaggaggtaagccctctgagaagtgcaagcccagtgtttgcttccccatggtcaaaacaaagaaggaggggctgaatgcacatgtcaccctaccccgaaccctctgacagaa

SEQ ID NO: 368 - DNA, 661 bp, Homo sapiens
  FLJ25124
  misc_feature [331]..[331]: Chromosome 1, SNP identification no. = rs12410298
  misc_feature [331]..[331]: allele = g, in linkage disequilibrium with rs12125340, respectively
  misc_feature [331]..[331]: n is a, t, c or g
aggccaaggcaggtggatcacttgaggtcaggaatttgagaccagtccggccaacatggcaaaaccctgtctctactaaaaatacaaaacttagcgggcgtgatggcacatacctgtaatcccagccacttgggaggctgaggcaggagaattgcttggaccgggaaggcagaggctgcggtgagtgagccgagattgtgccactgcacttcagtctgggtgagactctgtctcaaaaaataaaaataataataataaaaaaagaaacagtttgagtggctcttttgtgtgaaagtaatgagagatgggactgggaaagagggcggcagcntatgactcctgaagagccttgtaaaccacttaagaactttgggctttaccctgtaggttttcatatgcattttagtgagctctctccggcggggagaggagaaaagaaagacaggaagaccagttggctgcgactgactgttcaagaattaccaagagcctgaacttcaagggcagtggaaataatgaagacagttttttgtttggttattttttgtttctatgcgggggcgggggcggggggggcagcttaaaataaaattgctctcctcgctctctgctgttttctaattcagatgtgcgtttaaaaattgagcctgggccaggaata

SEQ ID NO: 369 - DNA, 661 bp, Homo sapiens
  FLJ25124
  misc_feature [331]..[331]: Chromosome 1, SNP identification no. = rs720899
  misc_feature [331]..[331]: allele = g, in linkage disequilibrium with rs12125340, respectively
  misc_feature [331]..[331]: n is a, t, c or g
actgccctatttgcaagctttctatgactccaatctgtctgaagaaacagttttctttccagctagataattctaaacccatccaacttacttcccataatctcattatagtaagatcttgttatactaaaagtttagaatgggtggtcattctttatggtcaaacctctgtacagctagaatcaaggaggacagagggatggttccaaattccaaaagccagcccactcattccagcaccttggaaaggaggtactgcccaaggattgggggatcagaaagaatgaaatagtttccccattcctaagaagcaggcagactccacaaaccngtaagggaaaggcaacattgaatactttcagtaactaaggaagagtccatatgaatttctaaaaagtcattatgagttaagactgagtctgggcagcctcagtttctggtgcatataatagtaaataccttttgattggttgatcaatgtgtggaaactaagtagagatgcaaatgtaagtgggacaaggacaggcctcaacagagttcatactcttgcctcatagcttgcttccaggattctgtaacctgcccatgcagaatgagctaattgaacatttctgatattttcttatgaacgatactactaagtcaagttagcaaagcaata

SEQ ID NO: 370 - DNA, 661 bp, Homo sapiens
  FLJ25124
  misc_feature [331]..[331]: Chromosome 1, SNP identification no. = rs10494240
  misc_feature [331]..[331]: allele = g, in linkage disequilibrium with rs12125340, respectively
  misc_feature [331]..[331]: n is a, t, c or g
cctgccaccacacccggctaatttttgtatttttagtagagatagggtatcgccatgttggccaggctggtcccaaactcctgacctcaggtgatccacccgcttcagcctcccaaagtgctgggattacaggcgtgagccactgcgcccagatgatccagtgccaattatttaaagctctcttctggtctacttctggtctacctaggcagagtaagctcataggtaagataccctcaaggatatcctctacttgactaaaataaaatgggattataggagttggggtttttttgtgtgtggattttcctatatactggtaacttagatnagctttaaaatgatcactgctttttcagtccttactcagactgacagtgcagggctctggccctggacccaaatgtgtgagtggagatgggtagaggcagtcttccagtgtgactgggaagccaggcttttggagtggccataaagactgccacactacttctctgacaaatggttccagagtagtttgccacccaaaacagtggaggaatttatcatgagaagtgtggggaaatttcatgaggaaccaatctgcagctgaaactgccctatttgcaagctttctatgactccaatctgtctgaagaaacagttttctttccagctagat

SEQ ID NO: 371 - DNA, 661 bp, Homo sapiens
  FLJ25124
  misc_feature [331]..[331]: Chromosome 1, SNP identification no. = rs12125340
  misc_feature [331]..[331]: allele = c, t
  misc_feature [331]..[331]: n is a, t, c or g
gaatggttatctaatcttggtatacttctgtttcttctgtcaaagagatggaataatagccctagctactttccagggatgttgagagactaattgaaatagcatgtgaaaggactgtgagaagttacaacttctgtacaggagtattacctcagaatccatctaccttagataattttatggtttggatatttagagctttcctgtggttgattaataatttgccctggctacgtaaacagtgtttgaaaatgagttactgggcttccacagaccctatttttcttcacccctttctatagcctcttgttgagattataccttataaaangctatgtgccaccaccaacaccccactacttcctgttttgttacaaggatgccatatatttgtatggctctttacagtttataaagagattttgtatatattagcttgtttaatagtcacagcatgatgaggtagttgttattagccgtattttatagaagaggaaacaggttaaaggtgtttaatggcttactttaggtcacatagccgagaatgtagctgaactaggtcccaaactcaggccagccagcgaaatatttgtctggcagcctttacatcagaccacagatctttgcatctgtctcttccttttcattcccttctctggac

SEQ ID NO: 372 - DNA, 661 bp, Homo sapiens
  misc_feature [331]..[331]: Chromosome 1, SNP identification no. = rs7512219
  misc_feature [331]..[331]: allele = c, in linkage disequilibrium with rs2758688, respectively
  misc_feature [331]..[331]: n is a, t, c or g
cctcggcctcccaaagcgctgggattacaggcatgagccaccgctcctggccgcaaagttgttttcagtcatagtattgtcattaccattttctcattattgtagccatgccttcttttgtctctgctactctgagactccatcattatcagggagcctacttgtgaggcaatgtcttcacctttgtccttgacctatttctgttatactttccaaaggtgctgatacttttatcactaatgtatttttcaacgttctgtggaaatacccttttaagagatatagggtacatgtgaatggaacatgtgtgatatatcgatatatccactgncacaatcccatctctataaatctttgaattcttcccctacgttataccaaggacttgttattatctcaactttatttttccaaggccattgttgcctacagattttgatctaccaagagagaaactaattagaatcactcccagctgcttgatctagtccactgagtcgagagtctcttccaagtgtatctgtaccaattcatttagcctcaaacagaattatattcctctatccttggtctactattcttagcaaaatatacagatttctgctgttaaaattaataattaaagaaattctattaaatctaattcttcctttttggggat

SEQ ID NO: 373 - DNA, 661 bp, Homo sapiens
  misc_feature [331]..[331]: Chromosome 1, SNP identification no. = rs849820
  misc_feature [331]..[331]: allele = g, in linkage disequilibrium with rs2758688, respectively
  misc_feature [331]..[331]: n is a, t, c or g
tggttgaaacagagaggtaaaagagcagcagaatatgagctattcattgtttattcaacttaccattgctttcagaccattctggagtgagacctcctgcaaatcacttccacttaatgatggaataatcctcaatatattatgaatttttgctttgtggatcagacagcttccagttcatggggaacagctcaggtctctggtgggccatgttcaagtgttcagtgaaaaagaaaagttacttgaagagaacatagttttgctccaaaattttatggttctcaactgtgattctcctgtagagccttgctgtagcctttacacaacattntgaccagccatgacagttttgggctctttggatatgctggatcctaaaagctaaggtcagtgctgcttgcactgtagcttagacaagctaaagaccccttgcttgctcaggggtccactcaaggatgataggtttgtgagttatccagttattgagtcagaacaagcaaccaaatgtgacatctgttgcttccaagatccagaggcctgtcaaatgttgggcttcttccttaaaagaatagaagcaacaatttaatatactatcccaacatgttgcagacacccgattgcacaataaatccccaaaaaggaagaattagatttaatagaa

SEQ ID NO: 374 - DNA, 661 bp, Homo sapiens
  misc_feature [331]..[331]: Chromosome 1, SNP identification no. = rs849819
  misc_feature [331]..[331]: allele = a, in linkage disequilibrium with rs2758688, respectively
  misc_feature [331]..[331]: n is a, t, c or g
ctgcaattgtcaccctcagctgatgtgagggcatatttaaaccaggatagactgttttttcctcctctgtcagttggtcatagggaactcaccaccaggtcatagttgctggttgaaacagagaggtaaaagagcagcagaatatgagctattcattgtttattcaacttaccattgctttcagaccattctggagtgagacctcctgcaaatcacttccacttaatgatggaataatcctcaatatattatgaatttttgctttgtggatcagacagcttccagttcatggggaacagctcaggtctctggtgggccatgttcaagtgtncagtgaaaaagaaaagttacttgaagagaacatagttttgctccaaaattttatggttctcaactgtgattctcctgtagagccttgctgtagcctttacacaacattctgaccagccatgacagttttgggctctttggatatgctggatcctaaaagctaaggtcagtgctgcttgcactgtagcttagacaagctaaagaccccttgcttgctcaggggtccactcaaggatgataggtttgtgagttatccagttattgagtcagaacaagcaaccaaatgtgacatctgttgcttccaagatccagaggcctgtcaaatgttggg

SEQ ID NO: 375 - DNA, 661 bp, Homo sapiens
  misc_feature [331]..[331]: Chromosome 1, SNP identification no. = rs849817
  misc_feature [331]..[331]: allele = g, in linkage disequilibrium with rs2758688, respectively
  misc_feature [331]..[331]: n is a, t, c or g
ttaatgagccctttgagcaattgctggagtaactggagaaagaggctgcctgacattcagccagagcagatgatcacagcctcctgattcctgagatcttcctcagtaaggccttgggtgagtattctcataagacacaaatattctcatactctggatccattcaaagaggtccaacaatatgattcttgcctaatcttgcagttttattctttccaaattcctgaccatacagctccaaacactagccactgctcatgaatcagagtaaagcctcacctctggacatctcatcttccagtcaaagtggaccactgggaatacccatctntgtcacaatcctccagggattcctgaatgtggttgaggtgctgcaattgtcaccctcagctgatgtgagggcatatttaaaccaggatagactgttttttcctcctctgtcagttggtcatagggaactcaccaccaggtcatagttgctggttgaaacagagaggtaaaagagcagcagaatatgagctattcattgtttattcaacttaccattgctttcagaccattctggagtgagacctcctgcaaatcacttccacttaatgatggaataatcctcaatatattatgaatttttgctttgtggatcagacagcttccagttcat

SEQ ID NO: 376 - DNA, 661 bp, Homo sapiens
  misc_feature [331]..[331]: Chromosome 1, SNP identification no. = rs849816
  misc_feature [331]..[331]: allele = a, in linkage disequilibrium with rs2758688, respectively
  misc_feature [331]..[331]: n is a, t, c or g
actctgcaccttccaccaaggccgcttcattaatgagccctttgagcaattgctggagtaactggagaaagaggctgcctgacattcagccagagcagatgatcacagcctcctgattcctgagatcttcctcagtaaggccttgggtgagtattctcataagacacaaatattctcatactctggatccattcaaagaggtccaacaatatgattcttgcctaatcttgcagttttattctttccaaattcctgaccatacagctccaaacactagccactgctcatgaatcagagtaaagcctcacctctggacatctcatcttccagncaaagtggaccactgggaatacccatctctgtcacaatcctccagggattcctgaatgtggttgaggtgctgcaattgtcaccctcagctgatgtgagggcatatttaaaccaggatagactgttttttcctcctctgtcagttggtcatagggaactcaccaccaggtcatagttgctggttgaaacagagaggtaaaagagcagcagaatatgagctattcattgtttattcaacttaccattgctttcagaccattctggagtgagacctcctgcaaatcacttccacttaatgatggaataatcctcaatatattatgaatttttg

SEQ ID NO: 377 - DNA, 661 bp, Homo sapiens
  misc_feature [331]..[331]: Chromosome 1, SNP identification no. = rs849815
  misc_feature [331]..[331]: allele = a, in linkage disequilibrium with rs2758688, respectively
  misc_feature [331]..[331]: n is a, t, c or g
ttggcctctgtgtatgtcaattgggcacttagcagtggtcagactggcctgggtgagtacatccttatgttactgaatccttccataaactctgcaccttccaccaaggccgcttcattaatgagccctttgagcaattgctggagtaactggagaaagaggctgcctgacattcagccagagcagatgatcacagcctcctgattcctgagatcttcctcagtaaggccttgggtgagtattctcataagacacaaatattctcatactctggatccattcaaagaggtccaacaatatgattcttgcctaatcttgcagttttattctntccaaattcctgaccatacagctccaaacactagccactgctcatgaatcagagtaaagcctcacctctggacatctcatcttccagtcaaagtggaccactgggaatacccatctctgtcacaatcctccagggattcctgaatgtggttgaggtgctgcaattgtcaccctcagctgatgtgagggcatatttaaaccaggatagactgttttttcctcctctgtcagttggtcatagggaactcaccaccaggtcatagttgctggttgaaacagagaggtaaaagagcagcagaatatgagctattcattgtttattcaacttacc

SEQ ID NO: 378 - DNA, 661 bp, Homo sapiens
  misc_feature [331]..[331]: Chromosome 1, SNP identification no. = rs849814
  misc_feature [331]..[331]: allele = g, in linkage disequilibrium with rs2758688, respectively
  misc_feature [331]..[331]: n is a, t, c or g
acaaccacagagtacacaggcccctgaggagctgactccatcagaggctcaggtttggcctctgtgtatgtcaattgggcacttagcagtggtcagactggcctgggtgagtacatccttatgttactgaatccttccataaactctgcaccttccaccaaggccgcttcattaatgagccctttgagcaattgctggagtaactggagaaagaggctgcctgacattcagccagagcagatgatcacagcctcctgattcctgagatcttcctcagtaaggccttgggtgagtattctcataagacacaaatattctcatactctggatncattcaaagaggtccaacaatatgattcttgcctaatcttgcagttttattctttccaaattcctgaccatacagctccaaacactagccactgctcatgaatcagagtaaagcctcacctctggacatctcatcttccagtcaaagtggaccactgggaatacccatctctgtcacaatcctccagggattcctgaatgtggttgaggtgctgcaattgtcaccctcagctgatgtgagggcatatttaaaccaggatagactgttttttcctcctctgtcagttggtcatagggaactcaccaccaggtcatagttgctggttgaaac

SEQ ID NO: 379 - DNA, 661 bp, Homo sapiens
  IRTA1
  misc_feature [331]..[331]: Chromosome 1, SNP identification no. = rs2758680
  misc_feature [331]..[331]: allele = c, in linkage disequilibrium with rs2758688, respectively
  misc_feature [331]..[331]: n is a, t, c or g
accagcaaaacataaactgagaaaaagttctatagggcaaatcacctggcttctataacaaataaatgggaaaaaaatgaaataaaaagaagagagggaggaagaaagggagagagaagaaaagaaaaatgaagaaaagtaattagaatattttcaacataaagaaaagacgaatatttaaggtgacagatatcccaactacgctgatttgatctttacaaattatatgagtgtatgaatttgtcacatgtatcacccccaaaaaaagagaaaaagaaaaatagaagacatataaattaaatgagacgagacatgtcgaccaaaaggaatntgtgggtcttgtttggatcctgactcaaattaagaaaaaataaaactacctacgaaatactaagaaaaatttgtatactaatattaagaaattgttgtgtgttttggatataagtgatagtttattgtagtgatgtttttataaaagcaaaaggatattcactttcagcgcttatactgaagtattagattaaagcttattaacgtaaattcggcgtacatgaaattagtagatgaaatgatgtgatttggtttgaaataacccgatgaggtgagggtgggtaggaagtgggtaggtatagatgtagcaggatcagtcatatgtgcacca

SEQ ID NO: 380 - DNA, 661 bp, Homo sapiens
  IRTA1
  misc_feature [331]..[331]: Chromosome 1, SNP identification no. = rs861998
  misc_feature [331]..[331]: allele = g, in linkage disequilibrium with rs2758688, respectively
  misc_feature [331]..[331]: n is a, t, c or g
caataccacctacaaattatccatgccccaagtgttaaaactgaatccattcaagtctttctaactgaatacttgttttatagaaaatgcatggagaaaaggaatttgtttaaataacattatgggattgcaaccagcaaaacataaactgagaaaaagttctatagggcaaatcacctggcttctataacaaataaatgggaaaaaaatgaaataaaaagaagagagggaggaagaaagggagagagaagaaaagaaaaatgaagaaaagtaattagaatattttcaacataaagaaaagacgaatatttaaggtgacagatatcccaantacgctgatttgatctttacaaattatatgagtgtatgaatttgtcacatgtatcacccccaaaaaaagagaaaaagaaaaatagaagacatataaattaaatgagacgagacatgtcgaccaaaaggaatgtgtgggtcttgtttggatcctgactcaaattaagaaaaaataaaactacctacgaaatactaagaaaaatttgtatactaatattaagaaattgttgtgtgttttggatataagtgatagtttattgtagtgatgtttttataaaagcaaaaggatattcactttcagcgcttatactgaagtattagattaaagctt

SEQ ID NO: 381 - DNA, 661 bp, Homo sapiens
  IRTA1
  misc_feature [331]..[331]: Chromosome 1, SNP identification no. = rs849828
  misc_feature [331]..[331]: allele = a, in linkage disequilibrium with rs2758688, respectively
  misc_feature [331]..[331]: n is a, t, c or g
ggtaaagacacaacacccagataactcagctggaaagatcagctctaaggatgaagaaagttaagagaatgaaaagttacgagaacgtcctactcatgtgatttctcccttgtccaaagtcccaggcccagtgcagtccttgcggcccctggaatgatcaactcattccagctttctaattcttctcatgcatatgcattcactcccaggaatactcattcgtctactctgatgttgggatggaatggcctctgaaagacttcactaaaatgaccaggatccacagttaagagaagaccctgtagtatttgctgtgggcctgacctaatgnattccctagggtctgctttagagaagggggataaagagagagaaggactgttatgaaaaacagaagcacaaattttggtgaattgggatttgcagagatgaaaaagactgggtgacctggatctctgcttaatacatctacaaccattgtctcactggagactcacttgcatcagtttgtttaactgtgagtggctgcacaggcactgtgcaaacaatgaaaagccccttcacttctgcctgcacagcttacactgtcaggattcagttgcagattaaagaacccatctggaatggtttacagagagaggaatttaaaagaggacatcag

SEQ ID NO: 382 - DNA, 661 bp, Homo sapiens
  IRTA1
  misc_feature [331]..[331]: Chromosome 1, SNP identification no. = rs849826
  misc_feature [331]..[331]: allele = t, in linkage disequilibrium with rs2758688, respectively
  misc_feature [331]..[331]: n is a, t, c or g
cacaaagccagtaaaggacaaagctaagaccaagtcttctgtcttgctatattttctgcatgcacagcctattactatatttgaccaacatatatcacctgatcacttgttttgtctttcactttgttccctgagccacctccattaatcaggatcccctttgaatggcagcattagaatggccactacctttcttgggttgattgagtacatcttatcttataaagctgtcttgataattttgcttttcttcatactctttccttgacatatttatcaaaacaccatttaagccaagcattctgttgatggactagttacatttcagacncttgaattattaatgatttgtagaatggtttcttcacctgttccttaaggtttacatgaagcccctgaaatcatatgcaaagttttgtacatatgaccattattctggggagagtacatagcttccatcatattattaaaaatatctgtaacccctaaaggtttggggtaagaatatggtaacaatacagtaagaaacagagagaaacctcaagtgccccagagtgtatctgtttttcaggctctctctctccataaaattgctctgctgctctgataattctaccttttactctgagactcttaatttctaatatgcatggttcaccaa

SEQ ID NO: 383 - DNA, 661 bp, Homo sapiens
  IRTA1
  misc_feature [331]..[331]: Chromosome 1, SNP identification no. = rs1885561
  misc_feature [331]..[331]: allele = t, in linkage disequilibrium with rs2758688, respectively
  misc_feature [331]..[331]: n is a, t, c or g
tctgtgtagagacaaggtctcactatgttgcccaggctggaaagccagtattttttaaccaaacaagagtaatcattctgactatgagacgatgattgttacgatgatgtcagagactccctaaccttgtttccaggcagcctgtccataccacagctccagggtttttttaaaaagaacagtctcactctatatagacctattgaaactctgattaaaccattcaggctttccagttccctactggctgctgactttctccaaatcctctttctcctctgccgctctccctgggtatctcactctcccgcatgttacagtgttccagggnttattatgtgtttctgtgtctcacaggctccctcccgctccaggcccaggagagtcctcccattccatctgccctgcccaggtggagcttcagtcgttgtatgttgatggtgaggattcccttctaggaagctgttcctggcctcagccatggaaagataatgcgctttcagccctgggaaatgcccctggactccctaaagtgtcccaaatccagatattcccagataattgttccattatgtgtccaagaagagtggagatgatgcttaggaagaggcatctgtagcactttaatactaacaggaacagccttgaaaatgtcttttct

SEQ ID NO: 384 - DNA, 661 bp, Homo sapiens
  IRTA1
  misc_feature [331]..[331]: Chromosome 1, SNP identification no. = rs2779158
  misc_feature [331]..[331]: allele = a, in linkage disequilibrium with rs2758688, respectively
  misc_feature [331]..[331]: n is a, t, c or g
ggagctgtggtatggacaggctgcctggaaacaaggttagggagtctctgacatcatcgtaacaatcatcgtctcatagtcagaatgattactcttgtttggttaaaaaatactggctttccagcctgggcaacatagtgagaccttgtctctacacagaataaaataaagttggccaggcatggtgacatgcacctgtagtcctagatacttgggaggctgaggtgggaggattgcttaagcctggcaggtcaagactgcaggaaactgagatgatgccattgcactccagcctgggtgacagagccagatcctgtctcaaatatatacntaatggcttcttcatcatcaggaagtagtgattaaatgtctttactttactgttggcctggtgcagtggctcacacctgtaatcccagcactttgggaggccgaggcgggcagatcacttgaagccaggagtttgagaccagcccagccaacattgtgaaacctggtctctactaaaaatacaaaaattagctagatgtggtggctcatgcctgtaatcccagctactttggaagctgaggcacaagactcacttgaacctgggaggcggaggttgccatgagctaagatcgtgccactgcactccagcctgggtgacaatacatacata

SEQ ID NO: 385 - DNA, 661 bp, Homo sapiens
  IRTA1
  misc_feature [331]..[331]: Chromosome 1, SNP identification no. = rs2779159
  misc_feature [331]..[331]: allele = c, in linkage disequilibrium with rs2758688, respectively
  misc_feature [331]..[331]: n is a, t, c or g
acttgacctaatttcataaccccacagttttgcatattgtgtactcgggaaactaaaaaggaatggcagaaactgaggtctcacctggtttcgtctcccaagaaaccaactcctgcaaaataaagcaaagacgcatttttgtcagcagagggagctctttctcaatgacttcatgtaacaggagctatctaagagaggtaatcaagacagtcaattcaaacacctgcccagtcctgggttttcatgaaaatgaggtgaaaaaaagattgtacaaagcatataactttttgaggccaggactgcacactcctgagttaagtatgtaattgtntgagaatttattaagactcaagtctgtgttgaaatccctcaggaaacattacatataacaaaagtgtcacttggagagtagtgagctgtgggtgaacttcgaggaacatctgtggccatgcccagaggagcactgggctctgactcagccccactaaggagaattggtcagaggtccaaagctccctacctccagttcaatgcaggacacacagaaggtgctgtcaggaatctggaaagttgaattgaattaagagacagagttgaaggatgtgggtaattattctagagctgaaaaaggttctgctcctgtcttctacaccaggtttct

SEQ ID NO: 386 - DNA, 661 bp, Homo sapiens
  IRTA1
  misc_feature [331]..[331]: Chromosome 1, SNP identification no. = rs2777965
  misc_feature [331]..[331]: allele = a, in linkage disequilibrium with rs2758688, respectively
  misc_feature [331]..[331]: n is a, t, c or g
ttgctgcgtgcttccaaagacttcttgcctcagcccacctcaggctggctttagatgccaagaaacctggtgtagaagacaggagcagaacctttttcagctctagaataattacccacatccttcaactctgtctcttaattcaattcaactttccagattcctgacagcaccttctgtgtgtcctgcattgaactggaggtagggagctttggacctctgaccaattctccttagtggggctgagtcagagcccagtgctcctctgggcatggccacagatgttcctcgaagttcacccacagctcactactctccaagtgacactttngttatatgtaatgtttcctgagggatttcaacacagacttgagtcttaataaattctcagacaattacatacttaactcaggagtgtgcagtcctggcctcaaaaagttatatgctttgtacaatctttttttcacctcattttcatgaaaacccaggactgggcaggtgtttgaattgactgtcttgattacctctcttagatagctcctgttacatgaagtcattgagaaagagctccctctgctgacaaaaatgcgtctttgctttattttgcaggagttggtttcttgggagacgaaaccaggtgagacctcagtttctgccattc

SEQ ID NO: 387 - DNA, 661 bp, Homo sapiens
  IRTA1
  misc_feature [331]..[331]: Chromosome 1, SNP identification no. = rs12755544
  misc_feature [331]..[331]: allele = c, in linkage disequilibrium with rs2758688, respectively
  misc_feature [331]..[331]: n is a, t, c or g
gggcatccgccggtgcaaaatcagaatcagccacacccaggcctaggattctagactcaaagggcagaaagcaagttactctaccttcctggtaaccctatttcctaaaagaaatggctactttggggaaagtaattgaaattttgtctcagttagaaaggcacagattctaaatccaggttgttggattagaatcccagctcctcaacttactcactgtgtgggcagggaaaattatttaatctccctttgcctcagtttcctatttactgttgtaaatgagttaatacatgtaaagtgctttgaacagtgcctgccacttaagtgttangtctagggaaatactagttcatattttgtggtcctgacaccatgccctagactctcaggaaattcaggctgctctctgattagcttagaggacacctccataggttaagcctgctcccacacagccctaccccagacatcctcagtccatgctatggattgatttgtgcccttctcccccagattcatacgctgaagctctaaccccaatgtgatggtatttggagacagggcctttgagaggtaatcagatttagatgaaatcatgagggtggggccccaaagataggattagtgcccttctaagaagaaacaccagaaaggttgtgct

SEQ ID NO: 388 - DNA, 661 bp, Homo sapiens
  IRTA1
  misc_feature [331]..[331]: Chromosome 1, SNP identification no. = rs10489674
  misc_feature [331]..[331]: allele = g, in linkage disequilibrium with rs2758688, respectively
  misc_feature [331]..[331]: n is a, t, c or g
tgggatgcagaagttggggataaatttgttacacatggttagtggaaaagctgctggagccccagcctccccctctgaagtattggcttatttctacccttttcctcttgggatgctatgcattccatcaggcttggctagaatcccacatcaggcggggtgacagctcctcttcctgtggacgctgtgacacatatcccaggccctgccatgtttagccagcacaatggcagttttggtttaagagagtcacccccaaatagcctggttcttagggtcagagtcaccacacgagctgatgtctctacatccctgcagcactcaggaaaangatgaaatggacaacagggactcttgtaagtatttgagataaaatatagttattagggtatctagagacataaaggagcaaagaaaataaggacttaccagattgtccacagactggagctgaaagagagtaaagagccagccatcagcgtaggcgaagagtcccgaactattcaccctgagagcccatacactcatatgctacttccaaccaagaggaagagaaacacgttccattccatccatcccagggaagcggggaaacacagtggccagacgctcaggctgtggactcagacagtctggtttgaattttagctgtatgacccag

SEQ ID NO: 389 - DNA, 661 bp, Homo sapiens
  misc_feature [331]..[331]: Chromosome 1, SNP identification no. = rs2224607
  misc_feature [331]..[331]: allele = c, in linkage disequilibrium with rs2758688, respectively
  misc_feature [331]..[331]: n is a, t, c or g
agaaatcatctcggaaacgtctctaaaacaaaaggagattatattttaccactgaaggctagaaatattattatctgtagtcatggaaaataaaatgcggcttctagatggcaccagcctacaaataaatgtaattgagcttcttcactgccttttctttgaagttcaaagttgattactccaagcggctgttcctccattactaacaaatggctatagaaatcattacgtatacagccactgatttgggagaagagtcttttaatagcaagaacaacaaatttatctttccagtatttttcccacccataaagcactgacaagaccacanactccctgtcacatagttaaaaatgtatgattctcccgtagtagtaaagaccatactcagcactcagatcttggtttctaaatatcagtctctactgaaaggaattggggctccttgaagaagtggctgattctagagttggggcaggaaaatgtaagatgagccaggagcatctcgtagtgccagacagtacagaaatgttccaacaaggaaaatgatgagagtttctcaaaggcacaaagaagaagctgacctgaaagagctcccaatcaccaaagctggatcaatttgagcaacaaaatatataaagcattatattgttaccaaagt

SEQ ID NO: 390 - DNA, 661 bp, Homo sapiens
  misc_feature [331]..[331]: Chromosome 1, SNP identification no. = rs2208753
  misc_feature [331]..[331]: allele = a, in linkage disequilibrium with rs2758688, respectively
  misc_feature [331]..[331]: n is a, t, c or g
ataggattttctccactttccaatctgtataactttgtctctttttcttgccttactgcacttaatagaacttgaagtacaattttaaatagaagtggtgagatggggtatttttattgtctcattcatttctactcctatctttactatttcctttcttctacgttatctgggtttttacttttacttttctctctattcagaatgtgcaaatttaaatttctaatgagacatatcttcttatctaatgtaagcctttaatcctaccaatttccctttaagcactttttcagcttcatcccactaattttatacattatattttcatttncgtttagttcagctatgttgtaacttcctttcagactccctctttgacccattgaatgcttagagatatcttatataatttctaagtgtttggagatgtttctgttatctttctgttagaaagttgtagtctaattccattacaatcagagaatatggcttacattatatttgtcacatttgttttatgacccaggataggacataccttagtgaacctctcatgtgccattgaaaagaatgtgttttttgctgttatttggtggagtgttttattaatattaattgtgtctaggtggttgatggtggtattcagttctatattcctgct

SEQ ID NO: 391 - DNA, 661 bp, Homo sapiens
  LOC391105
  misc_feature [331]..[331]: Chromosome 1, SNP identification no. = rs1998377
  misc_feature [331]..[331]: allele = c, in linkage disequilibrium with rs2758688, respectively
  misc_feature [331]..[331]: n is a, t, c or g
cctgagtagttctacgtggtcatcagttggttctctgggcttgatagtgtgcaggctaattctttctcccccagggcattttcatagcttccctggatagatagcctttttcacccatgctgcaaatctgtcacctactttgtcattcacaatgcactctcagtgtgaccactgatgactctctctttggcccctgtttcccagctggtccgttttcatacagactttccctactagggttctattgctccttcaagtgaccctcttgacaaattcttttaaggtcccgtgtccagcagatgaaaagcagtttcatttgactcctcaattnggatgcagtttccccactggtagtcctgactctgcggccataggctcagatgtgagtcaagcacctgtccagtgcatccccaagctgcaggggacacacatcaagttctctgaatggtcttattgatgccactctcaccaggcttgaggtgaagggtaggtacccatggggtgtggaggggacccatagcagagctctttccaaagaactttttttcccatgatcaccaaatcctaagtttttatgccttcaatataaatgagagcttaagagtctcaaacccagttttcagaactagctttgcaaattcttcagtggaaggcattttcc

SEQ ID NO: 392 - DNA, 661 bp, Homo sapiens
  LOC391105
  misc_feature [331]..[331]: Chromosome 1, SNP identification no. = rs2777986
  misc_feature [331]..[331]: allele = c, in linkage disequilibrium with rs2758688, respectively
  misc_feature [331]..[331]: n is a, t, c or g
tgcagaatctcccagcatcatgcacaagctgaggagaacttgtagcacttctagaggcccttgttcttctgaaacataccatgccccaatttctgctcaacagggccccctgggaggaggccctgccctcccttgtcaaaggtaagtgggacctaatccccgtctttgtttttcctgtcaacctatctggaggtcctatcacctggcctgctctgttaccttctgccccacagcgccctctgttgagtcctaggaaatggtgatatcaagtcccttctgagtcataatcagagtctcaactttaggcatttcttcaatgcttacttagatncagaacattatatatagatggtggaaaattactcatatacatatcttacctagcattttttaattttgtgacttggaagaactctatcctctgaatctgcaatctttggtttggaacacacaaatctatttttttttctatcaataaaatttagttcttgcccattttggcagtcaaaaggtgaacactgagttctgcattctcagtagggttctaacctctgcctgaagtaatggctgactgcatcccaaatgttgtatgcttgtgggcaataagaattacagaaatggaaaagatactttggaaacttccagagaagaaggcacttga

SEQ ID NO: 393 - DNA, 661 bp, Homo sapiens
  LOC391105
  misc_feature [331]..[331]: Chromosome 1, SNP identification no. = rs2777987
  misc_feature [331]..[331]: allele = g, in linkage disequilibrium with rs2758688, respectively
  misc_feature [331]..[331]: n is a, t, c or g
cacctggcctgctctgttaccttctgccccacagcgccctctgttgagtcctaggaaatggtgatatcaagtcccttctgagtcataatcagagtctcaactttaggcatttcttcaatgcttacttagatacagaacattatatatagatggtggaaaattactcatatacatatcttacctagcattttttaattttgtgacttggaagaactctatcctctgaatctgcaatctttggtttggaacacacaaatctatttttttttctatcaataaaatttagttcttgcccattttggcagtcaaaaggtgaacactgagttctgcnttctcagtagggttctaacctctgcctgaagtaatggctgactgcatcccaaatgttgtatgcttgtgggcaataagaattacagaaatggaaaagatactttggaaacttccagagaagaaggcacttgaactgacacagtaagcccctcctaacactctgaccacacaatagtgtttgataaaaacataaaaaaaattttaattatgtaacttaggttcaggaaaactccaggtacagaaacaagagggaactccatgctaaggaggtgagtgggatttgaagttctggagacccaagaagttatcagaaccagaagcagagcttaga

SEQ ID NO: 394 - DNA, 661 bp, Homo sapiens
  LOC391105
  misc_feature [331]..[331]: Chromosome 1, SNP identification no. = rs2248138
  misc_feature [331]..[331]: allele = a, in linkage disequilibrium with rs2758688, respectively
  misc_feature [331]..[331]: n is a, t, c or g
aaagggagccatgagagaagaagagactattggtctgctggaaaaatgaacagatagggaaagacaggcatggaggataggggagctggtcaaagaaacctgagaagttgcttggctgccctccagataggtgaagcctggagatcctggactggagactgggcatctgggcactggccaagcattgaaatctataataagaggcaaaatctacaataagaggcaaaagcaactcttgactcattttttctcttcctcagtccctgtgtctcatcctgtcctcaccctcagctctgctgaggccctgacttttgaaggagccactgtgacncttcactgtaaggtccagagaggttctccatgaatcccatatcagttttatcatgaggatgtgcccctggggagcagctcaacaccctctgtgggaagagtgtccttcagcttctctctgactgaaggacattcagagaattactactgcacagctgacaatggctttggtccccagcgcagtgaggtggtgagcctctttgtcactggtaagtgctgggttcctgccagtcacccacccctggcccagttctctctcacccattcctttaaaaatctgtctgtccagtttcctcccctaatcaacttaatccccttcttggcttcctct

SEQ ID NO: 395 - DNA, 661 bp, Homo sapiens
  LOC391105
  misc_feature [331]..[331]: Chromosome 1, SNP identification no. = rs2758688
  misc_feature [331]..[331]: allele = t, c
  misc_feature [331]..[331]: n is a, t, c or g
agcactttgggaggtcgaggtaggtggatcacctgaggtcaggagttcgagaccagcctggccaacatagtgaaaccccgtctctactaaaaatacaaaaattagctgggcatgatggcaggcacctgtaatcccagctactcgagaggctgaggcaggagaatcgcttgaattcaggaggcgaatgttgcagtgagttgagattgccactgcactccagcctgggcgacagagtgagactctgtctcaaaaacaaaaacaaaactgagtcacatccagtgaatttagccacaaagtactctttggcagaagaacacagactagaaccacnatacctgggtttgactgctgcctcttcacttactagctgtgtgactcaaccattcggggcctcagcatcttcatctgtgaagtagggacaacaatagtactcacctcattgaattgttttcatgaataaattaatgtctgtatacatatcaatatttataaattacatccaacaaatatacatacaccagaacttaaaggtactatagtgtcttataacaaatatcttttttatttttatcattatcgtcattactacattaataaacctgaaaaatcagctttagtagattattggggataaaatccaagttgtaatggacaaaatgtg

SEQ ID NO: 396 - DNA, 661 bp, Homo sapiens
  LOC391105
  misc_feature [331]..[331]: Chromosome 1, SNP identification no. = rs2758674
  misc_feature [331]..[331]: allele = t, in linkage disequilibrium with rs2758688, respectively
  misc_feature [331]..[331]: n is a, t, c or g
tttggaaagattagtttgccatggttaaacacatgtgccccagattcagctctctgccttctccaaagatgattttgaaggcatcaatatttaaagagggaagagcagatattggagaaagaggaagaaatttttaaaaggtgtccatacgtaagagacaaacagtttcactcatttgagtctttgatcagcctttatcagaatctacgatttacatgtgaaaggcagggcagaggaaatagtcacttctgtcttcctctagcccaggagtctgcatttttaagtcagggaaacaatcagatatgcatttgtctcctgtaagcagcaatgncttaaagttctgtcttttgtcctgcacttgtgaaaatcagctgtcaatttacactgttaggataaaacaggaccctttaaaacagaaccattttagggtaaagatcttggggcccacaaagaaatatttcagtggacaaattttgagggaggtatgtagcttttaaaaaagtctttgaagttatcatattaaggaataaaataaaaggcaggtttgcctgaaacagttcccagcttgacctttccctttggcttagtgatttggggttcccaagatttattttccttttacaaaatctacagtaagaggcagaaacaaatcttgactaat

SEQ ID NO: 397 - DNA, 661 bp, Homo sapiens
  LOC391105
  misc_feature [331]..[331]: Chromosome 1, SNP identification no. = rs1969742
  misc_feature [331]..[331]: allele = t, in linkage disequilibrium with rs2758688, respectively
  misc_feature [331]..[331]: n is a, t, c or g
tgcctgagctctctaatatctcctgttttcttgctgaggtcagcagggatttgaaagtgatgcctggtttactggcatcgcccaagggccaggatagctccatggtcaccccctgaccctccctgggggaagggatgaatgcccaagcagctcctggcttttgctaggccctgcatttactgttattgccaacagaccccatttagccaggcaggacatcttcaactccatggcaagtgtgctggactcaggataggatcctctccaatcagcgagccagaaaaatcctctgaaaacattccactgtgctgatgccagcaggaatgctgcnttttctacactttggagttaatcctccaggacatccaataactgggtccttacaaaaaagaaaggcacagaaaggggagatggggagaagacaagttatctgcatcccacatttaattagttctggctctcactgccattcctttggctcagagtggataattgagaatccatgaacagcaagaaccctctactaccgctctccttgtccaaatcagtggccccagctgtaaccttgtcctggtcacctctggatgtcagtgagtgacttgtctcttctttgctctgacacaattagctatggtgggattcttctgggcatttgaatcat

SEQ ID NO: 398 - DNA, 661 bp, Homo sapiens
  LOC391105
  misc_feature [331]..[331]: Chromosome 1, SNP identification no. = rs10489676
  misc_feature [331]..[331]: allele = t, in linkage disequilibrium with rs2758688, respectively
  misc_feature [331]..[331]: n is a, t, c or g
ttgtctcaaacttggcatgcactaaactgctccagtccacttccagagtatatactgcccagcttttcctcacccagtgggtccttagtgctccatcgattttacaagtatcccaggtttcttctatgacagttccatggctgagtgtgtggccagtgctctgaagcttgtgggtgacaatgataccataacagtgtccaggaagcttctttggaaagaatgtaaaatggtcttcccagtagtggattctacggttgaatgaccctggcgcttcctgagatatagacaggccctgaaaacagtgtcagggagacactgaggagcactatcngttcaggagcagatgactaccttcctccttgacccaaatcttatttttctttcctttcccctcattctcattccaggtccatccatcagtgcttttgactgctgaactcaagacatttattctcttttccaaagtagagattagttgtctattagagagcccatagaggctcctaaagagctatttcttctagaattaaggagggttaagttcttcaatcccaaagacctgtttatcttcttgtaggtggaggtcactgttccccgagccattctccacactccttcccagactacaagttcacacaaacatatggaatcagtacggagt

SEQ ID NO: 399 - DNA, 661 bp, Homo sapiens
  misc_feature [331]..[331]: Chromosome 1, SNP identification no. = rs2152710
  misc_feature [331]..[331]: allele = a, in linkage disequilibrium with rs2758688, respectively
  misc_feature [331]..[331]: n is a, t, c or g
atatctagggaaaaatagaaaagactgcatttttctgtttaagttatctaaaatataagtacttaacaaattataacaatttttcgtgggatttttaaaacatacattgatataatgcctatacatccatcctataaatgattggacacttatgggatataaatgaaaggataggacaaccatcttataaatgattgaaggggtggacatatatatacctatcaatttcaagattctacattttcagtggagaggcagagtatcaattttaagtaggccatgaaagattaagaatgtatattgtaacctctagatcaacctttgaaaacantacaaggatgtattactaaaaagaaaacagatacattaagatggaatactaaaatttcaaatgattcgaaagagaaaaaggagaaaaaatgaacaaaaaatggtggagcaaatggaaaataaaaattttttaaattcaaccatattaataattaccttaactatgaatagtataagaattttaactgaaggaaaagattatctaaatagattttaaaaagtaaggccaaagtatatgatgcttacaagaagctcacttgaaaaataaaaacacaaacagattgaaagtaaaaaagatggaaaatgatatgttatttaaacagtaaacata

SEQ ID NO: 400 - DNA, 661 bp, Homo sapiens
  misc_feature [331]..[331]: Chromosome 1, SNP identification no. = rs12136747
  misc_feature [331]..[331]: allele = c, in linkage disequilibrium with rs2758688, respectively
  misc_feature [331]..[331]: n is a, t, c or g
ataataatagtcaagtgtggtggctcatacctctggtcccagctacttgggaggccaaggtgagaggctctcgagcccagcagatataggcgacagtgagctgtgactggaccactgcactttgttgcctggtcatcaaagcaagaccttgtttcagaaagaaaacaaaaagcaaaaaaaaaaaaaaaaaaaaaaaaaaaacccaaaaagataacttttgattttgttaatcttctgtatttttttagtatcaatttcatttatttctcctttgatctttattgtttcttttcttcactaattttgtgtttggtttgttcttgcttttctngtatctttacatgcattgttagttttttatttgaagtctcaagttttttgatgtaagtatttctttatataaacttccttcttaatatagcttttgctgtattccatggactttcgtatgttgcatttccactttaatttatttcaagaaattttaaaattttcttcttaatttcttcactggtcattgaagagcttattgtttaatttccatgtgtttgtgaagttttcaagatttctcttgttattgatttctagttttattccattgtggtcataaaatatgtttgatataatttctgcttttttgaatttgttaaaacttattttc

SEQ ID NO: 401 - DNA, 661 bp, Homo sapiens
  FCRH3
  misc_feature [331]..[331]: Chromosome 1, SNP identification no. = rs6691569
  misc_feature [331]..[331]: allele = g, in linkage disequilibrium with rs2758688, respectively
  misc_feature [331]..[331]: n is a, t, c or g
ctagaaatctatcatgtatggcaaatgatgagactatgtcatgaagcaaaaattacaattaatgtgattcttcacacataaggtctttgcagtggggatacaagtcacatattaaactagcagagtctttaatgaaatgctgaagttatttttcatcataactagggtaatttggttgggaatgtcaccctgtaagtacaaaaatacacttcagatagagtcaccttaaattcttgttctataacttcttttggctgttcccaatatggtagcaaggatacagcatatacaccaaaacatcagcaatgccactaccagccacacaaaaaanggaaacaaaatatttggagcaaattgtttatacagagagcacattaacagctttcgatcacacttggatcaaatggtcatgattgtgcccttgtaaccctggctagaccatttctctctcctcctctattcgacagccctaggagctgagggccctcctgccttgccacgtgtctccactgtgaaaataacacagtgcttgctcagaggctgcctgctctcttcctggggaacacacagatcaggcacaggggagatttgcagaccttttgctcagcctcacataccctgcagcccagcctcgtaggaggcagagtctggagagatggat

SEQ ID NO: 402 - DNA, 661 bp, Homo sapiens
  FCRH3
  misc_feature [331]..[331]: Chromosome 1, SNP identification no. = rs17676026
  misc_feature [331]..[331]: allele = c, in linkage disequilibrium with rs2758688, respectively
  misc_feature [331]..[331]: n is a, t, c or g
gtgacagtccctgaaccctgggctactgagcaaataaggaccatattttctccttcaatcagctgccctccggtgggccggatctctagattcacattagacacagggactcctgggggaacacaagatggcatgtgaaggtcctgatggcagggacatcaaggtcaaggggaaggctggagctaccatgaataggccaatagcagcaggtgcagcaggcagaagcccaaagtaggaaataagaaattaattgtgtatacgattataaaggaagcaacatccctctcactcccacaacattcccatccttgagaaatgtgggcaccaagtncataatctccataaatccaatgttttctggtcacattttatatgcatttatctctaaggaatctttgatgcatcaataaaccacaaaataaaagagaacactggagatcctctgttttgaagatcaaaatagaatccaaacccttctcctattcttcaagacttctccagatttacatccatgtctccatgtctttctctgactattacagttcatattcatcttccccttttcggactattttgttgtgagttcaggttaccaaatggaagcaccacaggggcctcttaaaactgcatgtgttcagttgtgcttctagttgtctcttga

SEQ ID NO: 403 - DNA, 661 bp, Homo sapiens
  LOC148300
  misc_feature [331]..[331]: Chromosome 1, SNP identification no. = rs17676303
  misc_feature [331]..[331]: allele = c, in linkage disequilibrium with rs2758688, respectively
  misc_feature [331]..[331]: n is a, t, c or g
acccatttttttcaatctgaatattgctgcagcaaaaccagcttcaccaaaaagccaggtaaccttaacaaaagaattccctgtatcatctggatctcaacattggaaaaaagaagcagatagtgtttatggagaatgagttcctgtagagaaaaatggtgaagaaaacaaagatgatgataatgttttcagcagcgatttgccctcagagcctgtggacatctctacagcaatgagtgaacgggcactcgctcagaaaagactcagtgagaatgcatttgaccttgaagacatgagcatgttaaatagagctcaggaaaggattgatgcntgggctcagctgaactctattcctggccagttcacaggaagtacaggagtacaggttttgacacaagaacagttggccaatactggtgcccaacctggattaaaaaggatcagttcttaagagcagccccggtaactggaggaacgggagccgttttgatgaggaaaatgggctggagagaaggagaaggattaggaaaaaacaaagaaggcaataaggaacccatcctagttgattttaagacagaccgaaaaggtcttgttgcagtaggagaaagagcaaaaaagaggtctgggaacttctctgctgcaatgaaagatctgccaggca

SEQ ID NO: 404 - DNA, 661 bp, Homo sapiens
  LOC148300
  misc_feature [331]..[331]: Chromosome 1, SNP identification no. = rs17727309
  misc_feature [331]..[331]: allele = a, in linkage disequilibrium with rs2758688, respectively
  misc_feature [331]..[331]: n is a, t, c or g
gatctcaacattggaaaaaagaagcagatagtgtttatggagaatgagttcctgtagagaaaaatggtgaagaaaacaaagatgatgataatgttttcagcagcgatttgccctcagagcctgtggacatctctacagcaatgagtgaacgggcactcgctcagaaaagactcagtgagaatgcatttgaccttgaagacatgagcatgttaaatagagctcaggaaaggattgatgcctgggctcagctgaactctattcctggccagttcacaggaagtacaggagtacaggttttgacacaagaacagttggccaatactggtgcccnacctggattaaaaaggatcagttcttaagagcagccccggtaactggaggaacgggagccgttttgatgaggaaaatgggctggagagaaggagaaggattaggaaaaaacaaagaaggcaataaggaacccatcctagttgattttaagacagaccgaaaaggtcttgttgcagtaggagaaagagcaaaaaagaggtctgggaacttctctgctgcaatgaaagatctgccaggcaaacatcctgtgtctgctttgatggaaatctgaaataagagaaggtggcaaccacctgaatttctattggtccatgatagtggccctgatcat

SEQ ID NO: 405 - DNA, 661 bp, Homo sapiens
  LOC148300
  misc_feature [331]..[331]: Chromosome 1, SNP identification no. = rs17727339
  misc_feature [331]..[331]: allele = t, in linkage disequilibrium with rs2758688, respectively
  misc_feature [331]..[331]: n is a, t, c or g
acctggattaaaaaggatcagttcttaagagcagccccggtaactggaggaacgggagccgttttgatgaggaaaatgggctggagagaaggagaaggattaggaaaaaacaaagaaggcaataaggaacccatcctagttgattttaagacagaccgaaaaggtcttgttgcagtaggagaaagagcaaaaaagaggtctgggaacttctctgctgcaatgaaagatctgccaggcaaacatcctgtgtctgctttgatggaaatctgaaataagagaaggtggcaaccacctgaatttctattggtccatgatagtggccctgatcatngcaaacgttttctctttagggtattgagaaatggaagcccttaccagcccagttgtatgtttttcttgaatagggattgataaatggaagtgcttaccagcccaactttgccagccttaataagaagcatgctaaagacacagcagctactgtggttcttcaagcaatgggccttgtaccaaaggacctcatggctaatgccacctgcttcaggagtgcctcacatagatagattgaggttttataataatcatttcagataattttactctgcctcacaatgtgtttcctctttaatgttgtaaatatttggcaatttaagacattgtg

SEQ ID NO: 406 - DNA, 661 bp, Homo sapiens
  misc_feature [331]..[331]: Chromosome 1, SNP identification no. = rs17676381
  misc_feature [331]..[331]: allele = t, in linkage disequilibrium with rs2758688, respectively
  misc_feature [331]..[331]: n is a, t, c or g
gtacatgtagagcccaagtgcaaaggcactgcagctttgtgttttactcactgcaaagctctggaaaagacttgaaagtagctaagttctgccttagggtcaaatgtcccttgggagtccaaatggtagagaaaatacatctgacttcaagcccacataaagtgggcacagaatggttaaaaagcaaaaccttgaacatctacataagtgaaattagatttagttttattacacacaatgtggaggcacttgacacctctgtgcagtggtaggattattttgagatcagatgtttttcagagcatttgattttcccttcattaaatagatntctttctttagagcctagaccaaaatagccaacattcactgaacattatcattcatgtgtttaatggtacctccagattaacatatccaaaattgaagcaatcttttttttttttttttttttttccgacacggaggcttgctgtcacccaggctggagtgcagtagcgtgatcttgtctcactgcaacctctgcctcctgggttcaagcaattctccggcctcagcctcccaagtagctgggattacaggcatgcaccaccaggcccggctaatttttgtattcttagtagagatggggtttcactatgttggccaggatggtctcgat

SEQ ID NO: 407 - DNA, 661 bp, Homo sapiens
  misc_feature [331]..[331]: Chromosome 1, SNP identification no. = rs7522309
  misc_feature [331]..[331]: allele = g, in linkage disequilibrium with rs2758688, respectively
  misc_feature [331]..[331]: n is a, t, c or g
attggtcccaggtgccttattcagttcatttggtgaaatcatgttttgagagatggtcttgatattcatagatgttccttagtgtctaggcattgaagagttaagtatttactatggttctttgcagtctggccttgtttgtgcctgtccttcttgggaaggttttccaggtattcaaaggaacttgagacccaaccccagtagtgctgtggttcctgcagactcatagacgtactgacttagtggtcttggataagttccggaagacttccctggattaccaggcagagactcttgttctcgtcccttatgttctcctaaataaacggantctctctttgtgctgtgccgcctggatctgggggtgtcgtgatgcaagcacccctggggccaccaccactgactgtgctgggtcagatctgaagccagcccagcattgggcctcactcagggcccactgtaaccactacctggctactgctaatgttcgcttaaggccctagggctctacggttagcaagttgggaagccagccaggtttgtgcctttcttgccccggtcatgcccacagatgctgtctgagagccagggactggagtcaaaaatcttagaaatgtacctggtattttattctgttgaagctaagctgttccttggtcca

SEQ ID NO: 408 - DNA, 661 bp, Homo sapiens
  misc_feature [331]..[331]: Chromosome 1, SNP identification no. = rs7524764
  misc_feature [331]..[331]: allele = g, in linkage disequilibrium with rs2758688, respectively
  misc_feature [331]..[331]: n is a, t, c or g
actgacttagtggtcttggataagttccggaagacttccctggattaccaggcagagactcttgttctcgtcccttatgttctcctaaataaacggagtctctctttgtgctgtgccgcctggatctgggggtgtcgtgatgcaagcacccctggggccaccaccactgactgtgctgggtcagatctgaagccagcccagcattgggcctcactcagggcccactgtaaccactacctggctactgctaatgttcgcttaaggccctagggctctacggttagcaagttgggaagccagccaggtttgtgcctttcttgccccggtcatncccacagatgctgtctgagagccagggactggagtcaaaaatcttagaaatgtacctggtattttattctgttgaagctaagctgttccttggtccacaagacaaagtcctttccgctcttccctgccctttccataggcagaggatcctttctcagtggccaccaccaccactggcccatgggtaattctgtcagtccactgccaatattcacttaaggccccagggatcttcacttagccaggcctgggtggtgaaagctgccaggcctgggactcacccttcatggcagtgggcttctctctggcccagggcaggttcagaaatgct

SEQ ID NO: 409 - DNA, 661 bp, Homo sapiens
  misc_feature [331]..[331]: Chromosome 1, SNP identification no. = rs2873404
  misc_feature [331]..[331]: allele = a, in linkage disequilibrium with rs2758688, respectively
  misc_feature [331]..[331]: n is a, t, c or g
tccctagtcactgtgctttccctctcccaactgcacgaattctctctatgtatcatccagctgctgccaaggaatcggggaggggtggtgtcggcaattcaaaactgtctttcctactctcttcagtgcctgtttcagtaatataaagctaaattaggtactgtgattgctcacctgattttttgttcatgtgtagttgttgaaatttgcaggagggatgattggtgaagatttctatttgctcatcttcctctgcctccttctgtactatgtttattataactgaagtttatgcatatatatggatcagtttctgaattatctatgattncattgtttcatttatcattgtggctgtatcaccctttttatagcttcaaaatatattttattctgaaatcttttgtctttctcttttttttcaaaaatgtcttgctattctttgccctttgcatttgtatatgcataccaattttaaaattaactgttaaattccataaaatataaacaaataaaatctttctaggattaagattgagatttcattaaattaatacagcaatttgggaaaaattgaggttattatcatattaaacctttaactgctattatcatattaaaacctttaactgctaaatatgacatatttctctattttcta

SEQ ID NO: 410 - DNA, 661 bp, Homo sapiens
  misc_feature [331]..[331]: Chromosome 1, SNP identification no. = rs2317232
  misc_feature [331]..[331]: allele = g, in linkage disequilibrium with rs2758688, respectively
  misc_feature [331]..[331]: n is a, t, c or g
actgatttttatatactaattgtttttattcagcaatttttctaaacttttgtgttaattccaacaatttatctatatattcttttggatttgctacatttgcattcatattatttgtgaataatacttgttcttttacttcttgcttaatctttatttttggtttatttttcctgtctttctgcaatgaaagggcctccaggcactgttgataagagtgctgggccactgtggtgttgtggatttgtttttcttttcctcagatttctcccttctaggtttacatgggaacttattattatgttttaagacacagaccagcgttattttntctattccaatatatgttattgtttctcccatagtcagaatacttagatttgagaactaaggagtgaagtaggacacaacttatgacatgtcttttttatgacccactgccaacattttcttcccatacctatgactttgggctctgcttagaaaccttggaagaaagcctggaattcaggacctctccaggggtacctcctaatatattcaacagtaaaactttcaaatttattgacatgcaattatttattatatcttttgttaaatctttatatgttgtagctagctaacctttaatattactaaagggtaattttaatattaatat

SEQ ID NO: 411 - DNA, 661 bp, Homo sapiens
  misc_feature [331]..[331]: Chromosome 1, SNP identification no. = rs7517149
  misc_feature [331]..[331]: allele = g, in linkage disequilibrium with rs2758688, respectively
  misc_feature [331]..[331]: n is a, t, c or g
tctttatatgttgtagctagctaacctttaatattactaaagggtaattttaatattaatattacattttacattttacaaattttaatttttaaatattaaatttctaatattttattaaagggtaatttttacctgcattttttctttttcttttctcttaatcagtcttgctaggtgtttgttaattttattagtctttttatagaaacagctactggttttgctggttctccttttgagctcttttttagtattctattattttttgttatttctttactattccatccctttttggagggaagaattctgtagttccatttacaanctttttgagttcaatggtaggtctcttgactttaatttttctttttttattaattcaataaataattgtgaattaattcaataaaatttcctctaagtcttgctctagctgtattctatattttttcacatcacacttttattatcattctcttatattttataatattctttatgatttcctctttaattaaagtataattttgagtaatttttttccttttgcagttatgagactatttttactatcttctttaatcaattttaaatttattgcattatggtttaaaaacatatattgttagctttttattgaatttataattgactc

SEQ ID NO: 412 - DNA, 661 bp, Homo sapiens
  misc_feature [331]..[331]: Chromosome 1, SNP identification no. = rs6427395
  misc_feature [331]..[331]: allele = t, in linkage disequilibrium with rs2758688, respectively
  misc_feature [331]..[331]: n is a, t, c or g
gtagtaccccaaatagtattatttcaattgaattatatcaaacgaaattgatattatttgtttgtttagtgttgttatagatatgtttctcaatgtactgttggatttctgaaaatacaatctaagagtctatgctttattattgttaagtttaactcatttacagtattgtaattactaggctaatgggacctaatttctgctgctttatttggtcatttctgtttacctatttaaaaatgtctacttatgcctaccagtttttattatagacttcgaatttttaatattttatttaaattttatttaagtgacattaattatagcattngaaagggagaatctaattccacacaaaatggaagactgtaaaccgtactcattaaactgttaagaatataagttagtgagaatgtagcagaagtccactttagattttaagtgtgattatgccacagagactcttccaggcttgcatttagtatttttggaatctatttcattatctgatgcaaggacaataaaactacaacttgagaggaaattaagtctttgtcatagtctgtttgcacattgctataaagaaatgcccaagactggctaattaataaagaaaagagctttaattggctcacagttctgcaggaagcataatggcttc

SEQ ID NO: 413 - DNA, 661 bp, Homo sapiens
  LOC391106
  misc_feature [331]..[331]: Chromosome 1, SNP identification no. = rs10489679
  misc_feature [331]..[331]: allele = g, in linkage disequilibrium with rs2758688, respectively
  misc_feature [331]..[331]: n is a, t, c or g
ccacgttgcagcccaggttgatgtactctcacttgtaccctgtcttgattttagcattttgcccccagtgttaggtgaggaggctgaatcacaggtcaactttagtccatgtaaaaagctcatcttctccagtaactctgcacctaatgtcttgtcagtgttccacttctctgtaaatgtcaggccacatttgatccatctgttcttggtttccagactacctgtcactttgatggcctcaggattggctgagcctgagcttgtaacatccagtctattcccatattttgttttcaaatgaagctttattaatcctaatctataccgcttngtgaagacatccctggtacatttgtcaagatcagtgtacatgggagggacagccatattctgctcagtggcagccacaggaggctcaacagggtaagggggtggattttcctatgctgctttgaaggtcattctattcttgtttctggtggtaattactcacttactaagatgaataacaacattcatttacatgtcttcaaaacaacttcctccccactcttctatcacattatcattcttgagtttaaataatagaattttattttacttcttctttccatgtgtgtttctcatggtttaaagaacaaaattttattattttatttat

SEQ ID NO: 414 - DNA, 661 bp, Homo sapiens
  SELL
  misc_feature [331]..[331]: Chromosome 1, SNP identification no. = rs12938
  misc_feature [331]..[331]: allele = g, in linkage disequilibrium with rs3177980, respectively
  misc_feature [331]..[331]: n is a, t, c or g
acatttgttcatcttcagaggttcctaaagcctggcctcttgtctgagatttccagctgaaagcatttccttgctcctcttctcatctctaatgaatatttacctttactactaacactccaagttttgcaatttttaaactcttattatcttttgtttttctttcagtatgaatgacccatattaaatcgcccttggtgaaagaaaattcttggaatactaaaaatcatgagatcctttaaatccttccatgaaacgttttgtgtggtggcacctcctacgtcaaacatgaagtgtgtttccttcagtgcatctgggaagatttctaccngaccaacagttccttcagcttccatttcgcccctcatttatccctcaacccccagcccacaggtgtttatacagctcagctttttgtcttttctgaggagaaacaaataagaccataaagggaaaggattcatgtggaatataaagatggctgactttgctctttcttgactcttgttttcagtttcaattcagtgctgtacttgatgacagacacttctaaatgaagtgcaaatttgatacatatgtgaatatggactcagttttcttgcagatcaaatttcacgtcgtcttctgtatactgtggaggtacactcttatagaaagttca

SEQ ID NO: 415 - DNA, 661 bp, Homo sapiens
  SELL
  misc_feature [331]..[331]: Chromosome 1, SNP identification no. = rs4987369
  misc_feature [331]..[331]: allele = t, in linkage disequilibrium with rs3177980, respectively
  misc_feature [331]..[331]: n is a, t, c or g
agcatttttcaggggccactgagcagaactttcttgagcccatggcttattgaggagttgtggagttgaagttggaaaggaaggctggccccaataacataagtcttgaatgcttcaccagatggtctagaaaggcctagcaaagaagaattatttgcccagctctcatttattgaccaaggctgtattaattcataagaatcacagaattctaggtctgaatatgatcttggtggatatcacattcaaactctttttgtagttgaactaattaagtaagttttctataggccttgagcaagtgacagagttagttacaataatcataaanctttatcaaatattaattccatgttgtatactgttatgaatggtttacatgtcttaaatcatgaaatatgcctttaagtctgtgggagaagggtctatgaacatcttcattactgataaagaaacaggcacagagaaataaaatagcctgaggtcacaataaatggcaatgctgagatccatactcatttggatccaggaatcatgctcttaacgcgtatgcttttagaactcaagacccttgactaccagcttagagtggcaagtcccaggcaccctccttttccagtaacgtggttttttttttcacactgaaaccattgtgtgacgg

SEQ ID NO: 416 - DNA, 661 bp, Homo sapiens
  SELL
  misc_feature [331]..[331]: Chromosome 1, SNP identification no. = rs4987367
  misc_feature [331]..[331]: allele = g, in linkage disequilibrium with rs3177980, respectively
  misc_feature [331]..[331]: n is a, t, c or g
gacaggaatatagaaagaaaaaaatcagaaaaatacaaggcagagcatggtaatggccaatgggtgctatatttaagaaggaaaaggtcatttggcttggtggttatagaaaatgttataaagaaggttgcttatgaagaatagataggatttaggtatatggagaaaagcaggaaaggaaggcagtctgtaggaaggaaattgtgtaagcagtggtatggtagtgagactatgaaagcatttttcaggggccactgagcagaactttcttgagcccatggcttattgaggagttgtggagttgaagttggaaaggaaggctggccccaanaacataagtcttgaatgcttcaccagatggtctagaaaggcctagcaaagaagaattatttgcccagctctcatttattgaccaaggctgtattaattcataagaatcacagaattctaggtctgaatatgatcttggtggatatcacattcaaactctttttgtagttgaactaattaagtaagttttctataggccttgagcaagtgacagagttagttacaataatcataaacctttatcaaatattaattccatgttgtatactgttatgaatggtttacatgtcttaaatcatgaaatatgcctttaagtctgtgggagaagggt

SEQ ID NO: 417 - DNA, 661 bp, Homo sapiens
  SELL
  misc_feature [331]..[331]: Chromosome 1, SNP identification no. = rs4987358
  misc_feature [331]..[331]: allele = t, in linkage disequilibrium with rs3177980, respectively
  misc_feature [331]..[331]: n is a, t, c or g
tagtgtctaccactgtttattaagccagttcctcaaatctcctttgacacagatagggtccacctaacaaatacctaatatacttcaaaagacagttttgagagtgggagtcttccttctcccttacttgaaaaactttaaattgtctaatttttgctaatgccttttctctattttctattttcaggcaagaaatccaagagaaggtaagttttattagtggcgaggagtttccacatctgctgattcattctctacttccttaagttacttcctgctctagctagacacattaaccccatagtagtttatttacctggggtcctcatcnaaatgaccagataaggtgataaatctactagcttcctttcagagctgtgctttttggtgctagtggagctgaatgaatgaatgaacgaacaagtaatccctattagaaaagggcagtttatgtaaagggagatttttctgattacctcagaattttttctgagggttaaaaacattgtggtgtgttcttcttgttcttaaatatattatttaagaaatattcaattgaacaagcacttattgagaaatgaataaatgcttattcaattgactatttgcattcaattgctctaacaggcattgtccttcagaaatgtgggaaagataggga

SEQ ID NO: 418 - DNA, 661 bp, Homo sapiens
  SELL
  misc_feature [331]..[331]: Chromosome 1, SNP identification no. = rs2223286
  misc_feature [331]..[331]: allele = c, in linkage disequilibrium with rs3177980, respectively
  misc_feature [331]..[331]: n is a, t, c or g
catttctcaataagtgcttgttcaattgaatatttcttaaataatatatttaagaacaagaagaacacaccacaatgtttttaaccctcagaaaaaattctgaggtaatcagaaaaatctccctttacataaactgcccttttctaatagggattacttgttcgttcattcattcattcagctccactagcaccaaaaagcacagctctgaaaggaagctagtagatttatcaccttatctggtcatttggatgaggaccccaggtaaataaactactatggggttaatgtgtctagctagagcaggaagtaacttaaggaagtagagaangaatcagcagatgtggaaactcctcgccactaataaaacttaccttctcttggatttcttgcctgaaaatagaaaatagagaaaaggcattagcaaaaattagacaatttaaagtttttcaagtaagggagaaggaagactcccactctcaaaactgtcttttgaagtatattaggtatttgttaggtggaccctatctgtgtcaaaggagatttgaggaactggcttaataaacagtggtagacactaatacagaacagacatgttgatgcagatgcctcctgaggttccattccattctccgtgctactcaagaagacagaattgcta

SEQ ID NO: 419 - DNA, 661 bp, Homo sapiens
  SELL
  misc_feature [331]..[331]: Chromosome 1, SNP identification no. = rs4140655
  misc_feature [331]..[331]: allele = t, in linkage disequilibrium with rs3177980, respectively
  misc_feature [331]..[331]: n is a, t, c or g
ctctcctaccaagtatataaaactttgtgacatacatttttgtgccataacttcaaccttggttccaaatgatttttgtaccctaagtttaaatttggctttcttttttttttttttgtactcaataaaacatcaagctcatttattattgcgaagagcgaaacaacaaagcttccacagcgtggaaggggacccgagtgggttgcccaaattggcttctttttcttactttttaattaattttaatttgctatactgaacacattttgtactgttctcacattctttttgaaaaaagcagaatataaataagtagataacttaaaaaaanctctttgagcagaaagaatcatttgggaggcaatatatttcagtggctgtaaagtggcattctagaatcatcctacccaggtgaaagccctattttgccacctgtagtgtagtgtgtatttgaacagctactttcttttctaaactacaatttcttcatctgttaaagaggcataataattgtatcatcctcattgggttgataaaataaaatatttccaagtatttagttcaggtcctagcacgtagacagtgttgcattactgttttaatcctttaaagtattaaagactactatttgaaatcttttcttctaaaattcagcctgctg

SEQ ID NO: 420 - DNA, 661 bp, Homo sapiens
  SELL
  misc_feature [331]..[331]: Chromosome 1, SNP identification no. = rs4987353
  misc_feature [331]..[331]: allele = a, in linkage disequilibrium with rs3177980, respectively
  misc_feature [331]..[331]: n is a, t, c or g
gccctgtttggtaaataaggaaaccagggcaatgatgttttaggccaaatctcaaaaataccatatcagcaggacccagagtcagagattagactccagtccagatacatcttctaaaatcactggtcttcagatttgtgaactggttttttcctcggttggaagaatttcccaccagaaccaacacacagggttagaccagggcatgaaactgaacacatgcccccttagttcctttttcttcaaaatgaaactctctcagtaggaacagattcttactcatctattgctgttaggttcatcatccctaaaaaaaatatttatgtgaagntaaccagaatctgaaattaattcagatttgattccccctgctcaagtgcacttggtcatcagcaggctgaattttagaagaaaagatttcaaatagtagtctttaatactttaaaggattaaaacagtaatgcaacactgtctacgtgctaggacctgaactaaatacttggaaatattttattttatcaacccaatgaggatgatacaattattatgcctctttaacagatgaagaaattgtagtttagaaaagaaagtagctgttcaaatacacactacactacaggtggcaaaatagggctttcacctgggtaggatgattctagaa

SEQ ID NO: 421 - DNA, 661 bp, Homo sapiens
  SELL
  misc_feature [331]..[331]: Chromosome 1, SNP identification no. = rs17525350
  misc_feature [331]..[331]: allele = t, in linkage disequilibrium with rs3177980, respectively
  misc_feature [331]..[331]: n is a, t, c or g
ggccaggctggtcttgaactgctgagctcatgatccgcccgcctcggcctcccaaagtgctgggattacaggcatgagccaccacacctggccaaaacaggtatatcttaaaagctgcccaatgtccatgaatgttacagccttgaatggttcttccaggtgagtttggccaaatgtggcaccatacacccaaggcctgctgcaggctagtgggttgctcacactttaaagctgagacacactcatgccttaaggtaaagggagtgataatctgggcagcagatgttaacttctcaaggcagtcctccttctcttttcctctccagtgacngatggttggaaagcatatatggtgcatttggttagagctgtggccttggtgaatagatacttgggagaatacatgggaatttctcccagggttaatgcaatgcccatgtgttgggaaccaggtgactcttgaagaggtcaggtatttgggagcagtgccttgaaaccttagtggacattagacccacttcctagtggaattgtagcattgaaatccaaggcatgtaggctcttagaggacagagatagtgtgtcattttttcagaattaattaagagcaggccaggcgtggtggctcacacctgtaatccaagccctttgggaggccaag

SEQ ID NO: 422 - DNA, 661 bp, Homo sapiens
  SELL
  misc_feature [331]..[331]: Chromosome 1, SNP identification no. = rs3177980
  misc_feature [331]..[331]: allele = g, a
  misc_feature [331]..[331]: n is a, t, c or g
gtattggtaatttcattccaaaagcaaataaatgcctatgactatatgcttagtgtattttatacgtaaaaattttagcatatgatttttatgctatgaatttacaaataaacctttcctgattatttaaatcatctcagacaaaaggttatctatgtctaaagaaatgactttgagtactaaaatgtaatcacattaaaatattttttttctgacctccttaaagcttcttgccagccctggtcatgcagtggccatggagaatgtgtagaaatcatcaataattacacctgcaactgtgatgtggggtactatgggccccagtgtcagnttggtaagtctctttcctttctttgcttcttcttaggtaaagtcacaggaatcattatagcttatcatgaagctggttggaacaaaatgatactagccactctgagaaatgggaagttttgatcagaaagctctgctttcacaatattgttacctttccgtaaagatttcataagtcagcatgaagtttcgactcacttctcaacaagtctttttgagtaccacaagaagcacagtgttgggataaaagctgtcagggttaccataaggaattagcatggtagattcccgctctcaagaagctcacgatctaatgagcttgttagattaa

SEQ ID NO: 423 - DNA, 661 bp, Homo sapiens
  SELL
  misc_feature [331]..[331]: Chromosome 1, SNP identification no. = rs4987280
  misc_feature [331]..[331]: allele = t, in linkage disequilibrium with rs3177980, respectively
  misc_feature [331]..[331]: n is a, t, c or g
taaagcgtaaaaataaaatagaacaaaacaaaactgtgcatcagttctgatgtaaatttgaagtaatttttcatctatgtctgagaaacctgttacctcagacagggttagtagacatatgtgttttattctgattattaagaaagttgtaagcaccacctcaaaggctataaatgtgtggtttaagagtatacatctaaatataattttgtatttcatttgcagatatttccatggaaatgtcagagcacccagagggacttatggaacatcttcaagttgtgggggtggacaatgctctgttgtggtatgttatgatatttatatatcnctaagtctattttacttatattcatttttcttaaatatccactagttatacatagtctaagggaaaattatttcacagagctgttaattctatcccttctgtaaacatctcttttcttcttacctttagttcttccccagaaactcctgaacactatttttaacctataatagcccatgctgtagagttcaaatcccaataaccccacaaaatccctcaattataaaggaataatgttaattaagaaatctctgttaaggtacttacaatctgtaccaaatatttagcacctcattttctattttttattcatagttcagtgtacattaa

SEQ ID NO: 424 - DNA, 661 bp, Homo sapiens
  misc_feature [331]..[331]: Chromosome 1, SNP identification no. = rs12084893
  misc_feature [331]..[331]: allele = g, in linkage disequilibrium with rs3177980, respectively
  misc_feature [331]..[331]: n is a, t, c or g
tggaaagcagcactggccacaaccacacgtggcaaaagcatctatcgaggagtgaagttatatttggtgaatgtgaccgggaagcaggggcagtggtgtcctcctgccttcctgaggcactctgttcccttacctctgcgaaggcttattttacccctgagtgcttagttttgaaagccttagttccctctctcccataaaaaagctctactctgctaacatctaagttacctttgcagagtcttaggtagagggaggaaatcccaataaagattccaccctatctgcaaaatacaaacatggtatttcttgcattcccaaaattgtgaangaaaatgtgtatcaccacagtagagaatggcattttttgtttgatcaaaacctaaatatatttgatgaaaatgtgtctggttctaagtttatttcccagaaagccatgtttactcacttggaatttatagacatcttataatatctgagtcgagtaggagctccgggctctacctcactcttttctcccacacccagggggaagtgtagggttctcagactttagaataaagaggaatcacctggacaactcacctaaaatgcacatcttcaggtctcatactcagaggctctgactcaacaggtctgggtggcgcccaagaatttgggc

SEQ ID NO: 425 - DNA, 661 bp, Homo sapiens
  misc_feature [331]..[331]: Chromosome 1, SNP identification no. = rs10489179
  misc_feature [331]..[331]: allele = a, in linkage disequilibrium with rs3177980, respectively
  misc_feature [331]..[331]: n is a, t, c or g
ctttcaaggataccctcccttttaaacagtttgtccttatatagtctttattcttctttcaacaccctgcttccacaatttgtatatatatatatattttttgccttgtcaggactttctttggggctgttaagtttctagacatagcaccgacaaggagtttattatatttgccttggaatttttgtaattacaacattttgagagaagctgcttatttgtgaatcagtgtgttctaagacaagaaggctttccttcatattctttcattttataacaaccaacttaaaccactgaatgcttcatattcttaaaacacctaaacacatcncaactgttctaaaaatcattagccatgaaaaattcacacaatatcatgctgaacttttcaaaagcaaagccaaatttcttttagggacccatcactcagcaaaacaaatgtcaaaacaagtttttcttgacttgaacttttacatggtcacgtacaaaaaggaaaatgagtgtctaagtcagcaccaaagattataagatagatggaaaaatgataagagaacatctcatatttttgcttatgtaggtaagagactgaatcttcttgtaaaaaatgttttttctttctttttttttctttttgtttgtttctaccaagtggactattttc

SEQ ID NO: 426 - DNA, 661 bp, Homo sapiens
  misc_feature [331]..[331]: Chromosome 1, SNP identification no. = rs10800473
  misc_feature [331]..[331]: allele = t, in linkage disequilibrium with rs3177980, respectively
  misc_feature [331]..[331]: n is a, t, c or g
cctctactaaaaatacaaaaattagccgggtgtggtggtgggcgcctgtagtcccagctactcagaaggctaaggcagaagaatcacttgaacctggaaggcagaggttgcagtgagccgagattgtgccactatactccagcctgggtgacaaaagcgagactccctctcaaaaaaaaatttattggcactgcttggcatctgctatgaatacatgaagttcatgggtcagctatagatctgggcacgttatacacagaatttgggtctccctttctctggatttctccttttctggatttcttttctcattttccagcagctgtggttnccctaaactcggtcctctgtttctttacggcagtaagatttgggaacttttaggttttacctgcctctcagacaaaataaaaaataattttcatcttgatgctactcctttcttccagatgtagacacctctctaatttccagttgctttttattgctctccagagtctaaagattatcattgttttctgtgggagagttggtctgataaaaactactcccccaaaactggaagctggaagcttgtaattatgaatagactttgagtagtattcttctttggaaaaggattttaactactccctatgtacttctttatttcctgtttttc

SEQ ID NO: 427 - DNA, 661 bp, Homo sapiens
  FLJ10706
  misc_feature [331]..[331]: Chromosome 1, SNP identification no. = rs10919252
  misc_feature [331]..[331]: allele = g, in linkage disequilibrium with rs3177980, respectively
  misc_feature [331]..[331]: n is a, t, c or g
ttgtctgcaaagcagaagatatgtataactattttgaaaaagtttgtaaagacttggaaataatacatgcaaaacaggatagtgctgggtttaagagggtgctcagtaaatgctaggagttatttctgactagggtttttgcctcaagtccaagtcttttcctgccctagagtggttggccaggaaccagaggtactacacctacctcttagccttcttttcgtagccccacctattagccctctaagagcacggggagcttgcttgcttacaaaagaattttctactccagatatcttagaagaagtgggactgggagggaaagggtcanatgtcataagactttaagaaagtcactttcctttttttttttttttttttttttttaaatagagacagggtctggttatgttgcccaggctggtctcaaacttgaactcagacgatcctcctgcctcggcgtcccaaagtgctgggattagaggtgtgagctattgagctcagctgtcactttccttttaacctcaattttcttatttatacaacaggaataaaattattttcccaaggtggttatgaaattttaacttttaaaataatataactcagaatgaattagctatgaggtctagaagcagtgttctaaattagataaattata

SEQ ID NO: 428 - DNA, 661 bp, Homo sapiens
  PACE-1
  misc_feature [331]..[331]: Chromosome 1, SNP identification no. = rs1062976
  misc_feature [331]..[331]: allele = t, in linkage disequilibrium with rs3177980, respectively
  misc_feature [331]..[331]: n is a, t, c or g
tgactggagtgaacctgaggagcctgaaaatcaaactgtcaacatacagatttggcctagagaaccttgtgatgatgtcaagtcccagtgcactaccttggatgtggaagagtcatcttgggatgactgcgagcccagcagcttagatactaaagtaaacccaggaggtggaatcactgctacaaaacctgttacctcaggggagcagaagcctattcctgctttgctttcactcactgaagagtctatgccttggaaatcaagcttaccccaaaagattagccttgtacaaaggggggatgacgcagaccaaatcgagccgccaaaagtntcatcacaagaaaggccccttaaggttccatcagaacttggtttaggagaggaattcaccattcaagtaaaaaagaagccagtaaaagatcctgagatggattggtttgctgatatgatcccagaaattaagccttctgctgcttttcttatattacctgaactgaggacagaaatggtcccaaaaaaggatgatgtctccccagtgatgcagttttcctcaaaatttgctgcagcagaaattactgaggtgagtacttttatggagtaaactgtgctactagctttaggatttccctcataggtcctagttgcagtatcccatttataa

SEQ ID NO: 429 - DNA, 661 bp, Homo sapiens
  PACE-1
  misc_feature [331]..[331]: Chromosome 1, SNP identification no. = rs10489172
  misc_feature [331]..[331]: allele = a, in linkage disequilibrium with rs3177980, respectively
  misc_feature [331]..[331]: n is a, t, c or g
ctttactttgagacttttgttgccttagtgcagcatcttccaaattgtaccaagaatgatagttttgaaagatgttaatgggcgtgttgtgaaaaagagttctgtggttaaataagtttggggaaatgagagcaaagtcattaacacattgcacaggatctctcagtgccttaactactacacttagggaaatttcttaaagtgaggttaataagttgagttaggcaaacttatttgagcctgcaagactttttcaggcatatgtaattaacaaacatcccaaggataacactgcctggcttagagcatttctatatttatgtgaatatantgtatgtttggatatttaataaggattgaatgcactagttattacttacatgcttccactgagttaataatgtaagtattatgtaattatttggataacatgtgacatcgttgatcttgagtaatgttctgctgggatctcttttgtttagtatgcatggatatttccaagtaattagacctatactactacacttccttaatgctatccttcccataagtgtagttcttacctttaaccagtattttatgagaataattattttccctacaggcgatccattttctcagcctattaaatttcccataaatggactctcagatgtaaaaa

SEQ ID NO: 430 - DNA, 661 bp, Homo sapiens
  PACE-1
  misc_feature [331]..[331]: Chromosome 1, SNP identification no. = rs17603022
  misc_feature [331]..[331]: allele = a, in linkage disequilibrium with rs3177980, respectively
  misc_feature [331]..[331]: n is a, t, c or g
ttaacaacagaaactgcatcatttggtcctccaaaaaccccccactgccacttatccaaggcacaagagcaggcagcagtgttccggaagcagctggcgtcaccacaccagatgccctcacctgaagaagtcatgagatagtaaggtgcagagcgctggccgacattttggaatgggattcagcaaagttgagtgcaaggtctgttgaaagctggagagaacatccgctgaaactgaaatccagagctacagttagtttccaatgccttctccctcttttcaggacctctatagctggagactgccgagagcaaaaaccaacctgtaaaancccaaacaaacaaagccctggctgttgctaaacagcttcctgcttgccttaggcaaaactcattggcaggtgtagaaagttgtcctgccaccaccatcaaaccccaccccaggtgccattcccttctataccctctcatttcctgattatccatttaacccagctcaggcccaaagaagaagggctaacagtgataggtttgagggtctttctcaacaggggttcctcatccacagaacagttatatgaatgattatatttacaattcttccaaggatagtaaataattgctaccattctaaatacatagaatagttagttcattataca

SEQ ID NO: 431 - DNA, 661 bp, Homo sapiens
  PACE-1
  misc_feature [331]..[331]: Chromosome 1, SNP identification no. = rs12089057
  misc_feature [331]..[331]: allele = a, in linkage disequilibrium with rs3177980, respectively
  misc_feature [331]..[331]: n is a, t, c or g
tgaatgaagttagataaaaagaaaaatggaatggaagggcttctgttatctccccctgcctcatgtggcaggttaataaacacattaaagccagtgcacacagtcatctcccgatttctatgggagtcaggggatatacatgttcttaaacatacatttacaagtctgtataatctatattatttgcttccaatgcctttaaagataaaatatatctttgctcacataggttattttatttattttcttctctaaattctttctcacccacattctatcacgaacccagatctacttcatctgaaatcttgttagtaggcattaaaaaaantctgcctgaagaagaggaaaatggaatgataaggaccaccagaaatatcccacagactggccaggtgcagtggctcacgcctgtaatcccagcactttgggaggtcgaggcaggcagatcatgaggtcaggagatcgagaccatcctggttaacacggtgaaaccgcgtctctacgaaaaatacaaaatattagccgggcatggtggcgggcgcctgtagtcccagctactcgggaggctgagacaggagaatggcgtgaacccgggaggtggagcttgcagtgagccgagatcacaccactgcactccagcctaggcgacagagtgaga

SEQ ID NO: 432 - DNA, 661 bp, Homo sapiens
  misc_feature [331]..[331]: Chromosome 1, SNP identification no. = rs1321999
  misc_feature [331]..[331]: allele = a, g
  misc_feature [331]..[331]: n is a, t, c or g
atcttttcattgttcacatgtctttctgcacaaacatctcactgatttatatagccccagtgctcagctcatcagagatgatcagtaaatatttgctgaaatatttcagctaaaattgcagaactaaaagaaattgttcttttagctcactaaaaatcaacttatcagccatttgaaaaaataagaaatgtaattactaagttaagaggcagagctctgagtgggaatatgggaatattgaaatctctgtaatagctcttttattatagtcaaattagcttctcaccccttgaacaggtggtgactatttctaactctgtgcctttactgnagccattctcctcccacaaatgtcctccccactactctgcagttttctaaattctacccatcatcaaggccaagtcctatctactccataaaggagccctctctaacctacccatcccatctctaactctactgtgctaagcctcacagtggcagtttcctgactttattgatattgcctgtacactctgtctgtgaaggaataaaagcatagttaaatgtttacctagtaataaagcaaaagtctatatacattattccatttttaatcttcaaaaagtcaagtgctttgataagtgaactgtgttttggagaagtagtacactgattt

SEQ ID NO: 433 - DNA, 661 bp, Homo sapiens
  misc_feature [331]..[331]: Chromosome 1, SNP identification no. = rs10911755
  misc_feature [331]..[331]: allele = c, in linkage disequilibrium with rs1321999, respectively
  misc_feature [331]..[331]: n is a, t, c or g
atcttggaaagtgaatgaataaattaaaagaagaagcctggctggtctatagttgccagatttagcaaataaaaacacaagatgaccaataaatacttcatgggacatactgatgttgaaatgttactcaatgtttatgtggaattcagatcttactgagtattctgtgttttatctggcagccctaaatggaaccccactatggaatgctatacccaccctaagaagtctcccaggactttatacatgagagaactaaaccaccatcatatttttctgtcgcttacaaccaaatagaattcaacaacttcaaagcagaaaaagaggccancctatgtcttctcatactaaatctcatgattgtaacatgttatcacaatgcctctttggtgaaatgactatagatctgccaaattcttcagggtcaccagtaattgcaatatgttgtatttcatatactctttcattttttaaagaactttcatatgtttgagtttctttactattttcaatgatctcacttcttaattttgcagatgaagtttagagatttgcctaagtttatttaactagtaagcagttggtgtggggcttgaatttggaacttctaactctgagtttgctggtcttcctgctagtccacagcttcccctcttaaatt

SEQ ID NO: 434 - DNA, 661 bp, Homo sapiens
  misc_feature [331]..[331]: Chromosome 1, SNP identification no. = rs11586588
  misc_feature [331]..[331]: allele = a, in linkage disequilibrium with rs1321999, respectively
  misc_feature [331]..[331]: n is a, t, c or g
gtccttcatatgttattattatatgagctttataataatatataaaggaataaaataaataaggttctggttctgccattgatttactgcatgatcagtgtgggctgggagtagggtgaccaaccatccctcctttgcctaggactgagaagtttccagggatgtgggacttccagttttaaagccagggtgagctgttcagctgagctcaagggagtagccatggaccaggcaggggtgagtttttttggtggcccaagccaagtgtatattgcaaaaatatagtgagcaaaatagtgggtcaagaaaagggtcagaggagagttaaggngcaaagctgaagttcacagccacccaaagttttagacaatgaagagtgtttctgcaaggagccaaatgaaattagaacaagctgggcccattctaggtgaataatgaggtatggttctcccaggagttctagaatagtcagttggctactgtaagggtcttctcattccgttccctctgctgcagggaccacctgctccaggacttacagagccaatagagaaagtcagcactttccttcagggaagtagattattttcatcgtatgcaagggataaagtaaacattggggtttaacaatgaacttttgtttcttattttcatttttgaa

SEQ ID NO: 435 - DNA, 661 bp, Homo sapiens
  misc_feature [331]..[331]: Chromosome 1, SNP identification no. = rs11583193
  misc_feature [331]..[331]: allele = a, in linkage disequilibrium with rs1321999, respectively
  misc_feature [331]..[331]: n is a, t, c or g
gtcactttccaaaagcatttgacttaagaggggaaaaaaaggctgtattctgattttataatctagccagttattcattcaccagaaatgtgttcttttccagtgatgcaaggcttgcttactttatcaagttattccattactgccttggaatgactggaggtgggatggagtactatggaaaacaaagcaaaaaaacatgttttcaaactctcttcaactcatttaaacgttccatttagtcgaacaggcatttgtttggatattcctttccaagtcttgagatcatttaagtgcctatactctttggaaattctcctccatcttttcnttttcatttagaattaagttaaattctactgtcatttattgttcaccctctgcataccaaacttggcatctctgctgattttctgtttccgtaggaatgaaactgcccttgagaaaatatcaccttcaaaccttatgttcatggaaggcttagatcccatacttacttagacctcttgggctcaagatcacatagattttttttttcctcagtaagtagttcattctagaggtggataatatagaattgcatgttttaaatgatgaaatatgaccaactccagacttactaagaaaaaattttgacatggataatctcaaactcaaactg

SEQ ID NO: 436 - DNA, 661 bp, Homo sapiens
  misc_feature [331]..[331]: Chromosome 1, SNP identification no. = rs12402607
  misc_feature [331]..[331]: allele = g, in linkage disequilibrium with rs1321999, respectively
  misc_feature [331]..[331]: n is a, t, c or g
taggaagacaacagtgatcgagaatgaaaaatctttacctttacgaaactctagttcggaagagagacaataaggaaatacagaaacaccggataattacaaactgtgataaatgccatgaaagaaataaaaaaaaggatgatgagatagagctaaagaatggtaattagtcagccagtaagaagctgggggaagaacattccaggcaagtgcaaagcctgcaagtgtgaaagggtgtggtgggccaagtaacaggaaccccaggctgtgaagagattaagttttattctaagagcaagagaagccattcatgcattttaagcaaaggaancaacagatccagatttacattttcataatatcattctagctgttgaatggagatcatgaattagagagaaagtgacaagagagagactagctaggagactattgcagttgtccaagaaaaataaaagtgtcttaaataataatagttaatgcatagaaacttttttttttttttttgagatggaacttcgctttgtcacctaggctggagtgcagtggtgtgatctcggctcactgcaacccccacctcctgggttcaagtgattctcctgcctcagcctcccaagtagctgggactacaggtgcctgctatcctgcccggctgattttt

SEQ ID NO: 437 - DNA, 661 bp, Homo sapiens
  misc_feature [331]..[331]: Chromosome 1, SNP identification no. = rs12048982
  misc_feature [331]..[331]: allele = g, in linkage disequilibrium with rs1321999, respectively
  misc_feature [331]..[331]: n is a, t, c or g
taggagagtgtttagtgggaaaaattaacaattgaattgaataccatggatcaatgcaatctagttgcctttgagagatagcttgttctgttttttcaatttccctttttgctgcaggggttaaatacctgggagaatccagggctgtattgccctttaagatagaaaacaggttttgcaacttatctgtagacatgtccaaggtggggtgaagccagttaatatcgcctagcaatttctgataatcatttaaggtgtataagttgctagtatttaatttaaacttttgaggtcttactgaccaggaagttagtatgtatccaagaaattnccaaggagaagacatctgtactttttcaggtgctatgattaaacatcttaactgtgtattttttacgacagaggtatatagacttaaaaacatttgctctgttggggctggtagtaaaatatcatctataaaatgaataaccttgcaatcaggaaattcttttctactggggagcaaagcttgatttacttgatacctgcacatggtaggactattcagcgttccttgaggaagcacttgctaatgaaattggcaagctggcgtttcattattgatagctggtattgtaaacacaaatttttctctgtcctgctttgcaagtgaaatagt

SEQ ID NO: 438 - DNA, 661 bp, Homo sapiens
  misc_feature [331]..[331]: Chromosome 1, SNP identification no. = rs12046138
  misc_feature [331]..[331]: allele = a, in linkage disequilibrium with rs1321999, respectively
  misc_feature [331]..[331]: n is a, t, c or g
ttaactgtgtattttttacgacagaggtatatagacttaaaaacatttgctctgttggggctggtagtaaaatatcatctataaaatgaataaccttgcaatcaggaaattcttttctactggggagcaaagcttgatttacttgatacctgcacatggtaggactattcagcgttccttgaggaagcacttgctaatgaaattggcaagctggcgtttcattattgatagctggtattgtaaacacaaatttttctctgtcctgctttgcaagtgaaatagtataaaagcagtcttttaaattaataacaattataggccaatcttgagnaattgctgtggaggagggaaggccctgttgaaggggccccataggttgtaaattagcattaatagcatgtaagtcatgcaaaagtctccatataccagactttttgggaatgatgaaaatgggcaaattccaagggctgtttgatgattctatatgacctgtttttaattgctcctcaactaattcttggcctccttgtaatttctccccctttaaaggttactgttctacttaaattggattttgagagagccacgttaggggtaggagatacataacagtggccattattagaaagaggtcttttaaattcttaagttttacttatat

SEQ ID NO: 439 - DNA, 661 bp, Homo sapiens
  DBCCR1L
  misc_feature [331]..[331]: Chromosome 1, SNP identification no. = rs1185693
  misc_feature [331]..[331]: allele = c, in linkage disequilibrium with rs1501501, respectively
  misc_feature [331]..[331]: n is a, t, c or g
tatttttatgatttgggctaaaaagaaaaaatggctaaggggaaaacttaaggtcattgagatgaccaattaaaatattaaagctatagtaaagttagacatattaatttctgaaaatggaaacaagacacaaatacatgcatacattttcttcattttatgtccctttacaatagtgaatgagaattatacctcattataaaaatatgaatactactcctgaagctcagggctggcttggtacataattgttagtgaggccaaataatttgtgctcactgaaagtctgtgctgccacaaatgctaagaattttgcacagatcgtcggtgnttttttgttttgtttcgttttgttttgttttgttttggtggagggaaaggtcaaggaagcaaaatattgacatagtgagaaactaggacaacacacgtaaattttaaaaaacaatttaagaaaacagacaagaatataaagctgcttttataatgggtgcatgaatagtcaggcaacatgatatcatggggtatagggagagatgaggctcctgcaggagtttagacttcagcacttcagctctagcccttaatctatcacttatcagtgtaaccttgaagaagtcatctagtatttttgaggctcatatttctcaatggtaaaaaatat

SEQ ID NO: 440 - DNA, 661 bp, Homo sapiens
  DBCCR1L
  misc_feature [331]..[331]: Chromosome 1, SNP identification no. = rs2490271
  misc_feature [331]..[331]: allele = a, in linkage disequilibrium with rs1501501, respectively
  misc_feature [331]..[331]: n is a, t, c or g
ttttatgatggtgttttagtaatttttctcttttttttttttttttgcttcactgtgtggaaagtccaggctccttcaacatgttagcaaaaaataacaaaacaatatcaataataataacaaagcttatttgagtattcagaatgtgtttgtcattttaattgagaaaaatctgatagtggaagaaatctattggctgctcaatctacaaaactgaaaatgtaaaataaatttatttggggaagaaaacccataattttctatttttttttttttttcagttttccaactggttttctaaacccaaagattttcatactggggttgtacnctacactgcccttgggcaagctttcttcttttttccttctattttacaacccaacccacccccacctcatgtattttttcttaaggtggagaaaataatggaaatacctacaaaacagttctctcgagtagtcagaattaatttgatagttcaagaaacccttaatagttcttcacctgtcctttatatattaaggtctgggaccttaagaagaagcaatgtttttaatgcatttctgcaactgccatcttccatgttttattaagattatacatttcttcttctaactctctacccttcccatttcttcctctaaccttggtccagttt

SEQ ID NO: 441 - DNA, 661 bp, Homo sapiens
  misc_feature [331]..[331]: Chromosome 1, SNP identification no. = rs814944
  misc_feature [331]..[331]: allele = a, in linkage disequilibrium with rs1501501, respectively
  misc_feature [331]..[331]: n is a, t, c or g
ccctgagatatttacttttacaggggttgaaaaggctttgaggaattaaacagagtgacattgaaatttcctcttttctgtttgctaatttcactgattaatttgatcagctatcccaaggcatttactgacctgtctagttcaactttattttttaaattatatttgaggaacttaatatgtgagaattattttggaaaaatagcatgtataaaaagaaaataacagagtataggcgtcagagaatcaggtttgaaaaatgattcttccagatatcagctgtgtgaccttgtcccaagcatttaactcttctgtgctcagtagtgagggnttcacaataaataaaataataattgagatatataatgaatccttataaggactatgtgtaatttattgtgataattctttgaagttatgctttcatggtcaaggagcaaaactttagtaatttgaagagtcagaaaaagctagagaggatgccgaagtacttggaaattagagtctaaagaactgggagaagagacctaagccataggaagatggagcagcagcaaggaccataatggaaacaggcatccaggcagtgcggaagagcaggaacccaaaggggctgattttccctgagacatagaccattgcctcaagattttaaagtttt

SEQ ID NO: 442 - DNA, 661 bp, Homo sapiens
  misc_feature [331]..[331]: Chromosome 1, SNP identification no. = rs7519248
  misc_feature [331]..[331]: allele = c, in linkage disequilibrium with rs1501501, respectively
  misc_feature [331]..[331]: n is a, t, c or g
agaacatgcagtgtttggttttctgttcctgtgttagtttgctgagaatgatggttcctagctccatccatttccctgcaaaagacatgtactcatccttttttatggctgtatagtattccacggtgtatatttgccacattttctttatccagtcatcattcatgggcgtttgagttggtcttttctattgtgaacagtgctgcaataaacatacatgtgcatttgtctttatagtagaatgatttataatcctttgggtatataacagtaatgggattgctgggtcaaatggtatttctggttccagatcattgaggaattgccacgntgtctttctcaatggttgaactaattgacactcccaccaacagtgtaaaaacttttctatttgtccatgtcctgtccagcatctgttgtttcctgactttttaatgatcaccattctaactggcatgagatagtatctcactgtggttctgatttgcatttctctaatgaccattgatgatgaacttttgttcatgtgtttgttggccgcataaatgtcttcttttgagaagtgtctgttcatatcccttgcccactttttgatagggttgttttttttttcttgtaaatctgtttaagttccttgtagattctgtatattagccctttg

SEQ ID NO: 443 - DNA, 661 bp, Homo sapiens
  misc_feature [331]..[331]: Chromosome 1, SNP identification no. = rs814905
  misc_feature [331]..[331]: allele = c, in linkage disequilibrium with rs1501501, respectively
  misc_feature [331]..[331]: n is a, t, c or g
gtgatttatttacatgtacacttacgtttattacaccaagaagttcaaaacctacttgaagtggcttacaagttttttaaggtagaaccaccaaaattaacataacaagagtctgtttgataataatggatatagatgtatcagaaacataaaacaagttagttagttagcttatgttcccaatattatagtgatgtgatctttttaaattagaaacctattgagaacactgatagctttaaataaaatttttaagcacataaagataattttttcacatggtccaaatcacttctgaggattattttatgtggcagatatttttacatanatatttgaacagttgtccagagtagataatagattattggagaaaaatgaatcaagtttcaaaattttattatgtcccatgtcccattcctctacctaccatacactgtccaatacacacacacacacacacacacacacacgtgcatgtacacacatacatcatggttgaaatatacttcttaattttcatgtctagcttttaatagctttaaaaagagaatatactttgcaaaattataatttaaaaatcaaaggatagcctgcaaagctttcagaaagtaaatatgagagaaatatctggctcctgtacttagctaagttgccaaat

SEQ ID NO: 444 - DNA, 661 bp, Homo sapiens
  misc_feature [331]..[331]: Chromosome 1, SNP identification no. = rs17370268
  misc_feature [331]..[331]: allele = t, in linkage disequilibrium with rs1501501, respectively
  misc_feature [331]..[331]: n is a, t, c or g
ggagacaacactaggggaatggtgctaaaccattagaaaccacctccaaaatccaaacacctcgcaccaggcccctccttcaatattgggaattagaattcaaaatgagattggggtggaaacacagtgattaaatgtcatcacccatttcctaaaaagcaaactcagatgagcccatgactgttcctatggcttacacataagtgatcctaagaaaaatgggtaaggatatagggaaaactgaacaagaaagaagttgggcaagtgctggattccaaacaaagcccctttttcctgctggaaaactgtgaaatataagggattcattggntaaaggatactcaggagaaaccaaaactccttggtactttgaagcccagggacaggccctgaagatgctcaggttgtagaaacaaaagcacaccaaagcagaggaataaatgctctgaaagttaagcgtgattggagggtattttggtggggcatggacaatgtcagcagaaatcatttatagcttttcacatagctgatagtaatggtattccatgttgtatcgaatgtcattgctgacaatatacatttttaaaaaattccagattgtggggttagtagtttttagaagattctactgtcattttcacaaagttccgagttatagaaa

SEQ ID NO: 445 - DNA, 661 bp, Homo sapiens
  misc_feature [331]..[331]: Chromosome 1, SNP identification no. = rs755805
  misc_feature [331]..[331]: allele = c, in linkage disequilibrium with rs1501501, respectively
  misc_feature [331]..[331]: n is a, t, c or g
aatcgcacaaagacatgatagtaaagcagctgaaagccaaagagaaataagccaaagattgtaactcatagtgtacggaacaacgtgattaaaaacagctggcttcttagaaaaagaaaaaaagcaggacagtggaattacatatttaaaaggtttaaagataatcaattcaaccaataattctttatccagcagaaatatcctaggattcttcaagtaaaaaggtgaaataaaattcttctcagacgaataaaatactcagcaaatatgtttccagcagactttccccccacaagaaatactaaaggaaggactaataataaaagaaaanggatcagatgtagtaactgatctacagggacaatcaatgccagaaatagtaatattttggcaaatatattatatgtggactacatgtgtatgtgtacaattttttcagtcttctattaatttagtaaaaagaatcataatattgacccaatcaataattatatcactaaattcctgggtttatgaagaatttaggtgcattatacatgtatataagagcaaaaagaaggggaatagaataatactagtgtgtagttgctatgttttataaaaaattgtattaaagatgcttattgtaattttagtgcaacaaaaaataactcataaaaac

SEQ ID NO: 446 - DNA, 661 bp, Homo sapiens
  misc_feature [331]..[331]: Chromosome 1, SNP identification no. = rs814958
  misc_feature [331]..[331]: allele = c, in linkage disequilibrium with rs1501501, respectively
  misc_feature [331]..[331]: n is a, t, c or g
gagtaatttgctagagaccgaagatgtagggatcggcagctacagatatattccttattcacatggagtttgctgtcaaatgaagaaacaggagaaacgacttaataattgcatttctacagtaaagatttcctggcctggcgcagtggttcacgtctgtaatcctagcacttcgggaggctgaggcaggtggatcacatgaagtcaggagtttgagatcagcctggcccgtctctactaaaaatacagaaattaactggatgtggtggcacatgcctgcaattccagcacgcatgaggctgaagctcaaggatcgcttgaacccagtagnagaggctggagtccactaagattctgatatgatattctcacttatttgcctattcattcatcttgttactatcctgactagaataagatatctgtaaaagcaggagccttgtctgttttggtcaccactatatctccaacataaataataatgcttagtatagagattagtacacactagtaaatatttttttgaatgagaggagtctcactctgttgcccaggctgcagtgaagtagcactgtgatcagtgatctttcattttttttaataaattgaaggtcgtggcaaccctgcatctagcataaggcttcactttttcaacagtatg

SEQ ID NO: 447 - DNA, 661 bp, Homo sapiens
  misc_feature [331]..[331]: Chromosome 1, SNP identification no. = rs17370393
  misc_feature [331]..[331]: allele = c, in linkage disequilibrium with rs1501501, respectively
  misc_feature [331]..[331]: n is a, t, c or g
aaacagagtaagaagacccatgatggtaaacagaaaaatgatcattgtatttgatttgctttcctggtttcagaatggtgtggtttttattgttgttatgttcctccaaactacacaggtatgacttctttgcttcttttttttggtttcagtaatgtagacaagtgaaatgctggtgaatttccccatgcttaacaaaagcagagttattgctagacatggagactctccaagattttagcatgctgtagtacactttttttctccatgaaggtgtaaatctttaaaccggccacagagtgcatctgtatttgtattatttatttcaaanctatcaaacaatttttctctttatttctaaaacttatgatcttcttataaatggttgtcagacaattgtatgctttcatcagtagaaagtgcctttatttctttcttcataaatgttacacactgcccaaaacaattagagtacaggataattgccaaaagaaagatctgttaaagagaatatcaagcatgattttttaattttctcctgtcatattcttactttattcctccataacttgttgaattagaaatgctgaagatattttaaaaagtattattttgtacgtaagtgaaattaagttcataaagactgtacatttttgtccat

SEQ ID NO: 448 - DNA, 661 bp, Homo sapiens
  misc_feature [331]..[331]: Chromosome 1, SNP identification no. = rs12072620
  misc_feature [331]..[331]: allele = t, in linkage disequilibrium with rs1501501, respectively
  misc_feature [331]..[331]: n is a, t, c or g
cctctattattacagttctcaggagacagctaggtgttaaaaatggcctggcacctacctccttccctctctctcttacttcctcactagccatgtgatctctgcatgctggcccccttaggtatttgccatgagtgaaagcagcttgagcccctcaccagaagctaagcagatgcccatgccatgcttcctgaacagtctggtgaaccataaaccaaataaaattattttcttcataagttatccaaccttaagtattcctttatgacaaaaatggactaagacaggctgtataaaaattggtgttaatttatggttggattcatgacanattaagactattcattgcttctcacccacagaatgtgtacttcccttttaggatatatctaatgaggtactgctttattaattttgtttgtatatcttaccaatatcaaagaaatatcaaagtcatccccttaaaattattcaccacgtatttccatgtatgtatgagtttcttattgctgctgtaaaaaataacccccacttgaggcttaaaataatggaattttttaaattttatgtttctggaggggtcagaaatcataaatgggcctcactggactaaaatcaaggtgttggcagggttgcattattttctggaatccactctctt

SEQ ID NO: 449 - DNA, 661 bp, Homo sapiens
  misc_feature [331]..[331]: Chromosome 1, SNP identification no. = rs1501501
  misc_feature [331]..[331]: allele = t, c
  misc_feature [331]..[331]: n is a, t, c or g
ctttaatctactactttgattaaaatatattattgaaggcaaaacaatggtctaccaaatgtgttcatgtcctgatatctgaaacttgtgaaatagttaaattctatggcaagaggaattaaggtaacagatggaattacattgctaattaggtgactttaaaacagggagattaccctggattatctggtcattccaatctaaccacaggggtccttacatgtggaagatggagcagaagcatgatgtcagagtgatgcctatgttatcagaaagactccaccagcctttggaaagactctacttgccattgttggttttggagaaggangatggctaggaactaaagaatgctaccaactggaaaaggcaagagagtggattccagaaaataatgcaaccctgccaacaccttgattttagtccagtgaggcccatttatgatttctgacccctccagaaacataaaatttaaaaaattccattattttaagcctcaagtgggggttattttttacagcagcaataagaaactcatacatacatggaaatacgtggtgaataattttaaggggatgactttgatatttctttgatattggtaagatatacaaacaaaattaataaagcagtacctcattagatatatcctaaaagggaa

SEQ ID NO: 450 - DNA, 661 bp, Homo sapiens
  misc_feature [331]..[331]: Chromosome 1, SNP identification no. = rs17379109
  misc_feature [331]..[331]: allele = a, in linkage disequilibrium with rs1501501, respectively
  misc_feature [331]..[331]: n is a, t, c or g
tatcaacttcctggggaggctttccttaatcaaatatcctaaagtaattgttttaccccttattactcattatcatgtaaatatgcttatttcttttgtagcactttttcattcggagtttttctatttgtttacttctttactattttacctgccagaatatgagtgttatgatgaaacagattgtgtctgtgttgcacctgagtttctaatgcccataggattagaatcaggataatggtatggcacttaataaataattgttgaaagactaatataaattatggcttgtaatcatggaatcccaaagcagtctataaaatattatgtncatttgtagatgctggaatttgaagatctctgaaatatcttatcaagtatataaaaatctaattcaatagtataaatttatgcagcaaattttattgaatacttcatgcaagacttgtagtaaaacttccattctaagattattaaaaagaacaaaaataagcacaatatacacaaactagaaaaagcaaacttatcttctattatggggtaaattgatttgtatgacaactataaacaatagttacatatagatgaacacatttatattgctcatatatgtgtgttgctgtaatgagtagaatggcatattccaaatgactaaggttat

SEQ ID NO: 451 - DNA, 661 bp, Homo sapiens
  misc_feature [331]..[331]: Chromosome 1, SNP identification no. = rs1327872
  misc_feature [331]..[331]: allele = g, in linkage disequilibrium with rs1501501, respectively
  misc_feature [331]..[331]: n is a, t, c or g
aaaaaattggtatgtcatgaatgcataaaatatatgtagatgctagtctattttatcctttgctactataatatatacacaaatctattattaaaagttaaaatttatcaaaacataggcacagaaacacagaccgtacatggtgccattcacagtggagagaaatgtaaacacatgtaaaaatgcagtattaaatcataaatcataactgcataaaattaactgtagcatatattatgctactgtaataatttcatagcccctcctgttgctattgaggtaagttcaagtgtttggagtagctacttaaaatgccatgtcatactaatcntctaggcatgagcagttccagtaaattgtgtattgcagtaaaaaagggtctctcccaattctcgagtcttcttccgcctgtttagtgcaacattgtaaatctctaataaaccctgggaacccatatgaaatgccaccagtgatgctagaagtgctccaaagaagtagagaaaagtaatgacattataagaaaaagttgaattgcttgatctgtaccataacttgaagtctgctgctgtgattgcccactgtttcaaacagatgattcatcttgtaaacacaggatgtaaacttacaatatcattatcaaatatagtatagtactgtaaat

SEQ ID NO: 452 - DNA, 661 bp, Homo sapiens
  misc_feature [331]..[331]: Chromosome 1, SNP identification no. = rs10920748
  misc_feature [331]..[331]: allele = g, in linkage disequilibrium with rs1501501, respectively
  misc_feature [331]..[331]: n is a, t, c or g
ttatgcagttatgatttatgatttaatactgcatttttacatgtgtttacatttctctccactgtgaatggcaccatgtacggtctgtgtttctgtgcctatgttttgataaattttaacttttaataatagatttgtgtatatattatagtagcaaaggataaaatagactagcatctacatatattttatgcattcatgacataccaatttttttttctggtttttatctttttaaatatttccaggctatgtggtttgtctgcgagttttcattttaatctccaaaaaattttctaatgtatttattgagaaaatctataaataagtngacccatgcagttgaaacccgtgttgttcaagtatcaactgtagtacagtttctaggtctgtggataatactgaagtgcaataatctccctgggttttcaattcctaaattcaaatgaacttaacaatcttgcaataattatcagaaggataatgattcctaagtatcaattcatggtgagttttaaaagatacacagcccatgtatcacttggcaaattaattgctcattatcactcagtgggaaagaattcaactgttttgggagaatcacctttaaattatgtccacttgtaaattatcttcagtagaatgttatttaatgatgatc

SEQ ID NO: 453 - DNA, 661 bp, Homo sapiens
  misc_feature [331]..[331]: Chromosome 1, SNP identification no. = rs1576115
  misc_feature [331]..[331]: allele = t, in linkage disequilibrium with rs1501501, respectively
  misc_feature [331]..[331]: n is a, t, c or g
ttgtacacaattggttggaatgtagattgatgtaaacatagaaaacagtatgtaattttctaaagaatccaaaaataaagctctcatttgatccagcaatccctcttctgaatatgtaccaaaggaaatgaaatcacctcctcataaagatgactgcatttctatgttcactgcagccttattcacattagtcaagatatggaaatttaaaaaaaccctaaatttccttcaacgaataaatgaataaagaaaccatagtagtccatatatatatatatgggaatattattcagccttaaaaaagaaggttctgccatttacacaacagagntaaaactggaggacatgatactgagtgaaataagccagacgcagaaacatattgcatgatctcacgtatgtagaatcttgaacagaaaataataaaataaaataaaataaaacaaaacaaaaaaaatcaaatacacagacatggagaagaaaataatggtaaccaggaactgggggtgagctggaatggggagatgtaagtcagtttataaagcagcagatacataatatgagtaagtctaaggatctaatgtaaatgaaacctatagttaaaaaaaatcattctttatttgggattcctgctgaatgagtagattttagctgctcaacc

SEQ ID NO: 454 - DNA, 661 bp, Homo sapiens
  misc_feature [331]..[331]: Chromosome 1, SNP identification no. = rs10920753
  misc_feature [331]..[331]: allele = t, in linkage disequilibrium with rs1501501, respectively
  misc_feature [331]..[331]: n is a, t, c or g
gctgggattacaggtgtgagccactgctcccggcctgtaacgtaattttcaattaggaagtatgatgccttcaactttttatttcccagaattacattggctatttggagtcttttgtggttttgtgcaaattttaggataattttttctattcctgtgaagaatgccactcagattttaataggtattgcattgaacttgtatatagctatgagtagtatggaaatttttaacacttttgattcttctaattcgtgagcaaaaaatatttttttttcattattggtgtgtcttcttcagtttatttccatcaacatgttgtagtgttagnacaaatattttacctcttttactacatttattttaaagtattttattgcttttgttggcatcataaatgggatttagtccttgatctcatttttagctatgttgttgtttgcgaataaagatactgctgactgttatatgttgattttgtaacctgcactttattaaattcatttattggttctaacagggtttttttggtggaaattttgaatctttctctaggatcatgtcatctgaaaatagagacaattttaattatgtcaatctggttcagacatattttattcttcactctttatttgctgatctgttcaggctttccatttcc

SEQ ID NO: 455 - DNA, 661 bp, Homo sapiens
  misc_feature [331]..[331]: Chromosome 1, SNP identification no. = rs10920754
  misc_feature [331]..[331]: allele = c, in linkage disequilibrium with rs1501501, respectively
  misc_feature [331]..[331]: n is a, t, c or g
cagaattacattggctatttggagtcttttgtggttttgtgcaaattttaggataattttttctattcctgtgaagaatgccactcagattttaataggtattgcattgaacttgtatatagctatgagtagtatggaaatttttaacacttttgattcttctaattcgtgagcaaaaaatatttttttttcattattggtgtgtcttcttcagtttatttccatcaacatgttgtagtgttagtacaaatattttacctcttttactacatttattttaaagtattttattgcttttgttggcatcataaatgggatttagtccttgatntcatttttagctatgttgttgtttgcgaataaagatactgctgactgttatatgttgattttgtaacctgcactttattaaattcatttattggttctaacagggtttttttggtggaaattttgaatctttctctaggatcatgtcatctgaaaatagagacaattttaattatgtcaatctggttcagacatattttattcttcactctttatttgctgatctgttcaggctttccatttcctcctgatttaatcaggacaggttgtatttttatagaaatctattcatttcctctaggttatacaatttgttgacatgtaattattc

SEQ ID NO: 456 - DNA, 661 bp, Homo sapiens
  misc_feature [331]..[331]: Chromosome 1, SNP identification no. = rs10800949
  misc_feature [331]..[331]: allele = c, in linkage disequilibrium with rs1501501, respectively
  misc_feature [331]..[331]: n is a, t, c or g
tttctgaggtgaatgttgtagtgtctctgctttcttatttttcttatctttttttttcagttaatctagataagagtttatcgattttatttattcttgaaatgtgcttttttccctaataattacacaatttcaataggttagatggaaaataatagttgacaatatcccagttattcttaatgcattgatattaaaacaaactttatccacattccagaaaagttgaagaatttgtactgtaaactcacaggtatatgtttaaaaacttatggacatttaccagatggatataaaacaattaactattatgtttacccctttattatcnatgattatctatgagtagtgagattacgtttattattatactttacagtattttgtattctatactatactttccatggtggtgatgtttcttttatgcttcaaaataaaattttatttttaaatgtatacaaaacaagtcaaaatgagagaatttttattttaaaagtatttatttttgtggtaagaacatctaacatgagatccaccctcttaaattcttttaaaatgcacaatacagtattttaactgtagggacaatgttgcagtgtatctccagaatttatcatcttgcataattaagattttatgtccaatctgcctcattcca

SEQ ID NO: 457 - DNA, 661 bp, Homo sapiens
  misc_feature [331]..[331]: Chromosome 1, SNP identification no. = rs12038727
  misc_feature [331]..[331]: allele = a, in linkage disequilibrium with rs1501501, respectively
  misc_feature [331]..[331]: n is a, t, c or g
taaacatgatcacttaatcttacctgaaactaatttttgaagttgttactgtgaattaaaaaaggaatctcatttcttagtaaccaaagagtttgtgaagatttttcttaactcaattggacctcatatttctcacactgaacactttagaggtgaaataagacactatgagagggactattacccagaatgcaagggtgaggacattaccctcataaacagacctatacacattactcttggctttccagagagagcataattcatgtgtattaatgttgattccattgtagaaaccactgtctataagggatcatcagtgtgacagacntagccagatattacaactagatactgttttggaaaccatttttctaacactcatttcagaaaataatttgtacatcataatctttgctaagcctgtaaaaatttcactaggagaagagaaaagcaatataggagaaaacaaatgcttttcctaaacaggaaaagaaaacctgctattgcatctgtatctgtactgtcgttgattggcagatttttatcataggagtataactacacttttgctagaataatgtacattaggcagttagataagaaagtaaaagtccaggaataatttctgtattagtcagggctttctagagggcaggac

SEQ ID NO: 458 - DNA, 661 bp, Homo sapiens
  misc_feature [331]..[331]: Chromosome 1, SNP identification no. = rs10920759
  misc_feature [331]..[331]: allele = a, in linkage disequilibrium with rs1501501, respectively
  misc_feature [331]..[331]: n is a, t, c or g
gctgaggtaagactgattagaattattatttatggtttacctgaaatgtaaacattggaaacctgtttgaaactgaagaaaaagtaaagaaacacttttaaaaattgaactaccatactgactgctgtacccaaactttggtgaaaagccttccttggattacctgttggggcaaacaaagtttaaccatgcgaataggttccagttttgtcagaaaaataatttagatctacatatattttataaaatggtgagttttattgctatatcatgtctaaaatcaaagatcaaagttactggattatagtttgtgtgtgtatacatgtttagntgtatttatgtgcatgtatatgcatcatgctatgttgtgtctagcatgctaccaaattggagtataagtaaatgaacactcataagttaagctcaaatgcttttcaaattcatgtgaatttagtaacctttggtaaataaaatagctttacagtttttggtaaaataaaactaaaaatgtcttcataattgttagcatacttttttctgggcttactgattattttatatttgcctttgctggatattttaaggtgtgaggatttggcatgaagattataagattctaaaccaagccaaaaacaaaataatctttaggcttttttttttt

SEQ ID NO: 459 - DNA, 661 bp, Homo sapiens
  misc_feature [331]..[331]: Chromosome 1, SNP identification no. = rs17379742
  misc_feature [331]..[331]: allele = t, in linkage disequilibrium with rs1501501, respectively
  misc_feature [331]..[331]: n is a, t, c or g
ataactctaagagactttgccctcttttgccagagcatgtgcttaaagagatatgaggtgaggtgttttaaaataaaaatataaactctattacaatgtgtatagatatttatagtataaactatactataacttaaaattgttaaattcatattttataaacatacacatatgtataaacaggactctcttcaaaattgggaaaataatcagccaatataataaggttaaaagatacacttagtattttgaaactactgtaaatgggttaagtttgaagtttgggtgctagagaatgttgttacttctatgagactgtgaatgcatggancatgtcttaatgctgacacctactactgccacacaatttagataataatagcaaaaagaagataacttgcaaattcattatgcctgctcaaatattcttgtcagctttaggtttcaagactaatgatggctaggcacggtggctcacgcctgtattcctagcactttgggaggcctaggcgggtggatcgcctgaggtcaagagttcaagaacagcctggccagcatggtgaaaccccctctgttctaaaaatagaaaaattagccaggttgtggcaggcacctgtaatcccagctacttgggaagctgaggcaggagaattgcttgaac

SEQ ID NO: 460 - DNA, 661 bp, Homo sapiens
  misc_feature [331]..[331]: Chromosome 1, SNP identification no. = rs10920760
  misc_feature [331]..[331]: allele = a, in linkage disequilibrium with rs1501501, respectively
  misc_feature [331]..[331]: n is a, t, c or g
ctgtggtatttaaacatcaaggattatagccattgagaaagaaagttcaaactagaaccaagctaagtacagataaacaaaagaattgaagttcaaatactggttctgacgattagtaaacataaaatcttcagcaaattactttctctttgtagacctcattatcctcacctataaaacaggaataataagatttgtattagagaagtactgtgaaactcacatgagatatttatgaaaacattttcacaagtgcatatagatgcatgcttcttaaattctcttaaattctcaactttcctctgaccttcaccatcttatccatttgtcntagatatctgttaaatctacttcacaaatatctctcacatctcatctttttcttcgccatagtttagtttgagccttcattacttattttaaactgagaatgtaaactaacaacattatatacccacttctgggtatatatccaagagaaataaaattactatcttgaggagatatttgtacttccatattcactgcagcattatttacaatagccaagatatggaaacagccaatgtttccattgatggatatatttgtgtgtgtgggggggggtgggtgtgtgtatttatgcacatatgcatacatacatacatatagatgcacatgc

SEQ ID NO: 461 - DNA, 661 bp, Homo sapiens
  misc_feature [331]..[331]: Chromosome 1, SNP identification no. = rs2419670
  misc_feature [331]..[331]: allele = t, in linkage disequilibrium with rs1501501, respectively
  misc_feature [331]..[331]: n is a, t, c or g
aaaaggtaacatagaatggagtaaaatcagatcacaaataaacactatgcagcaaaggggaaagaaactttagagaagtcaagaagtcggaggatttgtctagggatttaggatctaagccactggtgacactagccacaacaatttcagtggatggatgagtgaagaaatcacatttcaatggtgaattgaaggtaataacagactcacagagaatagatgcttacgtcaggagactttaccttaatgagaaatagaagagatatttaataattagtattacaaatgggacatgaaattgagtgatgtgtgttcccccactttattcatnatttctctctccctgcctttccctcttctctctttctctctgtcaccctctcataagttagcaaaaacgtgcaaaaatatttattaagtaaaataaatcatatctagtgggaaaagggggaagttcaagagattctggaagaaagggataaatgatagagcaatatccctgaacaatttagaagataaaaattaacggtgaaattggccagtagagaaaactacccttggcttttttttttttttcttccttagcaatgctactaatctctcctacctcactctgcctgtaagcattgtttactttgttgaattctgttagtggaaagag

SEQ ID NO: 462 - DNA, 661 bp, Homo sapiens
  misc_feature [331]..[331]: Chromosome 1, SNP identification no. = rs10458403
  misc_feature [331]..[331]: allele = t, in linkage disequilibrium with rs1501501, respectively
  misc_feature [331]..[331]: n is a, t, c or g
cttaaagttccatgtggctggggaggcctcacaatcatggtagaaggcaaggaggagcaagtcacatcttatgtggaaggtgccagggccaaaaaagagagctttttcagggaaacttcttataaaaccatcagatctcatgagacttattcactattatgataacagcatgggaaaaacctgcccgcatgattcaattacttcccactgggtccctcctacaacatgtgggaattcaagatgatattagggtggggacacagagaaaccatatcattccatccctggcccctcccaaatcccatgtccttaacattttaaaaccaatcangccttcccagaagtcccccaaaagtcttaactcatttcagcattaactcaaaagtccacagtccaaagtcttatctgagacaaaggcaagtctcttttgcctatgagcctgtaaaaccaaaaccaagctagttacttccgaaatacaatgagggtacagacattgggtaaatagagccattccaaactggagaaattgaccaaaacaaagggaatgtaggccccatgcaagtccgaaatccagcagggcagtcgaatcttacagttccgaaatgatccccatcgactccacatcgcacatccatgtcattctgatacaagaggtaggttc

SEQ ID NO: 463 - DNA, 661 bp, Homo sapiens
  misc_feature [331]..[331]: Chromosome 1, SNP identification no. = rs720630
  misc_feature [331]..[331]: allele = g, in linkage disequilibrium with rs1501501, respectively
  misc_feature [331]..[331]: n is a, t, c or g
tgactgctcacctgtccttacatctgtgtctttgctatggcctcataatggatgtgttttcaccgccgctctgacgtaaggcttggtcatatggcttgcttcggcgatggcataagggcaaagtgagaggaggcatcaactcttaggtgtttcagctttccatgaaaaaaacacagcctgtgcagcctgatgatctaaggattaagacaggcatgtgaagcagagctgccccagctgcccattaatctagaagatacagtagaagacacaagtctgcatagcccatatgtcccccgggtcaggcctgtcctaactgagccctgctaacccntacattcattagaagaaacttttttttttaatatatcaagccttggggaggttttttacttggtgaagtgtcttacttggtattgataaaaatgttttctaaatcttatgttcataggataagcatgattaaattgtagtcaataaaacacactttcttttcataccttcaaatgtctggcaaaatttttaaagatgaaataaactgattacaaaaaaggatgtgtcataaaaatcaatgcacacttagaaaattaagtactttgtagtttaaaatagatttatttatcacaaatgcgttatatttttttctaaccaacatttaacagat

SEQ ID NO: 464 - DNA, 661 bp, Homo sapiens
  misc_feature [331]..[331]: Chromosome 1, SNP identification no. = rs658528
  misc_feature [331]..[331]: allele = a, in linkage disequilibrium with rs1501501, respectively
  misc_feature [331]..[331]: n is a, t, c or g
tattaagcttgtaagactttcactatgcctgtagatgacaggacaagaaagaaacccaaaatggaatcagatttcttcctttataatcacttaacatataatttagattaagtcattttaagtaaagaacaaatactattctgaaataaacaaagaagcaaggtcaaatttgatcatatgaattgataagacaatggatgaagttttgccattaagaatcctggtaagacctttttatgtatagaaatgccacaggtaaactaaaggtttgaatacaggaaagtgttatactggtcaattgactcaaatctgtgttaaaaattattaagangcctatccgtgcttccaactcatattgacaagccttactcttgatgtaaagaaaattaattcttatatacccgagtagttatactagtaatttttaagcaaaattatttgactgaatgataattggctacaaataaaaagacatagttcaattaaatcaattttgacttaataaaaataaggtacactatatacttgacatatggagtttgtgataaattatgggtcaagacattaatttaatatgttctattctttacctctgaggcaaatatcacatatagtagcatttaaaaaaaatggacatactgcataatatattaatattaga

SEQ ID NO: 465 - DNA, 661 bp, Homo sapiens
  KIAA0663
  misc_feature [331]..[331]: Chromosome 1, SNP identification no. = rs7552670
  misc_feature [331]..[331]: allele = c, in linkage disequilibrium with rs12408223, respectively
  misc_feature [331]..[331]: n is a, t, c or g
acttactttttcactaaggctgtacctcagttatatgattgtgtcagagaaaaaattttcttaactttagagaatgttcaaagccaaaagatacacctgactgttgacatatggacccatgacccatccactgactattttattgtgactgtacactgggtttctttggaaactgcgtcttttctcaataatggcaggatccccgattttagaaagtgggcagtgctttgtgttacaggtttggctaaagactgtttgataaccaatattttacaagaattaaatgaccagattggtctgtggctttctccaaatttccttatccctagcntcattgtttctgacaattcctctaatgtggtacatgcaatcaaagatggtggttttacccatgtgccatgcttcctgcattgtttaaatatggtcattcaggactttttctgcgagcacaaaagcattgagaatatgttagtggctgccaggaaaacttgtcatcattttagtcattcggtcaaggcccgtcagatactgcaagagttccaaaatgatcaccaacttccatggaagaatttgaagcaggacgaaactggccattggatttctactttttatatgttaaaatggctcttggagcattgctactcagttcaccatagtcttg

SEQ ID NO: 466 - DNA, 661 bp, Homo sapiens
  KIAA0663
  misc_feature [331]..[331]: Chromosome 1, SNP identification no. = rs7540041
  misc_feature [331]..[331]: allele = a, in linkage disequilibrium with rs12408223, respectively
  misc_feature [331]..[331]: n is a, t, c or g
ttgcccttggaagcaaaagcttcatgttcccttctgctgtagcagttgtggatgagtacttcaaagagaagtattcagagttctcaggaggtgatgaccctttaatttactggcagaggaagataagcatatggccggctttgacccaggttgccatccagtatctaagttgccccatgtgtagttggcaatctgaatgtatctttactaaaaatagccactttcatccaaaacagatcatgagcctggactttgacaatatagaacaactgatgtttctgaaaatgaacttgaaaaatgttaactacgattattctacgttggttctganctgggatcctgagcagaatgaagttgttcaaagcagtgaaaaagaaatactgccttaatttctttttctccatttaaaatgggcaactttttgctgtgttactgtatcttaatagctgtagttgttaaatataatcattatctttataaacacatctggggaaacctgaaatcacacaagggctgaaaattcctcagaggcaatataattttgataaaatgaagattaaagatttcatagctataactgtggcgctagcacttgaaaattttgcttataccaatgagagagaagatatttttaattaaaaaaaatatagtgcagcattga

SEQ ID NO: 467 - DNA, 661 bp, Homo sapiens
  KIAA0663
  misc_feature [331]..[331]: Chromosome 1, SNP identification no. = rs10494844
  misc_feature [331]..[331]: allele = g, in linkage disequilibrium with rs12408223, respectively
  misc_feature [331]..[331]: n is a, t, c or g
caaagcagtgaaaaagaaatactgccttaatttctttttctccatttaaaatgggcaactttttgctgtgttactgtatcttaatagctgtagttgttaaatataatcattatctttataaacacatctggggaaacctgaaatcacacaagggctgaaaattcctcagaggcaatataattttgataaaatgaagattaaagatttcatagctataactgtggcgctagcacttgaaaattttgcttataccaatgagagagaagatatttttaattaaaaaaaatatagtgcagcattgaaaggccttaggctttcttcctggtagatngaactagtaattggttttaagtaaaacttcccccaccatgggaaattttattgctctgaaatcaacgaaatgagaaaaaagtacactggctggcattcctcctgcccctgtttttctgtttccttaaaaaccctgatgcttaattacaacttggcaaaaagaaaacccgtgaaattgttttatatttggaaatttctaattgcctcctcatactggtcagctttataatttcaaattgttgagtgtgatagtgttaccctttagaattggatcttatataaaagggaaatattagaaaacaattaggaaaatatacttttagtctttgaa

SEQ ID NO: 468 - DNA, 661 bp, Homo sapiens
  KIAA0663
  misc_feature [331]..[331]: Chromosome 1, SNP identification no. = rs7532505
  misc_feature [331]..[331]: allele = t, in linkage disequilibrium with rs12408223, respectively
  misc_feature [331]..[331]: n is a, t, c or g
gttggccaggctggtctcgaacttctgaccttgtgatctgcctgcctcagcctttcaaagtgctgggattacaggtgtgagccaccgcgccctgccagaatcaagttttagtacaaagaaagcatttcccaagcaatgagtctcaaaggaaaaaaatagaagagcaatgtaattaaactttccttcaaagaaaggacagaaacgtatctgttacggtaaatttggaaagatcagtatttcatagtcccataatatgttttacatgatgtacttaaatgcaaatgtatgaagcagggatctgtggcaatccaaattcatccaccagaactcnatccttgtttttgtgacagtgggaacaccttctggaattgcaggtgcagatgctggctcatctaaatagaactcttggtcagccacaagctcatcacccagtgtatccaactctgcttctaggttgtcttcatctaattctgggccgccataactgcgactcagtgcttcttggatttcatttgcatcttccatcatgtccactagctggtcttgtaaattctcaatctggtcagttttcacttgcttgtctaccttcatttcctttgctcccagtttcatagcatcaaccgtggtcttggtatccttcaatgactggatggtgtaatta

SEQ ID NO: 469 - DNA, 661 bp, Homo sapiens
  KIAA0663
  misc_feature [331]..[331]: Chromosome 1, SNP identification no. = rs6685918
  misc_feature [331]..[331]: allele = g, in linkage disequilibrium with rs12408223, respectively
  misc_feature [331]..[331]: n is a, t, c or g
tctgcctcagcgtcccaagtagctgggagtaaagacatgtgccaccatacctggctaattttttaatttagtgtagaaactaggtctcattatgttgcccaggctggtcttgaactcctgggttcaagcagtcctcctgtctcggcctctcaaagtgctggcattacggatgtgagccaccatgcctggcctgttttgttttttttctacttttattgagtacttttttgtaagttctttttcttaagttagaatattttcttgagtatttttcaaaagtataagtacataggtgatatactttttgagaatttttgtatctaaaaacttntaagttctgagctatttgtgaaatgtagtttgaaattctaaacttaaaggtcataatctcctttacattctggatgaatagcattttgtcttttggcatttagagattcagatgagaagtctaataatgtcaagtctgattttctttcctttgttgtcaatctgatttttcctgaaagtttgtatgattttgtctttaccattggaattcaaaaattttaccatgtctgtgtatagcagagatgtctttaaagaaaagttctgcctggcatttgatgatcccctttaatgtaaagactcaagtccatcaaatttaaggaaatgttcttat

SEQ ID NO: 470 - DNA, 661 bp, Homo sapiens
  KIAA0663
  misc_feature [331]..[331]: Chromosome 1, SNP identification no. = rs7546400
  misc_feature [331]..[331]: allele = t, in linkage disequilibrium with rs12408223, respectively
  misc_feature [331]..[331]: n is a, t, c or g
atctgatttttcctgaaagtttgtatgattttgtctttaccattggaattcaaaaattttaccatgtctgtgtatagcagagatgtctttaaagaaaagttctgcctggcatttgatgatcccctttaatgtaaagactcaagtccatcaaatttaaggaaatgttcttatattgtttctttcataatctctacaaattccattcctttttaggatttctatttatagaaattgagttttctggaattattttcatttcatatacaatttccctcttagtgacatatgttggcatttttggtttggattcgtggagatgtcgtgtcagtantctcttgtaattcagttattatgtttttcatcagtgtttattctgttctttcctctactgaaatctatttttgaaggtaggggctggaaattagagtcttcatcttcgtcgtcgtcatcgccatcttcttcttttttttcttcattattatcattattttatatatttattttcttgagaaggcgtttttctgttgttgcccaggatggagtgcaatggcacaatcttggctcactgcaacctccacctcccgggttcaggtgattctcctgcctcagcctcccaagtagctgggattacaggcattcgccaccacgcccagctaatttt

SEQ ID NO: 471 - DNA, 661 bp, Homo sapiens
  KIAA0663
  misc_feature [331]..[331]: Chromosome 1, SNP identification no. = rs4951259
  misc_feature [331]..[331]: allele = t, in linkage disequilibrium with rs12408223, respectively
  misc_feature [331]..[331]: n is a, t, c or g
tcatcatggcataccattcttgcattaggaattattagtgggagatatgactgaatttgatttaattgatttcaagttgtagatcactatttctgaaacctgatcttctggtatgtacgtttgtggaaaccctttccatattctcgtatgtgcttttgttatatgcttttgtagaagcttgcttggacgttttagtgtggagatcagggtatgccatggactaggggagaaaatatttgttgttttgtggaatcactattatggaaagccccaaagactacttttgcgtcttgtttgtaattggtgtacacctctagtcgtcttcattaangtaagctagatcgatagaccttttcagaagtaattgttttcatcagttattctagctaaacagggttttctcacctagttatgattatatacttttggaataaaaatgcttgtgaaaatatttgaagtttttcatttagatgaaacattctactttatcatattttgttagcaagtattttgtgttagtaacctaagtcccattaataatctaaaatgtatgtagtcttttgagactttcaaattagtaggcaaaaatacatatatacatacatatatacatatatgtataatgtagatcaggctgggcgggatggctcacacctataat

SEQ ID NO: 472 - DNA, 661 bp, Homo sapiens
  KIAA0663
  misc_feature [331]..[331]: Chromosome 1, SNP identification no. = rs3753590
  misc_feature [331]..[331]: allele = g, in linkage disequilibrium with rs12408223, respectively
  misc_feature [331]..[331]: n is a, t, c or g
cccccacgcccggtgatattatgttttaaatgatgagttttgagcaaagctgtgataattttatcttacctatagcagtttgcacaacagtagcgttttatttcagatattaccgttgcataaagtatgcagtggagcacagttatattgtatatatgttaattatatttaaattctatttactttctgattttccatcaaaagctagagttacacaaggcgagatgtcagttttgaagatgaactgtaaaatacatttttaaagaggacctaacactcctacttgtctttttcaactctttttttcagcttgtgtcactcatgccagatnaaacgaagggtactgtcaagaaataggttataggaaataatttgttgctctcggtttgttcctgtcattccatgtccattgttttttaccttaccagtcctttcttactcatttgtgcttgtctaaattccaggagctcttgttatggatattttacctaggatgtatttcaatgctacaaatagagtgttctctatttgtttacagggtgacagctgcccattccgtcactgtgaagctgcaataggaaatgaaactgtttgcacattatggcaagaagggcgctgttttcgacaggtgtgcaggtttcggcacatggagattgatgta

SEQ ID NO: 473 - DNA, 661 bp, Homo sapiens
  KIAA0663
  misc_feature [331]..[331]: Chromosome 1, SNP identification no. = rs12403365
  misc_feature [331]..[331]: allele = t, in linkage disequilibrium with rs12408223, respectively
  misc_feature [331]..[331]: n is a, t, c or g
cagctcctatggagggtatggcagtgtctccaggagcatctcttcatttagagattctctaggatgtattcagagttgagatttattgcagcaatagagtaaagacactgtcagatcataagagaaaaagacactggaggaatctggaagaatccgtgtgcctgtttttttatgcccactccctttaggggtgacacagagcacactcttttcctagtcatgaaaatgcagcaatgcatgtgtggtattcctgcccagggaaatccattagagactcagcatccaggattttcattggtgctagccatataagcactctttaccaaacatntacccaaattccagactcccagaaggaaggcagatgttcagcattaaccatattgtttgtacaaacagtctaggcatactgagccttctcccttccccacttaccaattaacttggagcgtctaaaagccaaggtcccagatgctagccaagagcaagccttgcaagcaggcatttctaaggacagtagtctaagagctgctatgctaactcttttctgcactgaggcttattggctgtattgcttgaaagaactaaatacttatactttttacacataggtatttacctgcaaaataagatgtgtgcagaattgcttattgtagcaatt

SEQ ID NO: 474 - DNA, 661 bp, Homo sapiens
  KIAA0663
  misc_feature [331]..[331]: Chromosome 1, SNP identification no. = rs6673230
  misc_feature [331]..[331]: allele = c, in linkage disequilibrium with rs12408223, respectively
  misc_feature [331]..[331]: n is a, t, c or g
ttactttatttttactgctccttgtggagcagggccactctataggtagtgtgcccacagtagcctatacttttaaaaaatattatacttttagaaaatatcaataatattaaaattaataaataaatattgattaataataattaattctttttaaaaattatactttaaaaatattaataggtaattatgcatatgacataaacttagaacatagttttaaaaaactgattttgccaaatcacctttcagagatgtggagcaaatttacatttccattatgtgtttgagactgcctgattcttccacgtccctgaaaacagtgtataantgaattttatcactctctcaatatagtagattttgacctttgccctttttgatacatttaagcatctttttgtaatggttattgtttctctgtctctcttctccatattcttaaatttcaatgctggtgttttttcctggaattttaaaccataggctgtttatgatgattagagattcgacataatgcagttcatcggaggttagttagtttttgggagtacttctcatatcttttttcccccttttttgaactattaaaatgtatctagaaaagtgcaaaatcgtaatcttacaacttgaagaattttcatagagtgattatacttac

SEQ ID NO: 475 - DNA, 661 bp, Homo sapiens
  KIAA0663
  misc_feature [331]..[331]: Chromosome 1, SNP identification no. = rs10494847
  misc_feature [331]..[331]: allele = c, in linkage disequilibrium with rs12408223, respectively
  misc_feature [331]..[331]: n is a, t, c or g
tgaatgtgaaatgtgcagcacagaccttggaaaaaaggggtaaaggcaagtatttctatactgtgtattgctttaggttatcaaaattaccaaattcaacccaattgttgccagtaacttcctggcaacaattgggttgaatttcatttgccttctatccacaggtagatagtaatatttctgatatttttatacagaggcaaaacgagatgaattcttttctcagaatttaaaattgctatttaaaaagctttgtgtaaaactttctatggtgcatctttcctctggtattgaataaaaacaaggaatagaggaatggtaacaaatttangtggtattgtatctacatggtgaccacctgtagtgaccaccatgtgaccacaaattgcctttgaatcgttttcagtctctttttaaatgaattatttgtggtatttctagtactgaaggagttttgatattttattctgaattattccccatttaaaagagtctattctcactgcttatcagatattttctgccctttgtagctaaacccaaagtgaacgtgaagccatctgtggttaaagttgtgtcatcccccaaattggccccaaaacgtaaggcagtggagatgcacgctgctgtcattgccgctgtgaagccactcagctccagc

SEQ ID NO: 476 - DNA, 661 bp, Homo sapiens
  SNRPE
  misc_feature [331]..[331]: Chromosome 1, SNP identification no. = rs7520079
  misc_feature [331]..[331]: allele = t, in linkage disequilibrium with rs12408223, respectively
  misc_feature [331]..[331]: n is a, t, c or g
gtcttgggattacaggcatgagccacaacgcctggctgaaaattaacttttaaaaattattcgaaaaaaaaatattgagcgacaatgttagtatggagaggggggacaaaataaatgaaattagggagggtggggttatttgttgtgggttaggtgatacctgaatagagagctcagtggggttagttaaataaggcttctgggatagcaggctaccctaaatttttttttttaagttggggtccggctctgtcacccaggtgctctcagctcactgcaatcttgaactccttggctcaagtgatttttccacctcagcctctagtagctnggaactataggcatacaccaccaggtccagctaatttttaaatattttgctgggcaaggtggctcacgcctgtaatcctagcacttagggaggccgagcatgatgaatcactttagctccagagttcgagaccagcctgggcaacatgatgaaaccctgtttctaccaaaaatacaaaaagtagccaggcatggtggtgcgccctgtagttccagctacttggggggagctgaggcagaagaattgcttgaacccaggaggtccagctgcagtaagccgaggttgcaccactgcactctagcctggaagacaaagtgagatcctttctca

SEQ ID NO: 477 - DNA, 661 bp, Homo sapiens
  SNRPE
  misc_feature [331]..[331]: Chromosome 1, SNP identification no. = rs16852420
  misc_feature [331]..[331]: allele = a, in linkage disequilibrium with rs12408223, respectively
  misc_feature [331]..[331]: n is a, t, c or g
agctcactgcaacctccacctcctgggttcaagcgattctcctgcctcagcctcccaagtaactgggattacagggcatgccaccacacctggctaattttttgtattttagtagaagacggggtgtcaccgtgttgtccaggctggtctcgaatcctaagctcaggcattccacccaccttggcctcccaaagtgctgggattataggtgtgagccaccatacccagccgggttttttagatttaaagatgtcttgccaggacgggcaagcttagccttactgaggtcatattattcataaattatttaccaactgttgaattcccatgntagtatttatcctgtagaatagaatgttattaatacctgcagaagcctgggaaagtagaacagtttaattactgttggagttgatcaacgtgtctcaaaccgttctaccagtgaacaccagtgttcctgaagatgtttataaatttctcagaaaagtattgtcttaaataaccttaggaaattttgggtaaaacaggtttgtttattgtaggatggagtcttttttttttttttttttttttttttttttttttggagatgaattttgctcttgttgcccaggctggagtgcaatggtgccatcttggctcactgcaacctccgcctccc

SEQ ID NO: 478 - DNA, 661 bp, Homo sapiens
  misc_feature [331]..[331]: Chromosome 1, SNP identification no. = rs6673662
  misc_feature [331]..[331]: allele = g, in linkage disequilibrium with rs12408223, respectively
  misc_feature [331]..[331]: n is a, t, c or g
ggggaacttgtaagaaaatgctgatatattggatattgtccttgataagagtagtaaactgtcctctgactcacatttcacatgttttctactagcacccatgaaaccatgcggggaggggggcttgcttagcctgcaagtagggtaaaactaaggatacttaatggttctttacatcaccttacttgttttttgtttgtcccatccccatctctttttttcctcaaaatttttgttttcctttggatgatttttatgatttcattttatatctactgttaaacttattagctatactccattttttaaaagacttttacttgattacctngggattacagtatacatctttcttactacagtttactttcagtagctttttttgttttgttttgtttttgtttttgtttttgagatggagttttgcttttgtcgcccaggctggagtgcagtggcacgatccaactcactgcaacttctgcctcctgggttcaaacgattctcctgcctcagcctctggagtagctgggattacaggtgtccaccaccatgcccagctaatttttgtatttttggtagagatggggtttcaccatgttggctaggctggtcttgaactgctgaccccagatgatacacccaccttggcctcccaaagtgt

SEQ ID NO: 479 - DNA, 661 bp, Homo sapiens
  misc_feature [331]..[331]: Chromosome 1, SNP identification no. = rs16852507
  misc_feature [331]..[331]: allele = t, in linkage disequilibrium with rs12408223, respectively
  misc_feature [331]..[331]: n is a, t, c or g
tgagcctggcagtcaggcaggaggggaagtcatgcagagggggctgctgcaggaaatatgcccacctgggcaagtggcatcttgtgtccccatacccatcagaacctacatctttctgtagaacaggaagcacaagattgataccagctactcaaactgcaaaccatgccatagctaaaagtgtgacctcaattatcctggatcaagaaaataacaggtggccaaccctaaagtctgtccataacaaggggaaaagtccttgggacctgactcaggtctggggctgtaggaatcttttctggacactcccctttgacttgaatgcttttcnactcattgaacagtttatttatgaaccctataataagaacgaataagaaacatttaccaaataccagcaacatattgcaatattatgctagaacttacgggtgatacaaacaaattatgaaacctgtacttttctaagttatactttccaaaatgctttcatattcttgcaagattttatccttataacctctgcttatcctttccaggaagtcttcgtccactaaccttaccttgttatttatatatcagttttttctttttttgtagagatggggtttcgccatgttgctcctaatgactaatgaagccaatcatcttctcttgtgct

SEQ ID NO: 480 - DNA, 661 bp, Homo sapiens
  misc_feature [331]..[331]: Chromosome 1, SNP identification no. = rs1317456
  misc_feature [331]..[331]: allele = c, in linkage disequilibrium with rs12408223, respectively
  misc_feature [331]..[331]: n is a, t, c or g
catgcctggctaatttttgtattttaagtagagacagggtttcatcatgttggccaggctggtctcgaattcctggtctcaagtgatccacccatcttagcctcccaaaatgctgggattacaggtgtgagccactatgcccggcttcaattttgacttttttccccccatttttcatccctctcttaggaacagctgtaattcttgagttattaatgaatttgttttgtctgctattgctaccatctttttctctttatttcatcctttctcatctttttcccacagtttaggagatttcctcgttttgcctcctacatcattcattgantgcattttctgtgatgtccacgctctgctttactgtctttgcatcttttggttgtaatggctattttgatttccttgcagttcccccatatcgtacctaactcccttttcgtttctcttgtgctgtttgtattttattctgctgtccttttatctctcttattccctctttataactttttgctccctgtttgtggaggacatgacctcttacctcctagtgattatcaaacccagtagaaaatatagattttctttgactcaatcactgctaatttttggactacctgagcaccttgttggagctctagctgtttgacaagttgtgtgc

SEQ ID NO: 481 - DNA, 661 bp, Homo sapiens
  misc_feature [331]..[331]: Chromosome 1, SNP identification no. = rs12410049
  misc_feature [331]..[331]: allele = a, in linkage disequilibrium with rs12408223, respectively
  misc_feature [331]..[331]: n is a, t, c or g
tttgactcaatcactgctaatttttggactacctgagcaccttgttggagctctagctgtttgacaagttgtgtgcagagctactaaccctgttctctaggtctgttacatattcccctagagcagttttgacacactaagatgagatcttctaacttccaatgcatggttttctgaaccaataggtttggggagaatgtatctttctatcacttggtgaattgggggagcttcattagcataactttcctgtcttctctctacttccccactcttagcttcctggggagaggagtaagggttacctgagtggtgagtttaagaaaatggncctgggtaacctaatctcttcctccaggaagctggtttgcctgtagaaagtagaatcttctgatagttatcatccgtgaaggaagatatccagaggcaaacgttgcctctatagtacggaggcttgcatttcagatgtgtaacctcaaaaacctcagcacctgaaatgttgggctgtgaaccctggtaagtaaatagggagttaaattttggatggcaaaatgtacacacaaaggggcattgagttatgtaaggtgtgtagctttgagctttagacttcagagtgtttaacatgtcttgactttggcatcttaaagaagttatattaagc

SEQ ID NO: 482 - DNA, 661 bp, Homo sapiens
  misc_feature [331]..[331]: Chromosome 1, SNP identification no. = rs2001475
  misc_feature [331]..[331]: allele = a, in linkage disequilibrium with rs12408223, respectively
  misc_feature [331]..[331]: n is a, t, c or g
gcccagtgtgtgcagctttgcctttttgtaaaagaacaagctgcaaagtcctcacataaactacagctgcctgccaaggtcaaaatatgaggtggcttaagacttaaagtctcctgagaagttaaaagctatctacaaaacagtaaaaacccacttggcttaatataacttctttaagatgccaaagtcaagacatgttaaacactctgaagtctaaagctcaaagctacacaccttacataactcaatgcccctttgtgtgtacattttgccatccaaaatttaactccctatttacttaccagggttcacagcccaacatttcaggtgntgaggtttttgaggttacacatctgaaatgcaagcctccgtactatagaggcaacgtttgcctctggatatcttccttcacggatgataactatcagaagattctactttctacaggcaaaccagcttcctggaggaagagattaggttacccaggcccattttcttaaactcaccactcaggtaacccttactcctctccccaggaagctaagagtggggaagtagagagaagacaggaaagttatgctaatgaagctcccccaattcaccaagtgatagaaagatacattctccccaaacctattggttcagaaaaccatgcattgga

SEQ ID NO: 483 - DNA, 661 bp, Homo sapiens
  misc_feature [331]..[331]: Chromosome 1, SNP identification no. = rs12562918
  misc_feature [331]..[331]: allele = a, in linkage disequilibrium with rs12408223, respectively
  misc_feature [331]..[331]: n is a, t, c or g
ggccaggcatgatggctcatgcctgtaatcccagcagtttgggaagccaaggttggagggtcacttgagcttaggagttcaagaccagccttggcaatatagtgagaccccatttcataaaaacaaacaaacaaacaaacaaaaacctgaaaagcgatcattgaaatgaccaatatgtttgcaaataatagcatcccagaatgaatacaataacattttaaaactacaaaaaaattcagcacccatgaatataaaattcagtttgtcatccaataaaaaattatcaagcatgcaaaaacagcccataatgaggagaaaaataagtcagtanaaacagactcagaaatgacacaaatgattggcattaaactagctatcataggccaggtgaggtggctcacatctgtaatcccaatgcttggggaggctgaggctgaagaattgcttaaggccaggagttcaagaccagcctgggcaacacagcaagaccccatctctacaaaaaaatttttttaattggccaggcatgatggcatacacctgtaatcttagctgcttacctaagcaggaggctcatgtgagcccaggagtttgaggctgcagtgagctatgattacatcactgcattcaagtctgtacaacagagcaagactctgtccct

SEQ ID NO: 484 - DNA, 661 bp, Homo sapiens
  misc_feature [331]..[331]: Chromosome 1, SNP identification no. = rs12566239
  misc_feature [331]..[331]: allele = t, in linkage disequilibrium with rs12408223, respectively
  misc_feature [331]..[331]: n is a, t, c or g
gcttcagttaactttgcagctgctgtgactacacacaaacaaaaagggtaggcttttgctacagggtcaagtgagaggccaaaataagctactggactatgatgtccattgagcttttgatttagaagcctgcaagattcgtactgatctttcatgtatacatagaaaggtttatagtaattgggaaattcaaggataggaatgttttgaagggagtcctttaagttatagaaaatagtctcaagtgaacccgtccagggcaagggctcaggtatttctgctgttatcagaacatttaaagggacgcaaattctgaaaattaggaatgcantgtctacggttttctatgaggctgagaaatccttgatgttgtcttttaataactggatgggggcaagtccctaaagtttttcaacaaagaggctttccatctcgtgtgatgtcatggcctagataatggatgtgataaacttgggagtttattcttagagacattgtgtgccttgtatgtaaacactctctgcaaatggagaaaatcaattttggaagcctcttcatctggagagcataacagagggtcatcatattttataagaatagattcctaggagaattggatgtctccaaggttattgttgagttcttgggcgaaataagagga

SEQ ID NO: 485 - DNA, 661 bp, Homo sapiens
  misc_feature [331]..[331]: Chromosome 1, SNP identification no. = rs12408223
  misc_feature [331]..[331]: allele = a, g
  misc_feature [331]..[331]: n is a, t, c or g
agcagaagagggtccaggattcaggtcacagcatcagaaaccgtgggagaaaatgagccaccgcaccacgaagcccaagcgtccattcagaatgctgcagcctgagaactgttctgaagggatgctttgccttgaggaagaaagtggagattgtatagagctttagcctaagaaggtcaagttgaagttcaactagtcttgagaatagttggtcaaaaatgcttcttggaaaaatggtttttttttttcagtttttggctattcattgggcagtacagccaaagaataccaatatttataagtagcaggctactgagtgtggtctgaggantaggacaggtatagcctctcagaaagtagaatttgtgacaaatgaattattatttattttgagatggaggctccctcccccaaatgattctcctgcctcagcgtgctaagtagctgggattacaggctcctgcaaccatgccctgctaatttttgtatttttagtagaaatggggtttcaccatgttggccaggctggtctcgaactcctgactttgtgatctgcccaccttggcctcccaaagtgttggcattacaggcgtgagccactgcacctggtggacaactgaattatttaccaaggaaattcaaactcatgctctgattaagg

SEQ ID NO: 486 - DNA, 661 bp, Homo sapiens
  misc_feature [331]..[331]: Chromosome 1, SNP identification no. = rs2810624
  misc_feature [331]..[331]: allele = g, in linkage disequilibrium with rs12408223, respectively
  misc_feature [331]..[331]: n is a, t, c or g
ctaccgttattctcttatccaattttatggctttaaatacttaatgaatgccaagaactcccaaatctaaacttctagcccagacctctcctctgagctcctgacttgtctatccaactgcctgctcaacttctccacttaggaaatacactccccaagctggtgctcccctcagccttccccatctcagttcatggcaactctatccttctcactgctcacgagagaaccttgaagtcagcttcaactcctttctttctctcaaacaccatacccatttcttcctgtgggtttctcttcagagtatatctgaaatctaaccaattttcantgttttccctgctaccaccatcatttcttgcctgcattgctggaatagtaacaggtcttctagcttccacccttgcacctccatagtctgttctcaacacagctgcctgagtgatcctttgaaaacagagtggctcctgtcactcctctgttcaaaatcccaccacaactccccatgtccctgagagtaaaaacccaagtcctacagcggctacaaggccctacatggttcaacccccatcacttctctggccttgtctcctaccattctcattcacccagtccagccacactgctgtttaccaggcatgctcctgccttgaggcctcag

SEQ ID NO: 487 - DNA, 661 bp, Homo sapiens
  misc_feature [331]..[331]: Chromosome 1, SNP identification no. = rs2796423
  misc_feature [331]..[331]: allele = a, in linkage disequilibrium with rs12408223, respectively
  misc_feature [331]..[331]: n is a, t, c or g
acagagggtcaaagattgagccctggggcattgcaacttttagaacagtactgaagaataaaaacataatgtgagccatagtgatttaaaattttccactagctgcatttttggtctgtttattttttgagacagtcttgctctgtcacccatggcagagtacagggacatgatcacagctcactgcagcctcgaattcttgggctcaagcagtcctcccacctccgccaccccagtagctgggaccacaggcacatgccaccatgcctggccaattttcgtatttcattttgaggcggggttttgccatgttactcaggctagtcttganctcctaggcttaagccaacctcctgcctccacctcccaaagtactgggattacagggatgagccaccacacctggcctagaagctgaatttttaaaggaaaaggaaaattaggtgggcatgatggccatgcacctgtagtcccagctacctgggaggctaagacaggaggatcacttgagcccaggagctgggggctatagtgagccatgatcacaccattgcacttcagcctgggtatgagactatgtctcaaaaaaatgcataaataatataaaacttaaaaataaagaaaaaagaaacaggcaaaattaattttaaactttctttta

SEQ ID NO: 488 - DNA, 661 bp, Homo sapiens
  misc_feature [331]..[331]: Chromosome 1, SNP identification no. = rs16852608
  misc_feature [331]..[331]: allele = a, in linkage disequilibrium with rs12408223, respectively
  misc_feature [331]..[331]: n is a, t, c or g
caccctgtcattccaccccttcctcctttgtgcccacaagtgttccccactctacccccatagccactgctttctcccattcttgtttgtagttttaccagccccttgactagctcccaacttccctccccacctccgccactgccagatgaacctaagagatcggggaaactagtcctagcttgggaaaagactggtatgcactggcccttccttaggcctgatggccactcccacaggggtgtccatgatcttcatccacagtgctgctattccccaccaagtatctcccctgtgttcctccctagaggaactctgaccctagaacatngagtcagaggtgtcctttcccagggcccccttgtgcatacggctggtgtactcttagttttctcagtatcttagcccactatggctgcccccgtgggcttagataaactttacagtttttcgtctagctggtcttcttctccatattactattctattcaggttattttgctaggtggctaaactactaaatttcagttctctgacttcctcaaaaaaaaagagaccaaatttcttgggaaggcatttatataaaaattttggccaggtgctgtggctcacacctgtaatcccagcactttgggaggctgaggcaggcggatcacgaggt

SEQ ID NO: 489 - DNA, 661 bp, Homo sapiens
  misc_feature [331]..[331]: Chromosome 1, SNP identification no. = rs335564
  misc_feature [331]..[331]: allele = a, in linkage disequilibrium with rs335554, respectively
  misc_feature [331]..[331]: n is a, t, c or g
aagagcctggtacctcctcttctctctctgggtttctttctcatcatgtgataactgcccccttttgccttccaccttgaatggaagattcctgaggccctcaccagatgcagatgctagtgtcatgcttcttgtacagcctgctgtgagccaaataaactgtgagccaaatgaacactttttctttataaattacccagcctcaggttttcccttatagcaatacaagtggactaaggcaatcacccactcggtaaagcccactataaacacctgatttaaatgacaggctatctttccttagcattctcaatgacattagcctgatcantttttcacagtactaattgctttttctcacaatatgtaattcacccatttatcatgtttattgactgtctctcatcccccactcctgcagaatgtaagctatatgaaggcagacattttgtctattcactgatatattccaagtattggaattatacgtggcacactgtaggcagtacatgaatatttgttgaatgattttaaaatattttctttgtaacccatccaagagtcttcaaacatgtacagtgaaggtgacattctccccctgctccttagaaatattgaccaggtgctctagcttttccatttagagttagataataaaaat

SEQ ID NO: 490 - DNA, 661 bp, Homo sapiens
  misc_feature [331]..[331]: Chromosome 1, SNP identification no. = rs335565
  misc_feature [331]..[331]: allele = a, in linkage disequilibrium with rs335554, respectively
  misc_feature [331]..[331]: n is a, t, c or g
taggtgattaatttctgtctcctacaccagactattagctatatctgcttggttcatagtggcttccctggagcccagcacagagtttattatggggctcatgctcagaaatgttagggtatactccaatatagtttagagctcttgtcttggagctccactgcctgggtgtggacatccgttgcttactaaccatgtgctctcaggaaaaccatttacttttttgtgcctcaatttcctcagttgtaaaactgggacaataatagtaccaaatattaagtgttatataaattaatataaagtacttaaaaggagttcatggcacatagtnagtgctttaaaagtgtgtgctattattattaactgcatgggtgaagcattgtcttctatgtagtagagaaagtgtttttagggaatattcagttaacaaagaactatcttttcacaacaagctgaagaaaactcgctggtgtagtgcgtttcaggaaataggaagtcatccccaataccctagaactgagagctgccccttgtatcacatcacacagatctggggagagaacattcagaatagcaatctagttcaatggctcaagcacaggctttggaggtagacagatcacgatcaaatcttgcctctttcacttagaaactgtaattt

SEQ ID NO: 491 - DNA, 661 bp, Homo sapiens
  misc_feature [331]..[331]: Chromosome 1, SNP identification no. = rs335570
  misc_feature [331]..[331]: allele = a, in linkage disequilibrium with rs335554, respectively
  misc_feature [331]..[331]: n is a, t, c or g
ttgttggaaacagctatcattaatattttactactaacactagttaaagccatacacaaatagtggataaggactctgtactttagaggtaaatttttagaaattccatatagagtgtgtttttgttttttgcaagaagtataacctcattataaggaaaaccaagaaaaaaaggaatctcagtttcaatccctgcttatttcgagtaatatttactatgattagtttctagtatgtaacataaatcggattgcatatgtgaagaatgattagaatcccaatcatccctgaatttacaggcacatgaagcacctcctcatgaaggcacatngaactcttagcactgaaggtgccatgtaagtcagaggtactggtggtatctcaatgaaaccgactggaatagccttctccgcacacaaataaatttcttagtttttaatctggaaaactttaatacgaaatcctcagtatctgatttactgggaaacataagtttgaattactttagagatgcagatttctagttagttctatgataattcggatgacaaagctagatttccatttagaaataatttaatttacatttacttctttgaataacttgtgttattcaacaaatacccagtgtattttaagtggcagtcgggggaaaatacag

SEQ ID NO: 492 - DNA, 661 bp, Homo sapiens
  misc_feature [331]..[331]: Chromosome 1, SNP identification no. = rs335574
  misc_feature [331]..[331]: allele = g, in linkage disequilibrium with rs335554, respectively
  misc_feature [331]..[331]: n is a, t, c or g
agagttcaggctattgtttgctcgtctcctcactcctattctagattcagagagccaaagcttgggagatggggaatgtggtagagaaaagaggcttttctttgcatttctcagtacactgagatgcctggttagggtgtttgggaggagacttagcactcagtcatcctcccgacaagcctttcttatcaactttccttataattaaccttcctcctttcatccaaaagcttttcttcttctgttacagagtcatggtctgatgcagctggacattatagacaagcagagagggaatggatccgagggtgacctggctgaattaaaagtnctgcatctaagtgtgtgcaggttgcagtccacagtaatggtgccattcggagctgtgtgtacctgcactactgcatcaggtgaccttatccagcataacggtacaacagaaatttaacttgaaacaggtttattgacttgcttttagtgttggcaactaatgttctaattaagcctctaggttttgcttatggaacacttccattacatcagaaatataaagtattttattagcaatttcctttgagaatgtataccatccatcaaagttgtcaaaagcacagtttgtggatttaagagagaatatagaatatcaacatcactcctcgtc

SEQ ID NO: 493 - DNA, 661 bp, Homo sapiens
  misc_feature [331]..[331]: Chromosome 1, SNP identification no. = rs6662756
  misc_feature [331]..[331]: allele = c, in linkage disequilibrium with rs335554, respectively
  misc_feature [331]..[331]: n is a, t, c or g
aggagacttagcactcagtcatcctcccgacaagcctttcttatcaactttccttataattaaccttcctcctttcatccaaaagcttttcttcttctgttacagagtcatggtctgatgcagctggacattatagacaagcagagagggaatggatccgagggtgacctggctgaattaaaagtgctgcatctaagtgtgtgcaggttgcagtccacagtaatggtgccattcggagctgtgtgtacctgcactactgcatcaggtgaccttatccagcataacggtacaacagaaatttaacttgaaacaggtttattgacttgctttnagtgttggcaactaatgttctaattaagcctctaggttttgcttatggaacacttccattacatcagaaatataaagtattttattagcaatttcctttgagaatgtataccatccatcaaagttgtcaaaagcacagtttgtggatttaagagagaatatagaatatcaacatcactcctcgtctcttagagaatgcagataaggtgcttacttgaattaaaaacattcaaatgaagaaaaaagttccatatgttagaaataaaactggaaaataattatatatagaaaagtatttttgtaatcttgaagaggggagaagcgttcctaa

SEQ ID NO: 494 - DNA, 661 bp, Homo sapiens
  misc_feature [331]..[331]: Chromosome 1, SNP identification no. = rs335577
  misc_feature [331]..[331]: allele = g, in linkage disequilibrium with rs335554, respectively
  misc_feature [331]..[331]: n is a, t, c or g
agaatatagaatatcaacatcactcctcgtctcttagagaatgcagataaggtgcttacttgaattaaaaacattcaaatgaagaaaaaagttccatatgttagaaataaaactggaaaataattatatatagaaaagtatttttgtaatcttgaagaggggagaagcgttcctaagcagatacaacaccagaaatcacaaaggaaaaacttgcagaattgactttataaaattaatttctcatttttttgcttttaattgacctttttatttttagataattgtagattcacttacagttgtaacaaacaatacagatatccggtttccnccaatgataacatcttgcaaaactatagtacaatatcacaatggaaatattaacatcgatccagtcaagacacagaacatttctatcaccaaaaggaatcttcagttaacttttttataatcatatccactttccttctgtccgctctccctccttaaacccttgcaactgggccgggtgcggtggctcacacctgtgatcccaccactttgggaggctgagacgggtggatcacgaggtcaggagatagagaccatcctggctaacacggtgaaacctcatctctactaaaaaaatacaaaaaaattagccaagtgtggtggtgggcgc

SEQ ID NO: 495 - DNA, 661 bp, Homo sapiens
  misc_feature [331]..[331]: Chromosome 1, SNP identification no. = rs335581
  misc_feature [331]..[331]: allele = t, in linkage disequilibrium with rs335554, respectively
  misc_feature [331]..[331]: n is a, t, c or g
tcttttcatgcttttaacaaaaacttttgtagaggaaacatttttagtgttgatgaaatccaatgatcaatttttaaatttaatagattaagctttttgggtcaggtttaagaactctttggttagctctagattctgaagctttttgtcccatgatttttttcttaaaagtttacagttttaccttccgcatataagtctgttacaacaattttgagtaactttttgtataaggtgtgagacttagtttgaggttgttttttctttatggtgtgtgtatgaacgttcaattactccagcaccatttgttgaaatggcactttccttcatnaaattgatattgcacatttgtcaaaaatcagttggacatatttgtataggtctattttggggttctttattatgttccattaatctatgtgtctatccctccaccaataccaccacacagttttgacaacttttataagtgttgaaatcatcatgcagactgattcctcctattttatcaattctttacaaaattgttttagctattctacttcctttttctttccatctaaattttagaatagtatcttttatgtctacaaaaatcttgctggaattttggtgggaattgctttaagccagtatatcagttggggtctttactatgttg

SEQ ID NO: 496 - DNA, 661 bp, Homo sapiens
  misc_feature [331]..[331]: Chromosome 1, SNP identification no. = rs335554
  misc_feature [331]..[331]: allele = c, t
  misc_feature [331]..[331]: n is a, t, c or g
aattgtttattgcagcatctttatcatggctgctttaaggtctttgtcagatattttaaacatctctaacatcttagtgttgatttgtgttgactgtcttctcattcagtttgagatattccctatttatggtatgatgaatgattttcattcccacttttgtattgtgttacgagactatagatcttatttaaatttgaactggctttttctgacagtgctgtggcaaggaaatggagagatctgccttgttactgccaagcagagatacaaatccaggttccccttggcctccatggacatgtgaaggaggttcctcctttttactgcngggcaatggggaaagttcctgttccccacgtgtctccactgtcaccattgtggagtggtcttactactgctgggtgatagtgaaaattgagtttccactaggccacctctgatgccatcccaatggggcagtgtttgggttcctggctacagctttgcaaaaatggaaatgtgggctctttacttctctttgctggcatgagtaggggtgggtgagaggcagtgttttttgtggtgtttggtggtgtagaatggttattgtctaagatttttctgttttgctaggctgcccctctcatggtcttttgtctagagacagtgacttttgttg

SEQ ID NO: 497 - DNA, 661 bp, Homo sapiens
  misc_feature [331]..[331]: Chromosome 1, SNP identification no. = rs335556
  misc_feature [331]..[331]: allele = t, in linkage disequilibrium with rs335554, respectively
  misc_feature [331]..[331]: n is a, t, c or g
atgagcacttgtgtgcacagatggactcacaggtggattgaagcgtgaaagtctgaatcagtccagagtaataggaaccagccactcccagcatgacagggagctgcagctagtgttgcaccatgaaaagacacagtaagctccgtaaactctgtgcaaaccaaacaggactaatgtgagctatgtaaatcatggctgatggtgcttctcaaatctaaacttagcgtaactgcggtcagaaagacagatgcttctctacagcgaacataaaatgcaggctggcttggtgctaaaacagcatgatctgcagaaaaaacaattacggatgtanacagatctatattaaaaggaacaatgccttagatctattgctatcctggtgtgggatccctaatatttatttggtgctttgcagaataattctaggaaagctctgatgtttttttcttacagacagatttctgtgcttacctattgtatcacttgagaactagtttgaatttatgaactaacatacttcagtgaggaacaaagccaaagttctctacctgaaatgtagctggctttctagaactagttgttttagtcgttggcacaagtagccaatgtaagttttaaaaaatcatacaaccttcagaatctaaatttctgagagttgttt

SEQ ID NO: 498 - DNA, 661 bp, Homo sapiens
  misc_feature [331]..[331]: Chromosome 1, SNP identification no. = rs335558
  misc_feature [331]..[331]: allele = t, in linkage disequilibrium with rs335554, respectively
  misc_feature [331]..[331]: n is a, t, c or g
actgtggggataaagcatgaactttatagttaaataaacctgatttgaattcttacttcttccctctgtgtttctgacagttttttaaaaaaatatctaagacagaaacaataatgtctactcttatgtttaaggttgggaaattaacttagatggcatatgtaaagtgctcagaacatagaaaatgttcattaagtgtgcatttgcttaattttcacactctactaaaattgtctttaataatcaaaacaatgcaaaacaaaaatgtatgaatccaatggtgatttctcagtccttcatctccttggcccttttgcattatttcatgtantttattactctcgatctgaacttccataatactgaatccttttaagttttctaccgctttgcttttattgtctccttcactgatttctcttcctctttctgccctctgaaggcagatattctctagaggtctcttttctttgtttcttcatcaatctttttcactgctcctgctctggtgtttgcctctaagccacacttggtctctaatgttgaccttccttttggattccatcacacatttttagagaacagtcaaattcagcagggtttcgccagagataatcccttcactttgggaatatcactttccaagatccaacaatcctca

SEQ ID NO: 499 - DNA, 661 bp, Homo sapiens
  misc_feature [331]..[331]: Chromosome 1, SNP identification no. = rs335529
  misc_feature [331]..[331]: allele = t, in linkage disequilibrium with rs335554, respectively
  misc_feature [331]..[331]: n is a, t, c or g
aggttcaggtgattcccctgcctcagcctcctgagtagctgggattacaggcatgcgccaccacgcccagctaatttttgtatttttagtagagacggggtttcaccaggttggtcaggctggtctcgaactcccgacctcaggtgatccacccgcctcggcctcccaaagtgctgcgattacaggcatgagccaccacgcccagtccaattttccttttataaaacatttttactactgtcttcaaattcttaagttaaatgccttaactactgtgtttattggcttaaattcattaggctttggtagaggtgctatgtgccaccacaantttcttctctgtcatgtatgaagcacaagaaagaatgctatataattatcttgttttgaaaattagtttcaggtgagatccacttcaaaagcttggtgcccaactttgaagtttcttccacttcaaaagctttgtcttgaagtgtattatagagacaaacacacacacacacacacacacacagagagagagagagagagagacacgcatgcacacatgaaggcatcctgcattttaagatttattgagaattacttcctgccgtgaaaaataaaagccatacaatgaacagggaaagtcagtctgacagagaacttagatatagaaatc

SEQ ID NO: 500 - DNA, 661 bp, Homo sapiens
  misc_feature [331]..[331]: Chromosome 1, SNP identification no. = rs10863372
  misc_feature [331]..[331]: allele = c, in linkage disequilibrium with rs10863373, respectively
  misc_feature [331]..[331]: n is a, t, c or g
aggcatagaagagtatttaggacttcatgtccaatagatggtattgtattatgtaaaatgatagcagtagaatacctgagctgtatcttattccagctttgtcccttctttccagaactccctgacacatcatgtcttctttctgagcctcatttttctcactcagggttagccacacagctcaagaggaagctctaccccaaaatatagctctccctacctcttctcctctgcacccttagcctttgccacaagccacccccatggaaattttattaccaacaacttgactcctttgggggaataaatatatactctgattatacaatgnctgtatttttcagttgataactgagcttttcaaagagttcagttttactttaataagaacttttaaactttgccaactgaatgccatctaaatattccagatgtcaactatatggagcaataggaccagaaatggaaaaggaaaaaaattaagataaaatacaaagggaaaagagagaaagcacggagggaattgtgaaaattagaacttaagccatgtgttaagttaatattttggagaaaaagactataaattgaggttacttttgtattggtctccagtgcacagcccagctaggcccttctttctgcactacttatgctcagatat

SEQ ID NO: 501 - DNA, 661 bp, Homo sapiens
  misc_feature [331]..[331]: Chromosome 1, SNP identification no. = rs10863373
  misc_feature [331]..[331]: allele = g, t
  misc_feature [331]..[331]: n is a, t, c or g
cccccatggaaattttattaccaacaacttgactcctttgggggaataaatatatactctgattatacaatgtctgtatttttcagttgataactgagcttttcaaagagttcagttttactttaataagaacttttaaactttgccaactgaatgccatctaaatattccagatgtcaactatatggagcaataggaccagaaatggaaaaggaaaaaaattaagataaaatacaaagggaaaagagagaaagcacggagggaattgtgaaaattagaacttaagccatgtgttaagttaatattttggagaaaaagactataaattgangttacttttgtattggtctccagtgcacagcccagctaggcccttctttctgcactacttatgctcagatattgtaaggcaacaaaacatgttctcttaagtagagaatggatatttaaagtctctttgctataggtcaattttatctctttcaaaataccaaattacatctagtcgttagaaccataaacccttgggttaaattgcttcttataaatggttcatgatataagaatgtgacttacactaaagcaagaaaagaagaggcagaaatgcagggataatttgaaaatcccaaagctgacttcaggtgtgaccgtggaaaagtca

SEQ ID NO: 502 - DNA, 661 bp, Homo sapiens
  misc_feature [331]..[331]: Chromosome 1, SNP identification no. = rs2130585
  misc_feature [331]..[331]: allele = t, in linkage disequilibrium with rs10863373, respectively
  misc_feature [331]..[331]: n is a, t, c or g
aagaagaggcagaaatgcagggataatttgaaaatcccaaagctgacttcaggtgtgaccgtggaaaagtcatgaagcctctgggctcaagtttttacaccatggaatgataatttggattgttatgaaaacactttgagctgctctcacagccagcatctgacaagatattttcccagcagccaaaacattctctataactaatgatggcttgtttttttcatgcacagaaagatagacacaaatattagagatcagtcaatgattaaataaagtgttctcctgcacaaaataatgatttaagtcttcaggacacacagaaactaagtgnaataattctactaaggtttaaatactcagagactaccaaggcaaagcaatttgagcagcatcagaaacacatacacaccatgggcagcaaacagccattttacatttaattaggcaaagaaactccagctgaatgggttaaaaattgccactatttcacagtaagtgattttcttaacccccaagggttcaaattactttggcaggaaaagcaattatgcaattaataggggaaaaatctcaagagctctgtaattttcgaagaggtaaaggttctgcgctggcctgcaggggacagctgagctctgaagcttttttctttttctttctt

SEQ ID NO: 503 - DNA, 661 bp, Homo sapiens
  misc_feature [331]..[331]: Chromosome 1, SNP identification no. = rs11118029
  misc_feature [331]..[331]: allele = g, in linkage disequilibrium with rs10863373, respectively
  misc_feature [331]..[331]: n is a, t, c or g
tagagcgctcagcaaatgagatgagaatgaattccagcatctctgctgaagatagtaaccagccccaaacactataacgttccaactgggccacacttcacctgcttcattcatatttagtagaactgaaatagagaaactataatttaagtggtcagaaaaagaaaggtgaaaatacctgatggccattggttcaaagtaattgaagtttggggttgtaagtctaaggtattctctctggcttctttaccaaaatattctcacagataaaggacattgcatttcaagagagtaaatatcctgttgaccgagaaagtcttctctgattatntgactaagaggacatgaggcactgatttattttattgaatgagtaaatactcattcggattgctggcttgacattgtattggtgtgctctgacggactcaagcgtctgaatcacttttgtactctcgtggtatcaatgagggagaaagatgattctctttttactatgatggagaaaagaagttctggggcaatagcagcaggtttctgagtctcctcctgcattagccaacaccacacaagaagggtcctgaataaaattagagtctaattgaatcacactcctattcaggggcaaatccactaaaattttcgctcacaggcatacaac

SEQ ID NO: 504 - DNA, 661 bp, Homo sapiens
  misc_feature [331]..[331]: Chromosome 1, SNP identification no. = rs789367
  misc_feature [331]..[331]: allele = g, t
  misc_feature [331]..[331]: n is a, t, c or g
tggtgctaagggctattttcacatgctaatatggcaatggcccccgctcccaccacccgaccaggagaaatctttatgcttactgaacgcaggaaaagacaagtcagctgaccctttctgaaacgaaatttctccaatgttttcagctctaaatcatcaatccggcatatttttgtatgacatgtccttcactccttcactatccagcatgattataaaatccactcctgtgtccttcgggggcttcagattcagctggggagacagaaaatcaggagaattcttccaagaaagactattctgcataatatagcaagtagaagttggaganctaggaacagcatgagagggtggggagaggaacagaggtgagagagagataaagtgtgagccagtaagatgccagcgagctgagcactgcaatgtggacccagcccccaagccttgctgaagtctactaatctcatggatttttgcatgagggatttttgttgctgttgtgtggtggtgatggttggcaccataaggtgttcatctggtatgttatagaaagagcaagaggaagcaaggtccaagaggcagatggagccacctcactttccacctgctatgatttgaacatttgtcccctccaaaacccatgttgaaatttaatcctcaa

SEQ ID NO: 505 - DNA, 661 bp, Homo sapiens
  misc_feature [331]..[331]: Chromosome 1, SNP identification no. = rs629436
  misc_feature [331]..[331]: allele = a, a, in linkage disequilibrium with rs789367, rs586510, respectively
  misc_feature [331]..[331]: n is a, t, c or g
agtcccagcaccctatctttgtaccatacattgtttcttacaaagagaccttacaacctagcacgtcagttagaaatactggtagatggcttattaaacgctcatgaatcggtttacgtgatttatttcattgaatcatcacagcaacatcgtgcagtatgtattgttattaactgctccccactgcccctctgccccagttttaccgatgtggggagtaaagtgcaaggacgttggatggtgccatggagcccgcagctggtcactggtggcgagatgagcgccaacacaggcatagtgagtctggaatgagcattcctcacctgcgccncacactgcctctttatatggccctgacatcacatgacacagaccaagctgtgctgcagaaccatccctgtctttccctccaaccactggcagagaattcaatctgacattctgacattgcccagtcatcatggtgtccccacaccaagggcagtatcctgcccaaaggagctcagcaacttgttgcaggggtgaggttagcaggtaggttttaactactctcagaaaagtttccagacaagaggctttataccccagcacatccaggtctttatcataagccactgaaagcacacactgtgtctaagatgctgcatctgagattctccag

SEQ ID NO: 506 - DNA, 661 bp, Homo sapiens
  misc_feature [331]..[331]: Chromosome 1, SNP identification no. = rs3120762
  misc_feature [331]..[331]: allele = g, g, in linkage disequilibrium with rs789367, rs586510, respectively
  misc_feature [331]..[331]: n is a, t, c or g
agataaatacatttcaatagggaaaggaaacatgcaggaacagttatggagaaaccctgtcatgttatatgcaccctatgatgactgcccatgttactgattttgtaacataaagtagaatgtatccccagtgtttctccttttgaagggaacagacctttacagccagtatcacacagaaagaagccttggttcacagagtccatgtgtgtgtctcatgtttttgagccaagccacaccatggcccccagagtcctcgtgtcctgcacagctgaaggagctggaattggcacagctgagagtacaggtgaagcctcacctggcaagaccngccctctattcatgtcctgctttttgtgtgaggtagaagggggacattggtcatgctggccccatagacttgggtctatagccagttaacagctgttcccttgagaacccactcatccagaaggaatagctcagtctgagcatcagccttctggtgccctagcttgtttgttctcctccccagctccgagtggtgttcaagagagaggaaaatgtgaagctgttaagcatttggggaagaggcatagagccatcagactaggggcaaggagaaccatcagactagggggctagggacaggggtaaagagagctatcaggctaggtgcagg

SEQ ID NO: 507 - DNA, 661 bp, Homo sapiens
  misc_feature [331]..[331]: Chromosome 1, SNP identification no. = rs3131806
  misc_feature [331]..[331]: allele = a, a, in linkage disequilibrium with rs789367, rs586510, respectively
  misc_feature [331]..[331]: n is a, t, c or g
ggctctccttacttactctggtggtctaatgactcttcctgcacctagcctgatagctctctttacccctgtccctagccccctagtctgatggttctccttgcccctagtctgatggctctatgcctcttccccaaatgcttaacagcttcacattttcctctctcttgaacaccactcggagctggggaggagaacaaacaagctagggcaccagaaggctgatgctcagactgagctattccttctggatgagtgggttctcaagggaacagctgttaactggctatagacccaagtctatggggccagcatgaccaatgtccccctnctacctcacacaaaaagcaggacatgaatagagggccggtcttgccaggtgaggcttcacctgtactctcagctgtgccaattccagctccttcagctgtgcaggacacgaggactctgggggccatggtgtggcttggctcaaaaacatgagacacacacatggactctgtgaaccaaggcttctttctgtgtgatactggctgtaaaggtctgttcccttcaaaaggagaaacactggggatacattctactttatgttacaaaatcagtaacatgggcagtcatcatagggtgcatataacatgacagggtttctccataactgttc

SEQ ID NO: 508 - DNA, 661 bp, Homo sapiens
  misc_feature [331]..[331]: Chromosome 1, SNP identification no. = rs662251
  misc_feature [331]..[331]: allele = g, g, in linkage disequilibrium with rs789367, rs586510, respectively
  misc_feature [331]..[331]: n is a, t, c or g
cctgatcaactcctcactatgaccagctgccttactccttcaaatttatttctagaggaatttagaagtcagcattctgggaaatggcatggttaatccctcttcagtcccagcctgcctgactagccctacctccagctacaccctcagtccctccatacagttggtcagtttcattcccacctccttgcatctttttatgatatttctttccccttttcctggcatatctgctcttcaccttctgcccgtttttcagggcccaaggaaaggctagcctccacttgcatacattccttggcttctctggtctacagacatgctgctatcnactccatgaacacctatgctctgcgttgctcattcttgcacttcattatgggcagccctgcaggctttgacttattttttgtccatttgaacatatacaactgagaagggacactgagaaagccctggacaaatatctatctgaattctttttgagttaatagaaatcatctacaggtcttgtctatacaaatggtctgtaggcaaagtgaataccagagttgtacattcttttttttttttttttttttgagacggagtctcgctctgtcacccaggctggagtacagtggcgcgatcttggctcactgcaagctccgcctcctgggtt

SEQ ID NO: 509 - DNA, 661 bp, Homo sapiens
  misc_feature [331]..[331]: Chromosome 1, SNP identification no. = rs616415
  misc_feature [331]..[331]: allele = t, t, in linkage disequilibrium with rs789367, rs586510, respectively
  misc_feature [331]..[331]: n is a, t, c or g
tccacagagtcgtgtagttgaatgtgtctggacaaatgataattgtccatcaaagagcaatattcttattctctagctctactcgaaggggacaaaatggaatggccagctggtgccaaaatacagcttacaattaccaagccatgctgcctcgcaacaggaagtccagaagacgggacatcatatttgatgatgacattaggagtaaggacatcattcacaacttaaaggatctacaggctatccaagaaccaaaggcttaggttcttaagccaagtaaataaagaatacttgcatctgaacaccctcaaagatcccactaagctctctngtcttcagagatctgatacaccctcaaaacttccagttttaaacattcctagaagaatgattagacccaaaatttctaaattacgtgacattgtttggctctgtgtccccacccaaatctcatgttgaattgtaatttccagtgttggaggtggggcctggtgggaggtgattggattacgtgggtggtttctaatggtttatcaccatccccctagtgctctctcatgatagagttctcatgagatctggttgtttgaaagcgtgtagcacctcctgccactgtctcctgtcggccatgtgaggatgtgcttgcttttcctttacattc

SEQ ID NO: 510 - DNA, 661 bp, Homo sapiens
  misc_feature [331]..[331]: Chromosome 1, SNP identification no. = rs668959
  misc_feature [331]..[331]: allele = t, in linkage disequilibrium with rs586510, respectively
  misc_feature [331]..[331]: n is a, t, c or g
tactgtggaagaagtggcttcagtgacctgaagccttaattgaagtcagaagatgtctctcctcaacccagcccgccctgcagcaggtggtcctatcactgcctttctccactcgcacaacagaccctttatttcatggtagacaaaggtctgggaatgggagcagcagtaccagattataaaccatacattttccagtgctaagtagctcagacttgggactctcaggagtctggctgtagagtgctatagtctatgaacaagttaatttttttcccatttaagcacagaaaaaaaacatcttttctgattgttgtttagttcaatgtgncagttcaaactttgaccttccaagtatagatttctttctacttctttcctaggggtattaccattaaactagtactaaggcacagctcggggagcacaaagccactgtttaaaggcaggagtccagaagtgcagggaatggacatctttcataggaccacaacatagagattgacactgggcacataagactgtacattgaacatgtttgtctagtagccattgccaagacgtcccagctgaagtgccctttattattatttatttattgtagagacggggtcttgctatattgcccaagctggtcttgaactcctgacctccagcaatc

SEQ ID NO: 511 - DNA, 661 bp, Homo sapiens
  misc_feature [331]..[331]: Chromosome 1, SNP identification no. = rs592549
  misc_feature [331]..[331]: allele = g, in linkage disequilibrium with rs586510, respectively
  misc_feature [331]..[331]: n is a, t, c or g
gagagcctttcccatgctacagggcctttcccggtgccacagcggcttcacgtcttgttcctgtgcctcgaaccctgccccatgctcctactgtctcctgtcttagccaagccccagctgctgcttcctctaaggagttgctacctgcttctcgccgggcttcacatacttatctctctctctctccgtgtctctttttaaaaatcaataatcacgtaaagtcagggaaactccagacaatcttctatggactgctttttgcccagatgagagtggttgggtgacgacaggtgcctgaaattctcaattcccgtttcagtccacttcctantgaacaggtgtcaaggtcacagcaccttgctgccccttggtactaaccccatttcctgttgtctgaaaaggcaggaattagatgggcataatgacagagctgctcattgtaaaacattgaccaatgctggaggcagcctaattctatcaaattcctcataagctgaattgtcagaattgaggagttaaagcccagtttctgttcttccttaacgggggtcttcacaatatacattgtttgtgcacagtatttagatataaatgaggactggataagcataaccatggattttaattcagctgattttggcctttggaagtaactactcag

SEQ ID NO: 512 - DNA, 661 bp, Homo sapiens
  misc_feature [331]..[331]: Chromosome 1, SNP identification no. = rs653428
  misc_feature [331]..[331]: allele = a, a, in linkage disequilibrium with rs789367, rs586510, respectively
  misc_feature [331]..[331]: n is a, t, c or g
ttttagatcaatacataatccttaaggcatccactcaggagaaaatacaaagaagtcataattatggtgttgtcttggatgcctgctacctggagaactttggaacttcagagtaaggtccagagtagtgagtaggccaagttgcagagaggtaaactgagtcacagggcagaaaactgactgtgttggaaggacgtaggtagcaagagttagacctgtaatagagtcagagttagagctgccagcctagtgccagctccttctgagctaagagagagcctttcccatgctacagggcctttcccggtgccacagcggcttcacgtcttgntcctgtgcctcgaaccctgccccatgctcctactgtctcctgtcttagccaagccccagctgctgcttcctctaaggagttgctacctgcttctcgccgggcttcacatacttatctctctctctctccgtgtctctttttaaaaatcaataatcacgtaaagtcagggaaactccagacaatcttctatggactgctttttgcccagatgagagtggttgggtgacgacaggtgcctgaaattctcaattcccgtttcagtccacttcctactgaacaggtgtcaaggtcacagcaccttgctgccccttggtactaaccccatttcct

SEQ ID NO: 513 - DNA, 661 bp, Homo sapiens
  misc_feature [331]..[331]: Chromosome 1, SNP identification no. = rs9662828
  misc_feature [331]..[331]: allele = g, in linkage disequilibrium with rs586510, respectively
  misc_feature [331]..[331]: n is a, t, c or g
gaaacgggaattgagaatttcaggcacctgtcgtcacccaaccactctcatctgggcaaaaagcagtccatagaagattgtctggagtttccctgactttacgtgattattgatttttaaaaagagacacggagagagagagagataagtatgtgaagcccggcgagaagcaggtagcaactccttagaggaagcagcagctggggcttggctaagacaggagacagtaggagcatggggcagggttcgaggcacaggaacaagacgtgaagccgctgtggcaccgggaaaggccctgtagcatgggaaaggctctctcttagctcagaangagctggcactaggctggcagctctaactctgactctattacaggtctaactcttgctacctacgtccttccaacacagtcagttttctgccctgtgactcagtttacctctctgcaacttggcctactcactactctggaccttactctgaagttccaaagttctccaggtagcaggcatccaagacaacaccataattatgacttctttgtattttctcctgagtggatgccttaaggattatgtattgatctaaaaaggagtcgttgagctcatgtcaaaattagggccatctgtgttaaaatataaatagtaagtgggattcaata

SEQ ID NO: 514 - DNA, 661 bp, Homo sapiens
  misc_feature [331]..[331]: Chromosome 1, SNP identification no. = rs9286796
  misc_feature [331]..[331]: allele = g, g, in linkage disequilibrium with rs789367, rs586510, respectively
  misc_feature [331]..[331]: n is a, t, c or g
gatgatggttaggagaagacactatctgccagggctcagtcacatatgggtgagaaatttcctacaaaataaatgcaaagacaggacgtatgagaaacaggcagacagagagcaacattaacacatccatcacttcaggaggtcatgtcatttctgctactcaacgtcaagatccactgtgaattttacaaggcctgagaccatgtaatggagggccatacaccatatgtaaaaatgtttataattttttaattcagttaacaaactgaaatattaaataagttttttccctatttgacaatttttctttcaagatggcctggccttagangaaaacataggcatgaccttagatcaggcaatggtttctcagatgtgataccaaaagcacaaacaacaaaagaaaaaaaataggtaaattggacactgtcagaattaaaaacttttgtgtttcaaaggacaccatcaaaaaagtgaaaagacacctcacagaatgggagaaaatatttgcaaatcatatactagggaagaatctagtatccagaatatatacagaacacccacaactcaacaattaaaacataacccagttttttaaatgggcaaaggattggaatagatacttctacaaagaaaatattcaaattaccgaaaagcacat

SEQ ID NO: 515 - DNA, 661 bp, Homo sapiens
  misc_feature [331]..[331]: Chromosome 1, SNP identification no. = rs1766593
  misc_feature [331]..[331]: allele = c, in linkage disequilibrium with rs586510, respectively
  misc_feature [331]..[331]: n is a, t, c or g
actgaaccaaagagtcccagccccgttcaatcagtcatacttatcatcaatttcccagcatttaatgtgtcccagagattatgcaaagagatttatatgtagaatcccacttaaagctcttgcttttaaggatgaagaaattgaggctaagacacatggctggaatccaaactgaagatggtcagatgctaaagtgcatctcatgaatcatcaacatcaatggaagaccacaccactaggatggaagagaagtgggacatccaacacagcggaggagcccactccattcagtggtttggagcatttccaggctgctcctctcagcagtggngccaaagacaaacctctgacggtcgttcagcttgctctttctctggccagctcagtggctgcaaaagtagacagaaggcagagcgaaagcactgagccgtccatccactgggacaatgctgggctcccctttaacaggaagggctgccatggtcctcttggagtctgcccctcccaggcccagcaaactcatttgctgttacacaggggccatgctgaagtttacatttgcactgactccccagcctcatgctctacaagtggggagaaaaatgatacctcaggcaggagatttcgcttatctcttttctccctaagtcttctgctcaaa

SEQ ID NO: 516 - DNA, 661 bp, Homo sapiens
  misc_feature [331]..[331]: Chromosome 1, SNP identification no. = rs591175
  misc_feature [331]..[331]: allele = t, in linkage disequilibrium with rs586510, respectively
  misc_feature [331]..[331]: n is a, t, c or g
ttggcatgcggcagaggtgcgattcgaacccaggtagcctggtttccaaagacacttccctactcccaaacacccgttgcagggtgctggactgaggattcccctactaagacaggatgatttgccccagccacctgaggggttctcgggaagtctggtccaatgctagctcagctttggtttgtgcttgcattcacctgtttcaggtaggagtaagggagcttccaacctggatcccaggccacttacacagcctgtgtcccctgcgcctggatggactgcctagccctggaccactattgcctcatctttgattcccacatagtgctcnatgcatagaaggtgctggagaaatccggctaaatgaatcaccattggcttgttaagagcatgccattggagggaaaattatttattataaaacaaacctgaaaagggaaaggaaagactgagtgctggaagtgagaaacaagattggagatcagggagatcgagttggaagaatatccataggaaggagaagaaaagcatcaagaagctccataaatcacagcagcagtatttttacctacattgtccttctttattttacgtccctggcaccaaacaatttatcattcccatttcatgctaagtgctacaaaaatagcaattggcccaa

SEQ ID NO: 517 - DNA, 661 bp, Homo sapiens
  misc_feature [331]..[331]: Chromosome 1, SNP identification no. = rs653891
  misc_feature [331]..[331]: allele = t, in linkage disequilibrium with rs586510, respectively
  misc_feature [331]..[331]: n is a, t, c or g
aaaagagatctgcttcatcccttcaaccagtcattcatttttttgaatagatagatatttactggaaaatatttattctagtagccctaccctatgcttgttactgttccagggtctaataaactagtgtcagacaaaagagacaaagttggcatggggcatgtttgccagtggaagagacacaaacacgatacaatgacgggtaacagcaaattatcagagtaaaagcaaagccaggtaaggcagtggagaaggacctggcaacaatctctgcaaaacaaaatgtaagcagagaccagaacaaggtgagcatccaggccatgctgattgntgggggaaagccttctaggcagaaggaacagcaaaagcagaaaaccctaggtgagacaatgtgggttgggaacagctaagaggcattgaagccgtcttcacagcgttaacaagaattctggacagaaatagagttaaaatgaagcattaatcaggctgcactttaaccattttcttgtaactaaaagtcataaagcattagatattgaccattcaaatccccatttttcctatggataaaattcctggcattagaattagaaggtttttgtttaagaattgcttaagcagatcctgaatttcagcagaacacctggcaactacccgttta

SEQ ID NO: 518 - DNA, 661 bp, Homo sapiens
  misc_feature [331]..[331]: Chromosome 1, SNP identification no. = rs586510
  misc_feature [331]..[331]: allele = a, g
  misc_feature [331]..[331]: n is a, t, c or g
atatttattctagtagccctaccctatgcttgttactgttccagggtctaataaactagtgtcagacaaaagagacaaagttggcatggggcatgtttgccagtggaagagacacaaacacgatacaatgacgggtaacagcaaattatcagagtaaaagcaaagccaggtaaggcagtggagaaggacctggcaacaatctctgcaaaacaaaatgtaagcagagaccagaacaaggtgagcatccaggccatgctgattgttgggggaaagccttctaggcagaaggaacagcaaaagcagaaaaccctaggtgagacaatgtgggttnggaacagctaagaggcattgaagccgtcttcacagcgttaacaagaattctggacagaaatagagttaaaatgaagcattaatcaggctgcactttaaccattttcttgtaactaaaagtcataaagcattagatattgaccattcaaatccccatttttcctatggataaaattcctggcattagaattagaaggtttttgtttaagaattgcttaagcagatcctgaatttcagcagaacacctggcaactacccgtttaaagactttcacaggggaactgaatcagcacgagaatacagtttcttcatctgcttttcccatgacttc

SEQ ID NO: 519 - DNA, 661 bp, Homo sapiens
  misc_feature [331]..[331]: Chromosome 1, SNP identification no. = rs632585
  misc_feature [331]..[331]: allele = g, in linkage disequilibrium with rs586510, respectively
  misc_feature [331]..[331]: n is a, t, c or g
tctagggcagttccaagagtctacaatgaatggggttcctctgacaaagcaatcaacttttccatggttggcaggtgagtaaattgggttttactaggagttattaaatatgggttttggttgatttactacctgctgggtttccatggaagttgagtatataatacaccaggccaacaacattaatcttttgtccttaattcattgccgttttcaacgtgaagacgggcgcagcagtacggacgttacaggaaagccattgctagctctgctcctttaacatgtgtaaaaacatctgtgggtgacaggcagcaccccagctcctggggtngtgacagaggctctcaggactccttcctattgagatgcacagtggtctaggtgttccccaggcaggaacctgtggaatctttggcttttccttgacctagcccagcttgacccctctctggacttttgcattcctgtccctcagcaagtcgctgctgaactgatggagctcccgttgtcttgataagagggcaccattcctgcgtggagggaggtttacatggctgctccttctcctgataaggacaccgagcctccctttctttctgtggctctgctgccctaaatctctccttccctttgcaaagtgaccagtgccaagaaggaggat

SEQ ID NO: 520 - DNA, 661 bp, Homo sapiens
  misc_feature [331]..[331]: Chromosome 1, SNP identification no. = rs633041
  misc_feature [331]..[331]: allele = g, in linkage disequilibrium with rs586510, respectively
  misc_feature [331]..[331]: n is a, t, c or g
agtatatgacaaataaagtaatctagcactattattaacagcaggtatgttgctcctaggctattttatggctcattttgaatgcattatctccatccgaaaaaggtaaatgtgattcttatgtctagggcagttccaagagtctacaatgaatggggttcctctgacaaagcaatcaacttttccatggttggcaggtgagtaaattgggttttactaggagttattaaatatgggttttggttgatttactacctgctgggtttccatggaagttgagtatataatacaccaggccaacaacattaatcttttgtccttaattcattgncgttttcaacgtgaagacgggcgcagcagtacggacgttacaggaaagccattgctagctctgctcctttaacatgtgtaaaaacatctgtgggtgacaggcagcaccccagctcctggggtcgtgacagaggctctcaggactccttcctattgagatgcacagtggtctaggtgttccccaggcaggaacctgtggaatctttggcttttccttgacctagcccagcttgacccctctctggacttttgcattcctgtccctcagcaagtcgctgctgaactgatggagctcccgttgtcttgataagagggcaccattcctgcgtgg

SEQ ID NO: 521 - DNA, 661 bp, Homo sapiens
  misc_feature [331]..[331]: Chromosome 1, SNP identification no. = rs645925
  misc_feature [331]..[331]: allele = g, in linkage disequilibrium with rs586510, respectively
  misc_feature [331]..[331]: n is a, t, c or g
attgcagtcctggatcccaaattcttttctatgcaaactttcaagttctttgtcacctaagagatatgggtacttttaagttataccagccatataacttaaatccaatcaaaagcagaaagcattttaccccccttggaacaattgatgcttatagatcaaagaaaaagaagtaacaggcaggcgaacaagcactaaattatccagcaaacagcgtcctttgcctcctttccggtgatcagctctcctggttcagactttttgtactgaagtgcacttgcatccaggaggcagctggagagcactgggaattttctcaggaacaagtagnttgttgatgaaggagagcaaagctggagaaaatgctaggcagacaatagagagccagaataagtgagatgggaaggaaagcttcccatcatttccttctgatcaatccaatcaccgagccggaggtcatgaagtagaaagatccccaggaaaccgaacagtacaattaccaaatgataagatgtgattcagaaagctaatatcttccctaaaggctaaggccaaatgacttgtttgaaacagccaggaaggaagggtattgctcttcgtgtcttccttttcaagtccatggttatttgccttttctcgctgccttatgagggcgcttgtt

SEQ ID NO: 522 - DNA, 661 bp, Homo sapiens
  misc_feature [331]..[331]: Chromosome 1, SNP identification no. = rs646020
  misc_feature [331]..[331]: allele = g, in linkage disequilibrium with rs586510, respectively
  misc_feature [331]..[331]: n is a, t, c or g
gggaaaaatatggatttcaggccacagatgcttgttttggagttagaagcagagcccagattccttgtctttcattgcagtcctggatcccaaattcttttctatgcaaactttcaagttctttgtcacctaagagatatgggtacttttaagttataccagccatataacttaaatccaatcaaaagcagaaagcattttaccccccttggaacaattgatgcttatagatcaaagaaaaagaagtaacaggcaggcgaacaagcactaaattatccagcaaacagcgtcctttgcctcctttccggtgatcagctctcctggttcagantttttgtactgaagtgcacttgcatccaggaggcagctggagagcactgggaattttctcaggaacaagtagcttgttgatgaaggagagcaaagctggagaaaatgctaggcagacaatagagagccagaataagtgagatgggaaggaaagcttcccatcatttccttctgatcaatccaatcaccgagccggaggtcatgaagtagaaagatccccaggaaaccgaacagtacaattaccaaatgataagatgtgattcagaaagctaatatcttccctaaaggctaaggccaaatgacttgtttgaaacagccaggaaggaagggt

SEQ ID NO: 523 - DNA, 661 bp, Homo sapiens
  misc_feature [331]..[331]: Chromosome 1, SNP identification no. = rs662140
  misc_feature [331]..[331]: allele = t, in linkage disequilibrium with rs586510, respectively
  misc_feature [331]..[331]: n is a, t, c or g
ctacaaacatttgtctcttttgaatgatccagtccacatacggaatggtatcacttctaagtaaatggtctatttggcagatagcagtaattagtgaacctaatgattgtgcttctctttgtagttctaccagtttagctacctttgttagcacacaccttgtacccacctgacaagaggaagatggggaatggggaattggaaaggaagagggagcaacctcactgaatatggtatgccaagcagtgaacatatgtcgcgtcatcacactctgacaataacccacaaaggagaccaatatcccattataacagaagcagaaaagaaacancccttatgttactttaccaataggaaccttctctagatttgaccccaaatgatattattccaaagcctatgcttttgaaaacttaagaaatgtacagatttattttgagaaaaacaaccttccataattcttgagcatactccatgaatctcctagattctgtggagccaagttggtaaaataccacattagaagtgaagtgctaccagttggaggagcaaaatagcaaagtagttaagagctacttactctgaagcaagactgcctggttgggttctgactccagcatgttccagctttgtaaaatgaagcatgacacttgatgtctct

SEQ ID NO: 524 - DNA, 661 bp, Homo sapiens
  misc_feature [331]..[331]: Chromosome 1, SNP identification no. = rs673705
  misc_feature [331]..[331]: allele = c, in linkage disequilibrium with rs586510, respectively
  misc_feature [331]..[331]: n is a, t, c or g
gtcactgtgaattggtcaaagttgtcatgcttcctgaaactaatttgcttttttgggtatatgttttattgatgaaatgattctatgtctaaaaaaaattaaaactgttgatctactaaaattccttaattttaggcataaaaatggaagctcagacttgtcccagaacacagcacaagtttatggcagaatcaaaattagaatcatttgtcttttgtctgccagaagaatataatattctttctttctcttgtctttattctcagcacatctctgcatctgtctacaaacatttgtctcttttgaatgatccagtccacatacggaatgntatcacttctaagtaaatggtctatttggcagatagcagtaattagtgaacctaatgattgtgcttctctttgtagttctaccagtttagctacctttgttagcacacaccttgtacccacctgacaagaggaagatggggaatggggaattggaaaggaagagggagcaacctcactgaatatggtatgccaagcagtgaacatatgtcgcgtcatcacactctgacaataacccacaaaggagaccaatatcccattataacagaagcagaaaagaaacaacccttatgttactttaccaataggaaccttctctagatttgacccca

SEQ ID NO: 525 - DNA, 661 bp, Homo sapiens
  misc_feature [331]..[331]: Chromosome 1, SNP identification no. = rs789363
  misc_feature [331]..[331]: allele = c, in linkage disequilibrium with rs586510, respectively
  misc_feature [331]..[331]: n is a, t, c or g
atattatattcttctggcagacaaaagacaaatgattctaattttgattctgccataaacttgtgctgtgttctgggacaagtctgagcttccatttttatgcctaaaattaaggaattttagtagatcaacagttttaattttttttagacatagaatcatttcatcaataaaacatatacccaaaaaagcaaattagtttcaggaagcatgacaactttgaccaattcacagtgactctctggggcctaatgtggagaaggattttacaatgagagaaatctgtgattgattagcaatgtctgccagggtcacaaaaagcagacaggcntccctgtgaagaccatcctgtccagaagacaaatatgataagcagatatagaggaatatttcaggctgaaccaggagagatgcctaagcctggtttactctcttcagcaagccatcctactatagaaaattccccctagcctttcttagtctctatgtttctaaatcttggaggtaatatactttttaaaaactatccaatagctaagaccgtgagaagaatttgatatataattactaaaattattccaatcaaactcagcagataaagcaagagtaatatattttatattgtcattagacccagccactacaataacatttttgccta

SEQ ID NO: 526 - DNA, 661 bp, Homo sapiens
  misc_feature [331]..[331]: Chromosome 1, SNP identification no. = rs644690
  misc_feature [331]..[331]: allele = t, in linkage disequilibrium with rs586510, respectively
  misc_feature [331]..[331]: n is a, t, c or g
aacagtcaacccagtgactcatagagtgagaataaagagtggaagagctgtctggacagaagcagcattttcctttgctgatttcacaccatctgtggaaatagaactttcagaaatatgccccctgccgagtcttcccagagttgacggttgtgtcttctagaatgaaaggctggtggacatagaggggcagggttcagaaccaacaccaagaagaaccatcatctgctcagagctgtccagcattgggatttgccgcagcagggagcctcctctctggaacgctgaagcagaggctgaataacaggtgtgactcttgcaggggaggccncattgttgaacagcccttcctactcttgcgatgctgccctgctgtgcaatccagcccttttggaatgatggccattcctcccactgtcatctccttcccctggaatccatgcccagcctcgcctgcagctcttgctgctgtctctcttctggttttctttctgttaaagatgaagagcaaaccatcagaactaggaaaccacctcctaggctggtctgacacaactggacatttgtctttctagtttatcatttggatatcgaaagatgaggttgttagagaacagtgcatatttgaaataaaggtcattttggacttttgaacgcagag

SEQ ID NO: 527 - DNA, 661 bp, Homo sapiens
  misc_feature [331]..[331]: Chromosome 1, SNP identification no. = rs3131812
  misc_feature [331]..[331]: allele = t, in linkage disequilibrium with rs586510, respectively
  misc_feature [331]..[331]: n is a, t, c or g
gagtctccagtttgtgctgcacagcctgggggagaagctttccagtcacctggggagatcgcacgttgcctctggcccagggttggccttgatgttgttgctggaagacaaaagggccttccgcgacacaggggccagtggagagccgtggtcagcttccgttctggctctggatttctaagtcctttcattgctcttctctggaaagagtgactgttctggggacatctgcgtgtctgaggtttttcctgctagtcagactttcatttggaaatgtcagctggagcaacttccaggtgcaagagtctggttcccaggctggcttctcccngggtgcctgggcgtctgcctgtgtctcaggcacacacagctctggacatacagaggaaacagcaggaactggcttctgtgcatcaatcagatccaaaccctggtgtagaggaaaggccacatccaggcagagaggacaggggcaggcaggcagtcatgcagactagtcccctcaaagtgctattgggctggtgaatgggccagttgaccaccatctgaagtctggcccccatcttgctgcttcagggaccaaaagccctttggactggtgatgttgactcaccctagcaaaactcactagaaaataagaacggtgttttctttttctttt

SEQ ID NO: 528 - DNA, 661 bp, Homo sapiens
  misc_feature [331]..[331]: Chromosome 1, SNP identification no. = rs1294348
  misc_feature [331]..[331]: allele = a, in linkage disequilibrium with rs1294302, respectively
  misc_feature [331]..[331]: n is a, t, c or g
agctgactttgcctccctctacttttgcattcactacacattcaatcttttgtaatacaacacaattaggcacctgcccactttatcatctttaatcctcaaaatggctgaggctatgtcacattaggtcactcctaatggctgtgtcctaataacaacctttgtacttggcctcttctatggcacttgacactattaatcacgtccttcttgaattgttctttccccatttatttgctaatttcagattcaccttattttcctcctttcctccctcttttgtcctgcttgtgtgtttaatccttgtaattcacagccctcttggcttcanttttttctgggacattatcatcccgttttatgggactatctgctgatctctctcaagtataaatcctatttcagaaacctcccctaagcttcagaaacattctctccctgatggcttgcaaagtccctcagcaactcaaattcagtgtagtcatctttcactgctaatcttcctatatcttataaatggattagttttacagtatagtcatctcaacccaaaatggaaaatcattacattccttatccctttatctccacattgaattgatctctaagccttaagatcatatatgatccctcaacattttgtcccttcctgctggttcag

SEQ ID NO: 529 - DNA, 661 bp, Homo sapiens
  misc_feature [331]..[331]: Chromosome 1, SNP identification no. = rs1294347
  misc_feature [331]..[331]: allele = a, in linkage disequilibrium with rs1294302, respectively
  misc_feature [331]..[331]: n is a, t, c or g
caaagtgctgggattacaggcgtgaaccaccatgactggccagcatacttaggttttaatattaaaagccaatcagtcaaaacaaacactttcttgaccattgcacctgcatttagatcacgctcacctccatggccaggctcctctaaggagcagctgactttgcctccctctacttttgcattcactacacattcaatcttttgtaatacaacacaattaggcacctgcccactttatcatctttaatcctcaaaatggctgaggctatgtcacattaggtcactcctaatggctgtgtcctaataacaacctttgtacttggcctctnctatggcacttgacactattaatcacgtccttcttgaattgttctttccccatttatttgctaatttcagattcaccttattttcctcctttcctccctcttttgtcctgcttgtgtgtttaatccttgtaattcacagccctcttggcttcatttttttctgggacattatcatcccgttttatgggactatctgctgatctctctcaagtataaatcctatttcagaaacctcccctaagcttcagaaacattctctccctgatggcttgcaaagtccctcagcaactcaaattcagtgtagtcatctttcactgctaatcttcctat

SEQ ID NO: 530 - DNA, 661 bp, Homo sapiens
  misc_feature [331]..[331]: Chromosome 1, SNP identification no. = rs1294345
  misc_feature [331]..[331]: allele = t, in linkage disequilibrium with rs1294302, respectively
  misc_feature [331]..[331]: n is a, t, c or g
gctagagttgctcctttcttcccttcattgatatagaaggtttagttggagatacaaaaattagttaggaagccactttgatagttcgagagaaattctgaggatgacttgaagtcatggcaacagggatagagcaaacatatgtagttaattatcatttggaaataaaatcgataagacatggtcactgactggatatggtagtgagagagaggaggatgagaggaggaggaatttaggtttcctcctggttctaagtgactgggtggattgtggtttcatcggctgagatcaaaatacaaaaggcacaatggaaggaattgcagtaagngagaagacagagagttcacatttgaacatgctgagggcctatgggcagaagggcacccaactggatttaaatcgaaattcaggaaaaagttagggctgaagataaagactttagagtctccaacatatgcattacagtgaaagctataatgatgccaggaaacaagtagtcaagaagaagcatacttagttttttgtttgtttgtttgtttgtttgtttttgagatgcagtctcgctctgtcacccaggctggagtgcagtggcatgatcctggctcactgcaacctctgcctcccaggttcaagcgattctcagcctccctagtagctg

SEQ ID NO: 531 - DNA, 661 bp, Homo sapiens
  misc_feature [331]..[331]: Chromosome 1, SNP identification no. = rs1294343
  misc_feature [331]..[331]: allele = t, in linkage disequilibrium with rs1294302, respectively
  misc_feature [331]..[331]: n is a, t, c or g
gcccttctctccccaggcagaatgcccaccctaggggctgctagagtaaacacactttgcttagcaagcaactcctatcaagggaagcctggatatgtctctgaacacgaagcagtactgttctagttcccatatcatttcaacatttccatcccaattattctcaattgcataatatttcaacttttacattgtttctctcatccctagctaattcaatcatggctaacactgggtgccagaaaatgatgtgcaaaaattctacatagaacactatgaaacgttattgagcaatcttaataaaggaaggatgtatcttgttcattatggnaaggctcaatattgaaaagatgtcagttctctcaaaatttattggtaaagtcaatacaatcccactccaaatcccaccagattatgtgcatgtgtgtagatatgttgacatgctgagggaatagcatcagccaaggtgtagactcatgaagaaacatgcagtatgcaaagaagtacaagcactttgggttttcagagatgagttcagagatgagtttaaagggattaggtgagggcagggctgtagagggcacttggactgttgttgttgttgttttctgaatgtgatggaaagaatctaagaaggaataatcaggttggatttttattt

SEQ ID NO: 532 - DNA, 661 bp, Homo sapiens
  misc_feature [331]..[331]: Chromosome 1, SNP identification no. = rs1294342
  misc_feature [331]..[331]: allele = t, in linkage disequilibrium with rs1294302, respectively
  misc_feature [331]..[331]: n is a, t, c or g
cgatcataaggagatctgtgtttacttggagttgtaattgacagggggatgtactgaaggagaccttgggaaatcaagcacattaggggattgtactgctctgcaaagctaccttactctactccaaccccactgtttatgttgtggtgtcttgaacacagctgagtcattgcccttctctccccaggcagaatgcccaccctaggggctgctagagtaaacacactttgcttagcaagcaactcctatcaagggaagcctggatatgtctctgaacacgaagcagtactgttctagttcccatatcatttcaacatttccatcccaattnttctcaattgcataatatttcaacttttacattgtttctctcatccctagctaattcaatcatggctaacactgggtgccagaaaatgatgtgcaaaaattctacatagaacactatgaaacgttattgagcaatcttaataaaggaaggatgtatcttgttcattatggaaaggctcaatattgaaaagatgtcagttctctcaaaatttattggtaaagtcaatacaatcccactccaaatcccaccagattatgtgcatgtgtgtagatatgttgacatgctgagggaatagcatcagccaaggtgtagactcatgaagaaacatgc

SEQ ID NO: 533 - DNA, 661 bp, Homo sapiens
  misc_feature [331]..[331]: Chromosome 1, SNP identification no. = rs1294341
  misc_feature [331]..[331]: allele = c, in linkage disequilibrium with rs1294302, respectively
  misc_feature [331]..[331]: n is a, t, c or g
tacaaaagagcctttcatccacaataaagttagtgagcaagaatggcttgcagtccagctgttcatgggggcccatggactaaaagcaaactggcagatgagggctttctcttgagctacatggtgcaagatcacctcttcactagtctcagtgggcagggcacaccaagacagaggctggggtggatactttagtcagctactccttgtccagggctctagactgcttcacatgctcatgagggtctgctctttggcatagccatatctcaatcctctgctagtacgatcataaggagatctgtgtttacttggagttgtaattgacagngggatgtactgaaggagaccttgggaaatcaagcacattaggggattgtactgctctgcaaagctaccttactctactccaaccccactgtttatgttgtggtgtcttgaacacagctgagtcattgcccttctctccccaggcagaatgcccaccctaggggctgctagagtaaacacactttgcttagcaagcaactcctatcaagggaagcctggatatgtctctgaacacgaagcagtactgttctagttcccatatcatttcaacatttccatcccaattattctcaattgcataatatttcaacttttacattgtttctctcat

SEQ ID NO: 534 - DNA, 661 bp, Homo sapiens
  KIAA1804
  misc_feature [331]..[331]: Chromosome 1, SNP identification no. = rs1294310
  misc_feature [331]..[331]: allele = t, in linkage disequilibrium with rs1294302, respectively
  misc_feature [331]..[331]: n is a, t, c or g
gtaacaacatattttgttagactttgctctcatcacctaagcagatgcaatctaaattatagagagacttggggggaaggaggatcatgaaataaaacctaatgcttatgcttagctacaacattccaattatttacaattcccagtgaaaatgctacattagtaattttcaagtaaatttcttcttgtcactcttctttagggacaatgttttcacttgagctagctcctgtcctagcaggtttcacaggattgaaagacctccagctgttgtaggccaatgccagggctggctgcatcctttaaccttccctgggatttcatctcattntaagaatatgaagcgatcttcaatattaaagaaccaacatcaaacagcaattctataggctcttttatacagcaaagtttcataggatttgcatttaagtcatttgtcagttctttattgacatctggaaaatccaccctgatttataaacaaagtcaatgacactggccaggtcttcaaggtttcaagtacctgtgcaaggacaatgcacttgttattaacccaaaagtgcattacggtgcacaccagtgcctcttgtctggagaaaagaagccattgaaccaataataaaatcatatttcacgtagagacactttttttttttttgag

SEQ ID NO: 535 - DNA, 661 bp, Homo sapiens
  KIAA1804
  misc_feature [331]..[331]: Chromosome 1, SNP identification no. = rs1294302
  misc_feature [331]..[331]: allele = a, g
  misc_feature [331]..[331]: n is a, t, c or g
taaggagaaggctggtgaggagaggcatgcgtggggcaggcctggcaggcctccctctgctgtgcacatggaggtttcacttggagtgatggtgctggcttctgtgaagaacggactgcagtgggctcaagtgatggctttcaaggttgtctatatgagaggaggcaccgactctgcccagagtggtagcaatggaagtattttgcagggaggttaccagggggcagtgaagataaaatactgcaatataagaattcccaaggatggtttgaaatattagaattttgtttaagagttttatttatcaaattgcagaagtgcaagattgaantaagattatgtggcatcatgtatggtttcctttttcttttttgatgttgcttattgtgttctattttttttttcttaagaggaaataaactttccatggggaactgagccacaaattatggtagctacttacttttatactttttatgtcagtgattaagcatttattatctcaatttttttagtcttttaggaataattattatctatctacagtattatttacaactacaatagttgtatttattatgaaatgccatttggagctcttactatgacaaactgcaaaaggaatataaattttgttttagctttttttcattagtactgt

SEQ ID NO: 536 - DNA, 661 bp, Homo sapiens
  KIAA1804
  misc_feature [331]..[331]: Chromosome 1, SNP identification no. = rs1294300
  misc_feature [331]..[331]: allele = g, in linkage disequilibrium with rs1294302, respectively
  misc_feature [331]..[331]: n is a, t, c or g
tgcttattgtgttctattttttttttcttaagaggaaataaactttccatggggaactgagccacaaattatggtagctacttacttttatactttttatgtcagtgattaagcatttattatctcaatttttttagtcttttaggaataattattatctatctacagtattatttacaactacaatagttgtatttattatgaaatgccatttggagctcttactatgacaaactgcaaaaggaatataaattttgttttagctttttttcattagtactgtgtaaataaaagaactatctgagaaaattatggaaaatgtaatctccanataagatgtttaaatagctcatcagagtgatttggggaagctactaatttcactattatcagttgtaagacataagttccttctctcttctgttcttatactcaggacatgtagcttcatgctatagctgcttcctattccaggaggcacagagaagtcagtccagatgtcccaatggtaactgagatctacatctgcttttgaaacaaagttagtgaaagattagacttttagaagaatggcaatcacaaaagagtcaccacatcttcccccatcattttcatgtttgcgtattaaaaagtaagtagctggccaggtgtagtggctcat

SEQ ID NO: 537 - DNA, 661 bp, Homo sapiens
  KIAA1804
  misc_feature [331]..[331]: Chromosome 1, SNP identification no. = rs1294299
  misc_feature [331]..[331]: allele = a, in linkage disequilibrium with rs1294302, respectively
  misc_feature [331]..[331]: n is a, t, c or g
ggaactgagccacaaattatggtagctacttacttttatactttttatgtcagtgattaagcatttattatctcaatttttttagtcttttaggaataattattatctatctacagtattatttacaactacaatagttgtatttattatgaaatgccatttggagctcttactatgacaaactgcaaaaggaatataaattttgttttagctttttttcattagtactgtgtaaataaaagaactatctgagaaaattatggaaaatgtaatctccagataagatgtttaaatagctcatcagagtgatttggggaagctactaatttcnctattatcagttgtaagacataagttccttctctcttctgttcttatactcaggacatgtagcttcatgctatagctgcttcctattccaggaggcacagagaagtcagtccagatgtcccaatggtaactgagatctacatctgcttttgaaacaaagttagtgaaagattagacttttagaagaatggcaatcacaaaagagtcaccacatcttcccccatcattttcatgtttgcgtattaaaaagtaagtagctggccaggtgtagtggctcatacctatctatcatcctggcactttgggaggccaaggtgggaggatcgcttga

SEQ ID NO: 538 - DNA, 661 bp, Homo sapiens
  KIAA1804
  misc_feature [331]..[331]: Chromosome 1, SNP identification no. = rs1294298
  misc_feature [331]..[331]: allele = t, in linkage disequilibrium with rs1294302, respectively
  misc_feature [331]..[331]: n is a, t, c or g
gtccagggtctcaccatgttccccaagctggtctcaaactcctgggctcaagcgatcctcccaccttggcctcccaaagtgccaggatgatagataggtatgagccactacacctggccagctacttactttttaatacgcaaacatgaaaatgatgggggaagatgtggtgactcttttgtgattgccattcttctaaaagtctaatctttcactaactttgtttcaaaagcagatgtagatctcagttaccattgggacatctggactgacttctctgtgcctcctggaataggaagcagctatagcatgaagctacatgtcctgagtntaagaacagaagagagaaggaacttatgtcttacaactgataatagtgaaattagtagcttccccaaatcactctgatgagctatttaaacatcttatctggagattacattttccataattttctcagatagttcttttatttacacagtactaatgaaaaaaagctaaaacaaaatttatattccttttgcagtttgtcatagtaagagctccaaatggcatttcataataaatacaactattgtagttgtaaataatactgtagatagataataattattcctaaaagactaaaaaaattgagataataaatgcttaatcactgaca

SEQ ID NO: 539 - DNA, 661 bp, Homo sapiens
  KIAA1804
  misc_feature [331]..[331]: Chromosome 1, SNP identification no. = rs1294297
  misc_feature [331]..[331]: allele = g, in linkage disequilibrium with rs1294302, respectively
  misc_feature [331]..[331]: n is a, t, c or g
ctctactaaaaatacaaaaaaaaattagctgggcgtggtggcgggcgcctgtagtcccagctactcgggaggctgaggcaggagaatggcgtgaacccgggagacggagcttgcagtgagccaagatcgtgccactgcactccagcctggggacagagcgagactccgtctcaaaaaaacaaaaacacacacaaaaaagccaatgctgtttcccttagctgcactattctggtaggtttagcacttaaatgctagtgtgaaaaagcagggcttacaaatgaccttcttaaatgggtagagcagataaatactttcctctgtctcctttacnctgctttgatatacttgataatgattacaaaactgatcaaatacggatactttgcataattcagaactaactagctatacccctcacaactacaaaaaaataagacattgcctatttttttttttaattttaatatttgtagtccagggtctcaccatgttccccaagctggtctcaaactcctgggctcaagcgatcctcccaccttggcctcccaaagtgccaggatgatagataggtatgagccactacacctggccagctacttactttttaatacgcaaacatgaaaatgatgggggaagatgtggtgactcttttgtgattgcc

SEQ ID NO: 540 - DNA, 661 bp, Homo sapiens
  KIAA1804
  misc_feature [331]..[331]: Chromosome 1, SNP identification no. = rs1294296
  misc_feature [331]..[331]: allele = a, in linkage disequilibrium with rs1294302, respectively
  misc_feature [331]..[331]: n is a, t, c or g
cacctgtaatcccagtactttgggcggccgaggcggacggatcacgaggtcaggagatcaagaccatcctggctaacacggtgaaaccccatctctactaaaaatacaaaaaaaaattagctgggcgtggtggcgggcgcctgtagtcccagctactcgggaggctgaggcaggagaatggcgtgaacccgggagacggagcttgcagtgagccaagatcgtgccactgcactccagcctggggacagagcgagactccgtctcaaaaaaacaaaaacacacacaaaaaagccaatgctgtttcccttagctgcactattctggtaggttnagcacttaaatgctagtgtgaaaaagcagggcttacaaatgaccttcttaaatgggtagagcagataaatactttcctctgtctcctttaccctgctttgatatacttgataatgattacaaaactgatcaaatacggatactttgcataattcagaactaactagctatacccctcacaactacaaaaaaataagacattgcctatttttttttttaattttaatatttgtagtccagggtctcaccatgttccccaagctggtctcaaactcctgggctcaagcgatcctcccaccttggcctcccaaagtgccaggatgatagatag

SEQ ID NO: 541 - DNA, 661 bp, Homo sapiens
  KIAA1804
  misc_feature [331]..[331]: Chromosome 1, SNP identification no. = rs1294294
  misc_feature [331]..[331]: allele = c, in linkage disequilibrium with rs1294302, respectively
  misc_feature [331]..[331]: n is a, t, c or g
agcagatcatactacactactcctcaataaccatcaatggctctcccttgcctcttaaatagtccacacatcttagtatggcatccatggcactcactgcctgaccacatgcgaaatgcctgtttccttcccccccaaaaaaaccctttctccacttttcattctagttacacctaactactcattgttccctgaaaaagccatatgtttttatgccagtatttacctaattggctttaatgggttaagaaacattaaacagattttccctacaggacttctgacagatctcccaagaaacgaatacagtatcagaaatcaagacaatcantctcaatgaagttatataacttgctcaaggtcacacagctagtaaatgaggacactgatattcaaatccagatctgactgactttaaaggcaatgctagatagagccagaggtggtgtctcttacatgtaatcccagcactttgggaggctgaggaggaaagatgatggcttgactccaggagtttgagaccagcctgggctacacagcaagaccttgtattaaaaaaaaaaaaaaaaaaaaagtccaggcacggtggctcacacctgtaatcccagtactttgggcggccgaggcggacggatcacgaggtcaggagatcaagaccatc

SEQ ID NO: 542 - DNA, 661 bp, Homo sapiens
  KIAA1804
  misc_feature [331]..[331]: Chromosome 1, SNP identification no. = rs1294293
  misc_feature [331]..[331]: allele = g, in linkage disequilibrium with rs1294302, respectively
  misc_feature [331]..[331]: n is a, t, c or g
ctaggcttgaattgtaaatgataaacaatgtggtcaaaccaatgtctaagtaagttattttagtttttattattgccattctgacaatctatgatagtacagtcataaagcaatgaccgcaagcttatgtttctctctctgtagatgtgttttcttgcagcagatcatactacactactcctcaataaccatcaatggctctcccttgcctcttaaatagtccacacatcttagtatggcatccatggcactcactgcctgaccacatgcgaaatgcctgtttccttcccccccaaaaaaaccctttctccacttttcattctagttacanctaactactcattgttccctgaaaaagccatatgtttttatgccagtatttacctaattggctttaatgggttaagaaacattaaacagattttccctacaggacttctgacagatctcccaagaaacgaatacagtatcagaaatcaagacaatcagtctcaatgaagttatataacttgctcaaggtcacacagctagtaaatgaggacactgatattcaaatccagatctgactgactttaaaggcaatgctagatagagccagaggtggtgtctcttacatgtaatcccagcactttgggaggctgaggaggaaagatgatggctt

SEQ ID NO: 543 - DNA, 661 bp, Homo sapiens
  KIAA1804
  misc_feature [331]..[331]: Chromosome 1, SNP identification no. = rs1294285
  misc_feature [331]..[331]: allele = t, in linkage disequilibrium with rs1294302, respectively
  misc_feature [331]..[331]: n is a, t, c or g
cctactaccacaaataacaccatttgtcctccaatgtgaaaggaacaaacgctctgagatgttccttttcccagagtcatacgccagaatacatcaggcatactgtcacctggctcctgctatgacttaccatacatttatcagcagacagttacttgatttggatatagtctgtagccatggaagaatttctatatcaacccagataacatataagaaggaatccataaatctggtcctcagaactgtagctttcaaactttgctgtatatctatatttgctgaatcatctggaatcttcaaagaaaaattattgtttcctcataaagtnagatagactaatgaatgcatatgggttaaatctatgttaaagcacattagtgaaatgttaatggtagaatctaggcagtgggattataagtgaaataatttttgtaagtgaataattttaagggatttttttattttattttattttatttatttatttatttatttgacggcatctggctctgttacccaggctggagtgcagtggcacaatttcagctcactacaacctccacctccttgattcaagcaattctcctgcctcagcctcccaagtagctgagattacaggcacccaccaccacgtccggctaatttctgtatttttagt

SEQ ID NO: 544 - DNA, 661 bp, Homo sapiens
  KIAA1804
  misc_feature [331]..[331]: Chromosome 1, SNP identification no. = rs1294279
  misc_feature [331]..[331]: allele = c, in linkage disequilibrium with rs1294302, respectively
  misc_feature [331]..[331]: n is a, t, c or g
atcattcttccctgaaatactttcttcactggtctccacactcctgattttaccctttacttctagctattcttgggtcctccctgtctccctgacctctaaagactggagactacgaggactcagtccgtggacctctgtctagttttttcttatttacactcactccctagataatctcagccaatctcagggctttacataccttttcatgctgatgactctcacattcatatttccaacctggttccccttcatcaaatttcaaaactgctgccagtatagtcctgttaatatgtaaatcagaccacagctctcctctgttcaaaantctcttgcgtcgtagtaaaagtcaaagaccctgtagggcccccaagactgcatagtctgagggatccctgcttctccctcatgtgctgctgttctgcccaccttcacttttctcccagcacactggcctcttgttttagaaatcttgcaatttctgttctctgtaacaagcatgttctttcccagatgacccatttcctcacttacttagatactgctgaaaatccatcttttctgcaagactttgcttagacacacaatctttgactgctcacttcaacatttccatcctcctttgcaactttagtttttatactaagcacttaccact

SEQ ID NO: 545 - DNA, 661 bp, Homo sapiens
  KIAA1804
  misc_feature [331]..[331]: Chromosome 1, SNP identification no. = rs1294267
  misc_feature [331]..[331]: allele = a, in linkage disequilibrium with rs1294302, respectively
  misc_feature [331]..[331]: n is a, t, c or g
tcatgaaactttataaatttcaactttgaggacaatccacaatttatatggaatgaatgataactttctcaatttatcacatagcatagaatgtttctcatatttcttttcacccatttcctagtggcaccagttccccttcacccctagcaccatctgcctcccccttcccctgactcccaccccggacacataccccactcactatccagcctagggagtaaagcccacactttcattttggcctccgtcccttctcaatctcattctaaatgatccttccagctctcttttgtactctcctgaatgaaccctatattctaacaattcngtgtgccatttctaaaatctacagcattgcctttttctgtctccccactgccctgtgcctccttacagaatggaatgccttcctcttccgccctctataaaactcacacttcctactggacctcccactcaatcagggcaccagcactgagctcttagtccaggctgccatggcattaactgtgaagccacttacaagtccactggcctttggaatctggacacttcctgctccaatattagatgagtctataagcaacatctccccattgccttttgcctaacctcagctacttctctgcattctaatacacttagactgtaccttgcc

SEQ ID NO: 546 - DNA, 661 bp, Homo sapiens
  KIAA1804
  misc_feature [331]..[331]: Chromosome 1, SNP identification no. = rs4649302
  misc_feature [331]..[331]: allele = t, in linkage disequilibrium with rs1294302, respectively
  misc_feature [331]..[331]: n is a, t, c or g
atttctgtggccaaaaaggttagtttgcctggtttgtacattaaaatcagtggtgaccagctagtgcactgtggttcttcctgcgtgaatgacaggaagcggaagttggctgccaaccatgtgtctttaggctgaaacctggcagtgtgccccattatattacctgttgtgagatgggctatttttggtttcagtcactttgtccaaaagatatggaattccaggaattctgctgaacacctctgagatggaatccaaaacaatgggcttttcatggtaccctaaagggttgacatttggagtgtgatttgaacttgttttccgtgagccngcagtgtggaggtgcctggctcctatggaaactctggacctggggaatgggggctggtgttctgaaactgtcagaaccaagtctgctaatatcatacgctgccatccgtttatttgggaatgaagtttgttagtgtttggtttttagttctcacttttgactctgtttttattatttagagcagactttctttgacctttgcatcgcaagggctgccagcccttacttggggtctgggtgtggataaggaggcaaggaagtgttttgaggcctattttcatcagtcgtttctcatgtctgcctgcctggaggtttgtaagaatgaggaga

SEQ ID NO: 547 - DNA, 661 bp, Homo sapiens
  KIAA1804
  misc_feature [331]..[331]: Chromosome 1, SNP identification no. = rs1294264
  misc_feature [331]..[331]: allele = a, in linkage disequilibrium with rs1294302, respectively
  misc_feature [331]..[331]: n is a, t, c or g
ttagagctctttatgagtagttctctttctgagaaagtaaatgatttctaagagcaagaaacatttcctgagatatcacaagtaggatcagaagtctgtaaaaatttacctgatatgaaaaaatacattattttctgacctaagtacagaatgttttctactgaagtggagaatattgaaattagatgatatattaccatagctgattattatcaaacattatcttacattaaatttgcaaagtgcttatagattctttaactgataaagataatgtaggagatataattgctttactggagctcaaaatgtagcaaaaagtaaacacagnggtcatccagttgctggttttctcaatgccagcctcctgccaatgtagaggatgcacagggggaactcccgggagtgaagctgatgccagcatctgtccctgagctcttgtgtagctctgcaactacaacaaatgtgcttttattattattattattattattattattattattatactttgagttctagggtacatgtgcacaaggtgcaggtttgatacataggtatacatgtgccatgttggtttgctgcacccattaactcgtcatttacattaggtatttctcctaatgctatccctccccctgccccccatcccatgacaggc

SEQ ID NO: 548 - DNA, 661 bp, Homo sapiens
  KIAA1804
  misc_feature [331]..[331]: Chromosome 1, SNP identification no. = rs4649222
  misc_feature [331]..[331]: allele = g, in linkage disequilibrium with rs1294302, respectively
  misc_feature [331]..[331]: n is a, t, c or g
aattaatacaaagtatgtcataggcattccctgaaatacagaatgttttcttaaaaatgcgatttaagaacgtgtctgttggagattgttttgagtttcagtgttatgccatttttcttactacatgctgggacagtgccagagtcctagaactcagagatggatgtggtgtttgtacccttgaatgattctttgaatgccaggctagtgatttggaccttgttgacaagtttttaaaaggggctgcatataatctcttgaagccagacattgaagcagaagctcccccgactcccgctgtgccttccctccttctttcccttatttgtgntaatgggatcactgttctcccaggtacccagtctcaagggtctttttgcagtgttcctgtggtcttctgtgtgacaaagaccatcagtggcaattttctgccctaatccctgccaacctcactcatcaccagcatggctgctggaccatccttactgggcactctctgtgcagcctttcttccctcatctgtccccttctccttctaaaatgcaaatctgatcagccttgtttccattgcccacttttttgccatgttcactccctttctcctcacatattttgccttacatctccaccgcccctgtccccagccatactgaatttcttc

SEQ ID NO: 549 - DNA, 661 bp, Homo sapiens
  KIAA1804
  misc_feature [331]..[331]: Chromosome 1, SNP identification no. = rs10752755
  misc_feature [331]..[331]: allele = t, in linkage disequilibrium with rs1294302, respectively
  misc_feature [331]..[331]: n is a, t, c or g
cacagattgcttaaggtaggaggcatcagacttggaattaatggtgagtaacttggctgtggtctgtgttattcagtaagccgtagcctccgtagatactgggtcctccctaaactcctggctccttatctctgtgtgtctgtatttgtgcattttgtgcatgcacctgtctgtgaccccccacacagaggcatgccaccgttaatgattaacagccactgccagggatctggatttgccattaccagagtggcctgtgccaagcaattcaacaaatattactgctagtaatctcatcaaccgaaagaatgtttttgtgcttcatactttngaagtattcaaagggttctaataccccagttttaaaatttacttttgaatgtgttcaaatttattcagaaggaagattacttttgctgctttctcttcaatcttatttttttcttttctgaagtcttaggcaagtgattttttgtttattattcacaaatttgttcacagggattcatgatttagcttgggacctggaattaaaaatgtttttttattcaattactatcgtagcaacacacaacctacttggatttgctgttctgatcgctttctcatgccatctcatttaacaatagctaattggattgatatcaacatcactgaaaag

SEQ ID NO: 550 - DNA, 661 bp, Homo sapiens
  FMN2
  misc_feature [331]..[331]: Chromosome 1, SNP identification no. = rs7542728
  misc_feature [331]..[331]: allele = a, c
  misc_feature [331]..[331]: n is a, t, c or g
ttttaggtcttatgtttcagtctttgttccattttgaatttttgtatatggggtaagaatttactgggttttaatgaaagcaaatctcaaatgaagttttgcccaacatgtaaacatttattaaacatacaacattagtttgcacaagagcctatccaagctgacttgagagtcagagcgtggccagcttgccactctggtaggtgcttgacctcaccttgtgtgaaaggtccatgtgatacaaacaccaaggaataggattctgtgaccgactgttggcaacaggcaaagagacatcctcctaaactagaggtgggaggtagcactctcnggctgtcacaccttgacatcatcccttgcctgagttttatcctttttaagtgtggggatgttctctgatgttgtactcaatctacttacattgaattccttcaggttctccaatgatagctcattgtctaacattcattatgttaattaaagccactaatttcaccaatgaaaaactatttctgatattcagtatgctaaatagcgcagtttctggtgttggtcgagataggatagctggaagatacatgagtagctcaaatgcttagccaggtctgaaatgtggtcctttctgatccaacgctgaggctaaccccaggaatctgaattc

SEQ ID NO: 551 - DNA, 661 bp, Homo sapiens
  MYT1L
  misc_feature [331]..[331]: Chromosome 2, SNP identification no. = rs6719219
  misc_feature [331]..[331]: allele = c, in linkage disequilibrium with rs17338512, respectively
  misc_feature [331]..[331]: n is a, t, c or g
tcaagagatagcaagggttggtgaggttgtggacaaaagggaagccttgcacactgtagatgggaatgtggcttggtacagccattatgaaaaacagtacattaaaaatagaactaccatgtgacccaccaatcctcctgaggaaattccaaaggagacaaaatcaatgcctcgtaaggatgcctgcaactcccatgttcattgcagcatgattgacaatagccaagatacagaagcaacctaatggacaaatggatggcaaaaatgtgggggatatatatatatatatatatcttcaatgaaatattattcagccttaagaagaatgcantcctgctatttgccacaatatagatatacccagaaaatattatactacgtaatataagtcagatgcagaaagaaaaatattgtattatctcacttaaatgtggaacttttttttttttcctaaagagctcagcctgggtgcggtggctcaggcctgtaatcccagcactttgggaggctgaagggggtggatcatttgagctcaggacttggagaccggtctggccaacatggtgaaaccccgtctctactaaaaatacaaaaattagccgggcatggtgatgtgcatttgtagtctcagctactctggaggctgaggtgggaggatcac

SEQ ID NO: 552 - DNA, 661 bp, Homo sapiens
  MYT1L
  misc_feature [331]..[331]: Chromosome 2, SNP identification no. = rs12468174
  misc_feature [331]..[331]: allele = a, in linkage disequilibrium with rs17338512, respectively
  misc_feature [331]..[331]: n is a, t, c or g
agcccaccccagaaaacacattttgcattgattttaacgttaatgcttgaaagagttcatgcccacagacaaacattcttctgtatcagagggccacgtggtccaaggctgcgtccctgagaaagagaagaattcacttcgtcgaagaggaagactcgctagacagcctttccaggttgctccccatccaactattcagtcctctatgttgtttgaaaaaaaaaaaaacagcaaaagccttgtgccgccagggcaggggagctgctccgagttctgcctctgtggggtccttcaggagcccgtgctgggagcttcccgtccacacccactngatattaggcactacccaatctgttggtgtaggcttatgccagcctcctgaagtggagagagagagattgcccacacaattttgggcggagctcagccgagttcttcacacacgcaggccagccagaggaccatccacaggcaacatccaggcagctcctgggaaacaggctgcccccttctctaatggacattctgtgcacagctgagatgaacagttcatgcacgagtctatgcagtccagcccaacactcctctgagggaggcagctggtgtctaggattcggtaaagtgcccacactggccataaaggtgactcaggcccccaccc

SEQ ID NO: 553 - DNA, 661 bp, Homo sapiens
  MYT1L
  misc_feature [331]..[331]: Chromosome 2, SNP identification no. = rs11127292
  misc_feature [331]..[331]: allele = t, in linkage disequilibrium with rs17338512, respectively
  misc_feature [331]..[331]: n is a, t, c or g
gtgtttagctgagagacagctttctgtctgcggaacagttgggcctccctcggcccgggccacccctgctagaatccctgcagggctgccaggatccacagctcgcaacccagaccctccagtctccctcctgggcacggccttgggacacccggtctctgaacccttctcctcagtctcctctggtgcgggcagagatgggccggccccagcaaacctctcacccacgtcccccgcacacccttgtcacacagtggaggggacagactggggccacgtcatatggcatagggtgaagccgtaaaaatgtgtttttaagttttaagaggtntgtttaatggggacagtaacacctaggccacagttttattataattgttaaataaagcttcaagccctagacccctaactagagcatggcacatggtggtactgagggaaagtctgttaaatgaacaataacaggaccaggcagccagggctggccctgctactttgaagcaccgattaggaggagaacttggcactggatgtttggttttctatttcttgctgaagctctgcctttgtcccaatcaggcacatgattagttcagattttgcttttgcttcatgtatcttgttctgaatattgagtttgagtataattgcaataggtcac

SEQ ID NO: 554 - DNA, 661 bp, Homo sapiens
  MYT1L
  misc_feature [331]..[331]: Chromosome 2, SNP identification no. = rs11685526
  misc_feature [331]..[331]: allele = g, in linkage disequilibrium with rs17338512, respectively
  misc_feature [331]..[331]: n is a, t, c or g
tctaggatgttgtcactttttatctctccaaaatttggtattgtcagacttcaaaaaacattgtaattaaacggcaggggacagtatctcatctgggcttactttccatttctctgacaaataattgttgattatttttccatacacttgtggtgtatgtgttcccgcttgtgaaatgcttaacattttctgcactatcttttattgtgttgagtatgcttttatttatttttaatgctttatatattcttcatgtaaatcaaaaatatatcttcttccagattataacttgaccttccactttccttaagatgtcttttgatgaacaaanttttaatattaatattttcaaattaattcatcttttcttttatagtcaatgctatgggggtcctgtttatttttccttactccaaggtttaagtacatagtcatctatgttttctaggaagagttttactttagttttatgtttttgtttttgttttggtacagacaggatcttgttatgttatccaggttggtatcaagctcctgggctcaaacaatccttctgccctggagttacaggcgtgagccactgtgcctagacttaaggcttagtttttgatatttaactccttaatccatcttaaattttctttgcatatgatgtgagaat

SEQ ID NO: 555 - DNA, 661 bp, Homo sapiens
  MYT1L
  misc_feature [331]..[331]: Chromosome 2, SNP identification no. = rs17039339
  misc_feature [331]..[331]: allele = a, in linkage disequilibrium with rs17338512, respectively
  misc_feature [331]..[331]: n is a, t, c or g
gggaggtggagtttgcagtgagccgagaccgcgccgttgcactccagcctgggctgcaaattagaaaatgttttcctcgccaatatgattgaaggagagcgagtttaaaagacttacaagcacaattatttttaacatggaatcatgtttaaaagagttgcactataaaatgaaaatccggcagttcgatccacgggctggggggcacctccttgacttccgccgagcaagggtctgtgggcgctggttcctccgcgccggcctcccggtgaccgccatcgccacctggtggccgtgggtctaacacacaggttcactggaaatggacttngggggagtctgcaggattcctgagattaaaacacccaccacacagtgcgcactcaatggggacagctggtaggaatcttcggtggtcgctatgagcgaggtattgcacggttcagagatgaggataatacacacacacgtgtgtgcaatgcgcacattcgtatccacagtgcggagtggggagcatgggatcatctttcgtaatttacaaactgctttataggaacaagtaataccttaagagttaccttaattataaatttttagcttctcttgtttgagtttcaccaacagcttgatttttgtaagagcatgactccccttagcttca

SEQ ID NO: 556 - DNA, 661 bp, Homo sapiens
  MYT1L
  misc_feature [331]..[331]: Chromosome 2, SNP identification no. = rs11687473
  misc_feature [331]..[331]: allele = a, in linkage disequilibrium with rs17338512, respectively
  misc_feature [331]..[331]: n is a, t, c or g
cacagactgacttctggccggaaacactggtctgtgaaattggacattggctaagcgagtctatcctgaacgtaaacgccaccaagtgtgcctgcttccgaaactaccaggaagatcacctggccctaaaccagtattcaaagaacggttctcggaccacttccgttagaaccccaactttgcttttcattctccttggagctccattcgagtcctaaggtatcagaatttctagtatagggcctggatataaaaaattttaataagtaccccacaaattcatatgcacattaatgcagagttcctgcccagagtgacagcacattcactnagctgatgcatccacctctgaggctgctgggagctggcgtccccagcaccatcttgctctattgccgcatacccagggagctgggttctttgtctttgtttcttcatttaattttgtcaactgagacctgggaaatgtaatgacacatccttctcatttcaagttctttatgttatgtaaaatgataaaaacattttacaatagaaggattcaacataggcacaagtggggctgagccccaaatatacatcttcaggctcccagagtggcctcacttgtttcattgatacccgaccattcttcctcgtgcaggcacgggtcactctgaag

SEQ ID NO: 557 - DNA, 661 bp, Homo sapiens
  MYT1L
  misc_feature [331]..[331]: Chromosome 2, SNP identification no. = rs12474442
  misc_feature [331]..[331]: allele = a, in linkage disequilibrium with rs17338512, respectively
  misc_feature [331]..[331]: n is a, t, c or g
acccgcctcggcctcccaaagtgctgggattacaggtgtgagccactgcgcccggcctgttttgtttcttacttaattgcaactactgtcaggcaacataaattgtatttcagtgataagtcttcaaaatgccttgtcacagatttgcaactgatgatttgctcttacagaaaatatgaataagtataactgaggcaggtagggtaagagatagcatcttagccagcagggtggtgatgaaggcccccacctcgggtctcgaacagagatcagagccccatgtagaaagaaaaacaaggttgggggttctaatggaggtggtcccagaacngttctttaaacaatgctcatttagggtcaggtggtcctgctggtagtttcagaagcaggtgtactaggtggagtttattctgcagatagacccacttagccaagatcttatttctacattctacctggagctctgatctccattgaagacctaatggggtggtaatgaaggcctccacttctacttttatcagtgcgggcagtaaatttatttgccacctttccaaggtcacggggttacagatcaagaggtcacagggtggcaagtcaagttactgcgagcactgataaaagtagaagtcaaacagccacctgagagcaagagaacatt

SEQ ID NO: 558 - DNA, 661 bp, Homo sapiens
  MYT1L
  misc_feature [331]..[331]: Chromosome 2, SNP identification no. = rs17247359
  misc_feature [331]..[331]: allele = c, in linkage disequilibrium with rs17338512, respectively
  misc_feature [331]..[331]: n is a, t, c or g
catccatttccttacagacatactttaaactgtcagaggtagatcatagaacttgaaatctcctttccaacttaaggaaatactaattgtctttggctggggaggcccgtgagctccacttctggtgcccctggagagctggcgcaggccccccttccagcagagactcatccaggaaagcagctggcaggccttgactgccccttacctacaggttaggaggaaagagccccgccaaacagttttctaagccaaagtgtttattggtgaagctgcaggtgaactttgagtgcccttctttccttctgtcacagtgcattgatgtgttccntgtccaattcatgaaaataaactgttctagcaggacactgtgtttggaaacttgtgtacatggaatgcagtcctaaaggcaagggctaaaggcaagctctgtctttgagcaacggcgtgtatgtgcttctgaaaaccatgtctatcgtctgttgacagcacgtgtctttctttcatatgccctgaaagcacgttgcagaatgtcacaagtttatgcagatggtatttcttctcattcattcccacacagaaaataaaaaggatagttggtcaactgacaatctggggtggctaccctatgtgaggcattgtgctaagtcttggaaagtaa

SEQ ID NO: 559 - DNA, 661 bp, Homo sapiens
  MYT1L
  misc_feature [331]..[331]: Chromosome 2, SNP identification no. = rs17338519
  misc_feature [331]..[331]: allele = t, in linkage disequilibrium with rs17338512, respectively
  misc_feature [331]..[331]: n is a, t, c or g
agcacagttcagatgtggtaacagcatcaggaaaggccagaggtttgggagcgggaagcgggagggaaggcagggtgggcgtggtgagtttaggttgagctctgtagatggtgagagaccatgggtgagtttaagcaaagaggagacagggtttgatttcccagtgtgaagtgtggattggaggagctaacgccagtgcctggaggacagggagctgttgacagagtccaggagaagttgttcagggtctccaggaagacagaggtatttggtttgaagaaggtgaaggtgtgtgtggtgggcttacagtgcagcaacgctgtgcagatcnaggtgggattcagacatcattgcgtccaacagaggagaagagcaaaaaggcttcacagtacagctttgaaaacatatacaaattctacactcacccctcaaaacctgggggtttcatatgtaaaacagtgagtgtttcccacgtcacagggtcattgagggttacacacactaatgcctgtaaaacctgcagcgcagcggctggcaagaagcaccagccctttaaaccctggttaccctcattattattcataaagaacccaagacacacttgcctcgccataaaagacggaggcggaagtgacctgatttacatctgtgttatgcttta

SEQ ID NO: 560 - DNA, 661 bp, Homo sapiens
  MYT1L
  misc_feature [331]..[331]: Chromosome 2, SNP identification no. = rs17338512
  misc_feature [331]..[331]: allele = t, g
  misc_feature [331]..[331]: n is a, t, c or g
aaatccaactggaaggggtgtttccacgcctggatacagagggagttctgtccataaaaccgcgcataagccaaaagaaaacatcttcccggaagggtgagggatgccggtcagcagtccgtggggcagagccgggcgtgaccacttgacaggaccaggccacacaaccgggtggggtgggattccattcggcctgttttcccacatcctctgcaactacaaaacaaaaatgtaaacatgtgaatttaaaaaaaaaccatagcaaacatggagaataaaataccaaacacaaaagagaacgatttccggttgcaggggactgtatgccacnagctcgataaaaaggttaatgctgaaaaagatgttaacgatgccgtagatgtttttaaagcctccttatgtttgcctcggactttaaaaaatcttatttggcatgtgaatctgtatcatatgtgatttagccaaaacacagagtattagttgacattttccactgagatgacttggtagaatctgtgtatctttaaggtagtattgtacatggtaatacattattacagaaaaagccaaaagaggtgattgagagagcggaaacacaacctgcagagtgtgctcctaccacactgcccaaggagcttagagagaaaaggtctgctgttcc

SEQ ID NO: 561 - DNA, 661 bp, Homo sapiens
  MYT1L
  misc_feature [331]..[331]: Chromosome 2, SNP identification no. = rs17338505
  misc_feature [331]..[331]: allele = g, in linkage disequilibrium with rs17338512, respectively
  misc_feature [331]..[331]: n is a, t, c or g
tgcaactgctcatcactgccaccgctgtctgaaatgagccacaggcaacagcgagcaaatggcatggccacctgacaataaaactttatttacagcatcagtagagaacagatttggcccgtgggcctaagtttgtcaacccttatttacagcgtcggtagagaacagatttggcctgtgggcttgagtttgtcaacccatggtgaagacttaagttcccagttctgaaatagccacagtcagttttggaagagagatgttccctgactcctccctgggtgagcagatccttgcaaactcgcatgacagtctaaagctactgtccacagangtgctactcccaggcaagccctttgctgatacgtgagcgtggtacccagggtggagctagcagaagcttccacaaagtctgaaagaaggatgaagagagcaaggttgccacctctgtggaaatcagagcagaattcaagagactcaaaagatttcaagaggagaaaatgtttctagtgcgtttatgcctgtatcaccctgtctgactagaaatatcatcctgaaaactgtgtgggatgtgaaaccaaactaaatccaactggaaggggtgtttccacgcctggatacagagggagttctgtccataaaaccgcgcataagccaaaagaaa

SEQ ID NO: 562 - DNA, 661 bp, Homo sapiens
  MYT1L
  misc_feature [331]..[331]: Chromosome 2, SNP identification no. = rs12467137
  misc_feature [331]..[331]: allele = t, in linkage disequilibrium with rs17338512, respectively
  misc_feature [331]..[331]: n is a, t, c or g
gcccaaatctcagatcctgtaaagtcgttggttctgaacgagtgaatggaatgggaactctggtattatcttctcaatactcacatttagaagtacttttatatatgttactctgatgaatagcagaagaaaattctggtaaaaatggcaatttctcagcatgctctataaggaaagctgtggtgtgcattttaaggttcactgtgcaattgtgatttatttgtctgccgaccgccccatttgcctgtctgataatagaactacttaccactgcacagaaattagaggctgggattgtcttccatatgctgcaagcttgtgggtgctgcangctttgagagctttatgaactgctgtaataggtcacagttgttctaattattttctcatctataccctattcattttccctgaagaaactcactgcactcattggttccgtttggggaaggcattatgtttaatcgtacatttccccgaggttaaaacaacaacaacaacaacgacgacgacaaaaagaaaaaaacaaaagaagctattcacattgagtgttcatgcatacttggcttcagaagcagttaaagtttctgaactgtaggtgtttcatacatccaagctatcttgtttatctcatctcattgaattttagtaataagttaag

SEQ ID NO: 563 - DNA, 661 bp, Homo sapiens
  MYT1L
  misc_feature [331]..[331]: Chromosome 2, SNP identification no. = rs11683072
  misc_feature [331]..[331]: allele = t, in linkage disequilibrium with rs17338512, respectively
  misc_feature [331]..[331]: n is a, t, c or g
aaggggctcctggtgacagtgcaggtacccctgcccagcacggggctcctggcgacagagtacaggtacccctgcccagcacggggctcctggccacagagtgcaggtactcctgcccagcacggggctcccaggattgctgcaggcagcccctcctctggtgcttgtcccatttgctgctttgagtaaatactttcatcttagctgcctggtgcttcatggcttccgggaggcagttaaaagttgcattgcgcatcctctccaaagagacaattcatgccaaaaagagtcctttgcagttaaattagatgaggcatcactgctgaagttntatagggcaggaatgatgtgagcctccttgtgggtgctgagaggatgcctcggggtggccagtggggagggaatggtgcccatgaccctcacgtggaaatggctcatgtagaatcactgcacacagaatctacacttgcagcagaaggaactggttagtaaagcatgtggggtctgatttggaggattggggagggaagagattggcgcatacctagtggctgctgcctggcagcacatatttttagggctggaggtcgacaagactgaaatatggcccaaatctcagatcctgtaaagtcgttggttctgaacgagtgaatggaatggg

SEQ ID NO: 564 - DNA, 661 bp, Homo sapiens
  MYT1L
  misc_feature [331]..[331]: Chromosome 2, SNP identification no. = rs11680102
  misc_feature [331]..[331]: allele = a, in linkage disequilibrium with rs17338512, respectively
  misc_feature [331]..[331]: n is a, t, c or g
aacctaggtaaaagaagccattgtttgtccagggtgaatgctcctgaatctttgtagatgatttcaaggtggtatgtctgatgcaaaaatgtttcaggggcatttgcctgaggaagaaactgcaagaattccttgcatttatactatgtgggtgttgagaaaaagccataaaacacaccattgttatcagagattttccagtgtagatagctgtgcactgctataaataaaaccccaaattataatttgtattaaaagctaagtgtatatttttaaatgttacaaaataactccaaactgatatctgtagactttgcaacaaaacgaatangctaactctcattcaaattttgaaccttgatttttcagggtaattttaaaacctctctagctccatgtatctattttggcattattttgttctttatgtgtttgttttagtaaattcttattaggggaaataataataattgttatggttgcattttattggctgcctttgtgtttcctaggaaatcttgtgttatcttatttcaagttccacttgctaagcactctggctatcatcttattacaggcgggaagtacagtatctgttagaggatttatggtaatgctgctgcatctagctgctcataaacagcatggggagcccctcagg

SEQ ID NO: 565 - DNA, 661 bp, Homo sapiens
  MYT1L
  misc_feature [331]..[331]: Chromosome 2, SNP identification no. = rs11674222
  misc_feature [331]..[331]: allele = t, in linkage disequilibrium with rs17338512, respectively
  misc_feature [331]..[331]: n is a, t, c or g
ggcaccgccctggcaagagagggtggaggaagacaggcttggttcttccttccttcagcagtgccccacggtggaggcccttctcagagaggacatttgcatgataattcccgaaaccactgagccaagactcaaagctacgaattcacactcaacatacaacacacatagaaaggaggtctgagtgagcctcacaaggagagcaccacacttctctactcatggctcacttgctgcctggggattcatatcaggtgccacagcagtgggattcttacttaaagcatttggtgctaaaaaacagatttaaacttttagcctagccctgctnttgtcagatacagaacctgaacttcagagagatttattcactcaacaaatgttcacaccaagattggctgagatgggtcttgctaacccagcagtaatgacagtccatacaatcaataacatttgatgaatagttatatttttaaatcataatattatgtcagtatcaataatgtcaagtttatatgctagttgccttagtataatctgattgaggaagtagggacccagttaaaaaggtcaaaataaaagaggccacctcacagtgagtacccactaagcgcacattcatcctcatcaaactgcgttgtctgggagggagtctccacat

SEQ ID NO: 566 - DNA, 661 bp, Homo sapiens
  MYT1L
  misc_feature [331]..[331]: Chromosome 2, SNP identification no. = rs17247345
  misc_feature [331]..[331]: allele = t, in linkage disequilibrium with rs17338512, respectively
  misc_feature [331]..[331]: n is a, t, c or g
gacacagaaaaccttaaagcagttttcctgttcagacagtatcgaggcaagggtccaggaaagtatgtaaaaccaggctcgggcatccttgccttgcagaggctcctctgaaactcagttcacagaggatggtttcgccttctccttacggtggtgtctgaggtgggcttttgtcaggcatttgtctggttcttgctgttcagtgttatacgtctgagaaagaagcactatcaacgtgtagctctcatcttttaaccaatctcacacggagcttttagggtgaaaaacaaagagcgtgacccatttccactagtagctaatcctacaggtntgattcaggttaccagacaggcacaggcactgccgtttcagcaacacttagctaaacaaaaggtcttcttgacaagaaatcttagaaaagcaatgatagcaggaaagaatatgtgcacctcagatgctgatacctccaggaaaagtcaccaggagctggcttctttccatctgtgtcccacaggggtggtgggcaccgccctggcaagagagggtggaggaagacaggcttggttcttccttccttcagcagtgccccacggtggaggcccttctcagagaggacatttgcatgataattcccgaaaccactgagccaagactcaaagct

SEQ ID NO: 567 - DNA, 661 bp, Homo sapiens
  MYT1L
  misc_feature [331]..[331]: Chromosome 2, SNP identification no. = rs11675244
  misc_feature [331]..[331]: allele = a, in linkage disequilibrium with rs17338512, respectively
  misc_feature [331]..[331]: n is a, t, c or g
ctgttctcatgatagtgagtgagttctcataagatctgatggttttataaggcagttttccctggattctctcaaattctctctttcacctgccaccatgtaccatgtgcctgcttcacctctgccatgattgtaagtttcctgaggccttcccagccatgtggagctgtgagtcatttaaacctctttcctttgtaaactgccgagtctcaggcagttctttctagcagtgtgagaacagacgaatacaccctaggttctaggttgtcgtatgtgaacaggttacactgtgtatgcttccctgtaccatcctctagtcactttgctacanatcttaaggattctgccttgtcagtgcttataggtcagtcttagattgcctatttaccacaaataatctaaccattctatcactgaagagttttgattatacacaatattgcattgaaacattttatgcaggtatctatgcatatgtgtgactaaatatatatttggtagataccaggaactggaattgtcaggctagcatatgcacattgaaaattttcattcacactgccaaattcccgacacaacaaggttgttccatttacatccacgcaaacctgtgtgacagtcctgttgacgacatcgtccccgctacacagcagacggggaa

SEQ ID NO: 568 - DNA, 661 bp, Homo sapiens
  MYT1L
  misc_feature [331]..[331]: Chromosome 2, SNP identification no. = rs964568
  misc_feature [331]..[331]: allele = g, in linkage disequilibrium with rs17338512, respectively
  misc_feature [331]..[331]: n is a, t, c or g
aaggactatgctaaacaaatgaagaattcaccaagtaataaacatcttctgtactctcaaggagccatgagttccttggggggcttggaaggagggtgaagtgaactctattatcattattgttattcaattcattcatttaatggattctctctcctctggcccctggtaatacaaaaatgaacaggtgcaatccccatcttcaagcaccctagtttctttgataacaacagtggcattagcagaagtgggcaaacagtggaatcactggctggctgtgtgaaacagtgtgtgaaggtatgaacggatcagcgagaggatgacctcattnatcattcagaggaacagcctcctcctgagggccagaatgatctaaaagtctttgagtagagaaatgatgggatttgatgtgaaggctggtaaatctttgagatgtgcataaagagaggcatggtgtgaaccaaagtgaggaagtatagtttatatttgaggaacatggagaggacaaagcagcttaaactaaaggtcacataaggtggtggtaagtcttaggaattgagaaataacatgtcaccaagcttcgggagacctaggaaccaggctacagtgcgtgcttttagttccagctccgattcctactgttcctcactcactaaagcaa

SEQ ID NO: 569 - DNA, 661 bp, Homo sapiens
  misc_feature [331]..[331]: Chromosome 2, SNP identification no. = rs308004
  misc_feature [331]..[331]: allele = t, in linkage disequilibrium with rs308019, respectively
  misc_feature [331]..[331]: n is a, t, c or g
atcaataacaatatcctggttgtgagtttacactttagttttgcaaaatatggccttaatggaaactggagaaataatacacgggatttctctgtcttatgtcttacaactacatgtgaatctataattacctaccaataaaaacttgaattaaaaaaaaagtttttagaaaaacaaaagctgaaatatttggtgacagaaaaccagaacaacaagaaatattaaaggaagttttcaaaattaaaaaaagtgaatccctctggaagcacagcaatgcaagaagaaatgaacaactcaagagagagtaaatatgcgggtcaatgtaaaagantatgttacttaggctgggcccgatggctcatgcctgtaatcccagaactttgggaggccaaggcaggtggatcacttgagctcaagagtttgagaccagcctagccaacgtggcaaaaccctgtctctactaaaaatgcaaaaattagccaggtgcggtggtgggtgcctgtaatcccagctactcggaaggatgaggcagaaggatcacttgaacccaggagtcagaggttgcagtgagccgagattgtgccactgcactccagcctgggcaatagagccagactccatctcaaaaaataataataataataaaataaagattatcagt

SEQ ID NO: 570 - DNA, 661 bp, Homo sapiens
  misc_feature [331]..[331]: Chromosome 2, SNP identification no. = rs308006
  misc_feature [331]..[331]: allele = a, in linkage disequilibrium with rs308019, respectively
  misc_feature [331]..[331]: n is a, t, c or g
gagaggacaatggagctaaactagtaagatattcttatatattttatgaagcagtaaaatactgatataaggtaaactggaacattttgtaattttaaagacaattactaaaaaattatactgagagttattacaataaatctaatatacaaccaaagtgattattaattatttttaaaacatgataaatttcaaagaaaacatgaagtaaggaacaaagaaaatatataaatgaaaccaagaggaagtaattagcaaggtgtcagacttacacccaacgatatcagtacttacattttaatataagtgaatcaaatacttcaaataagcnaaaatgttttcagaactgatcaaaatgcacacacacaaaataattctatgtgcaaaaacacatatgtgctccctccacgctcatcaggtcagcaagatggaagctccactctgggtgggtgtaaccaagaaaatgaatctccctgttccccccagttccccccagttcccaatcaaggaaccccttggaggtgcagcaaaccagcatttctactttcctgcagctccacgtgatggggaatataaggttggggactcccttccttcacccagtccccactcataaggtagaggccccaccactggtacatcaagctgagaatactgtagt

SEQ ID NO: 571 - DNA, 661 bp, Homo sapiens
  misc_feature [331]..[331]: Chromosome 2, SNP identification no. = rs307973
  misc_feature [331]..[331]: allele = c, in linkage disequilibrium with rs308019, respectively
  misc_feature [331]..[331]: n is a, t, c or g
aaaagcagtagaattattgtgaatatttgtcaatgaaaaaaaccttgggcatcatctactttagtactttcgtcttaaaggttaagaaattatgctccaaacaggggcaggggaccatcagccaatgagtaacaaagaaaattacattaaaaaaaaatatatgcttcatctaccctctccatggtcatttcattaactacacagttcccatgtttagctgagttataaagggaacatgatggccctaagttgcttaaaagcctttgataattacctgttttccatgcaaaaatatatagactccctggcataattattcaaatcctacacnatctcccccagtccacattcttatcaccagctgctcttctcactttatgaagtgcccattatggaagccacagctgagttataattctctgaacactggtactcattcctttcctctgcttgattaagctttacctcccattgtacccagccccaaaccctatttattgcatacatgtctgcctttctatgacgattgttaattgtttgaagctcagaataaaatcttgaaaacacctttagcccctcctaaaattagcgtaactcctggaaaatagtaaacattgaaataattaaaagagtaaaaagggcattcaccctggggaaggaa

SEQ ID NO: 572 - DNA, 661 bp, Homo sapiens
  misc_feature [331]..[331]: Chromosome 2, SNP identification no. = rs307975
  misc_feature [331]..[331]: allele = c, in linkage disequilibrium with rs308019, respectively
  misc_feature [331]..[331]: n is a, t, c or g
cttagataacaaaaaataaagaacatttgtaattagcagacttgctttacaagaaatatgagaggaagttcttgaggctgaaaacaaatgacctcagaaaataatgtgaatccactgatttaaaaagagagcatctgtaaagataattatgtaattatattacaaattgcataaatcgcattcttctgtttgtttcttttaaattatttaaaaagcaattgtatcaaacacacatatatatagatacagatagatatagatatatgtacacacacattgtttgactcataacacgtagaaatgtaatatgtttttcaatgacagcacaaanaagatgggtgtaatgttggtaatggcaactttgtagtttctgtcttttaaatctgatatcttgtcatactcagaggctgtttgtttttcttttttattttctagtatgtggttattatttgcttgtcaagtcaaagttgtattgggctaagaggttactgaagatgataactgtaatttataggaataaacagaaattataaatcagtaggtttatgtaatgaaagctacagatatctacttactctcatttctaatctcaccttatttaaaagatggaaacttgtataaagtaaaaattataatgtaatattgggtatgtaacagctac

SEQ ID NO: 573 - DNA, 661 bp, Homo sapiens
  misc_feature [331]..[331]: Chromosome 2, SNP identification no. = rs2351936
  misc_feature [331]..[331]: allele = t, in linkage disequilibrium with rs308019, respectively
  misc_feature [331]..[331]: n is a, t, c or g
atagaatattgcacatttcaaaattgctatgagagtatatttcaagtgttctcataaaaatgctaagtacttgaggtgatagatatatttaataccttgatttaattcaacattgtatttataaattataacatcactttgtactccatatatacaattccaaattgtcaatttatagtttaaaaataaaaatttaaacaaatctataaaaccaaaacagttttttaaacatcaacaaaattggcaaacttttagctatatttagcaaaaaagaaagagaagattaatactactaaaaccacaagtgaaagagggaatattacagaaattnaaaaaaaaatagaaatactattgggcacttgtatgcaaataaataagataatttagatcgaatggacaaattcccgtacacgcacaaactaccaaaactggctcaaaaaaaaaaaatagaccatctggatagacttatcataagtgaacagattgaattagtgatttcagaactacacacgaagaaaaacctaagcccagatggcttcagcacttcactctaccaaacatttaaagaaacactaataccaattcttcacaaactctactaaaaaacagagaagagaacatttcccaactagacaaagatatcccaaggtaagacagctac

SEQ ID NO: 574 - DNA, 661 bp, Homo sapiens
  misc_feature [331]..[331]: Chromosome 2, SNP identification no. = rs307994
  misc_feature [331]..[331]: allele = g, in linkage disequilibrium with rs308019, respectively
  misc_feature [331]..[331]: n is a, t, c or g
cttcacaactatcaatcaaaagagtagggcaaaggacagtggctgtttaggtctagtgcccatctctttttcctgtatggtctcaatttatcctatttccagtgacaatattatgaattttctctggggaatgactctcagtcttcatgtattttggaattgtctcatggagagcacaggaccaagaccaatcatcacatcttattcctgtgtccaccgaaaatgtttcaggggcagggaggcagtttagttcagtccaatggcacttatgctcagcgcctttatttgaacctgtgtgtgtgtgtgtgtgtgtgtcttggggtaagggaangtacatctagaattgttattaaccgtcttgtcatcaaatggactttgagaaaaaatacaacgagaggggaatagaaactcagctatgcgaccatctttatcctgagtcaagcgacttctatggccagcaaaaccagtgctatccctgaactttttggtcacattatgaaatcatgctatagcaagtatggcagactgctgtaaggttatgaaaagcctctgcctcctctttgtggtgtaaaggccaggctactttggcagcttcttttgtagttaggtgtgaccacaggaatgcatggaagacatgtgttcctccattcttgttcataaa

SEQ ID NO: 575 - DNA, 661 bp, Homo sapiens
  misc_feature [331]..[331]: Chromosome 2, SNP identification no. = rs307971
  misc_feature [331]..[331]: allele = t, in linkage disequilibrium with rs308019, respectively
  misc_feature [331]..[331]: n is a, t, c or g
ttagagacagagatttgaactgtgtgatcctgcgttattattttaattcagattctgagccttggccaaaaccatccgagctgtttcccttataggatgtggatccacagacttacttcatccctaagatacctcatgctatactcacattagaatcactccacctaaacaatgctaatcctgaaatgcaatgttaccaacacacacaaaaaaaggaagaataaaattaatggcataaaaattctgattattagacagaggactaaacaaaagtgtttgtctgaagtttgcattttaaacataaacagatcctccaaattcctctctgagnttctttcagcatgcaacacattctcttgaagctttaagtttattcttcaaaaaagtagtccaaagaatagcacattgaatctcaaaagaacactttaaaatcctttcttcatgggcatgagattttgttcttaaggggctaagataatggatggtaaaggtaagtttgtattaagcccccaaagagcattgttgaattcaattattagtttagttttttagagtttatattcattgttgagatcagtttagaataggatataatacattctaaatgtgaaaagcctgaggtttcaaaaagtggcactgtaattttttaatctttattttt

SEQ ID NO: 576 - DNA, 661 bp, Homo sapiens
  misc_feature [331]..[331]: Chromosome 2, SNP identification no. = rs308015
  misc_feature [331]..[331]: allele = g, in linkage disequilibrium with rs308019, respectively
  misc_feature [331]..[331]: n is a, t, c or g
aggactctgcatatttatcagatgtgtggacaaaagttgcagaatgtctgctggaaaagtaggtactgacaggattgctgtcaagtttaccagattttaaagggcacaacttgatgtattgtggtggagaactgcagaatgtttcaaagcacaggaaggaaaggttcaggtttcaattgtaaaggtcagtgtgatggcaggggaaagcatggattgaggaagggtaaggagtgggcgtggggctagcagtcctccatcagggtggagaaggaagatatgattgagactctggccaatggagtgaagaaggggccagggatttctaaatganaagtgacatacttaacaactaacgacacatgggggaagtggaaagagggacacctaggagatctgggtgtaaatctgagtgtaaaaaaaatattaattgatacaagaatgggggaataaatgggactgaaacacttacagtatccagtgctcactggtgtcagacttcatgctaacccctttgcatgaattattttatctatacaataaccctaaggaagaaggcactattaaggtttgcattttaagagaagaaaattaaggcttagaaaagttatgcaattctcccaaatcatataattattaaatgacagaaagagcaataaataaa

SEQ ID NO: 577 - DNA, 661 bp, Homo sapiens
  misc_feature [331]..[331]: Chromosome 2, SNP identification no. = rs308017
  misc_feature [331]..[331]: allele = a, in linkage disequilibrium with rs308019, respectively
  misc_feature [331]..[331]: n is a, t, c or g
ttttaagagaagaaaattaaggcttagaaaagttatgcaattctcccaaatcatataattattaaatgacagaaagagcaataaataaatccctgcctcactcagacctgtggttctacaaagtcgtaaaggctgggcattctggattgatccttcctttcttctgcctctcctcaatggaattcagttccattctcctcaatagaatccaaagttttaaaggaaaagatctggatcctatctatttcaaatgtcctctgttaccctttaagtgcctcgtacatagtaggtatgaaatgaaagtttgtgatttgggatataataaactttnggcataaagctggtgacaccagtgctatagaatgtcatgtcattatgtgtggatatctttcccttgagttttttattcattcctgattgttctgtcctagagcaaagcattatgcaaacaatgacagtagttactggggagcttgaacatgccatgaacatgccaagggactggaaggaggacttgtgggttcttatgcctctgtctctcagactcaaccccagccctaaaacccagatgctgggtctggacctaggatatcccactgccattgggaactcttctctgtgagcttctgtcaatgtggggctaagaggaggggtggcggag

SEQ ID NO: 578 - DNA, 661 bp, Homo sapiens
  misc_feature [331]..[331]: Chromosome 2, SNP identification no. = rs308018
  misc_feature [331]..[331]: allele = g, in linkage disequilibrium with rs308019, respectively
  misc_feature [331]..[331]: n is a, t, c or g
attcagttccattctcctcaatagaatccaaagttttaaaggaaaagatctggatcctatctatttcaaatgtcctctgttaccctttaagtgcctcgtacatagtaggtatgaaatgaaagtttgtgatttgggatataataaactttaggcataaagctggtgacaccagtgctatagaatgtcatgtcattatgtgtggatatctttcccttgagttttttattcattcctgattgttctgtcctagagcaaagcattatgcaaacaatgacagtagttactggggagcttgaacatgccatgaacatgccaagggactggaaggagnacttgtgggttcttatgcctctgtctctcagactcaaccccagccctaaaacccagatgctgggtctggacctaggatatcccactgccattgggaactcttctctgtgagcttctgtcaatgtggggctaagaggaggggtggcggaggagcagggacctgctcttttctttctgcttcatgcccttctccgcatcaccccgggaagccttcttccccaggcagcacgagggctcatttcaatttttgcttttccaacaccccaaaaatcagccgcaatgcaccacctactgggtcggtcagtgttccctcccagcagttgggggccca

SEQ ID NO: 579 - DNA, 661 bp, Homo sapiens
  misc_feature [331]..[331]: Chromosome 2, SNP identification no. = rs308019
  misc_feature [331]..[331]: allele = c, g
  misc_feature [331]..[331]: n is a, t, c or g
tcgtacatagtaggtatgaaatgaaagtttgtgatttgggatataataaactttaggcataaagctggtgacaccagtgctatagaatgtcatgtcattatgtgtggatatctttcccttgagttttttattcattcctgattgttctgtcctagagcaaagcattatgcaaacaatgacagtagttactggggagcttgaacatgccatgaacatgccaagggactggaaggaggacttgtgggttcttatgcctctgtctctcagactcaaccccagccctaaaacccagatgctgggtctggacctaggatatcccactgccattggnaactcttctctgtgagcttctgtcaatgtggggctaagaggaggggtggcggaggagcagggacctgctcttttctttctgcttcatgcccttctccgcatcaccccgggaagccttcttccccaggcagcacgagggctcatttcaatttttgcttttccaacaccccaaaaatcagccgcaatgcaccacctactgggtcggtcagtgttccctcccagcagttgggggcccacctgcacgtgacatctagcccaggcttccttcaacctctgcagccctaaaggtgccagctgctccctgcagtggttaatatgctctgtgttgact

SEQ ID NO: 580 - DNA, 661 bp, Homo sapiens
  FLJ42418
  misc_feature [331]..[331]: Chromosome 2, SNP identification no. = rs308020
  misc_feature [331]..[331]: allele = c, in linkage disequilibrium with rs308019, respectively
  misc_feature [331]..[331]: n is a, t, c or g
ctccagcacagggggattacatttcaacatgagatttgggtggggacacagatccacatcatatcactgtctataggtagtcaaatgtgccatggtatcatgaaagcagccatacctaaataaatgagcatgggtgtgtttcagtgaaattttatttagttacaaaaacagatcgtagtcagattttgcgcacagagtgttatttgctgacccctgagttaggtcacaatagcaaagagacctcaatagctcacttaagccagtcaaagttcatgtctctcatacttaaagaatctcagtatagagttcagagctgatcgaacaatttggnggtgtcaggaaccctggaaaaattcttcttcttgctggcaagtcttaatgtaagaccctcaactcattttcccagctatctgctctagctccatttatcagctttgaatttcagccagtaagaatgggaatgcaaggaaatgggggacagaccaattttctttaacagcgaagtcagaagttgttcacattgcttttctccacacatggctggtcactcatcaatcacagggccacctctagctaaaagaaaagttggagatgtgcagattttggaaagccaagagcacttctatgttctattgccagaggaagaaagataaaaaaaaaa

SEQ ID NO: 581 - DNA, 661 bp, Homo sapiens
  FLJ42418
  misc_feature [331]..[331]: Chromosome 2, SNP identification no. = rs308024
  misc_feature [331]..[331]: allele = t, in linkage disequilibrium with rs308019, respectively
  misc_feature [331]..[331]: n is a, t, c or g
tttaaacttcactgtctgcttttgaaggtgacaacataatttatattagtgggagtatgtctcatttatgaaaatactttcatggcctttaggttatgtaaagatcttaagtaaccaaacccaaaccaagtgtacaaggaacttaaaggaaatgagagagagagagagagagagagagaaagagggagagagagacaacactgaggaattactttacagagcaagttttccctggggtggggaggacacatcactgtagagattttattttggtcttaaatgtttttttttttttttctttcttcccctggtagatgcaaaaatggggtangagggacctgggactagggaatgagtaaaaccaggagaagagggctctgttccaaggagaaagaaatccaatcaatggggtatagggtcaaagcagaagtagccattggggaactcccagaaaaaaggcatggtcaacagttaacaaggttttttggattttgtttttaatggtcaacagatattaagttcgggtgtgggaggggggttgtttctaattcttttactaaagagctttgttaactattacagttcctcagttttgtcaagcagaatgagggagtgacttgtgtccatgctagagatggggtagtgggaaaacacatctttc

SEQ ID NO: 582 - DNA, 661 bp, Homo sapiens
  FLJ42418
  misc_feature [331]..[331]: Chromosome 2, SNP identification no. = rs308025
  misc_feature [331]..[331]: allele = t, in linkage disequilibrium with rs308019, respectively
  misc_feature [331]..[331]: n is a, t, c or g
caacactgaggaattactttacagagcaagttttccctggggtggggaggacacatcactgtagagattttattttggtcttaaatgtttttttttttttttctttcttcccctggtagatgcaaaaatggggtatgagggacctgggactagggaatgagtaaaaccaggagaagagggctctgttccaaggagaaagaaatccaatcaatggggtatagggtcaaagcagaagtagccattggggaactcccagaaaaaaggcatggtcaacagttaacaaggttttttggattttgtttttaatggtcaacagatattaagttcgggngtgggaggggggttgtttctaattcttttactaaagagctttgttaactattacagttcctcagttttgtcaagcagaatgagggagtgacttgtgtccatgctagagatggggtagtgggaaaacacatctttccttcctgccagacacccttgaggaccctggaaaagaccacagcaattagagacaagcaagagtgaggcatcagtgaagcctggagcttacgtctggagggaaacccaacaaaatgtatctgtggaaggtgtaacccgcaggttcccaaaacctcagtattctcagcaaatcaagggaagagagcccaataaaagc

SEQ ID NO: 583 - DNA, 661 bp, Homo sapiens
  FLJ42418
  misc_feature [331]..[331]: Chromosome 2, SNP identification no. = rs308029
  misc_feature [331]..[331]: allele = t, in linkage disequilibrium with rs308019, respectively
  misc_feature [331]..[331]: n is a, t, c or g
gtttactttcagataccctatgtttgaaacacagccttcttcaggacagtggttgccacgcctacattgagttgagagccttagactccataagcattcaatattaaatagcaaagctctttccacactacctagcaatttatttctgggttaatataaggtgatagtttcaacctataaatcccattaagtttgaatcccagttacctcaagataatgcataagaaacgaggttgtcatggcaatttagatccgagattcacacccaatcctagacactagatctggggctcaggagacagtatgttttccatgctttatttctaatacnggaattatcttcttccagcatccaaaaccctactgatgtagtgtctgtgaggcagagattgtcttttcagattggccaaatagtgttctcggatggtaatcagaaatacaatataaaactttttatattgagaaattcatattggaaaattctatgtatctaaaaccttttagtaatgactgtcttttaatctaatatatagtttgaggtaaatatagggataattttcaagcacattttcctggacaaatgtgtgataccaaactctgagctgttctaaataaaaccctttcattagctagttcaaggctatattttcaacattcagca

SEQ ID NO: 584 - DNA, 661 bp, Homo sapiens
  FLJ42418
  misc_feature [331]..[331]: Chromosome 2, SNP identification no. = rs2102306
  misc_feature [331]..[331]: allele = g, in linkage disequilibrium with rs308019, respectively
  misc_feature [331]..[331]: n is a, t, c or g
ttataaaagcaactacaattgtcccaaacttattcttgataaaaatatatagaaataaaaattaatagtattaacctgagttcaaaacaccagactgtattaatagaaattgtaacaggaagtaaaaagggagtgctatgttctgaatgtgtttgtcctctaaaatttctgtgttgaaaccctatccctcaaggtaatggtattaggaggcggggactttgggaggtgatgaggtcatgagggtggaatcctcaggaatgcagttagcacccttattatagaggccccagaaagctagctcatctcttccaccctgtgagcacatagcaanaaggagacatctatgacccaatcaatggctcctcaccagacaccacatctgctggcaccttgatcagacacttctagcttccagaactatgagaaattaattcctcctatttacaagccacccaggccatgatattttgcggtgatacctgaatgaactaaggcacccaactcctgccttattgttagaaaactcaagaaaaaatataattgtgaaatactaacaacaggaatatagttttaaaatttgtttgagatacttaaatataactactagtagcatttcagatagtatttaaatcttctcaatcacagaataagaaacagcaat

SEQ ID NO: 585 - DNA, 661 bp, Homo sapiens
  FLJ42418
  misc_feature [331]..[331]: Chromosome 2, SNP identification no. = rs12470246
  misc_feature [331]..[331]: allele = t, in linkage disequilibrium with rs308019, respectively
  misc_feature [331]..[331]: n is a, t, c or g
aagtttttaaaatgttttggcaaattttaataatatttggaaaatatttattggaaatactaaatgtaataagcataatattaatatttctaaaataaaactggatagaaagatatataaacacagacacatatagatatgcaaatatcggtgtgtgtagatatatgtgtgtgcctaggtatatcatctatctataagatactatatataatctgtatgtatatatgcaaacacacatgcttatttaaaacattattatcatattggtataaatgaaatctcattaacaatgattaggcaaagttgatgttgttgcctgttaggcactcgnaggatatctgtctcctacaaagttttctagaaggactttcaacttaatggagtcttataaaggtgtataaaacaaaacaaacaaaaatcctagtctgttgtcagtaactaccaatgcaaaaatcaaaatttcaaaatgaatagattttgtatgacatactttaaaaagtaaaaacaaaacatagcaaaaaaattaatagttttttccttgaacaaataagaacttcgatgtttatattttcctcagttcttctaaacaaatatcgtaagtttccttgttttcaaatgcgtgtttcatcgattttcctattcataccatccattttccctt

SEQ ID NO: 586 - DNA, 661 bp, Homo sapiens
  FLJ42418
  misc_feature [331]..[331]: Chromosome 2, SNP identification no. = rs7595209
  misc_feature [331]..[331]: allele = t, in linkage disequilibrium with rs308019, respectively
  misc_feature [331]..[331]: n is a, t, c or g
aatacaatgtaaatgctatgtaaacagttgctaaactgctgtgtttagggaataatgacaaggaaaagaatatacactttccatacaaatgtaattttcccctaatattttcaatccacagttggttgaatctacaaatgtgaaacccatggatacagagggcagactccatactggaatgaacctgtgattactatgtaatgcattgattatttgggaaatgtgttttgttattgttaaagtctctatatagtcacccagattagtagtttccactctgaccaattactaaactaaagatcctagacactctttcatttgactgttctantccgctcctgttacagttctaggcacagcttggccctcaattcatgttttttgattatgagaaagatttcttttttgcaattctaactgtatccaaataataaatggcaccaaaccacagacaccagcaaaaccctgattaatgaaattacacatcactttctatcccagcatttggaggctaacggcgatatgcataatgacatgtcacatgcttcagataccatcaggatgtcctggaatgattacttattgcctgtgggaggaaatcatcagtaggaagggcatgttggagggatggcttccacagtcgctgggaaatagccctgtg

SEQ ID NO: 587 - DNA, 661 bp, Homo sapiens
  FLJ42418
  misc_feature [331]..[331]: Chromosome 2, SNP identification no. = rs967705
  misc_feature [331]..[331]: allele = a, in linkage disequilibrium with rs308019, respectively
  misc_feature [331]..[331]: n is a, t, c or g
tgcgaagagcaagtgaaatgatgcctgcattcgagtttacttccatcattacaaaacgaggtgcatccaggtatgacacttgttcaaaaaaatcaatttactttagttcagcaaaatatttagagtatctttcatccaagcagtacgataggttctggaaattcccaaataagcaaaaatcagccaggctccatgaggagttcacagtgaactgcaggacacaaaagaagaaagaaataattcaataatacaatgacaaatgttaagtaaccaattaagccaggcactatgaaaactcagacaaggggctgttgtcctatcttggttcacngaaggcttcttggaagagagaacatgaaatctgagtctctaaggaggaaatcgaatttgtaaatattaacaaaaggggctggctgttgtggcttacatctgtggtcccaataactcaggaggctgaagtgggaggatcgcttgaggccaagagtttaaggctggagtgagccatgattgtgtcactgcactccagcttggaagacagaatgaaacccctactcaaacagaaaacaaaacacaggggaaggctacgaattctagataaagggagcaagagctaggcactggggcataaaattgtgtgtgcatgtgtgtgtgtgtggtgggg

SEQ ID NO: 588 - DNA, 661 bp, Homo sapiens
  FLJ42418
  misc_feature [331]..[331]: Chromosome 2, SNP identification no. = rs954845
  misc_feature [331]..[331]: allele = t, in linkage disequilibrium with rs308019, respectively
  misc_feature [331]..[331]: n is a, t, c or g
aagggagcaagagctaggcactggggcataaaattgtgtgtgcatgtgtgtgtgtgtggtgggggagggggaatacaatttagtgttaactgaagtgtgaaaatcaagatgggttacagcaggtgatgggaccaagtcagagacttaaccctcagagcaatgactggccactgcataattttaaatcacatttgcatcttagaaggattatacaggatgcagtttgggggattaatttaaggggccagaagaaagatagggaaacacgttaactggttctcaaaatggtctgagcaagtgatgtggtctgatgtacaacagtggtagacangaaaatgggaaggttttttaaaggaaggagcattagctggtgatggctgggagagaagaatgggcagagggcataatctagaagaattcacagatggtcaggtgggtgatgccaccctgaatactgagctatgccatggaaccagagagaaggaataggctggtggcagcgcaggtgcaccctgtgatccagggcagcacttgaacttgggagatggccaagatgatttgaagatactttgatattgaaatgttctgtggaacttctagtctgcagttagagcagactcatcttcatttaccagtagttaagttttgtttctccaagtag

SEQ ID NO: 589 - DNA, 661 bp, Homo sapiens
  HPCAL1
  misc_feature [331]..[331]: Chromosome 2, SNP identification no. = rs12618307
  misc_feature [331]..[331]: allele = c, in linkage disequilibrium with rs1974677, respectively
  misc_feature [331]..[331]: n is a, t, c or g
ctgtccccttccatcctgcagccactccctgaggtggcatttccttgaatgacaggagaggagcctgaggcacgggaagattaagtaaccggtcctacgtataaggtggcatttgaacccaggtctacctggctccatagccaggccccgtgccccacacaccacaccacctggcgcttggccaacaggaaatcacgtcccccagtgtgtaagtcagggaggcagaggtgctgagatgctctcacctgtgggctcccgggcccagccatgctcttggtgttccctcaggccctggcttcccccctccctccaggtggacccatgcttgtgnccctgtgcattctcccacagactcctccctgcggggccacccatctccaaatcccagctgcatatccacaactgtagagtgttttaaaatagtgatggtagcctaggcaacatagcaagaccccattacccccaaaaatacaaaattagctaggcgtggtggcacatgcctgtagtcccagctacttgggaggctgaggtgggaggataccttgagcccaggaggttgaggctgcagtgagctatgattgcaccactgcactccagcctgggtgacacagcgagactctgtgtctaaaaaaaaagatggtgatgctgtccaggcttgacg

SEQ ID NO: 590 - DNA, 661 bp, Homo sapiens
  HPCAL1
  misc_feature [331]..[331]: Chromosome 2, SNP identification no. = rs12621651
  misc_feature [331]..[331]: allele = a, in linkage disequilibrium with rs1974677, respectively
  misc_feature [331]..[331]: n is a, t, c or g
acgggaagattaagtaaccggtcctacgtataaggtggcatttgaacccaggtctacctggctccatagccaggccccgtgccccacacaccacaccacctggcgcttggccaacaggaaatcacgtcccccagtgtgtaagtcagggaggcagaggtgctgagatgctctcacctgtgggctcccgggcccagccatgctcttggtgttccctcaggccctggcttcccccctccctccaggtggacccatgcttgtgcccctgtgcattctcccacagactcctccctgcggggccacccatctccaaatcccagctgcatatccacanctgtagagtgttttaaaatagtgatggtagcctaggcaacatagcaagaccccattacccccaaaaatacaaaattagctaggcgtggtggcacatgcctgtagtcccagctacttgggaggctgaggtgggaggataccttgagcccaggaggttgaggctgcagtgagctatgattgcaccactgcactccagcctgggtgacacagcgagactctgtgtctaaaaaaaaagatggtgatgctgtccaggcttgacgtaggagccttccgttcctcctcagggcctgtgctctccttttgaggaacagcctccttttagtaaatgtga

SEQ ID NO: 591 - DNA, 661 bp, Homo sapiens
  HPCAL1
  misc_feature [331]..[331]: Chromosome 2, SNP identification no. = rs1974677
  misc_feature [331]..[331]: allele = t, c
  misc_feature [331]..[331]: n is a, t, c or g
cgtcctcttgatatccagccacgtgtgtcttcttccacccacgtgttcctctcaatgtccagccgcttctgtgtgtgcctgctaggctctcgcggtttttataggcacaggatgggagtgtggtgggccagggtggtcttgggaaatgcagcatttgggtgtaaaggcaggagtgtctgtcctcacctagggctgtgggcatgggcccaggggtggagccctcgacagggacccgcccttctcctcccagcacttccctgccccacttccgtatcagctgggagttcaggaccagtctggacaacatagtgagactccgattctattaacnaaaatggaagaagtggttgagattgtgacactactgatttgtgcttgtttccctcctcatcctttctatcacaaaatagggcctgacaacctgatgttaccgcacatctatcctgtttattaaagtggggccggaatcatccagccatcggccacgattttagccagaagctggtgctgagccttctccttcttccagcaactcctccaggtacaggagaaagaggctttccaccggggctgctatacagcacggggccgtggtggacacgggaaaggaacccttcagacagggctggggtttcagccctggggctggtgccggctcaag

SEQ ID NO: 592 - DNA, 661 bp, Homo sapiens
  misc_feature [331]..[331]: Chromosome 2, SNP identification no. = rs4670011
  misc_feature [331]..[331]: allele = t, in linkage disequilibrium with rs4670019, respectively
  misc_feature [331]..[331]: n is a, t, c or g
tccacaaaatgttgtaagatgaatagccagagaggttgaaggaaaccaggagagtgaatgtagtacaatggaaggaaaggaagagcctagctcaacaaggaagaagttgtcatctgtgcacatgcttctcagaagtaaggtaagaacccaaaaacatccatcacattcaatgctgatgagatcactgttccccttggtgagagctgctcagtgatggagcgatggttgcacaagacagcctgtggtggattgggataaactgcaagatgggagagtatctcaagggagaggtacagttaggagatgtttttacgatgtgagagacaaatangactccatgcaactgggaagcagttaggagaataggtggggttatatacgaaggtggagagaggggttttattaaaattgtgaggtccttgagagggcacaaacaggtggcattcagagcccaggttgatgtacttgtctttgccaggatggggccagcaaaggcactaacagaagggcaatccagatgcaacacaaagagcataaaagttactctttgcagagacagaaccaagattttcataatcagtcaatcagtagcctaaaagggaatttgatacctaggaacagaaagttttcctgtttatgcaggtttctgctctaaccacag

SEQ ID NO: 593 - DNA, 661 bp, Homo sapiens
  LOC400944
  misc_feature [331]..[331]: Chromosome 2, SNP identification no. = rs2196267
  misc_feature [331]..[331]: allele = a, in linkage disequilibrium with rs4670019, respectively
  misc_feature [331]..[331]: n is a, t, c or g
tcctggattcttttattgttttctctgctaaaagcaaatcaaatattacaaatacccttcaactcaaattagccttaagccccataagttatatttccaagagccttttgtggtggaaagaacctgccaattttggttagagaaatttctttaggctcgcctttgcaggcaaggcaagtgacgggctttctggttttcctggtaaccaagaatcagtgagaagcacttgtactagacagctgccatagtcttacatttatggagtacctactgtgtgctttctactatcagccatcaaaaagaatgataaaagtccacagcataggaatcngttcatctgagtgttctgccaaaaaatacagtaattacaagtagtgtcaccatcagtgacaagggcagggaagactatttttcctttttttcccaacttattcaaatacttaaacctcttctatttcgagttcaaatgaggtaaacatacaacctcaaaggtaaactttgagttatgaaataatgggattttatgaattactaaatgattgaaagataggatcttagcttctctttagtgtcttcagttagaagggagaacaggtgtcccctgttgaaaagtttattagctcattatatgatctcatagcctccccactttatcttgctt

SEQ ID NO: 594 - DNA, 661 bp, Homo sapiens
  LOC400944
  misc_feature [331]..[331]: Chromosome 2, SNP identification no. = rs1865456
  misc_feature [331]..[331]: allele = t, in linkage disequilibrium with rs4670019, respectively
  misc_feature [331]..[331]: n is a, t, c or g
gtaaatctattcccatataccaaagaaaatttttagcaagagctacaataagcttccttctgaaggaataatcttgtgatttcatgcgagaaaaatctctccttgaggtgaatgagagatgaagttgtgaaagttacagttggaactattttgcttttcccttcgcttttccctttctgaccaaatgacaagagaacattttctacttttcctggattcttttattgttttctctgctaaaagcaaatcaaatattacaaatacccttcaactcaaattagccttaagccccataagttatatttccaagagccttttgtggtggaaagancctgccaattttggttagagaaatttctttaggctcgcctttgcaggcaaggcaagtgacgggctttctggttttcctggtaaccaagaatcagtgagaagcacttgtactagacagctgccatagtcttacatttatggagtacctactgtgtgctttctactatcagccatcaaaaagaatgataaaagtccacagcataggaatctgttcatctgagtgttctgccaaaaaatacagtaattacaagtagtgtcaccatcagtgacaagggcagggaagactatttttcctttttttcccaacttattcaaatacttaaacctcttc

SEQ ID NO: 595 - DNA, 661 bp, Homo sapiens
  LOC400944
  misc_feature [331]..[331]: Chromosome 2, SNP identification no. = rs7559666
  misc_feature [331]..[331]: allele = a, in linkage disequilibrium with rs4670019, respectively
  misc_feature [331]..[331]: n is a, t, c or g
ttccagtagggggagcagaagaaaaacagcctcctttgattgacggttggacctccaggctggttgaacagctagaataatttgaaatgcaattgagcactgagaatgtaactagattaatgtcttatgaaatatatatgcttttatattgatgtgttccttggaactcctaggaggagcaccccttacttttatagggacttattattctcttagcacctctggacatttaatttagtttaatctggttctggacatggttaaggttgcctgtatctaagacaagctactttaatttgggattttaaaccacaatatcctgttgagaaanaaagtgtcaaaattctagagagcttctttagagtgaaatattattactaatttgggattcgaaatccaggtaaatagaggttctggtaaaatattgcttatgccctgagagcaatttccagagtagacagtggaggagatttttcattatgcagcctcactattctgatttcagaaatcagtgccccttgcatgtgtctgctttatttgtgtataattttataagacaggatctatgaaagaaaatgagaggagaggtagttactccatcctttataggccaacaaaacaaaggctctaaatccagattaattctgcgtatgttacttcc

SEQ ID NO: 596 - DNA, 661 bp, Homo sapiens
  LOC400944
  misc_feature [331]..[331]: Chromosome 2, SNP identification no. = rs4670012
  misc_feature [331]..[331]: allele = t, in linkage disequilibrium with rs4670019, respectively
  misc_feature [331]..[331]: n is a, t, c or g
acatgtaaaagtcctcctcatccagagtcctggtgagaatgctgttcacttaccagctgttctgtgaagcttctccttttcctacaacaccccctacaaaaacagctaaaactggccaaattcatcctctcccatttgaacttctggtgtagcactttctccaaacatttaatgatcatgccgtccatttaatattacagttttcagcccctaaactatgtcaaacatagtctgtttaagttaatgagaacctgattgccttctgaaataagtttgaggaaggtgtcttggcactttgatctttgattggttagtaactagtatctggtcnatagtaggtcctcgatcaatactgacttaattctctgaatctaatttaattcaaaaacaactattctacagcaagaacagtaagttgtattttgaaattaatgtcctagtgggagataaactccttaaacatgtgttgggtccctaataaaggcaagcattttttttttaatttcacgtggatacaaagcatagtctagatttcaagaacgagacaggacaaaggagacaggcccactattagctataatccattatagcctggaatataggtaattacccaggtataattttttaaaaaataccataggagttcaaaggaagaatcact

SEQ ID NO: 597 - DNA, 661 bp, Homo sapiens
  LOC400944
  misc_feature [331]..[331]: Chromosome 2, SNP identification no. = rs10803752
  misc_feature [331]..[331]: allele = c, in linkage disequilibrium with rs4670019, respectively
  misc_feature [331]..[331]: n is a, t, c or g
tattgtgtttaatttaaaatggccttctgaaggaaaaagcaaaacagaaaacctgttaactttgacagtattctttcaatataaataattgaatttctttgaagaaaaacaaatctgagcctcttgtccaaagaaatcttgaatttgctcatgtgtttccaatggcctttggcacatagcattggctttctaaatgcctctaataactacagtaaatgtctctatgaaattcagcacatcatacaaatgaaatgttccttcttgtgtgcaattcccatttactttaagaaggagaaattccagattatatacaaagattgataagtttgcnaaaatatccaggtatataaccatcagcttctggactgcaattccttaatgttaatgaattccaaagaaaaacagctgactttatgcatttattttaataaggctgtgaaaacagtccatttacagtgtaaaaaccccttgtcttttaaaaatgctagacggaatcttttaataaattaaatttatctgcctgtcaaattgacaagaaccttcaaggagtattgctgatgttgtagttctacttttccaataggattacatctggaatttaataagggctgcttagaggaagaatctatccatcagggtaattttaagtaacaaatattta

SEQ ID NO: 598 - DNA, 661 bp, Homo sapiens
  misc_feature [331]..[331]: Chromosome 2, SNP identification no. = rs3002
  misc_feature [331]..[331]: allele = t, in linkage disequilibrium with rs4670019, respectively
  misc_feature [331]..[331]: n is a, t, c or g
tatatattaagcatattagactggggtcctatgatgaggatgagcaggatggaaattaagatcgtaaataaaaagaaatcaatcaataaagaatgtgagatttcacgtatcaatgattgtgacaggccatgaacataggcatatgttagctttttgcaaaacagtgtgtgtatatgcacataaatgtgtatgtgtgtatcctaaaatctttcatgttcatttactcagtcactccatatccagaaatatattccaaggaaataacccaaaacaaagaaaaaagaatctatccaaagatatttattgcagcgtggttttcaatactaaacantgtaaacaatgcaaatatttaacaataaatacagtgattaaataagccatggcatatccagttgatgtaatactttgcaaccattaaattgatgtttacaaggagtttatattgacattggtgatgctaatagcatattaataagtaaaatgtatggcataaaattgtatttgtgtgaatacaattaaaattgaggcatgctttgaaaggttaatagaggaaagtacacatatgtgaatagtggttttatatgagtagtagaattatagacaattttttctttcttcctgcattttcaaatgtaatttaatgaatagctattactttcaa

SEQ ID NO: 599 - DNA, 661 bp, Homo sapiens
  misc_feature [331]..[331]: Chromosome 2, SNP identification no. = rs10200543
  misc_feature [331]..[331]: allele = t, in linkage disequilibrium with rs4670019, respectively
  misc_feature [331]..[331]: n is a, t, c or g
ttatttaatcactgtatttattgttaaatatttgcattgtttacattgtttagtattgaaaaccacgctgcaataaatatctttggatagattcttttttctttgttttgggttatttccttggaatatatttctggatatggagtgactgagtaaatgaacatgaaagattttaggatacacacatacacatttatgtgcatatacacacactgttttgcaaaaagctaacatatgcctatgttcatggcctgtcacaatcattgatacgtgaaatctcacattctttattgattgatttctttttatttacgatcttaatttccatccngctcatcctcatcataggaccccagtctaatatgcttaatatatatctctttatttgtacatggtcatattagcatgaatttttattttgtgtttacgtactataaatgcacacaaatgatgttgtgctatggatctcatattgtttctttttttttcacctagcactaggtttttaagatctatttacatcatagatccgtctaagactactgggtgctgcctgatttgcttctatgcatccattatgctatacttctcttaactagcagacttctgtggattgcatctagctctgcactacaacaaatagtgctgctataattttccc

SEQ ID NO: 600 - DNA, 661 bp, Homo sapiens
  misc_feature [331]..[331]: Chromosome 2, SNP identification no. = rs10202947
  misc_feature [331]..[331]: allele = t, in linkage disequilibrium with rs4670019, respectively
  misc_feature [331]..[331]: n is a, t, c or g
tatttcgttgtgtcataaataagaaagatatggaagaaaaatcattacaatacagtgaaagagatactgtgagagctctaaaaatcatacgcctaaattgacaggtaatggagcattgccaggaaaggactcatgggaagtgggaagggcaaaggctttaggacctaatagtcttgtgttttatcccaattgtgtcactttttagctagctgtgtgacttttgtgctattaaatttacctccctgagactaagataatatttgctaatcatgtggtcataaaacttagaaagaggtactgtaagcacattgcatggaggccagcacatagnagacactcaaatagtagtttttatttttaaaaagttgacatagatgcagcatttgtgaacactgttgagtgtttagattgccagatgcacacaaaagaggaagcaagattctatgtgtttaatcaaagactcatgaaaaaaagcataacattatttttaacttgcactaatacaaaataatatgcaaattgtttatatgatactattgatcataaaatacatcccaatattagagacattgaaatatgaaaaatgtgcatcattgaatcaataaaaatgtacttacatgttttggttttatagctggaatgcaagatacaggtgaaagtg

SEQ ID NO: 601 - DNA, 661 bp, Homo sapiens
  misc_feature [331]..[331]: Chromosome 2, SNP identification no. = rs6752249
  misc_feature [331]..[331]: allele = t, in linkage disequilibrium with rs4670019, respectively
  misc_feature [331]..[331]: n is a, t, c or g
ttccaaatgcttggtaagccttttaataagaacaattattgcttcttacaattgcatatatttggggggggttccaaagtacttgttaatctattatttcatgcagccattttaaattatggtggtctgtaaggatttgcgtcacttgacaaatgaatattaagcatcagatagataaaatattaagaagcaagtaaattctgtgcttaatatcacaaagataacagaaacagtaaaagaagatgagctcaataataatttcaataattcaaataatttcaataatgaaattattcactattattcatttccctgttcgtatagctttggncccgttctctaccttctcttacagttttcagcttttgtaatcatccatttgaaagagcccaggtcccacccacatccccaggacagtctgagctggttggattacgcattccatgcccagtgtagccctagttgttccacattttactttctacaggtctcccatatttcactgtatgtaatgttgcttcctatctcctcagctggaatatgagcttcattgatgatgtctgttctccctaggtatctcgactagggtttcctgagagaaggagccctggggatgggtagaatgattcacagagacagacatggcaaggaatgagtgtgt

SEQ ID NO: 602 - DNA, 661 bp, Homo sapiens
  misc_feature [331]..[331]: Chromosome 2, SNP identification no. = rs10185415
  misc_feature [331]..[331]: allele = t, in linkage disequilibrium with rs4670019, respectively
  misc_feature [331]..[331]: n is a, t, c or g
aagatgtatagagaaatatattatctgatgaatgtaaacccaggtacacagaaggtcactgagggaaaggcacaaccaaccatgagaagagagaatgattaatgccattgaggaagagtgaacgaggcactgtggtctcagaagcgtgcttatgttgttcaaggaaccagagaaggttttcttgagctgaaacttcaaagggagtaggaactggaaggtgaatgtctgagctacctgttgttcatatctaactaccctcccagttataaaatgtcacagctgcctaaaatgggttattggactatgtgggaaatcactaatatagcaatcncgatagacttgcaaagctttctcccttaaaccatatttcaatgaaaactaggagctgatgagatattctacttgggaataggctcatcccatctggttctgaatccattgaaaaacatatacagtacaggattcaggatgaagatatcagcttgatctcaggtaaaaatggactagagaagttggttaggcctagaagccaagatgggttttgtagtgtatcccctctgccaactccttccccactccacccttacagttgattttacttgcttagtcacatacagagtttcaggagaatctagggcaccccatcccatggcagagcttt

SEQ ID NO: 603 - DNA, 661 bp, Homo sapiens
  misc_feature [331]..[331]: Chromosome 2, SNP identification no. = rs2380623
  misc_feature [331]..[331]: allele = t, in linkage disequilibrium with rs4670019, respectively
  misc_feature [331]..[331]: n is a, t, c or g
caccatgcctggctaattttttctattttagtagagacgtggtttcaccgtgttgcccaggctggtctcgaactcctgagctcaggcaatccacctgccttggcctccctaagtgctaggattacaggcatgaaccaccacacctggctggttttcttttctattcaattagggggatctcaacaacacaagacagaattctattatgatgtggaatgagagcaatctaggactcaggctgacagagcagctctctctgcaacatcgctggtcattatgggttgaattgtgtctccctaaaaagatgataaagtactgtccctcagtaccngtgaatgtgatcttatttggaaatagaatatttagttgatcaggtgaagatgaggtcattagggtgaacctctaactgaatttgaccattgccctaataagaaggagaaattcagacataaagacagatatgggcacagggaggacatcttgtgaagatgaaggcagagattaggatgatgcttctgcaagccaggaaatgccaaagattgtcagcaaaccaccagaagttatggaagaatcatggaacattctctctcacagccttaagaaaaaagaaaaaaacctgcaaacaccttgaattttgatttgtagcccccagaagtatgaa

SEQ ID NO: 604 - DNA, 661 bp, Homo sapiens
  misc_feature [331]..[331]: Chromosome 2, SNP identification no. = rs4670016
  misc_feature [331]..[331]: allele = t, in linkage disequilibrium with rs4670019, respectively
  misc_feature [331]..[331]: n is a, t, c or g
acacaaggactacccccccgcccctgctccagggaagagcagggaatatttttaacaataaaacagtctaccgtagcaacactatcatcactataggcagatgggtattgagggccattgaactcaggcccaaagacaacaactgagtggtacaagctgaataatttgtggagccagtatattatccctgcttttctgccccaaatccaaggctattcctactgcatccccaaggaattctaaaggtagccagtttgccaatactgatccctgtcctggaagtgctaatgcaactccccttcacaatatcagccacttggttaagaatcanaaaattagcttcaaaaataaataaataattaaacttgtataataatcaaaggtcagtctttatgctctttcttagcataaagcctctcattagaatactgcctgagcttttttcctgggtaaacacatgtgtgaaatcagggcattggtttgattgttgtggtattatacagctttgtatagatttgcctcggaaaatgaacctttgagggtattaattgtgagcctcttaaccagctcagcccagccttctgctcacaatgttttgagaggcagtagctaattaggccagttaggtcaggtcaagcctactatagtgcatctggctggg

SEQ ID NO: 605 - DNA, 661 bp, Homo sapiens
  misc_feature [331]..[331]: Chromosome 2, SNP identification no. = rs1816503
  misc_feature [331]..[331]: allele = c, in linkage disequilibrium with rs4670019, respectively
  misc_feature [331]..[331]: n is a, t, c or g
accagctggagctgtggcagaggaacataaattgtgaagatttcattttaatatggacatgtatcagttcccaaaattaatacttttataatttcttacacctgtctttactacaatctctgaacataaattgtgaagatttcatggatatttatcagttcccaaataatactcttataatttctaatgcctgtctttactttaatctcttaatcctgttatcttcgtaagctgagaatgtacatcacctcaggaccactattgtacaaattgattgtaaaacgtgtgtttgaacaatatgaaatcagtgcaccttgaaaatgaacagagnaacagcgattttagggaacaagggaagacaaccataaggtctgactgcctgtagagtcgggcagaatagaaccatatttttcttcttgcagagagcctataaacggatgtgcaagtaggagagatatcaccaaattcttctcctagcaaggaatattaaatattaagaccctaggaaaagaattgcattcctggggggtggtctataaatggcccctctgggagtgtctgtcctatggggttgagataaggattgaaatacaccctggtctcctgcagtaccctcaggcttattagggtggggaaaaaatcccaccctggtaaatttgag

SEQ ID NO: 606 - DNA, 661 bp, Homo sapiens
  misc_feature [331]..[331]: Chromosome 2, SNP identification no. = rs2705859
  misc_feature [331]..[331]: allele = g, in linkage disequilibrium with rs4670019, respectively
  misc_feature [331]..[331]: n is a, t, c or g
aaatgaaggaaatttaatcgaggagcaagacctatgaggaacagattgtaatgctgtttgattagaccagtgaccaagtatatgtacaaaatacaaatataacacagaagagagtggtagagttttgggaggatgtggagaaggtgacagcaaagtcaccttccagaggaggttacacctgagttatgttgtaaaagatgaatagagatttatcctgcagaaaaggtgaggagtccagaaaatcttggccttcagcaaacttgacctaattgaacaactcctttgatccttagaaagctgcatctgcagatcatcctggaagaagctaccntatccctgttcatgcatctactaataaaatagatccagtacactttttcctttggccacatgaagaagaaactcatgcatactttatgaatgggattataaatcttcaaatctcttaagctgctactcttttgaaagttttaatgtgttcttttaccagtgaatttattttttatattccacttgatggttgaaatgtattgtttttttatttctagaagtttccagtcagttttacattacaagaaatctgccacagatatttaaacttgggatcatcacttgtctcattatactggtagtaaacaggcaatgcaataacataagagta

SEQ ID NO: 607 - DNA, 661 bp, Homo sapiens
  misc_feature [331]..[331]: Chromosome 2, SNP identification no. = rs967088
  misc_feature [331]..[331]: allele = t, in linkage disequilibrium with rs4670019, respectively
  misc_feature [331]..[331]: n is a, t, c or g
taccaagaattactgatgttaatttaacttaaatttgacctaaagctcccttcatactttgaattcctacatagaaaactgaaacctaacttaatatgtaaataaaatgcaacctcagagtatattcttgcaacaaacagccgaatctcagccaatcataggagttgagcttcagccaattaaagctgccaactgatcagaccatttccataaaaggcaaatgacaagctgtaacctattaagctatttctctatcccacatcctttttctgtacaaatactgcctgcccacattgctgggcgatgctctctgaacctcccctagttcttngtggtactcaattcatgagtcattctttgctcaaataaacaccactaaatttaatttgtctcaagtttttcttttaacatcaaatacttgcttcaccatactcctgctcaaccccaaacagaattttataataacattcagaaaattttattgcacttgataatttaaacatttgtttcctcccctagattgtgaagataggaaatgtgaattcactcatttctgtaacactagggcctagcatcatggttaaaaaccgttttagtaattaatcagttttaattaatgagattgttttcaaggtatccactacctctgcctcatagtttg

SEQ ID NO: 608 - DNA, 661 bp, Homo sapiens
  misc_feature [331]..[331]: Chromosome 2, SNP identification no. = rs2714298
  misc_feature [331]..[331]: allele = g, in linkage disequilibrium with rs4670019, respectively
  misc_feature [331]..[331]: n is a, t, c or g
tgcccataaatattaaaaatgcattagccagtctaagtttttcttttgtattttccaagacttgtcaattgcaaatgaatagatcttatttgtagagaaagaacagatttaaaatgacaaaatcagaacctttcccagaatcttggggaggactggcactttaaagaagaaagaaaaaagaatgacaacaaaatttcgagtgaattgtcttggatgtctgtcagatttggagatgcactgctctctcggagcccatgcatcccagatggagtggtttctgtagaaaaacaatcatagttacattcaggggagcttacttggcaagaaaatnatgattgaactgatgctattgtgacatcatgtaggagtttataattgcagtttgttatgaaacagttggactgaatcctaaggatggatattttagtgttccgtggagaaagtggagataaaggcattggcaaggacagatgtgacattagaataagagttgccgtggtgaggcctcaccgcttggtatttactttgctgaaaccacagaagtctcagatctagcccttctagtcccacaggtcaagaaactcaaacttaccaatgttccagagttgatcatatttgggaaggtcaattcctactgagtaaattcacttatgtaaaccag

SEQ ID NO: 609 - DNA, 661 bp, Homo sapiens
  misc_feature [331]..[331]: Chromosome 2, SNP identification no. = rs2705850
  misc_feature [331]..[331]: allele = t, in linkage disequilibrium with rs4670019, respectively
  misc_feature [331]..[331]: n is a, t, c or g
cagcagacggacatcagttcaatcggagcattccaagggtttaagaaagaatctaggaacagaaaattctgggaaaggaaaacagtaagtgtgtcatgaacacagtataatgaataaagagcattgatcagatctctgtgtctggagtgaagggtgcttgggaggaagtgataagagatggatttagaaagataatctgatgttggtcatgaggttttcctactggacaccaggccacggaggaaggggtggggatggacaaaagttaagtcttttaagcttaaatttaaggggtatcatcaaattgctttttaggaatattcttagcagngcacttaggatgactagaattgggtgagattgggaggctatttgcagcaggtctgaagagatacgctgcaggtttgaagtcaggaggttgcactagcaatggaggaaagcggctgtgagtgagtgacagtgtggtgtagccacccagcctggaggctctgctgtgtcctttctgcactcagaccacatccacagaagccaaactgggcccactgaactgcctcactatcttccatcctggaccacagtgagccatgccaggaatgggcacctgactaaagctgaaccagtcagaaggcttctgcaagacttttcagccttgagctggggg

SEQ ID NO: 610 - DNA, 661 bp, Homo sapiens
  misc_feature [331]..[331]: Chromosome 2, SNP identification no. = rs2571642
  misc_feature [331]..[331]: allele = a, in linkage disequilibrium with rs4670019, respectively
  misc_feature [331]..[331]: n is a, t, c or g
gagagtgctctgtcagagcaccttgctgagagccagggcagggtgaaccacaatccagttctcctgacttgttgaattccaattgccttaacataccaaacaattctggagaatgtatagtttcacttaaaagctgctacaaaagagactttaacatatggcaggtatttttaattgtagaaattaagagtgctatccttagatggggaaactcactttgggaaagtgatttctatgttgacaaaatatctaactccacccatctgttgctacatttatttacaaaagcactcatgcctgggtttccctagattttcttcttcacagtcangcagggtgtcagttcaatcctgttccagtgggtcccagaccacatgtgcagaataaacaacctattgaatgaataatccttgagcatctctctatgggggcttctgttcaaggaccatggacgctgcataattcacctgctgccctccaggaccatggtgtgtgcacagagcactacaggccagacactgcagtgatggacattctcatatttgttatctaatttaactctccaagtgaccctgtgagatagagattagttcctctatttgcagatgggcacatggcattcagagaagctaagagatatgcccaaagtcaacaatctagc

SEQ ID NO: 611 - DNA, 661 bp, Homo sapiens
  misc_feature [331]..[331]: Chromosome 2, SNP identification no. = rs2571614
  misc_feature [331]..[331]: allele = t, in linkage disequilibrium with rs4670019, respectively
  misc_feature [331]..[331]: n is a, t, c or g
gaggctgaggcaggagaattgcttgaacccgggaggcagaggctgcagtgagccaagattgtgccactgcactccagcataggtgacagagcgagactctgtttcaaaaacaaacaaatgaaaacatatatatatatctgctattgattcaccttggctccaaagagttaaagaaactaatggctaatggaaattactgagtttgcaggatggcagataagaaaagacaacttgctgaaacactgaaactccatctgcttatgagataaaagagctgggggcaatccgatagaaccaagatggctgactgaagtttgtgcagaacagtttnttgatgtcactgcaagagaaagaaaaataatctacataatagaaagaggaaaaaaatgtaaattccacatgtgatgaatttacacatgtgacccatgagttaacatgaagagataactgtatatgccaaaagacatttcagacctcccctttccttccaccagtcacctgctaatcccagtaaccaccccctaaaccttttctaataaaattacagccttaaagctagcaccgggagacagatttgaggttgacactcctgtctccttgtaagtcaatttttaatataaagcttttcttctctcaaaaactccatgtcacggtattggct

SEQ ID NO: 612 - DNA, 661 bp, Homo sapiens
  misc_feature [331]..[331]: Chromosome 2, SNP identification no. = rs1434964
  misc_feature [331]..[331]: allele = t, in linkage disequilibrium with rs4670019, respectively
  misc_feature [331]..[331]: n is a, t, c or g
tgaaactccatctgcttatgagataaaagagctgggggcaatccgatagaaccaagatggctgactgaagtttgtgcagaacagttttttgatgtcactgcaagagaaagaaaaataatctacataatagaaagaggaaaaaaatgtaaattccacatgtgatgaatttacacatgtgacccatgagttaacatgaagagataactgtatatgccaaaagacatttcagacctcccctttccttccaccagtcacctgctaatcccagtaaccaccccctaaaccttttctaataaaattacagccttaaagctagcaccgggagacaganttgaggttgacactcctgtctccttgtaagtcaatttttaatataaagcttttcttctctcaaaaactccatgtcacggtattggctgctagttcattgggcagcaagcctgctttgcttgataacgtcaattgaacttgtgttttatcaattctgtaccttttatcacaaaaattaaatgataatctattgcatgtttatgtcaaacaaagaaatttatattaacgatggaacattatttgtccctttactaattgcctgctgtaaatcaggccctatgccaggaactttacatacattataccaattctcatcccacaagttataggg

SEQ ID NO: 613 - DNA, 661 bp, Homo sapiens
  misc_feature [331]..[331]: Chromosome 2, SNP identification no. = rs2714302
  misc_feature [331]..[331]: allele = c, in linkage disequilibrium with rs4670019, respectively
  misc_feature [331]..[331]: n is a, t, c or g
gtttctctcaaccatatataaatgcaaacaaattttcatgatatgcgtacctatattccaagtgctttacatttattatcctgtttacgctacattgtgaggttgtcagcattatctccattttacagatgaagaaactaaggcttaccaaggacaggtatcttgcctgaagtcaaacagcaggtaaacagcagagccaagaatcaaacccaagtctgtctgtctctaaagcctatgcttacttattcttttaaaaaatcttcactccagcacagcagttctcaaatagtggcaatttcataccccaggagatattcaacagtctggagangtgttttatttctgcaactgagaggagaggggcatgtgatgttactggcacctagtgcttggccagggatgttgctgaacatgctacaaggcacacagcagccccccacaacaaaaaattatttagtccaaaatgtcaatagtgctgctattgaaaatctctcctctggcatttatcaaaattggtcttgttttaatataagtgaacgtaatatcctcatacttctgaatttagatgttcattctttattgatgagcaggcaccagaagactgtatttttctaatcctctgcaaggcagagattttcccacagtgtgctacatgttcata

SEQ ID NO: 614 - DNA, 661 bp, Homo sapiens
  misc_feature [331]..[331]: Chromosome 2, SNP identification no. = rs1434968
  misc_feature [331]..[331]: allele = t, in linkage disequilibrium with rs4670019, respectively
  misc_feature [331]..[331]: n is a, t, c or g
atccattcctactacgtatgtctcagccagagagatgtaatctgaccactgcccctaacttaaataggaaaatggcacttgcatatgttaaagtttcaaaagtttggattgtccattcacagcaccatgtggcatcagccataatcaatccagttccttgtagctgcctttccttcagcctgagagatatgtggcctgactttcaccatactctaaggggaaaacaggctgtctattccaaagcctttatttcacatgaggaaaatgaagctcagaaagggcttgtctaaggcacccagcaagtcaacagcaaagcccagactagaactcnggttgtctaaatcccaatcaagcattctccttcttttcatatgttcctgaaatctcaataatggaaaactttaattttatatgactataaatacacatattagtagtcagcaacggaacagatatgaaaaccccaggaaagcactgaacatatggaaactaaatctgggtcacaatattccttggggacccatcatttcttggtctcaaacataataacttaaatgggaaggtaaatttcaatggcaagggtacaatacacactgtaattgatctagaagatgtatttagaagttgttaataatgcatgtaagatgctgaatattatttt

SEQ ID NO: 615 - DNA, 661 bp, Homo sapiens
  misc_feature [331]..[331]: Chromosome 2, SNP identification no. = rs1897911
  misc_feature [331]..[331]: allele = a, in linkage disequilibrium with rs4670019, respectively
  misc_feature [331]..[331]: n is a, t, c or g
gggcaactgagcacaagagacagagagaacaccatgggagtccctttaataatgactcactgtcatgaaaactaaccaactcccataatatcaatattaatacattcatgaaagcttcaccttcatgatccaatcacctcttattaagtaagccctacctcccaatactgccacattggagattaagtttctagtacatgaaaatttgagaaacacattcaaaccatagcaatggttgtacataaatttatatatagaaaaacttttcctgaaaaataagtccctcattgtcaatcagttgagggaaatacagaggagagcaaagagccanactcagaagtcaaacccttggcttgaaattctcaaaccaccatttaccagctgaatgacctgagacaaattacaaatctttcctgaacctcagtttttatattcatgaatgagaggcaataggactgtattctaccacttttggaaagactagaaccaatatattccctgttccccattgtttgacatatagtatccactgacacatctcagctcaattctgaggagaaaaacaactaccctatgagcaaatggagtttttggagttttcagtaaggctgtttataacacctcatgtcctttggtatcatgctcccccaaaaaggtttat

SEQ ID NO: 616 - DNA, 661 bp, Homo sapiens
  misc_feature [331]..[331]: Chromosome 2, SNP identification no. = rs1897912
  misc_feature [331]..[331]: allele = a, in linkage disequilibrium with rs4670019, respectively
  misc_feature [331]..[331]: n is a, t, c or g
ctcttattaagtaagccctacctcccaatactgccacattggagattaagtttctagtacatgaaaatttgagaaacacattcaaaccatagcaatggttgtacataaatttatatatagaaaaacttttcctgaaaaataagtccctcattgtcaatcagttgagggaaatacagaggagagcaaagagccaaactcagaagtcaaacccttggcttgaaattctcaaaccaccatttaccagctgaatgacctgagacaaattacaaatctttcctgaacctcagtttttatattcatgaatgagaggcaataggactgtattctaccncttttggaaagactagaaccaatatattccctgttccccattgtttgacatatagtatccactgacacatctcagctcaattctgaggagaaaaacaactaccctatgagcaaatggagtttttggagttttcagtaaggctgtttataacacctcatgtcctttggtatcatgctcccccaaaaaggtttatttttttaaatctagaaattaggatcgtgtttataagagaaactctaaattatttctttgattctttatttttaagaaccttcatttcactttttttaattcctcttcccagatgaaaaatttctggtagtcctgagg

SEQ ID NO: 617 - DNA, 661 bp, Homo sapiens
  misc_feature [331]..[331]: Chromosome 2, SNP identification no. = rs2714304
  misc_feature [331]..[331]: allele = g, in linkage disequilibrium with rs4670019, respectively
  misc_feature [331]..[331]: n is a, t, c or g
gctgagaagagaagcttcaggactttatttcagatacctacaaattgagtggccagggagcagcatgccaatactgacataaaataggccaaataatttgctgtaggattctttcaatatttagtttctcaaatggaattaaagtatttttttaattgttccaagttcaaacaatggaagaatatgtattaacacctgttagaaatatgtacatcttttcttccttgtcttgatgcatgctcagctatgaacaaatcattcagcaacatggcatatcacttggaaacagggcatcttcacttggttcaagtctattttatagttctaatcnaaagattgcttaactccagcaaattgctcaatcaacatagggacatccatagtctgagcacatcaggttgactaagaagcagggttctaaacttcaagatgggatggaatatggcatctcattctgtaagtttagggagggaagagttgacttgacttcactacagttactgctagagtttgattgatctgacccctccaaatcttgtgttgaaattcgatctccattgtgggaggtagagcttaatgggagaatttgggacatggggccagatccctcattaatagattaatctcttccttgagactggggttaggtgagttctcactc

SEQ ID NO: 618 - DNA, 661 bp, Homo sapiens
  misc_feature [331]..[331]: Chromosome 2, SNP identification no. = rs1541960
  misc_feature [331]..[331]: allele = c, in linkage disequilibrium with rs4670019, respectively
  misc_feature [331]..[331]: n is a, t, c or g
tcttccttgtcttgatgcatgctcagctatgaacaaatcattcagcaacatggcatatcacttggaaacagggcatcttcacttggttcaagtctattttatagttctaatcgaaagattgcttaactccagcaaattgctcaatcaacatagggacatccatagtctgagcacatcaggttgactaagaagcagggttctaaacttcaagatgggatggaatatggcatctcattctgtaagtttagggagggaagagttgacttgacttcactacagttactgctagagtttgattgatctgacccctccaaatcttgtgttgaaattngatctccattgtgggaggtagagcttaatgggagaatttgggacatggggccagatccctcattaatagattaatctcttccttgagactggggttaggtgagttctcactctattagttcccaagataatagttgttaaaaagagccagacacctcccctttctctcttgccatgtgatccctgtatatgccagctcccctttaccttctgccatgagtggaagtagcaaggtcttaggctacttcccaatcttgaacttttccatacatcagaatcatgagccaaataagcttccttttaaaaaaatttttacccagcctcaagtatt

SEQ ID NO: 619 - DNA, 661 bp, Homo sapiens
  misc_feature [331]..[331]: Chromosome 2, SNP identification no. = rs2714306
  misc_feature [331]..[331]: allele = a, in linkage disequilibrium with rs4670019, respectively
  misc_feature [331]..[331]: n is a, t, c or g
ctccaaatcttgtgttgaaattcgatctccattgtgggaggtagagcttaatgggagaatttgggacatggggccagatccctcattaatagattaatctcttccttgagactggggttaggtgagttctcactctattagttcccaagataatagttgttaaaaagagccagacacctcccctttctctcttgccatgtgatccctgtatatgccagctcccctttaccttctgccatgagtggaagtagcaaggtcttaggctacttcccaatcttgaacttttccatacatcagaatcatgagccaaataagcttccttttaaaaaantttttacccagcctcaagtattcccttatagcaacacgaatgaactaagacagccacctaggactcttgtcttgcctgtgacaagacagactgtcaacactgaagggataccactaagaatgaatctggcagaaatctaccaagctcccctcattcccattctctgcaagacaaagttcaaaattctcaacctgggcattctagctccttcacaatctggcctaggcttcctttttagcaccactttcctccacttacttttctttttgcttctgcttttaactagtcactattttccacatgggtagatgttcctgcacttcaatgctt

SEQ ID NO: 620 - DNA, 661 bp, Homo sapiens
  misc_feature [331]..[331]: Chromosome 2, SNP identification no. = rs2714307
  misc_feature [331]..[331]: allele = a, in linkage disequilibrium with rs4670019, respectively
  misc_feature [331]..[331]: n is a, t, c or g
tttacccagcctcaagtattcccttatagcaacacgaatgaactaagacagccacctaggactcttgtcttgcctgtgacaagacagactgtcaacactgaagggataccactaagaatgaatctggcagaaatctaccaagctcccctcattcccattctctgcaagacaaagttcaaaattctcaacctgggcattctagctccttcacaatctggcctaggcttcctttttagcaccactttcctccacttacttttctttttgcttctgcttttaactagtcactattttccacatgggtagatgttcctgcacttcaatgcttttnctcataatgctgcctctgtgtggcgtttcatcccagaatctttacccatttaaaattcatttcaaatgtccacatagtcatatattcattcagtaaatgagtatttattgtctagtgattgccactctattgttctgggcactggtgacacagatatcaatcagaaacaagaaaaataaatccatacacatgagtagctgtcgaaagtagatgatgtttccctgaaggaagtgttttctcttaccctgattcccaggaagaagtcattgctcgcttttctgaagaagaaccacacacattgattttgctgcactcccaaaatgcttttta

SEQ ID NO: 621 - DNA, 661 bp, Homo sapiens
  misc_feature [331]..[331]: Chromosome 2, SNP identification no. = rs4670019
  misc_feature [331]..[331]: allele = a, g
  misc_feature [331]..[331]: n is a, t, c or g
tccttcacaatctggcctaggcttcctttttagcaccactttcctccacttacttttctttttgcttctgcttttaactagtcactattttccacatgggtagatgttcctgcacttcaatgcttttactcataatgctgcctctgtgtggcgtttcatcccagaatctttacccatttaaaattcatttcaaatgtccacatagtcatatattcattcagtaaatgagtatttattgtctagtgattgccactctattgttctgggcactggtgacacagatatcaatcagaaacaagaaaaataaatccatacacatgagtagctgtcnaaagtagatgatgtttccctgaaggaagtgttttctcttaccctgattcccaggaagaagtcattgctcgcttttctgaagaagaaccacacacattgattttgctgcactcccaaaatgctttttactccaaacttcaaattagagctatttagcccatcctagaatttcagagtaaaaaatcttcagcatcatcctactgcctataaagaaaagtcaactggcccattctcagcagagcatatcaccctacaaagaagggttaacccttgaatatggattctatttacctaggcaccttattttaattatagataacttcctaaaaat

SEQ ID NO: 622 - DNA, 661 bp, Homo sapiens
  misc_feature [331]..[331]: Chromosome 2, SNP identification no. = rs2714308
  misc_feature [331]..[331]: allele = a, in linkage disequilibrium with rs4670019, respectively
  misc_feature [331]..[331]: n is a, t, c or g
ccacacacattgattttgctgcactcccaaaatgctttttactccaaacttcaaattagagctatttagcccatcctagaatttcagagtaaaaaatcttcagcatcatcctactgcctataaagaaaagtcaactggcccattctcagcagagcatatcaccctacaaagaagggttaacccttgaatatggattctatttacctaggcaccttattttaattatagataacttcctaaaaatccaaaagtgaaatctatactagtattatacgtatctaatttattttattcccctttggaaacctcttaaaggtatttcaaaataccncctccccgcccctcttcactgtctcttcctgtgtttctgccctgcctcatccaaagggaagtgtcactaaccgtttttgatttttaaggaagtgatggttactgccactaatgttcttccaggtgggtgattttccagtcctctcaatttttcctccaaaagagaagatacggtggccacaagaatgcatcttacaggcctccagctatagggagagttattgacccagagactcagtcactgagccttgaaatgcaacacagtgttttcattgagaccaaaactcctcagggctgctatgcaccaattttggactgcaccagggctata

SEQ ID NO: 623 - DNA, 661 bp, Homo sapiens
  misc_feature [331]..[331]: Chromosome 2, SNP identification no. = rs2705876
  misc_feature [331]..[331]: allele = c, in linkage disequilibrium with rs4670019, respectively
  misc_feature [331]..[331]: n is a, t, c or g
aagggttaacccttgaatatggattctatttacctaggcaccttattttaattatagataacttcctaaaaatccaaaagtgaaatctatactagtattatacgtatctaatttattttattcccctttggaaacctcttaaaggtatttcaaaataccacctccccgcccctcttcactgtctcttcctgtgtttctgccctgcctcatccaaagggaagtgtcactaaccgtttttgatttttaaggaagtgatggttactgccactaatgttcttccaggtgggtgattttccagtcctctcaatttttcctccaaaagagaagatanggtggccacaagaatgcatcttacaggcctccagctatagggagagttattgacccagagactcagtcactgagccttgaaatgcaacacagtgttttcattgagaccaaaactcctcagggctgctatgcaccaattttggactgcaccagggctataaaattaaggaggtgcaaaaaaactcaataattagtatagatggtatttaatcaaaattaatgcaaaaaaaatctataatgaaaaaatattaaatttaaaataaatgttggtattactaattttccttttgtttaagctaacacttggctctgcaaggatgcagagtgcagc

SEQ ID NO: 624 - DNA, 661 bp, Homo sapiens
  misc_feature [331]..[331]: Chromosome 2, SNP identification no. = rs722836
  misc_feature [331]..[331]: allele = t, in linkage disequilibrium with rs4670019, respectively
  misc_feature [331]..[331]: n is a, t, c or g
aaggctggaaataggaactgaatataggtaggcaactaaaaatctctgcctcagcctcattcctttagaagcatttattgataaaattccctttacctcagtggctcaacacacagtcaaggccactgaagtctgtatcaacgacgagcagttatgtccagggccaaccttgacaccaaatagtggccagcagcttctaagaggtcgtggacaaaccatatatatccaaggggtcccaagatacacttcttagcattggaagtggtttaaaatatgatgcaaaagaatctgtttgatgttgctcacctagtctcttctttgtagcactagnattttaaaagtaaaatctttatgctagtgataaactagtgattaatctagatatttgtggtatatagtcctagctgagaaatgcagtccattcatcagaaaacaaaacaccaaaactctgctttaaaaaaggcttaaatttccaagaagacattaccatttgaaacttgtatgtactatacatatatacatacatacatacatgtgtgttttgtatgtctatgcaccacccaccccccacccccaacacacacacatgcacatgtttatctcagagcttggaccctgactcagaaaagtctccctctatgtggataagtaaagacagaga

SEQ ID NO: 625 - DNA, 661 bp, Homo sapiens
  misc_feature [331]..[331]: Chromosome 2, SNP identification no. = rs722835
  misc_feature [331]..[331]: allele = g, in linkage disequilibrium with rs4670019, respectively
  misc_feature [331]..[331]: n is a, t, c or g
acttccagacatttttccagaagaagaaggaagaacttttctggaaagttctagaactttaaacttttctttagataaaattgccctgtattgagtcttacatctatttctgaacattttggcaaaaccactcctggacttgagaatgggctttccttctcctagggcacatgaggctagtgggaagagtgaagagctggagagggattctgcttggaaggctggaaataggaactgaatataggtaggcaactaaaaatctctgcctcagcctcattcctttagaagcatttattgataaaattccctttacctcagtggctcaacacanagtcaaggccactgaagtctgtatcaacgacgagcagttatgtccagggccaaccttgacaccaaatagtggccagcagcttctaagaggtcgtggacaaaccatatatatccaaggggtcccaagatacacttcttagcattggaagtggtttaaaatatgatgcaaaagaatctgtttgatgttgctcacctagtctcttctttgtagcactagaattttaaaagtaaaatctttatgctagtgataaactagtgattaatctagatatttgtggtatatagtcctagctgagaaatgcagtccattcatcagaaaacaaaacaccaa

SEQ ID NO: 626 - DNA, 661 bp, Homo sapiens
  misc_feature [331]..[331]: Chromosome 2, SNP identification no. = rs2571617
  misc_feature [331]..[331]: allele = c, in linkage disequilibrium with rs4670019, respectively
  misc_feature [331]..[331]: n is a, t, c or g
gatacagacttcagtggccttgactgtgtgttgagccactgaggtaaagggaattttatcaataaatgcttctaaaggaatgaggctgaggcagagatttttagttgcctacctatattcagttcctatttccagccttccaagcagaatccctctccagctcttcactcttcccactagcctcatgtgccctaggagaaggaaagcccattctcaagtccaggagtggttttgccaaaatgttcagaaatagatgtaagactcaatacagggcaattttatctaaagaaaagtttaaagttctagaactttccagaaaagttcttccttnttcttctggaaaaatgtctggaagtgactctattctttctctagacattgccaaacatggatatgagagcccaacctgaaaacagactgagacagaaaccaatccgaagagaaaggtagtgtcaagagaggcagaatggagccggagccacaccttatgcaaatttcgaagcctatctttcctctatacttccagatatgtgagccaataaatgtattcaatgcaaattaagtggagttttgcgttgctttcactcaagagctttccaaatattatagagaaccttatcatataaaagaataaaacactttcttgaactaagacagagag

SEQ ID NO: 627 - DNA, 661 bp, Homo sapiens
  misc_feature [331]..[331]: Chromosome 2, SNP identification no. = rs2571618
  misc_feature [331]..[331]: allele = c, in linkage disequilibrium with rs4670019, respectively
  misc_feature [331]..[331]: n is a, t, c or g
gaaaaatgtctggaagtgactctattctttctctagacattgccaaacatggatatgagagcccaacctgaaaacagactgagacagaaaccaatccgaagagaaaggtagtgtcaagagaggcagaatggagccggagccacaccttatgcaaatttcgaagcctatctttcctctatacttccagatatgtgagccaataaatgtattcaatgcaaattaagtggagttttgcgttgctttcactcaagagctttccaaatattatagagaaccttatcatataaaagaataaaacactttcttgaactaagacagagagaaattcaanggaagtaaacattggaatttttcagtctctaaaaacaagatttaatcagattcaaagaagaatgatattgattcataaaggaggggaaaaggttttctgtctctgcttcagaacaatttttgtgggagagtaaatgaaaaatgaagagtgacattttgattgagctggagggagagagcagtttccttttgagaaaggttgtaagctttcaggccaggctcaacagaaatgaaaagggagaagagatagtcttcggacggcacttcttttaaaaatagaaaaggaggcattgcggccattactctagcagcatgggagactcagatccaa

SEQ ID NO: 628 - DNA, 661 bp, Homo sapiens
  misc_feature [331]..[331]: Chromosome 2, SNP identification no. = rs2714231
  misc_feature [331]..[331]: allele = g, in linkage disequilibrium with rs4670019, respectively
  misc_feature [331]..[331]: n is a, t, c or g
aaatattatagagaaccttatcatataaaagaataaaacactttcttgaactaagacagagagaaattcaacggaagtaaacattggaatttttcagtctctaaaaacaagatttaatcagattcaaagaagaatgatattgattcataaaggaggggaaaaggttttctgtctctgcttcagaacaatttttgtgggagagtaaatgaaaaatgaagagtgacattttgattgagctggagggagagagcagtttccttttgagaaaggttgtaagctttcaggccaggctcaacagaaatgaaaagggagaagagatagtcttcggacngcacttcttttaaaaatagaaaaggaggcattgcggccattactctagcagcatgggagactcagatccaaagagacctagcaaataaaagacttcttatggttgaaatggtaaaaatatcatacctctatcctcttctgagttcgaagccaactgagaaaatgaaacagaaattagttataaatacaaaaatattagtgttattgctaaattatctggattggacaatacagctttgagcttggccacacattctttttattatattcctgctccacacgctaagtaattgaacttacatactcaagcacaggaagtgcatctggataa

SEQ ID NO: 629 - DNA, 661 bp, Homo sapiens
  misc_feature [331]..[331]: Chromosome 2, SNP identification no. = rs2705877
  misc_feature [331]..[331]: allele = t, in linkage disequilibrium with rs4670019, respectively
  misc_feature [331]..[331]: n is a, t, c or g
catgagaagggggaaccaaaggatgtcagactcccaacatcccatcaatgagctcaatcatttttccccaatgtaggaaggcctagaggaatggccagggagcctataactgctattctaaccatgcctctgaggtcaacatttcctcatggacaacaaaggacaggatgatactgtccccctaacaggagacaagaactcaaggagcccacatccagtgtactattaagagatgcttcttaaagctgtaaaagagtgcacatggtaaagtccattaggaaatcagcccttgaatatcaagatagccatgtcaggtagatgtagatagagngagccaaactcaaccaagaagactgggaagctcagtgtagaaaatgtcaaacaccactaggtatatttcaagatgacaagacttaatgcccccctactctccatctcttccttttgaggtaaaattacaatcacttacaggctttcaactagtatttccagggcatttctactgtttcaattatttcattagaaaagactagattttcttaaatatctgttgagttttgtcctatgttatatttttgactgaagcaaggataggagttgggtggagacttctgactaaggaaggtgagagtaattgagatttgtatgaagggtagaactt

SEQ ID NO: 630 - DNA, 661 bp, Homo sapiens
  misc_feature [331]..[331]: Chromosome 2, SNP identification no. = rs2714233
  misc_feature [331]..[331]: allele = t, in linkage disequilibrium with rs4670019, respectively
  misc_feature [331]..[331]: n is a, t, c or g
taacaggagacaagaactcaaggagcccacatccagtgtactattaagagatgcttcttaaagctgtaaaagagtgcacatggtaaagtccattaggaaatcagcccttgaatatcaagatagccatgtcaggtagatgtagatagagtgagccaaactcaaccaagaagactgggaagctcagtgtagaaaatgtcaaacaccactaggtatatttcaagatgacaagacttaatgcccccctactctccatctcttccttttgaggtaaaattacaatcacttacaggctttcaactagtatttccagggcatttctactgtttcaatnatttcattagaaaagactagattttcttaaatatctgttgagttttgtcctatgttatatttttgactgaagcaaggataggagttgggtggagacttctgactaaggaaggtgagagtaattgagatttgtatgaagggtagaactttcatagacccagaactcattaacttcacatatctcagagtagaagcatcctcatgtagaatctagaggaatatgataggaaacaagatattgggtccataaaggaaggctaattctatatgtggcagagaaagaatgtggccagtttatgaaacaggctcacatttctggagctcggcaaga

SEQ ID NO: 631 - DNA, 661 bp, Homo sapiens
  misc_feature [331]..[331]: Chromosome 2, SNP identification no. = rs2714235
  misc_feature [331]..[331]: allele = c, in linkage disequilibrium with rs4670019, respectively
  misc_feature [331]..[331]: n is a, t, c or g
gtaggggatacagggcctcactggaccctgaggtcatacgttttattgtcatcagcaaccacgtgagtccaggatctgctaagtgtgcctgctcagccaagacaaatgtggggacaaggtgggatctacctagggaaactaaagtcttttggagcgggaagcagtagcagcaaccactatggcacagggttacaagtgggttattttcaaggtagcctctcctcccaataattaagactggtctctatgagatgactttccctggactcctctacctcactgaacctgcagtgatatattctaactttctgagccataaccagctgcagantggcccattgtgtcagcagcagcttcacaaatatttattgggcacctactgtgtgctaggccctatgaaagtgctttcatgtgatctgatttacttcatcatcatcattactccaagacatggttatcttgcaaaggacgcaactgagacctggagagaataatgatgcattcagggtcacattgcctcaaatggcaaacctgggccttgaaccctggtttctggacttcaaatccagcactctttcccttcagcactttgttctgttcccacactcttccagcagtagtctcaagtgcccttaccacaccccaacaactcacttcaatt

SEQ ID NO: 632 - DNA, 661 bp, Homo sapiens
  misc_feature [331]..[331]: Chromosome 2, SNP identification no. = rs2571619
  misc_feature [331]..[331]: allele = a, in linkage disequilibrium with rs4670019, respectively
  misc_feature [331]..[331]: n is a, t, c or g
tggagcgggaagcagtagcagcaaccactatggcacagggttacaagtgggttattttcaaggtagcctctcctcccaataattaagactggtctctatgagatgactttccctggactcctctacctcactgaacctgcagtgatatattctaactttctgagccataaccagctgcagactggcccattgtgtcagcagcagcttcacaaatatttattgggcacctactgtgtgctaggccctatgaaagtgctttcatgtgatctgatttacttcatcatcatcattactccaagacatggttatcttgcaaaggacgcaactgagncctggagagaataatgatgcattcagggtcacattgcctcaaatggcaaacctgggccttgaaccctggtttctggacttcaaatccagcactctttcccttcagcactttgttctgttcccacactcttccagcagtagtctcaagtgcccttaccacaccccaacaactcacttcaattcagaaacacagtatgaaactagaattatttgcttggtgtattagtttgctagggctgccataacaaaataccacagactgggtggcttaaaaaacagaaatctgcttcctcacagttctggtgctggaagtctgaggtcaaggtgccag

SEQ ID NO: 633 - DNA, 661 bp, Homo sapiens
  misc_feature [331]..[331]: Chromosome 2, SNP identification no. = rs2571620
  misc_feature [331]..[331]: allele = t, in linkage disequilibrium with rs4670019, respectively
  misc_feature [331]..[331]: n is a, t, c or g
aaaggacgcaactgagacctggagagaataatgatgcattcagggtcacattgcctcaaatggcaaacctgggccttgaaccctggtttctggacttcaaatccagcactctttcccttcagcactttgttctgttcccacactcttccagcagtagtctcaagtgcccttaccacaccccaacaactcacttcaattcagaaacacagtatgaaactagaattatttgcttggtgtattagtttgctagggctgccataacaaaataccacagactgggtggcttaaaaaacagaaatctgcttcctcacagttctggtgctggaagtcngaggtcaaggtgccaggaaggtaggcttctcctgatgcctctctccctggccttggatggacaccttctctcagtatctccatccctctgtgcatatctttgtccaaatctcctcttcttatagaacaccagtcaaattagattagagcttaccctaataacccctttttatcttagtcacctctttaaagagcctatctcctaacacagtcacatgtcgaggtactgggagttaggtaagtcttcaacgcgtgaaataagggagactacaactgagaccacaacacttaggtaaaatatgatttcaactgtatgatggtgttttcagtt

SEQ ID NO: 634 - DNA, 661 bp, Homo sapiens
  misc_feature [331]..[331]: Chromosome 2, SNP identification no. = rs2705844
  misc_feature [331]..[331]: allele = t, in linkage disequilibrium with rs4670019, respectively
  misc_feature [331]..[331]: n is a, t, c or g
ggtggcatcacgtctacattccaggcaggaggaagagggaaggtcaaataagcagaaggcccacatcagacaaatctgccccatagcaggaaagcaaaacttttccagaacatctatccagtaaatgtctggggacatcccactgccagaatttgtcacgtggccacctccaactcagtcataaccaagtaatcatgatccatccccaactggggatggagtacaggctactctcctgaaggtcaatagatctttccagcaatctgaacaaatcatggcgccattagaaaaatgagaggacagagaatagattctgcgcagactctgacgnggtgtgccacaaggctctggcatcagccctcacatcaccctgctggttcccaactctgcccctcaacagggtccttagaaaacttctgcaggctctgggcaaaactctgttgcttgttgcatagaggacaccaaaatggtcattctcgtctgtctccataacctcttctgaggttaactctggcatctgttggatgttctcattctgaatgtctgcattgggcatgatgtcatctattgtcttagtcaagttccaatttatataaataattctgtggagacaatatggagctatggggtgcccactagactggggtaagaagcaaaccca

SEQ ID NO: 635 - DNA, 661 bp, Homo sapiens
  misc_feature [331]..[331]: Chromosome 2, SNP identification no. = rs2714236
  misc_feature [331]..[331]: allele = g, in linkage disequilibrium with rs4670019, respectively
  misc_feature [331]..[331]: n is a, t, c or g
accccagtctagtgggcaccccatagctccatattgtctccacagaattatttatataaattggaacttgactaagacaatagatgacatcatgcccaatgcagacattcagaatgagaacatccaacagatgccagagttaacctcagaagaggttatggagacagacgagaatgaccattttggtgtcctctatgcaacaagcaacagagttttgcccagagcctgcagaagttttctaaggaccctgttgaggggcagagttgggaaccagcagggtgatgtgagggctgatgccagagccttgtggcacacctcgtcagagtctgcncagaatctattctctgtcctctcatttttctaatggcgccatgatttgttcagattgctggaaagatctattgaccttcaggagagtagcctgtactccatccccagttggggatggatcatgattacttggttatgactgagttggaggtggccacgtgacaaattctggcagtgggatgtccccagacatttactggatagatgttctggaaaagttttgctttcctgctatggggcagatttgtctgatgtgggccttctgcttatttgaccttccctcttcctcctgcctggaatgtagacgtgatgccaccaggagcagtagcca

SEQ ID NO: 636 - DNA, 661 bp, Homo sapiens
  misc_feature [331]..[331]: Chromosome 2, SNP identification no. = rs2571621
  misc_feature [331]..[331]: allele = a, in linkage disequilibrium with rs4670019, respectively
  misc_feature [331]..[331]: n is a, t, c or g
agctccatattgtctccacagaattatttatataaattggaacttgactaagacaatagatgacatcatgcccaatgcagacattcagaatgagaacatccaacagatgccagagttaacctcagaagaggttatggagacagacgagaatgaccattttggtgtcctctatgcaacaagcaacagagttttgcccagagcctgcagaagttttctaaggaccctgttgaggggcagagttgggaaccagcagggtgatgtgagggctgatgccagagccttgtggcacacctcgtcagagtctgcgcagaatctattctctgtcctctcntttttctaatggcgccatgatttgttcagattgctggaaagatctattgaccttcaggagagtagcctgtactccatccccagttggggatggatcatgattacttggttatgactgagttggaggtggccacgtgacaaattctggcagtgggatgtccccagacatttactggatagatgttctggaaaagttttgctttcctgctatggggcagatttgtctgatgtgggccttctgcttatttgaccttccctcttcctcctgcctggaatgtagacgtgatgccaccaggagcagtagccagtgtataatcacaaggtggcatga

SEQ ID NO: 637 - DNA, 661 bp, Homo sapiens
  misc_feature [331]..[331]: Chromosome 2, SNP identification no. = rs2714237
  misc_feature [331]..[331]: allele = a, in linkage disequilibrium with rs4670019, respectively
  misc_feature [331]..[331]: n is a, t, c or g
atcatgcccaatgcagacattcagaatgagaacatccaacagatgccagagttaacctcagaagaggttatggagacagacgagaatgaccattttggtgtcctctatgcaacaagcaacagagttttgcccagagcctgcagaagttttctaaggaccctgttgaggggcagagttgggaaccagcagggtgatgtgagggctgatgccagagccttgtggcacacctcgtcagagtctgcgcagaatctattctctgtcctctcatttttctaatggcgccatgatttgttcagattgctggaaagatctattgaccttcaggagagtngcctgtactccatccccagttggggatggatcatgattacttggttatgactgagttggaggtggccacgtgacaaattctggcagtgggatgtccccagacatttactggatagatgttctggaaaagttttgctttcctgctatggggcagatttgtctgatgtgggccttctgcttatttgaccttccctcttcctcctgcctggaatgtagacgtgatgccaccaggagcagtagccagtgtataatcacaaggtggcatgagtgaggagaaaagccacccatctcaggatgacagagaagaaaggtgaaggagctgcatctctga

SEQ ID NO: 638 - DNA, 661 bp, Homo sapiens
  misc_feature [331]..[331]: Chromosome 2, SNP identification no. = rs2705843
  misc_feature [331]..[331]: allele = t, in linkage disequilibrium with rs4670019, respectively
  misc_feature [331]..[331]: n is a, t, c or g
ttcctatattaagaaagcatcagcagagccagaatggccaggacccagagccagctctctccctcagtcctggctttgtagatggagatgtgagcactcagaatcacccatcagagtttgggcttccttttagatagcaccagaaaacaatagaaaaagccaaacaaaaaatcaaaccacagtgggagaaaaacattcatgtttcttgcatagcatgatccccaaaggtgaatagcctgggaaggatgttgcccagtgaagtcctcagagatgcagctccttcacctttcttctctgtcatcctgagatgggtggcttttctcctcactcntgccaccttgtgattatacactggctactgctcctggtggcatcacgtctacattccaggcaggaggaagagggaaggtcaaataagcagaaggcccacatcagacaaatctgccccatagcaggaaagcaaaacttttccagaacatctatccagtaaatgtctggggacatcccactgccagaatttgtcacgtggccacctccaactcagtcataaccaagtaatcatgatccatccccaactggggatggagtacaggctactctcctgaaggtcaatagatctttccagcaatctgaacaaatcatggcgccattagaaaaatga

SEQ ID NO: 639 - DNA, 661 bp, Homo sapiens
  misc_feature [331]..[331]: Chromosome 2, SNP identification no. = rs2571622
  misc_feature [331]..[331]: allele = c, in linkage disequilibrium with rs4670019, respectively
  misc_feature [331]..[331]: n is a, t, c or g
tctggcagtgggatgtccccagacatttactggatagatgttctggaaaagttttgctttcctgctatggggcagatttgtctgatgtgggccttctgcttatttgaccttccctcttcctcctgcctggaatgtagacgtgatgccaccaggagcagtagccagtgtataatcacaaggtggcatgagtgaggagaaaagccacccatctcaggatgacagagaagaaaggtgaaggagctgcatctctgaggacttcactgggcaacatccttcccaggctattcacctttggggatcatgctatgcaagaaacatgaatgtttttctnccactgtggtttgattttttgtttggctttttctattgttttctggtgctatctaaaaggaagcccaaactctgatgggtgattctgagtgctcacatctccatctacaaagccaggactgagggagagagctggctctgggtcctggccattctggctctgctgatgctttcttaatataggaacattctggccaggtgccgtggctcacacctgtaataccagcactttgggaggatgaggagggcatagcacgaggtcaagagattgaaaccatcctggccaacaaggtgaaaccccgtctttactaaaaatacaaaaattagctgg

SEQ ID NO: 640 - DNA, 661 bp, Homo sapiens
  misc_feature [331]..[331]: Chromosome 2, SNP identification no. = rs2714238
  misc_feature [331]..[331]: allele = g, in linkage disequilibrium with rs4670019, respectively
  misc_feature [331]..[331]: n is a, t, c or g
tgtaataccagcactttgggaggatgaggagggcatagcacgaggtcaagagattgaaaccatcctggccaacaaggtgaaaccccgtctttactaaaaatacaaaaattagctgggcatggtggcacgtgcctgtagtcccagctacttgggaggagaatccgttgaactgaggaggcagaggttgcagtgagccaagactgcactactgcactccagcctggcgactgagcaagactctgtcaaaaaaaaaaaaaaaaaaaaaaaaaaaggacattctaatgtggatgctgttggatgctgtgttttgtattgactgactcggcaatgntgaggctccaccttcccagcgtcagcacagggctcgctgaactggtttcagactgaaaggtggagaggtcagcactgaccaggggactcatgggaagaaccagataaccaagaactaaacacaaggcattacccaatcatctcagcaaaggtatgacaaagggcagggagatcacaattattaaacacctactacaagctgtgttcagtattttcatgcattccacaaatattagtgagtgccaagtgtgtgccaagcattattgtagccatggaggtcacaggcaacacataccacctacaaaaatccttatccttgtggagcttacat

SEQ ID NO: 641 - DNA, 661 bp, Homo sapiens
  misc_feature [331]..[331]: Chromosome 2, SNP identification no. = rs2571624
  misc_feature [331]..[331]: allele = a, in linkage disequilibrium with rs4670019, respectively
  misc_feature [331]..[331]: n is a, t, c or g
acacaaggcattacccaatcatctcagcaaaggtatgacaaagggcagggagatcacaattattaaacacctactacaagctgtgttcagtattttcatgcattccacaaatattagtgagtgccaagtgtgtgccaagcattattgtagccatggaggtcacaggcaacacataccacctacaaaaatccttatccttgtggagcttacatgcaggtcagaagaggtaaaccataaacatccaaacaagttttatattcaaatacatatatgcacacacacatatacacatgtatatattagatattgataatgtttacaggttggcagnacactataaggaagggagatgaggtgttgggtgacacttcccctgctgtgtcctcattggcctcagcccgctcatctgtgaaatgaagggcttccaccacgtttccttcatctctggaattctttgagactataacacacttcatctgcttatggactggctcattcttaaatgctttctaaagcatttgaatgaactctcatgaaagaatcatgttcactttaggctttaattcaaactcactttgtaaatcgcttttcttcttagtgattcctgttgatatcattttcttctttctaggactatttacagttgtagttgtatatgtat

SEQ ID NO: 642 - DNA, 661 bp, Homo sapiens
  misc_feature [331]..[331]: Chromosome 2, SNP identification no. = rs2714240
  misc_feature [331]..[331]: allele = t, in linkage disequilibrium with rs4670019, respectively
  misc_feature [331]..[331]: n is a, t, c or g
ttaagtgtctatttatgctccctattaaattccaatgcttaatgcagcacttggtgcttactgcttgctcaataaaattatggtttaatgaatgaatgaatgaatgaatgaatgaatacattctaggttatctatactgttttaattttaaagacctttgatgtttttctcttcttcaacattccctttttcagcttctcattgatattttccaaatagctctttacaaaatgcacgctttcaaacccagaggacctagaacatattttgttcattttctagacagagtaaattttgttatatactatgcaatgtgtgagctacagtggangtaatgaacttgtatatggtaaactctgaagatgtttcattaccagggagaaaatggcctgtgagtggacacacagaaatgtacacacacaagcatacacaaatacaaacttcctttctaaattataaacaggagggtgagtgtagatgcctgatttaggtcctgcctcaggcatggggctgtctttatgcagccaacctatgggcatctctttgagggcacctcaagagtgtgtactcataagggactgtcctgaagtgtggatgccctgagatttagtagagacaatgttgcctacaagaacagttagaggcattaaatggcagggga

SEQ ID NO: 643 - DNA, 661 bp, Homo sapiens
  misc_feature [331]..[331]: Chromosome 2, SNP identification no. = rs2714241
  misc_feature [331]..[331]: allele = a, in linkage disequilibrium with rs4670019, respectively
  misc_feature [331]..[331]: n is a, t, c or g
agtgtgtactcataagggactgtcctgaagtgtggatgccctgagatttagtagagacaatgttgcctacaagaacagttagaggcattaaatggcaggggatttttggacagcacgaagtcattacatctgggaagaataaacaagagatcagtcatttggtaattggtgtcacaaggacatttggccaaaatcctgctggcctagtcagtcttatattcattatttatacatttttttaaaagtcatttataactcatataattatgtgccaaaagggtacactgttccacaatttgggttaggccattttcaacaaatgctctagtcntattagaatactagagaaccactctgggtgttgttccatggaggtttctggacctggtagctcctatctgtcagaatcaagctctggtggcttgagaggctgatgccattggcctttatccatccaatccccttataagatgatgcttttattctgacagttgggttgcaagaccaaagcaactagcataacatctggtagaaagcaagaaactaagatccttgtgtttttctgacaacaaaggcaaaaatcaaacaacaaccataaaacaccaaaattgtcagtgctatcattccctgctaacaagaaaaatagggggacaggaaaggc

SEQ ID NO: 644 - DNA, 661 bp, Homo sapiens
  misc_feature [331]..[331]: Chromosome 2, SNP identification no. = rs2714242
  misc_feature [331]..[331]: allele = t, in linkage disequilibrium with rs4670019, respectively
  misc_feature [331]..[331]: n is a, t, c or g
tatacatttttttaaaagtcatttataactcatataattatgtgccaaaagggtacactgttccacaatttgggttaggccattttcaacaaatgctctagtcatattagaatactagagaaccactctgggtgttgttccatggaggtttctggacctggtagctcctatctgtcagaatcaagctctggtggcttgagaggctgatgccattggcctttatccatccaatccccttataagatgatgcttttattctgacagttgggttgcaagaccaaagcaactagcataacatctggtagaaagcaagaaactaagatccttgtgnttttctgacaacaaaggcaaaaatcaaacaacaaccataaaacaccaaaattgtcagtgctatcattccctgctaacaagaaaaatagggggacaggaaaggcaaactttttcctagcagcaacttttaagaggcaatcatcacagatatctttatgtaagggatgtggaacaatggaaggaatactctcttcgtagcatttttatagaaagcatagaaacatgttttatttggtcattttttatatggcccctcaataaaagaaaatgacatcctcttaaatagccattccctggtggcagttttacaggtatgagagtaatggtattt

SEQ ID NO: 645 - DNA, 661 bp, Homo sapiens
  misc_feature [331]..[331]: Chromosome 2, SNP identification no. = rs2714243
  misc_feature [331]..[331]: allele = c, in linkage disequilibrium with rs4670019, respectively
  misc_feature [331]..[331]: n is a, t, c or g
actctgggtgttgttccatggaggtttctggacctggtagctcctatctgtcagaatcaagctctggtggcttgagaggctgatgccattggcctttatccatccaatccccttataagatgatgcttttattctgacagttgggttgcaagaccaaagcaactagcataacatctggtagaaagcaagaaactaagatccttgtgtttttctgacaacaaaggcaaaaatcaaacaacaaccataaaacaccaaaattgtcagtgctatcattccctgctaacaagaaaaatagggggacaggaaaggcaaactttttcctagcagcaanttttaagaggcaatcatcacagatatctttatgtaagggatgtggaacaatggaaggaatactctcttcgtagcatttttatagaaagcatagaaacatgttttatttggtcattttttatatggcccctcaataaaagaaaatgacatcctcttaaatagccattccctggtggcagttttacaggtatgagagtaatggtatttagaccttaagcttttggtgatctgacctgatacgggactaggttgctgatattgacgtagaagagatgaggctgcactgctgtctcgaatactgtttgtttcctcggcagggctggggacaaga

SEQ ID NO: 646 - DNA, 661 bp, Homo sapiens
  misc_feature [331]..[331]: Chromosome 2, SNP identification no. = rs2714244
  misc_feature [331]..[331]: allele = t, in linkage disequilibrium with rs4670019, respectively
  misc_feature [331]..[331]: n is a, t, c or g
tgctatcattccctgctaacaagaaaaatagggggacaggaaaggcaaactttttcctagcagcaacttttaagaggcaatcatcacagatatctttatgtaagggatgtggaacaatggaaggaatactctcttcgtagcatttttatagaaagcatagaaacatgttttatttggtcattttttatatggcccctcaataaaagaaaatgacatcctcttaaatagccattccctggtggcagttttacaggtatgagagtaatggtatttagaccttaagcttttggtgatctgacctgatacgggactaggttgctgatattgacgnagaagagatgaggctgcactgctgtctcgaatactgtttgtttcctcggcagggctggggacaagacttggttcatgaattccagacagagggctcagggagggatctggactacacgaactgagccctctcttgggcaatcctcactccatggacttcttttctctcttttttcttctcttagccttttaactctccagcatcttttcttttaaccttctcctttgcctaggcacatcatcacccctgaaggcattgccgtgaaacgtcactgccacatgtgctggaatcttgctgcaaagctggcaccttctgaggcctgaactggct

SEQ ID NO: 647 - DNA, 661 bp, Homo sapiens
  misc_feature [331]..[331]: Chromosome 2, SNP identification no. = rs2571625
  misc_feature [331]..[331]: allele = c, in linkage disequilibrium with rs4670019, respectively
  misc_feature [331]..[331]: n is a, t, c or g
actaggttgctgatattgacgtagaagagatgaggctgcactgctgtctcgaatactgtttgtttcctcggcagggctggggacaagacttggttcatgaattccagacagagggctcagggagggatctggactacacgaactgagccctctcttgggcaatcctcactccatggacttcttttctctcttttttcttctcttagccttttaactctccagcatcttttcttttaaccttctcctttgcctaggcacatcatcacccctgaaggcattgccgtgaaacgtcactgccacatgtgctggaatcttgctgcaaagctggcancttctgaggcctgaactggctctgtgaatggagtctggagtgttaacttgagttactgggcaaaataattcaagtttaccgtgtttattacaatcactgtctctctcaaattatcataaaagagaaactggaaatgagtgaatctcagtaagtcagatagtccttaaagtggcgaactgtgttccctaaaaagatacattgaagttctaacccctagtacttgtgaaagtgacttttgtggaaatgtaacaaagtcaagataaggtcatagttgattaaggtagacccaattaaggtgtccttacaagagaggaatttggacacagacac

SEQ ID NO: 648 - DNA, 661 bp, Homo sapiens
  misc_feature [331]..[331]: Chromosome 2, SNP identification no. = rs2571626
  misc_feature [331]..[331]: allele = c, in linkage disequilibrium with rs4670019, respectively
  misc_feature [331]..[331]: n is a, t, c or g
gaagattttcactgttccatgtcctgccacgaggacatggcagatttgccttagaaagggcggcctccttatgcttccctgcaccaggaaggaatcaggagagcgttacctaacgcttacctttcaaggacatcctgaagattcgtatctccgtaataggtgtccaagaaattggagctttctggagagctgtcactagctaaatataaagtctgttattatcctcgccaaaccttggcaatcctttgtcacttttcttttgaaaagaaaattatacttacccaaagcatttcattaccacctgaaccgtctgttccatataaatttaganacctaaacttatataaccccacggccaaatgtgttggagttaggagctcagggcacctgtaatattgctattacagaaaataaattttggcatgtggtcttgcattgactgttcagtctcagctccaaatcatctctatttagagagatcccttcaaactgttttttggggtggtttgcctacatttgtctatgttgcccacagtagtttatgccaggtagatcttatagacttactaaatgagaattataccaccatctacctgaatatttgggattccttctttacatatgaaaaggaaagtctcgtttaaggaggcatggttgccag

SEQ ID NO: 649 - DNA, 661 bp, Homo sapiens
  misc_feature [331]..[331]: Chromosome 2, SNP identification no. = rs2714245
  misc_feature [331]..[331]: allele = a, in linkage disequilibrium with rs4670019, respectively
  misc_feature [331]..[331]: n is a, t, c or g
ggacatcctgaagattcgtatctccgtaataggtgtccaagaaattggagctttctggagagctgtcactagctaaatataaagtctgttattatcctcgccaaaccttggcaatcctttgtcacttttcttttgaaaagaaaattatacttacccaaagcatttcattaccacctgaaccgtctgttccatataaatttagacacctaaacttatataaccccacggccaaatgtgttggagttaggagctcagggcacctgtaatattgctattacagaaaataaattttggcatgtggtcttgcattgactgttcagtctcagctccnaatcatctctatttagagagatcccttcaaactgttttttggggtggtttgcctacatttgtctatgttgcccacagtagtttatgccaggtagatcttatagacttactaaatgagaattataccaccatctacctgaatatttgggattccttctttacatatgaaaaggaaagtctcgtttaaggaggcatggttgccagtcctttttgattagctaagcatgtccacgggtatgtggctgaagagcaggaaagccccctggaccctgcaagtccccctcttgtagcactttcaaagagtcagttgaacagcatcagcaaggttctg

SEQ ID NO: 650 - DNA, 661 bp, Homo sapiens
  misc_feature [331]..[331]: Chromosome 2, SNP identification no. = rs7607607
  misc_feature [331]..[331]: allele = a, in linkage disequilibrium with rs4670019, respectively
  misc_feature [331]..[331]: n is a, t, c or g
ggggacattggagtatatccccattaatgccaaaacctcatttcagatattagataggagagtattttacaaattctcatgcaaatgtaggtgctgttggcattgttgaaggcttaagtattattaagtggtattattattgtaatattagcatagaatgtgggagaattaaggggattatgtattatattaattagcaacaatttatgctttcagaaatactcttaattattaaaatctctgtcttgggggaaatcagctaacaccaggttataaaataagtacatggtatgaccccttttctgcatttagtagttctgttttagaagcntgtttatcttattttatactgggattctatacaattaattgtgagtttgacctcaatggaacatttttaaagtaagtttattcttatgggaaattcagcaggaggtgtatacataaaaacaaactgaacacaaactcctttgcaatgaacactctttcagaatctcttccttcattcccatcccctctttcccttatacctacctacacctcatcccactgctattgcaaactttatagtgactatgataagatttttgaaaggttcctatacaacataatagcatactgtttggataaatcaacaagtagttgcagagcatttatctta

SEQ ID NO: 651 - DNA, 661 bp, Homo sapiens
  misc_feature [331]..[331]: Chromosome 2, SNP identification no. = rs7607846
  misc_feature [331]..[331]: allele = a, in linkage disequilibrium with rs4670019, respectively
  misc_feature [331]..[331]: n is a, t, c or g
ggattatgtattatattaattagcaacaatttatgctttcagaaatactcttaattattaaaatctctgtcttgggggaaatcagctaacaccaggttataaaataagtacatggtatgaccccttttctgcatttagtagttctgttttagaagcatgtttatcttattttatactgggattctatacaattaattgtgagtttgacctcaatggaacatttttaaagtaagtttattcttatgggaaattcagcaggaggtgtatacataaaaacaaactgaacacaaactcctttgcaatgaacactctttcagaatctcttccttcnttcccatcccctctttcccttatacctacctacacctcatcccactgctattgcaaactttatagtgactatgataagatttttgaaaggttcctatacaacataatagcatactgtttggataaatcaacaagtagttgcagagcatttatcttaattttgccattccatggacaatacttaccaaactattgcacatcaggtagtacacgtaaaatgtctgtggcccactggagtaaagggtaaaggcagctcccagggacaggggacaaatctagaagctataactacctcaagccccacctagctgtccctgggacaaagatgatt

SEQ ID NO: 652 - DNA, 661 bp, Homo sapiens
  misc_feature [331]..[331]: Chromosome 2, SNP identification no. = rs2705853
  misc_feature [331]..[331]: allele = a, in linkage disequilibrium with rs4670019, respectively
  misc_feature [331]..[331]: n is a, t, c or g
agagattcatggatgatgacacagagccttcaaggagcacaatgttcagtgtacaaatcggtccttctggaatgactggaattactcctacctgtagaaccacctccaatttcccaaaacacactatgcctacatctctccttggaaatcttctttatttcactcttctttctccccacaaagtttataatccccccatatcagttaatttgttttatgttgcatataatagaaaaacaatatatctaatttaaataatgaaaaaatgttttggttcgcataatgggaagcccagaagcagagcaggcttcctggttgtctgagcctagcntcatgggctatttttctgcgagtcactcagctcttttcctctatgcactgagttcactttcaggctcacagaggcaaaatcactgtggtatttcccagaggctaaaagagagaaggaagcaactccccaagttctccaacacatttctctctcacttctcaatgatctgaaatggatcatgaggtcattagaaaattaatccccatggccagaagacagccatggatggatggatggatggatggatggatggatggatggatggatggatggactgattgattgatttaggcctgggtagcacatatcaattactattctaaggcagta

SEQ ID NO: 653 - DNA, 661 bp, Homo sapiens
  misc_feature [331]..[331]: Chromosome 2, SNP identification no. = rs7602844
  misc_feature [331]..[331]: allele = a, in linkage disequilibrium with rs4670019, respectively
  misc_feature [331]..[331]: n is a, t, c or g
tttcctaagggagtaacagtttggaggagtcaaagatgaaaagaaaataggaagtgtcacactgtgattgggcagaaccagaacagcgctgggccaggcctgtaacagacctctgaaaactagggttggcaccaaaaatggataatgacattcagagaacaggtcactggaggccattccagagtgagtcagatcttagtttcggacaggaggctagttctggaaccaatgtgggtagcaagaatccaaggacttccgccaagtggcttccctgctgcccagccacgttttatcagctgaatttctcttgtatcagcagctctcctgctgnggtattttcagggcattttgttttcagtcctaaagattccacccagagagggaggaagaaggagaatgtgcaagtatttgagggccacttttgtgctcagctctgtgctgttgatcacgtgctccctgtggtaccctcttgtccctcctcctccacacacgccacacacatacattcacacacactcgcactcaacatgaacctgtgcacactcataaaaagctacactacacccacacacttatacactcatgcacactcacactcgcaaacatgcacatgtgctcactcatacacatctacacccacacgctcatatactcacactct

SEQ ID NO: 654 - DNA, 661 bp, Homo sapiens
  misc_feature [331]..[331]: Chromosome 2, SNP identification no. = rs1836522
  misc_feature [331]..[331]: allele = c, in linkage disequilibrium with rs4670019, respectively
  misc_feature [331]..[331]: n is a, t, c or g
cactcgcaaacatgcacatgtgctcactcatacacatctacacccacacgctcatatactcacactctcacacgtgcacatgcacacactgatacacagctatgcccacacactcatacacacactagcactctcacacatgcacatgtgcacactcattcatacatagctacacccacacactcatacacatactcgcactcacacatgtgcacactcacttataaacagttacacccacacattcatatattcccacacttgcatacatccacacatgcatgtgctcacattcatacacagctactcttatacacttgaactctcacanatgcacatgtgcaccctcataaacagctacacccactcatacacacttgcatacactcacacatgcatgtacacacacactcatgtacagctacacacacaactctcatacactcacgcacactcatactcacacatatacacctacactctcatacacacacacacaaacatgtgcacactcataaacagccacatccacacacatacacacacttacatactcacacatgcatatgtacacacacactcatgcacagctacacttacacattctcatacgttcatgcactttcactcccacacatgcactcacacacttgcacacttg

SEQ ID NO: 655 - DNA, 661 bp, Homo sapiens
  misc_feature [331]..[331]: Chromosome 2, SNP identification no. = rs10199271
  misc_feature [331]..[331]: allele = t, in linkage disequilibrium with rs4670019, respectively
  misc_feature [331]..[331]: n is a, t, c or g
acagtctccatctatttgtcagagagaataagcctccctccacttcccaccccccacatgcaccagctttcaagaatgccctccacccaggcttggcagggcttttttttactgcctggtccagcagctgtcttggtgtttcagtgatttcattcaacttaattcctttccgtgcattttcataaagtgcttactctgtgcagggtcctacgctaggtgccgaggatacaggaatggatgacatgtcatctctgcctccaggaattcacatcctaattgaaagagacagacatattgctgtggtcgtggatggatggctttttaagaattntcagcttcggtgtgtgggaaacagcattctcctctgctccaggccactaccagctgccttggaatcccagttcaagaatcatctcctccagggatcccaactcccacctctagcacgagggaggtgagatcggcacttaaagcgtgatttctccccggagaggaaagaaaaggatgagggcctctggaaaggagacttcagactataacgagcaaagggtgcattttaaggaacaaagaccctttctccaggccaccaaagtctgctcatgtcacaagaattattttaaaacctcaagacctttcagaagcactgtctcagttttgctaa

SEQ ID NO: 656 - DNA, 661 bp, Homo sapiens
  misc_feature [331]..[331]: Chromosome 2, SNP identification no. = rs2714248
  misc_feature [331]..[331]: allele = a, in linkage disequilibrium with rs4670019, respectively
  misc_feature [331]..[331]: n is a, t, c or g
gatcccaactcccacctctagcacgagggaggtgagatcggcacttaaagcgtgatttctccccggagaggaaagaaaaggatgagggcctctggaaaggagacttcagactataacgagcaaagggtgcattttaaggaacaaagaccctttctccaggccaccaaagtctgctcatgtcacaagaattattttaaaacctcaagacctttcagaagcactgtctcagttttgctaacctggaagtcttaaaaactaagcaaagattatcatcaccactttataaatgggaaaactggggcccagagagagagagagagagagagagagngattcacccagggtcacatagaagatggaacacagagccaggggctggccagggcctcatcccagccccccacagtggcttcttcagctgatccccggggatgtcctgaatgacaagttttatgaaagtttgcttttcttctgatgcacaaaatggatatatcttgtcattaataaatagctgagtatgtgaatcagagagaaggaacaggtcattgtgtaggaagcaccccctcgtagtcagaagagccgtcatctcagaaggccactgcaggtgtgggaagctgagcagggaagtaggaggcaggttctcctccaagagctctgtcct

SEQ ID NO: 657 - DNA, 661 bp, Homo sapiens
  misc_feature [331]..[331]: Chromosome 2, SNP identification no. = rs2010753
  misc_feature [331]..[331]: allele = t, in linkage disequilibrium with rs4670019, respectively
  misc_feature [331]..[331]: n is a, t, c or g
cagagagaaggaacaggtcattgtgtaggaagcaccccctcgtagtcagaagagccgtcatctcagaaggccactgcaggtgtgggaagctgagcagggaagtaggaggcaggttctcctccaagagctctgtcctgagtccagaggcctcaccttctacatgggggccccaactttgtgaggtgggtctaagaataacttagacataacacaggcaaatcccctaggacagggccggggacatagcaggcccacaatatgtggtagctggtcatagcaccggaagatcaggatttatgaggtgaggcatttgaagtcctgcaaagtgtgncttgcctcaggtcacagagctaggtgatgacgtgcaggttttctgaatgtgtgttggcgttctgcccactggcctttccaagcaccacaggtgcagcctggaaggctttcatgaaatcagatgtcaccagcctgggtgggttttctctgttcactgacagggattcttccagcacgcaaaggaaacttcctctccattgttcctgaagcatctgctagaggaaattgccaacacccagtgcagtaagtagcacctcagagcagccggcaaggagagaggagacttggttgttcccataaagagaagtcccaaagcccagaaacccaaacg

SEQ ID NO: 658 - DNA, 661 bp, Homo sapiens
  misc_feature [331]..[331]: Chromosome 2, SNP identification no. = rs1865454
  misc_feature [331]..[331]: allele = c, in linkage disequilibrium with rs4670019, respectively
  misc_feature [331]..[331]: n is a, t, c or g
ccctatcttgcaggactctatctgttcaacacttatgaagcatccgctatatactgggcacttgaccaggtgctggagatacaaggatgaacaactactggtcctgcctaaccatcctcaaatgcagtctgagccttgccacccacagctggttgacaagttccttgagaacagggatcatgcctcctccttccctggcatatcctcaatgcaaggcatcatcctgggcacagagccaggggactcagagcctcagtgaccaaatgcaaggccactctgtttgcaagcccagcgttctcactttagaagtgagtgctatcctcctcccttnctctggaggacagaaagcagaacagggatgagagctatgactgtgaagcatcagcaatcaaatagaaactgcgagaccacgcctgaaatatgatctctcttcatcttgctaggctgcaagcttctcttgagagtttcttcaagttttaatcttaaaaatatatatttgccaatctcctatgtatattagacaatctgctaggtacatttgcatacattattttatttaactctcacaaccctctggagagataggtagaaatattcctgtctcgtagacatgaaataaaggctcaaagagatcaagtgacctgcctaatgtcacaccttg

SEQ ID NO: 659 - DNA, 661 bp, Homo sapiens
  misc_feature [331]..[331]: Chromosome 2, SNP identification no. = rs6705141
  misc_feature [331]..[331]: allele = c, in linkage disequilibrium with rs4670019, respectively
  misc_feature [331]..[331]: n is a, t, c or g
gctcctgttatgtggctggaggtgggtggaaagcatctaaacaattttcagaacatgataactctgtttcatgcttcagcaggataaaaatggctgggcagaaatttaccaaacttttagcagaaaaaaaaaaatcacctttgggctcagaactagtctgataaattccagcctaaagggtgagtcaaagaatgctgaaatgtgctgagacagacttacgaaaaaagactctgcaatgataactatggcaaagccagtgctgtcggacaagtagcctggtctcagaggtcagattggccagaagaaaaattaaaagctccctccagctttnggtttctatgtatacactgttaactggccttgtctgggaagaagtttgtctcctttgcttactgagtcctacaggaaacaaaagtgggcctggtgggacttgtttgtcagaaagaatactaaatgccttagtagacattttaaaatgaagagcagtttctttttgcctttgtgtcctcatagctgagctcccacatatcagtaagaacacacaatgtttggttttccattcctgagttacctcacttagaataatagtctccaatctcatctaggtcattgcaaattctgttaatctattcctttttatggctgagtggtattccatcat

SEQ ID NO: 660 - DNA, 661 bp, Homo sapiens
  misc_feature [331]..[331]: Chromosome 2, SNP identification no. = rs1865455
  misc_feature [331]..[331]: allele = g, in linkage disequilibrium with rs4670019, respectively
  misc_feature [331]..[331]: n is a, t, c or g
taaagggtgagtcaaagaatgctgaaatgtgctgagacagacttacgaaaaaagactctgcaatgataactatggcaaagccagtgctgtcggacaagtagcctggtctcagaggtcagattggccagaagaaaaattaaaagctccctccagctttcggtttctatgtatacactgttaactggccttgtctgggaagaagtttgtctcctttgcttactgagtcctacaggaaacaaaagtgggcctggtgggacttgtttgtcagaaagaatactaaatgccttagtagacattttaaaatgaagagcagtttctttttgcctttgtntcctcatagctgagctcccacatatcagtaagaacacacaatgtttggttttccattcctgagttacctcacttagaataatagtctccaatctcatctaggtcattgcaaattctgttaatctattcctttttatggctgagtggtattccatcatatatacataccacagtttctttatccactcagtcattgattgatgggcatttgttgttaactagcaacccaggaagccataagttttcaaagtacattcaaattctttgaaattagaaatactactgtctttaccaaactttggaaactgggtgctgagaacaaagtggtacg

SEQ ID NO: 661 - DNA, 661 bp, Homo sapiens
  misc_feature [331]..[331]: Chromosome 2, SNP identification no. = rs6737372
  misc_feature [331]..[331]: allele = g, in linkage disequilibrium with rs4670019, respectively
  misc_feature [331]..[331]: n is a, t, c or g
gttctggaggcgggaagcctgagatcaagatgtctgcagctcatttcctcctgaggctgtgagaaagcctctgccacaggcctctcccctcatcccgcaggcctctcccctcaccgtggtcacggcggtctttggcatcactggcttctgctctaacaccatgatgactgccttggtctttacaaagcattgtccctgagtgcatgcctgtctccaaatttcctatttctggggacaccagtcatgctgagttaaatctagtgtgaccgtaaactaactttcctaattatatctgcaaagaccctatttccaaacaaggtcacatctgacnttctgggggttagaagaacttcaacataagaatttggagggtacacaattcaatcccataaccaactgggactgtcctttcaaccaattccccaggtgatcatgtcaacctggttagataaccactatcttagagtagaagcctcaccctttggtaaactcatctccatcacagaaagaaattaaaacacatgcacacacaaaacatatgccttttgttccccttactcctctcttaccacccaaataactcagttttgctttgctcaacttactttcttagaccaaaagagaaagaaaagaagattgggggttgaggtgtttacagaag

SEQ ID NO: 662 - DNA, 661 bp, Homo sapiens
  misc_feature [331]..[331]: Chromosome 2, SNP identification no. = rs1434969
  misc_feature [331]..[331]: allele = g, in linkage disequilibrium with rs4670019, respectively
  misc_feature [331]..[331]: n is a, t, c or g
aggtgtttacagaaggcgattatgaagggggaacatattcaggagggcatccaaacccatctctgctggctccccactgtggctgcagtaagatccagagatcacagtccccaagaggggattttatattggataatgttcaaggtctgtgaaagtttgttcttgtccctaaagatgtttgctattccaaacatcaaataaaattgaacacccatatataacatgttttcctctgtgagaaatccaaagaaatggcacctgctcctacagccacttgacgtacatttaattttcttgggaaagggcacagccaaaaccaaaatacttaacntgtgcatgtaaaacagcatggaagtgctatgaacttgatgaccaatgaggaggaaaaggagacaatttacaactcttattaagagcatcataaatgtttgctccaaacaaaaatcagaaccttttttacaagttaaaggtaagtttctagccaagaaaaaaaatacatgaatatctacaaactgaggagttctctacacactctgtatgttacaaacatttgtgttttgtctaaaagaggtagttacatatgtggggggtggatagtgctacgcagaattctgggtcgtgaacaatccaggctacacataagccagagtgatctttgaaa

SEQ ID NO: 663 - DNA, 661 bp, Homo sapiens
  misc_feature [331]..[331]: Chromosome 2, SNP identification no. = rs2714249
  misc_feature [331]..[331]: allele = c, in linkage disequilibrium with rs4670019, respectively
  misc_feature [331]..[331]: n is a, t, c or g
catcattgcaaaaggagtccagcaaatgcctcttcaagggagactgccatgcttttcccacttcactcaccaaagccaggattggggtaaggcaagagagatgcctagggtgtaaaatttaaggagatgctctcagagtcctgcaagtgcttctgtagatttcgcatgctaggtgcctctcttgccttaccctagccccagcccgaaccccatcaagcataatagagatgctatagttaattacatttgatttagatcagctgccctaccacacacccagctggcttctgacgtagcctgagccagcctctgtaaagggaacagagatgantcaggaccagagtttgaactgacaagcttatgatctgacaagggacgtaatgcaattagcttgatactcagaaggccacgacaagttccctaacagagggtccttggtatgtgggaatgacacaggaaggaattgctccatgggggttagcatggcctcctctaggacatcacatttgggatggacattgaagaatgagcaagattttgacaggtgaagctgaaagtggaaagattcccagtagaaaggtgaatgtgagcaaacatgatttttacaaaggaatataaggtaaaatgatgcatggagtgtaaagaaaaggtttcaagggca

SEQ ID NO: 664 - DNA, 661 bp, Homo sapiens
  misc_feature [331]..[331]: Chromosome 2, SNP identification no. = rs6732328
  misc_feature [331]..[331]: allele = a, in linkage disequilibrium with rs4670019, respectively
  misc_feature [331]..[331]: n is a, t, c or g
agttaattacatttgatttagatcagctgccctaccacacacccagctggcttctgacgtagcctgagccagcctctgtaaagggaacagagatgactcaggaccagagtttgaactgacaagcttatgatctgacaagggacgtaatgcaattagcttgatactcagaaggccacgacaagttccctaacagagggtccttggtatgtgggaatgacacaggaaggaattgctccatgggggttagcatggcctcctctaggacatcacatttgggatggacattgaagaatgagcaagattttgacaggtgaagctgaaagtggaaagnttcccagtagaaaggtgaatgtgagcaaacatgatttttacaaaggaatataaggtaaaatgatgcatggagtgtaaagaaaaggtttcaagggcattctgtgcctagcctgcaaatgcctgggcatcatcaaagtcaacgcagctcttcaagcctgatattttttctgtcattttctttctaattagtacaggagttaagctctcaaggcttaattttactcctatgcctgtgttaatggcaggattggctattagctgatgtcaaacctgattctcctccacgtagagcatttaaactctgctctcagttaattccttcatcatatac

SEQ ID NO: 665 - DNA, 661 bp, Homo sapiens
  misc_feature [331]..[331]: Chromosome 2, SNP identification no. = rs2714259
  misc_feature [331]..[331]: allele = g, in linkage disequilibrium with rs4670019, respectively
  misc_feature [331]..[331]: n is a, t, c or g
attgtggagttcggtgcctagccggccaagcttaattgtaacacattaacagtttttcttattaaacttcatatgaactttgttatagaatcacggggctcccagaatggaaaggggagttcatagggattttcctttacttgttaatctaaaatattaaaggccaatacataagaatagcctcaaagaatgtcaccaaaaaccattgccagaaaaattcttcaaataagatttgtagcttcctgccatttttttgaataagtttttaagattggtgcgctgaagtttgtgggatgtaatgggaagcttctgagcaaggaccagggaatgngatcctttttcagtctcttccctgaagttagtgatcttgtgcaggtcattttcttattctggctctttttcctacaacaatcagaagttgaactgaaaattagaatctcatgtcttttgcacactggaatcactgaagagtattgaaatgatactggtccaagctacctcaactatttctatttaggtggttttccagtgtagggcataggtattggcagtttttgtgaagctctccaggtgatgccaatatgtggccagaatgagaatccactgggctagactgaactctaatcttgccactcaaagtgtggtttactgaccagcagca

SEQ ID NO: 666 - DNA, 661 bp, Homo sapiens
  misc_feature [331]..[331]: Chromosome 2, SNP identification no. = rs1946675
  misc_feature [331]..[331]: allele = a, in linkage disequilibrium with rs4670019, respectively
  misc_feature [331]..[331]: n is a, t, c or g
catgcaaaagtaactcagttttttaaaatgacacacaaatcatacgataccaatggaaatagtgatagagatgcaacacattagtaaatagtattctgtcttgataagtggaggtcatttgcaatgagaaacatggtgccattttactccgtatcatgaatgatttgcaaagactatccaagaataaagaacagcctctgtctctgcaaggacatgggcatatatgtgtctgagtgctgcacgttcagtatgatgagtgtgtgaagtcacttgtgaaaaatcatttccaagcacaaaatcctggtgaacacaactgcctgctttctcctcnactcaaaaaagcaaatctatgttctgagaaaagtaggaaaggcagaagactggatttcaaatgtgcttggagagagagtccacccattcatttataaaatccttgacattcacgctatacattaaaatgaaattcaacatttataaaatgttatgcaaaaaaatgcacagaacattgggctagtctcagtaaaacatgaatagttgccataaactttctaagtggttaataaaaaagattttttttgtggactaagtattctgcgaataggcccttcagtaaattgttatattggccatttgttataatataattggggttgggacaatt

SEQ ID NO: 667 - DNA, 661 bp, Homo sapiens
  misc_feature [331]..[331]: Chromosome 2, SNP identification no. = rs1946676
  misc_feature [331]..[331]: allele = c, in linkage disequilibrium with rs4670019, respectively
  misc_feature [331]..[331]: n is a, t, c or g
caatggaaatagtgatagagatgcaacacattagtaaatagtattctgtcttgataagtggaggtcatttgcaatgagaaacatggtgccattttactccgtatcatgaatgatttgcaaagactatccaagaataaagaacagcctctgtctctgcaaggacatgggcatatatgtgtctgagtgctgcacgttcagtatgatgagtgtgtgaagtcacttgtgaaaaatcatttccaagcacaaaatcctggtgaacacaactgcctgctttctcctcaactcaaaaaagcaaatctatgttctgagaaaagtaggaaaggcagaagantggatttcaaatgtgcttggagagagagtccacccattcatttataaaatccttgacattcacgctatacattaaaatgaaattcaacatttataaaatgttatgcaaaaaaatgcacagaacattgggctagtctcagtaaaacatgaatagttgccataaactttctaagtggttaataaaaaagattttttttgtggactaagtattctgcgaataggcccttcagtaaattgttatattggccatttgttataatataattggggttgggacaattagtcattccaaggtagacaagttaactatccagcaaactggtctatgact

SEQ ID NO: 668 - DNA, 661 bp, Homo sapiens
  misc_feature [331]..[331]: Chromosome 2, SNP identification no. = rs4670021
  misc_feature [331]..[331]: allele = c, in linkage disequilibrium with rs4670019, respectively
  misc_feature [331]..[331]: n is a, t, c or g
gacattcacgctatacattaaaatgaaattcaacatttataaaatgttatgcaaaaaaatgcacagaacattgggctagtctcagtaaaacatgaatagttgccataaactttctaagtggttaataaaaaagattttttttgtggactaagtattctgcgaataggcccttcagtaaattgttatattggccatttgttataatataattggggttgggacaattagtcattccaaggtagacaagttaactatccagcaaactggtctatgacttatcgtcagtgaagtaacctagggcgtccagtatcttgcagctagcattattaanaggttatttttaagcattatagacattttaaattattaagtatggcactatttttaaaattattgttcattcatgaaaacaaagccattattttatatatctggtgctgagccttttagctaattaagattacctcatggtcttaatatcagtttagcaattctcctaagttacattaaaaaatactcaactaaaaataagttatctccttcattgctcagatcctatagttgatcttctctgtgttacacaccattcttgtcccacataacctacattagagctgtgacttcactttaagaggaggcatttaataacaatacaaagatt

SEQ ID NO: 669 - DNA, 661 bp, Homo sapiens
  misc_feature [331]..[331]: Chromosome 2, SNP identification no. = rs2705845
  misc_feature [331]..[331]: allele = t, in linkage disequilibrium with rs4670019, respectively
  misc_feature [331]..[331]: n is a, t, c or g
ataacaacctctaatgaatccccctctcatatagtatagagggcagactccttaaaatggcaaactaaggcatgcctaacgctgggcttcataccctctgacaccacccgttgacattacacggaccttcttacgtccgcacctgctggctgctgtcctagtgcctttgcccagctgggtccctgtccctgaggtggccattcccatttctgcagggtgcctcatcattctttggaggttgtttaagcaagtcacctccccagcagaacttcccaaagcagaatttggcactctcacagtatgtacttatgtgatggcaaaaagaggaccngtattggaatcccagccacacaaagcataagaccgtatgtgtctcacttaactttatctaggtggctaggtgtgctctttaaaatgagaataataatagtgcttaatgcatagttataaaaagtaaatgataacaccttcaaatacatgtttttccccagatattagactgaatcaatcaccatctcaacaatatctaacccagatcctagcacctgtggcttccagattaagatatctagtatctaaagaatcttagatgagaaactattttttgataattttttttaagttttaattttggattcagggagtatatgtgcagatttgt

SEQ ID NO: 670 - DNA, 661 bp, Homo sapiens
  misc_feature [331]..[331]: Chromosome 2, SNP identification no. = rs7599163
  misc_feature [331]..[331]: allele = t, in linkage disequilibrium with rs4670019, respectively
  misc_feature [331]..[331]: n is a, t, c or g
gccccatgcaggtggtgcacacaccacagatccttgctagagtctccttagtgaaaggagtatgattcttacacacactgtgtcttttgctttttctaaagcttccacggaacttggccaaaactctattaggtcagatgcaaactcagcttttataattagcctacccaaagcctctgttgtatgtggctcctgtttattcttgtttaagttttaaattatgcttcactcagtattgagtacagagtgtcctgtaaatgctaactaacattaatattgttctagattataagctccttggaagtagaaactatgtctttttccatctttntttttcaatacagtgttttacacaatatttggtacccagaaagacctcaattaacattacttgagtgaaattagcaattatatagtaacttgtaatacataaagaacttgtacattcgtcctcttagttattttcacaattatgctgtgactgagaattcatcttattgtctactagagacctgagatgtagggaaggaatatggcttgccaaggctacgggattaatgacagagccataactcaaacccatgtgttgttttgctctgtttttcctttgttgttgttttggatttaaactggtcttttcactactcaatcatgtgtttaa

SEQ ID NO: 671 - DNA, 661 bp, Homo sapiens
  misc_feature [331]..[331]: Chromosome 2, SNP identification no. = rs10929918
  misc_feature [331]..[331]: allele = g, in linkage disequilibrium with rs4670019, respectively
  misc_feature [331]..[331]: n is a, t, c or g
aggatgctcctggtcttggcatagctaattaagagttattggagatcaatgagagctgttttgaatgacattattaagaaccccatgtcatatgtttaagtgggtcccttgtcatagaccaatgcatgtgaggaaaagggaaaaggagagaaaagacatgaaaagtgcttcataatttaaatagtaccacccttgggagcaagactaatccttgtagattaacaaactttaggaaagtatttatcttacatttatttggactgcactgtctctgataattattatctgtcctgagaatagtgtgtgcacatgttgtgggttcagtccaagntttatccacatgagaccagaaggccccaggaagaatgagggtgtgtgtatttacttcatactggtagagacacatgaaaatgaccagtcttggggtacaaacacctaccctgagctgttctacagaagttccatatggtattgatcttgataaagcatcttgggctttgggaaataggttctgttgtatatagatgggatggctgcctgctgaggtggatggaagaggatggatccagacagagaccaatccctgtagatgtacagggagtttccctggtgaggtatgaaacccacactgtgaaggataaagatagtgaatatttctctg

SEQ ID NO: 672 - DNA, 661 bp, Homo sapiens
  misc_feature [331]..[331]: Chromosome 2, SNP identification no. = rs2705847
  misc_feature [331]..[331]: allele = a, in linkage disequilibrium with rs4670019, respectively
  misc_feature [331]..[331]: n is a, t, c or g
ttcacaatctccatggtagggacaaagaagatggggcaaaaacacagcaatttaaagcttcaacctgggaaagacaccactgcttctcccacgtcaaaataagaatgtcctaccctttgcattttgtgcctgctctagagttattacccctggaggtcataagtgtatagatgtgtattcacatgagtttccatcactaggttatgctgccttgagggtaagaagtctgctaatcaactttttatcattccagtgcctaccaagatgtctgtccaattgcatacatctaggtttattttaatgcaaagttgctgggtctctttcttttttncttctcaagtaatttcacacagattaggggcccagctacagagctgacagatggcattgtgtataatcagcagacatcacagaatttggaatgtcggagagaattgtctttatgcaatcaacggactgagacaaggccttgatggatataatcctgacagttgcttacccagagggtcccatcccatctttaaatccacccccactcctatccctactcctgactcccaggagtcttggtttactgccctggagaaaaccaatctatgaatcagagaatgtcagctctggcagggatctcaaaatgtcccgaatccttatatttctaagg

SEQ ID NO: 673 - DNA, 661 bp, Homo sapiens
  misc_feature [331]..[331]: Chromosome 2, SNP identification no. = rs13339778
  misc_feature [331]..[331]: allele = c, in linkage disequilibrium with rs4670019, respectively
  misc_feature [331]..[331]: n is a, t, c or g
tggaaacaatttctaagtcttgagatcaaatcccagctgcatttttcagatgtgtagcctagggaattagttgaactctgaatttcaattctttatctgtaatttggagattatgagatgtaaatgagatggcacaggtaaggcatcagcatgtggcatgtgttcagagattagtcacctactaattgcctctaccccaaagccctcaggttcaccttgcttgtatactgttgctttgggaaagtcccattctctaagtgacactgttcctttcatcaaagatgcttatctggatcccacacagatgcttccctccatactaactccttcngtcaccatcaagccaaactacaatgcacaaaaacacaacaagtgaaggctgactcagcaactcacaatgccctttcctgggtgcaaaagctaaagcaaaaaaagtctgttagaaaccctttatttttcgaaacccagaaacctcaccactgaagctaactgaaaaggctgatgagaaatcaatagcatttgattgtaaacctgtcaaaatgatactgatggtagtacattattggcggctctcagggattgatttctgcccccttcctttctccatcatcgcacatcaccttcatactaacaacagattccttttttctaaattaatctc

SEQ ID NO: 674 - DNA, 661 bp, Homo sapiens
  misc_feature [331]..[331]: Chromosome 2, SNP identification no. = rs2705854
  misc_feature [331]..[331]: allele = g, in linkage disequilibrium with rs4670019, respectively
  misc_feature [331]..[331]: n is a, t, c or g
gcggacaggtccatacctttctccaaaagagggctccaaatttaaaggggaaatggcaggatattgagagtggacaattttcaggtaagggggaaggagggggaaaatagtcattcatgcctttgtctggcttccttcctgatatactaaggttcttttcttaaatcatttctttctgtttgaagaattttttttaggcagtctttaagagtgacactactaatgacaagtccttttagtgtattcctttatctgagaatgtttgtatttctacttcattcctgaggcatagtttctccagatatagatcacagttagcattttttttcanggtactcgtaaaatattgtgccttttccttctaaccttcctagtttcagatgagaaatccaatgccatttgaattagtgtgcccctgtttgtatatggtatttatctgtttttaagactcttcgactttagttttcaaaagtttaattatattttggtatagatttctttgagtttattttgagtttggtgtttactcagtttcttgaatgtatagaagtatgactttaccaaatttggaacatttttttcatcgatcatttcttcttagactatttccactccattctccttctctgatcctctgagattctgatgatacaaatcttca

SEQ ID NO: 675 - DNA, 661 bp, Homo sapiens
  misc_feature [331]..[331]: Chromosome 2, SNP identification no. = rs6747456
  misc_feature [331]..[331]: allele = g, in linkage disequilibrium with rs4670019, respectively
  misc_feature [331]..[331]: n is a, t, c or g
gagatacacctatgttgttgtatgtattggcaattcattcatttttattgctgagtagtatcccattttatggggatatcaatttgtttgtccattcgcctgttaatgaacatttatgttgtttccagtttttggttatttcatataaagttgctatgaatatttgtgtacaagtctttatttggacatatgctcttgtttgtcttaggtaatcctttagaaatagaatgtctagttcatatgctaggtgtgtgtgtaacttttgaaaaaaaattttcaaagtgttttccaaagtgttgtatgaattttgcattctcactagcagtgtaanatagttacagttgttccttatctctacaaacacctagtatcgtcagtcttttagacattctaatatgtgtatggtaatatctcacggtgactttaatttgcatttacataatatctaatgatgaaaatctttgtgcatgcttatttgctacctatatgccttctttggtgaaatgtctattcaaatattggtccatatatttattggcttattattatggagttttgaaatgccaagattttacatatatatatatattctggatacaagccctttatcagatataatttgcaaataatttttttagcctatgctttgactttcattttc

SEQ ID NO: 676 - DNA, 661 bp, Homo sapiens
  misc_feature [331]..[331]: Chromosome 2, SNP identification no. = rs7571164
  misc_feature [331]..[331]: allele = c, in linkage disequilibrium with rs4670019, respectively
  misc_feature [331]..[331]: n is a, t, c or g
tatatatatatattctggatacaagccctttatcagatataatttgcaaataatttttttagcctatgctttgactttcattttcttaagtttctttcaaatgagagaatttcttaactttattcaagtaaaatcttggtgttatatcaaaaagacatttgcctaacccaaagatttatcagcttggcactattaatattttggactggataaatcgttgctgtaggtaagtgtggtggacagaggaggaggtttggccttctgtgcaccgcaaggtatttactagcatgcctgccctctacctagcagatatgagtagcaactcctaccncaaccccaactgtaacagccaaaaatatctgcagatattgcaaacatctcctggcgtggaggacaaaattgcccctgatattgaaccactggcctaactcgaagtcataaatattcttctgtatgtcttttagaagttttatgatttctttatgatttagaagttttatgatttagaagttttgcattcaggtctatgatatagtttaatttttgtaacattatataaggtagtgttaaagtttgtgttttttgcacatggatgcccaattcattccagaaccatttgttgaaaagaatattctttctccactgaattgctatggaaaat

SEQ ID NO: 677 - DNA, 661 bp, Homo sapiens
  misc_feature [331]..[331]: Chromosome 2, SNP identification no. = rs6760314
  misc_feature [331]..[331]: allele = g, in linkage disequilibrium with rs4670019, respectively
  misc_feature [331]..[331]: n is a, t, c or g
aatacagtgaattacatagatagatgtttgactgttaaacttgcattcgtagaaaaaactccacttgttcatgatgtaatttttaaaatatatgttgtcagattcaatttgtcaaagttttgtctagaatttttgtttctgcattcataagtgctattggtctgtcaaaatttttttagtaataactttctattttgttatcagaccaatgctggccttacagaaagagttatgaattattgcttcctctttaattttctggaacagttgcgtagaattgatattattttttcctttaacatttgctacattaccctagtaaattcatctngagtctagttttctttgtgaaaagctttttagatacaagtgtatcttaaaaaaatatatatggctacttaggttatctacttcttcctgaatgagatggtaatttgtgtatctcaaattactgtctacttaggtaggtggttaaatttattggcataaagttattcatagaatttattatcattttaagatctgtagaatctacagtaatgtcatatatttcattcctgatattagtaatttgtatccttctttctgaccaatctggcgagaagtttataaatgctgtaatatgctcagagagaattttactactttgttttcttatttt

SEQ ID NO: 678 - DNA, 661 bp, Homo sapiens
  misc_feature [331]..[331]: Chromosome 2, SNP identification no. = rs6432473
  misc_feature [331]..[331]: allele = g, in linkage disequilibrium with rs4670019, respectively
  misc_feature [331]..[331]: n is a, t, c or g
ctgttctaaaataccagtagttcatgctggctgataatattgcttaattgagtagtctatatcctcaccaagcttctatctactggttccatctattactgagagaagattgttgaaacctctcaatacagttgtgtatttgtctgtttcctttgtagatctataagtgtttgctttatgtattttaaagctttgttattcagtgcataaatatttagtagtgttttatctccttgaagaattgacaattcttttattaaaaattatagtctatctccagtctttattctgaattgtagtttgtctgataataatatagtcactccactcntcgtttgtttagtgatagtatggattatcttttaccattgttttgtgtttaacctatttttgtctttatatttaacatgtatgtcttgtagtcaacatatacttcaggtttttaaatccaatctgacaatatctaccttttaaatggaatgcatataccactagcatgtatgtgcttatcactatggttgaatataaatcttccaccatggtatttgatttagtttcatttattctttgtttccttttaacttttattctactccctttggattaattaaatattttttgattccatgccgataaggtttggctgtgtcccccacccaaa

SEQ ID NO: 679 - DNA, 661 bp, Homo sapiens
  misc_feature [331]..[331]: Chromosome 2, SNP identification no. = rs7590056
  misc_feature [331]..[331]: allele = c, in linkage disequilibrium with rs4670019, respectively
  misc_feature [331]..[331]: n is a, t, c or g
gcttgatttaaggtacatagtacacatcttcaaacatcacagtatgtcttcaatttgtgacactttattacatttataaaccttaaagacttatattttcctttcttccctcctgttttcatatgctttgcttctacatattttataaagtccatagtacattgtaattattttcactttaaacagttgattttaagagatttaaattgtttttgtttttttttttttaggcacttacatttgcccacttactatttccagtgctcttccttcttttgtgtagatcaagatttttatctggtatcatttcctttgtgtgaaaagtattacntttaatatttctcatagtgtagttctgtaggtgataaattattttagcttttgtatggttaggaaaagtattgattttcctctattttttgaaagatcttttcactgggtatagaattctatgctgacaattttttttcctttcagtacttctttcagcatgcattgcatctgatgataaatctactgtcatcctttaaccaatgccccctgccatcactatctttaaaatttacactttagcactggttttaagcaattcaattataatttccattcattggtgtttgttttggggaggatgattggtttggtttggtttgctttggtt

SEQ ID NO: 680 - DNA, 661 bp, Homo sapiens
  misc_feature [331]..[331]: Chromosome 2, SNP identification no. = rs7590304
  misc_feature [331]..[331]: allele = c, in linkage disequilibrium with rs4670019, respectively
  misc_feature [331]..[331]: n is a, t, c or g
tgtttttgtttttttttttttaggcacttacatttgcccacttactatttccagtgctcttccttcttttgtgtagatcaagatttttatctggtatcatttcctttgtgtgaaaagtattacctttaatatttctcatagtgtagttctgtaggtgataaattattttagcttttgtatggttaggaaaagtattgattttcctctattttttgaaagatcttttcactgggtatagaattctatgctgacaattttttttcctttcagtacttctttcagcatgcattgcatctgatgataaatctactgtcatcctttaaccaatgcnccctgccatcactatctttaaaatttacactttagcactggttttaagcaattcaattataatttccattcattggtgtttgttttggggaggatgattggtttggtttggtttgctttggttaggcttggatatttttctgatttttttctctctcactcccttcctgttattccagaattccacttacacatatattattaggttgcttgaaattgctccatagctctgttcattttaaaaaattttttgtgtttcactttgtttatattgctatgactttaatttcaccaattttttattctgcaatgattaatttactattaatcc

SEQ ID NO: 681 - DNA, 661 bp, Homo sapiens
  misc_feature [331]..[331]: Chromosome 2, SNP identification no. = rs10929920
  misc_feature [331]..[331]: allele = g, in linkage disequilibrium with rs4670019, respectively
  misc_feature [331]..[331]: n is a, t, c or g
atatcacactctggggactgtggtggagtggggggaggggggagggatagcattgggagatatacctaatgctagatgacgagttagtgggtgcagcgcaccagcatggcacatgtatacatatgtaactaacctgcacaatgtgcacatgtaccctaaaacttaaagtataataaaaaaaataaaaataaaaaaataaaaacaatttgacacttttaagctttctttttaaactttgttaatcaggaccataacagcatttagtctaggagtaaattactctcaggcaaactctttctgaatactttacctaatgctccatgaaatctgnggtttgcctctagctagaaagaataaatacaattcctggccctgtgtgactccagtgattgtctcctgtaattttattggtggttcttttccatatcaggtagtttctcacatacatgtgctgattactacttagctgaatattttaggggaagcctctgctggtctctggggctctctctctttgtgcagctctattttctgtggtaatttgccttttgtactctcactaccttggccttcctagactccaagctccttctcaattactggagactcctgggcttctctctgtactgcattttggaaacctttccccaggtagtaagct

SEQ ID NO: 682 - DNA, 661 bp, Homo sapiens
  misc_feature [331]..[331]: Chromosome 2, SNP identification no. = rs7598987
  misc_feature [331]..[331]: allele = a, in linkage disequilibrium with rs4670019, respectively
  misc_feature [331]..[331]: n is a, t, c or g
aggctctaacagagattttctgcacagtgttcagtctggtgaagggaaaaaataattcagataggtgtatgtaataagataaaaataagacacgtagatgtaattgtgttactagaaaggacttggaaaggttagatagttagaaataagaacaggcctaaaagatatttaaaattattaacttattatcagcatccttgtttccccaaacagaaggaccctgtcaactagaggataaaagcaattttcttaggcttttctcttgggttcttttgcctgaaacacaaatcccttcatagttcattcattcaagaaacattcactccacacntacaatatgccaggccttgtgctcagatttgaggttagaaactacaaagactgagtcattatccgccacaggatcagaagcagctggggaagaacaggtgaaaaatatcagcacaatgtgacaggtgctagcagagatgcatcccaggatgtcgtataataaaaacacagatctcccagtcagcttcccagaggaaagggtagtccttggggcattttggaggaagagaaaattaaataagttaaatagtgtcgcaaaggaatggcaattgggaaagcagcatattgaagactctgaggagacccaggaagagacaaaagagatgagggt

SEQ ID NO: 683 - DNA, 661 bp, Homo sapiens
  misc_feature [331]..[331]: Chromosome 2, SNP identification no. = rs16862033
  misc_feature [331]..[331]: allele = a, in linkage disequilibrium with rs4670019, respectively
  misc_feature [331]..[331]: n is a, t, c or g
agttagaaataagaacaggcctaaaagatatttaaaattattaacttattatcagcatccttgtttccccaaacagaaggaccctgtcaactagaggataaaagcaattttcttaggcttttctcttgggttcttttgcctgaaacacaaatcccttcatagttcattcattcaagaaacattcactccacacatacaatatgccaggccttgtgctcagatttgaggttagaaactacaaagactgagtcattatccgccacaggatcagaagcagctggggaagaacaggtgaaaaatatcagcacaatgtgacaggtgctagcagagntgcatcccaggatgtcgtataataaaaacacagatctcccagtcagcttcccagaggaaagggtagtccttggggcattttggaggaagagaaaattaaataagttaaatagtgtcgcaaaggaatggcaattgggaaagcagcatattgaagactctgaggagacccaggaagagacaaaagagatgagggtaaggaggaaaaccggcaagatcatgcgaggcattatacaccaggataaggagtctgaactttatttgcaggcaaataagagccatgaaaaagttttaagtaggaaagaaataggttagtgatatggcctatctttta

SEQ ID NO: 684 - DNA, 661 bp, Homo sapiens
  misc_feature [331]..[331]: Chromosome 2, SNP identification no. = rs1518786
  misc_feature [331]..[331]: allele = c, in linkage disequilibrium with rs4670019, respectively
  misc_feature [331]..[331]: n is a, t, c or g
agtctggaaatctagggtggtggttctcaaagtatggtccctggaccagcagtgccagcatcaacctgatttgggaacttgttagaaatgaagctctcaggttagcatctcagacctactgaattagaaactcaggggaaacccatatgtgttttaacaagctccccaggagattctgatgcactctaaaatttgagagccactgatctccagcatgtaataaaatctgtgttcattgaagtggagggtgtataagacataatccttgcctgcaaggggatctcaatctagttgaaatcttaaacaaatgatcagttacttattaattttnaagggcattatactggagatgagctatgaaaacagagattaaggggagacagactctgcaaatatgaaggcttgaaagtagaggtgcactgaaggatcaatgggcgttttccaaacaggcaaaggcagtcaataaaagtccaggcaggagaaaaatggcatgctaagacacaaaggcaagaaagaaattatctgtatgggttgcagtgggtggtttgatgtggctaaagcactggtgaagggatagaatttggaagcagccctctcttgtccaggccactattatctcacttgtttattgcagcaacctacttactcctcttcttgtctc

SEQ ID NO: 685 - DNA, 661 bp, Homo sapiens
  misc_feature [331]..[331]: Chromosome 2, SNP identification no. = rs4670024
  misc_feature [331]..[331]: allele = c, in linkage disequilibrium with rs4670019, respectively
  misc_feature [331]..[331]: n is a, t, c or g
gtccatatgagccaatcctgattattccattgcatcaccaaaacagtttttctctataaaatctattccgtttcattttctgttagttgtcagacctccctgggggtacatgttctactcagttcatttatttttgtgaaatgctgcatcatattttcttttgttttctttgtaatctcttgatatcttcacagcttctctacagaaaaaaaacaaaacaaaaaacctacactaacaaacagaggtaatttgcatggttctttgctttacttggatccaatgagtgagtgagtccctgaggcccaccaatgtaaatatcaggggggggttnacatgcctactactttcatgagttcaaatataattttttaaatttctcaatcatgacaggttttcttttatttctaaactttccattgaactttagaatgattacaaagttagcaattatctcagagtaatttctatttattatggagcctgattttcctggggtttctcttgtaaagctattttcataaatgtccaaacttcttgttttttccagatacctccaacaaaataattatccatagctctttatagctctttacattctcttaaagagttttcaaatcccgtgtgtgtgtgtgagtgtgtgtgtgtgtgtgtgtgtgtgtgt

SEQ ID NO: 686 - DNA, 661 bp, Homo sapiens
  misc_feature [331]..[331]: Chromosome 2, SNP identification no. = rs6432474
  misc_feature [331]..[331]: allele = a, in linkage disequilibrium with rs4670019, respectively
  misc_feature [331]..[331]: n is a, t, c or g
tctctgtctctctctctctctcacacacacacatgcacatatatacagactacatttttcaaactttaaatattcatatattgttttacagttttaacaccttttttaccatactcatctttaactcaagcatgacatagttatttcaaatattatagctattatatgcatttcaaaaagaatgaattactttttgtgcatctactttgtgcaagacatcagactttatttaatgctatgacaaccacatatggaataggaattattttccccatttctattgaaaaataaactaaattcagagaagtaaattaactcagccaagaacagngagctagtaaggtggggagctagcccaagaagacattctctgacttcattgctatatccactacatcatgtggcatggtgaatatcattctgagagacagctggtgaaatggtttggctctgtatccccatccaaacctcatcttgtagctcccataattctcacgtgttgtgggagggacctagtgggaaatcattgaatcctgggggcgggtatttcccatcctattctcatgatagtaaataagtctcatgagatctgatggtgttaaaaaggggagtttccctgcacaagctctctttgcctactgccattgatgtaagacgtgac

SEQ ID NO: 687 - DNA, 661 bp, Homo sapiens
  misc_feature [331]..[331]: Chromosome 2, SNP identification no. = rs6432476
  misc_feature [331]..[331]: allele = g, in linkage disequilibrium with rs4670019, respectively
  misc_feature [331]..[331]: n is a, t, c or g
tcttgaattcccatgtgttgtggaaggaacctggtgggatgtaatcgaatcatgggggcaggtctttcccatgctgttcttatgatagtgaataagtctcacaagatctgatggttttacaaaagggagtttccctgcacaagctctctctttgcctgctgccatcgatgtaagacatgatttgctcttccttgccttccaccatgattgtgaggcttccccagccatgtggaactataagtccaattaaatctttttctttgtaaattgctcggtcttgggcatgtctttatcagcagcacaaaaactaatacagctggtctggtttcanatctggactctggcctaggttagttgtactattagggaaagtaacataatttaaattttcaaaaaggaataaaaatagtgccaagcttccagggctttgtgaggattaaaaacattaattcctctaaagccctaagcatggtggtgtctggcacatagtaaaagcatgataagtaacatctattagcaatttaacaaagtggaaaggtaggtcatatcttctgcagattagagtaaatgtgattctgactttaaaaaaaaatcctgtatttttacatgaaacacttcttgagatttctgttctcctctgcccagagcagaaagattaagc

SEQ ID NO: 688 - DNA, 661 bp, Homo sapiens
  misc_feature [331]..[331]: Chromosome 2, SNP identification no. = rs7583588
  misc_feature [331]..[331]: allele = g, in linkage disequilibrium with rs4670019, respectively
  misc_feature [331]..[331]: n is a, t, c or g
ggttttaggccaggtgtggtggttcatgtctataatcccaacactttgggagaccaaggtgggaggatcacttgaggccaggagttccagaccagccttggcaacataatgagactctgtatctactaacaaaacaaattaattagccaggcatggtggcgcatgtctgtattccaagctaccggggaggttgaaataggaggatccattgagcccaggagttcaaggctgcagtaagctatgatcatgtcactgcactccagcccaggctacaaagtgaggccctgactctagaaaaaaaaagaataaggttttcggaatccatttttanacagtggttcttaactggaggtgattctgcctctccattccaaaggatatttggtgatatctgaagacagccttcattatcatgaccggaaggacatcatgatactggcatttaggaggtagaggtcagggatgcagccaaacatcatgcaatgcacagaatatctagtctgaatgtcaataatatcaagatcaagaaacccttgtttaaaatatatgggaaaaatgatgcagaggggcaaagactagatgaggggaagaaagtaaggtggctgttgcagtaacccaggaacctagaaaccaggaaccaggaaccaggaatctaggaatg

SEQ ID NO: 689 - DNA, 661 bp, Homo sapiens
  misc_feature [331]..[331]: Chromosome 2, SNP identification no. = rs7558005
  misc_feature [331]..[331]: allele = c, in linkage disequilibrium with rs4670019, respectively
  misc_feature [331]..[331]: n is a, t, c or g
cagaccagccttggcaacataatgagactctgtatctactaacaaaacaaattaattagccaggcatggtggcgcatgtctgtattccaagctaccggggaggttgaaataggaggatccattgagcccaggagttcaaggctgcagtaagctatgatcatgtcactgcactccagcccaggctacaaagtgaggccctgactctagaaaaaaaaagaataaggttttcggaatccatttttagacagtggttcttaactggaggtgattctgcctctccattccaaaggatatttggtgatatctgaagacagccttcattatcatgacnggaaggacatcatgatactggcatttaggaggtagaggtcagggatgcagccaaacatcatgcaatgcacagaatatctagtctgaatgtcaataatatcaagatcaagaaacccttgtttaaaatatatgggaaaaatgatgcagaggggcaaagactagatgaggggaagaaagtaaggtggctgttgcagtaacccaggaacctagaaaccaggaaccaggaaccaggaatctaggaatgtaaatgatgaaatgtaagaaggaggtaggtaagaaagaggttagcagaatagaactgacataacttcatgagtggttagctatagtg

SEQ ID NO: 690 - DNA, 661 bp, Homo sapiens
  misc_feature [331]..[331]: Chromosome 2, SNP identification no. = rs6734577
  misc_feature [331]..[331]: allele = g, in linkage disequilibrium with rs4670019, respectively
  misc_feature [331]..[331]: n is a, t, c or g
aagaaacccttgtttaaaatatatgggaaaaatgatgcagaggggcaaagactagatgaggggaagaaagtaaggtggctgttgcagtaacccaggaacctagaaaccaggaaccaggaaccaggaatctaggaatgtaaatgatgaaatgtaagaaggaggtaggtaagaaagaggttagcagaatagaactgacataacttcatgagtggttagctatagtgggttaggaaaaagaataaacaatctatgaggctttggtgactgaagaaacgattatcaagaaatcatgagccccattttagttactcaataggaaatcagtacaaancttaggggatgaaaatgagatcaatgtattatttctcatgattctgtttgttggccaagtggttcttcagctctgcatgacattggctagggcactgggatagctaaatgacacaaatggtcttattcacatagctggcagttggtactagccactagtgcatagctctataggctaggggcctcagcttcctggaggcaggcatatccacgtggttagttgggctttctcaaaaaatggtggccaggttacaagaaggggcatcacagggagacaagaccaaatggaagtgtttatcaagcctctgcttgaataaaacttgtcagttcc

SEQ ID NO: 691 - DNA, 661 bp, Homo sapiens
  misc_feature [331]..[331]: Chromosome 2, SNP identification no. = rs6724694
  misc_feature [331]..[331]: allele = t, in linkage disequilibrium with rs4670019, respectively
  misc_feature [331]..[331]: n is a, t, c or g
aacccaggaacctagaaaccaggaaccaggaaccaggaatctaggaatgtaaatgatgaaatgtaagaaggaggtaggtaagaaagaggttagcagaatagaactgacataacttcatgagtggttagctatagtgggttaggaaaaagaataaacaatctatgaggctttggtgactgaagaaacgattatcaagaaatcatgagccccattttagttactcaataggaaatcagtacaaagcttaggggatgaaaatgagatcaatgtattatttctcatgattctgtttgttggccaagtggttcttcagctctgcatgacattggcnagggcactgggatagctaaatgacacaaatggtcttattcacatagctggcagttggtactagccactagtgcatagctctataggctaggggcctcagcttcctggaggcaggcatatccacgtggttagttgggctttctcaaaaaatggtggccaggttacaagaaggggcatcacagggagacaagaccaaatggaagtgtttatcaagcctctgcttgaataaaacttgtcagttcctactagtcaaagctaatcccatgccaaccccagagccaatgtgaaagggaattatataaggagtgccagaagggatggcttaccagga

SEQ ID NO: 692 - DNA, 661 bp, Homo sapiens
  misc_feature [331]..[331]: Chromosome 2, SNP identification no. = rs7562308
  misc_feature [331]..[331]: allele = c, in linkage disequilibrium with rs4670019, respectively
  misc_feature [331]..[331]: n is a, t, c or g
ccccagtttgtggcataaaaaacctgaagatcaaatactgatatggtttggctctgtgtctgcacccaaatcgcgtgttgatttgtgattctgagttttggaggtggggtctggtgggaggtgattggatcatgggggtggtttcctatggtttagcaccatcccccagtgctgtctcatgatagagttctcatgagatctggttgtttaaaagtgtgtagcacttccgccttcattctctcttacctgccactatatgaagacgtgcttgcctcctctttgcccttctgccatgattgtaagttttctgaggcctcccagtcctgctgcntgtacagactacagaactgtgagtcaattaaacctcttcataaattacctaatctcaggtagttctttatagcagtgtgagaatgactaatacagaaaattgctaccagaaaatggggcattggtataaagatacctgaaaatgtggaagcaaccttaaaactgggtaatgggcagaggttggacgaatttggagggctcagaagacaggaagatggggaaggtttggaacttcttaaagactttgttgaatggttttggccaaaatactgatagtgatatggacaatgaattccaggctgagagggtctcagatggagatgaggaactt

SEQ ID NO: 693 - DNA, 661 bp, Homo sapiens
  misc_feature [331]..[331]: Chromosome 2, SNP identification no. = rs6750019
  misc_feature [331]..[331]: allele = c, in linkage disequilibrium with rs4670019, respectively
  misc_feature [331]..[331]: n is a, t, c or g
cctaatctcaggtagttctttatagcagtgtgagaatgactaatacagaaaattgctaccagaaaatggggcattggtataaagatacctgaaaatgtggaagcaaccttaaaactgggtaatgggcagaggttggacgaatttggagggctcagaagacaggaagatggggaaggtttggaacttcttaaagactttgttgaatggttttggccaaaatactgatagtgatatggacaatgaattccaggctgagagggtctcagatggagatgaggaacttattgggaactggaataaaaatcatcctcgttatgttttagcaaatgantggcagcgttgtgcccctgctctatagatctgtggaactttaaacttgagagagataatttagggtacctagtggaagaaatttctaagcagcaaaggattcaagatgtgatcttgctgcttccaacagtgtattctcacatgcatgaacaaaaagattatctgaaactggaacttatatttaaaaggcaagcagtaaggttacatataactttacttatatgtaaaagtttggaaaatttgcagcctaaccatgtgggagaaaagaaaaacccattttccaggaagaaattcaagccagctacagaattttacataagtaaaggggagc

SEQ ID NO: 694 - DNA, 661 bp, Homo sapiens
  misc_feature [331]..[331]: Chromosome 2, SNP identification no. = rs17432222
  misc_feature [331]..[331]: allele = a, in linkage disequilibrium with rs4670019, respectively
  misc_feature [331]..[331]: n is a, t, c or g
ttcttcataaattaccaagtcttaggtagttctttatagcagtttgagaacagaataatataaatgccaagctttttcagatcaaaacaggttaactagctataaggcttagggcatgcacatcaactcccatgattgaaagctacttcactcaaaatactagtgtgaaaacattggcccaaatgtgattcaaactaccaactaccaagaactgctagagcctgagcacacacagtctcagagtgagagccaaaaatgtcctgctttgggaaaaatttcttcacagaataaatctagttcctggcactcacactttgttgtcagccaaagngtgcccattgggaaaacatccgaaagctgtgtcaacaatgaataagatctgaagcttttgacttataatttcaaatagagaagtcactcaatacaatgctcagcctcttctctctctgtttatttgtcctattggaaaactcaatcacctttctcctcccaaattccaactaccttttatatattgctagtgcccaaatcttaatctgaagcccagacatctcttctgtgctctagacccttcctattctattcaatccagtgttctacaggacatattaatctggaggacccacaagcacctcaaaccaaacaaatctaaaactcaatt

SEQ ID NO: 695 - DNA, 661 bp, Homo sapiens
  misc_feature [331]..[331]: Chromosome 2, SNP identification no. = rs7582273
  misc_feature [331]..[331]: allele = g, in linkage disequilibrium with rs4670019, respectively
  misc_feature [331]..[331]: n is a, t, c or g
taaatttgtcacacaccatcatactcctcacacattggtaattaaatactaaaatttttacatcccaatctagcccccctttttctcttgccaaggttgtagcaacagcttgacaactggtctccctgcctttattcttttgcctctccatttcttcctctctactgcatccaaaatgattcttctaaaactaaaatctattctgatcactctttgctttaaaattttcaatggctctctagacatggaagcccaaactcctttagcttacacagggatctccaacttccaggctgctgacctgtactggtctgtgacctgtcaggaaccngaccacagagcaggaggtgagcagtgtgagtgagcattctcacctgagctccacctcctgtcagattagcagcggcattagagtctcataggagcatgaaccctattgtgaactatgcatctgagggatctaggttgcatgctccttatgagaatctaatgcctgatgatgtcaggtggaacagtttcatcccaaatccatccctcctgctgtctgtggaaaaattgtcttccacaaaacccgtccctggtgccaaaaaggttggagactgctggcttagaagttttcttgggactggtctcttcctgcttcagctgaaccttgtacttt

SEQ ID NO: 696 - DNA, 661 bp, Homo sapiens
  misc_feature [331]..[331]: Chromosome 2, SNP identification no. = rs6432478
  misc_feature [331]..[331]: allele = c, in linkage disequilibrium with rs4670019, respectively
  misc_feature [331]..[331]: n is a, t, c or g
aatttattctcctctacagagaactattattctctgtaaaataattaattattatgattaggattaaatctggacccattgcttccttcaggagagtgttaaaaatcaggaaaaacaagaaaactaaaagtaagaattcccaacttggaatctccattctgcaactgactatggttatgactaggagcaaattactgaacctctccggagactaatttcctcactagtaggattaatatgtgaggttcgctattctccaggattctttcctgctctacacatctctaagctcctgatcatactgttctttccacccactgcttttcccacncacgaagttcacaagtcccagcctcagcactctgtcaccatgttcctgcacacacctccactcatcctccccacctgtctctgctccatctgtttgggagtatctcaaatctcactcacctctgtccaccagcaccatggaaccatggtttctttagaaatcacctcctacttcgtgtccaatatgtcatcttttcaccttccttcaaaaagttcctcaagctattttccttccagaaactcagatttattctgaaccacacttgtacatgtgaaggggtgtgtgtgtgatttgttataatagtcatcattagtacattctaattcttaa

SEQ ID NO: 697 - DNA, 661 bp, Homo sapiens
  misc_feature [331]..[331]: Chromosome 2, SNP identification no. = rs6729694
  misc_feature [331]..[331]: allele = c, in linkage disequilibrium with rs4670019, respectively
  misc_feature [331]..[331]: n is a, t, c or g
tactgcagagccaaaaggaagctgaagatcactgatatgagagactctcagctgtcttcatggactcttctgagagtctgatacatagtatggaatttcaccctagaaagcttcataagacaacatttggcctatggcttttgtatacatttcagacctccaaaggtcatgaaccccaagcaggtagatctagtctaatgcaacccactatcttatttataaatgaagatagcaagacccatgacagaggtgactttgccaaaatgacacttgcttatctccctgtctactttcttcccatcacacggtgtaacctcccagtgaaaactcncacaaggtgagcaacttgaataggcaatggacattttaaggataaaacctgttatgaatgtaagattgtagtttgttgttgtttgatataattatagatcacacttaaaatcactaaaacgaggctatcacaataacataacaattattgaaaatctgtgcaccagacaatatgctaaatgtaatatttcacttactcctcatcacttccctaaggtgggtaaaggcatgaagcttcttctagagagagcaaatgactttccaaacagtgacagacccagggtttgaacccaaagtctggtagcagcatctgagccttcaactgtcacat

SEQ ID NO: 698 - DNA, 661 bp, Homo sapiens
  misc_feature [331]..[331]: Chromosome 2, SNP identification no. = rs6746706
  misc_feature [331]..[331]: allele = a, in linkage disequilibrium with rs4670019, respectively
  misc_feature [331]..[331]: n is a, t, c or g
tacagcagtaaataaattaggtggacatggctctcctgtatcttaccttctagaaaaaaaatagataataaataaacgtttttaaaagacaattttagaatgtgatgtgcgtatggaagaaaatacaccaggttggtttgataacaagtggctgatggaggctacttgggtttggtgagcaggaaaggtctttccatggaaggggcatttgagctgacacctgggtgatgagagggagcagcccatgaaaaagccagaggattaatgttccaggcagaggaaacaggaagtgcaaagtcccatgagtgacatgggtggaaaaaggaggagnggttaggcagagtcagaccacattgggtctttcaaaccacatgagaggaatctagattttattctaggctcaatgggaagccttagaaaagttctttagaggggagtaagatttaattaacacatacaaagatcactttaatgactgtgcaaaaaaaataaattctatgaaacaagagtgaaaacaaggtgatgagttgggaggctgttggaatggaccaagtaggacatgatggtgcctgagtgagggagtggcagtggagcaggaagaagtgaatgaatttaactaactatatgcagtcagaggtgcaatccataggacttgctgatg

SEQ ID NO: 699 - DNA, 661 bp, Homo sapiens
  misc_feature [331]..[331]: Chromosome 2, SNP identification no. = rs10211519
  misc_feature [331]..[331]: allele = a, in linkage disequilibrium with rs4670019, respectively
  misc_feature [331]..[331]: n is a, t, c or g
ctgtcctaaactcagggttggctgctggagcatttgttgccttcgtgtaaatgagtagaagaaacccctcctggaaccagagccttgtgagcgtgcagctgtgagtagagggcagctttgcatgaatgaaaaacaaagccccttccaatccatccccaaatcagggatgagggtttgtgcctgcttgttgagcagagcaagggctaaggtttagtttttcaactctcctccccactgtgtccagtggtgtgctgataactgtctgacagccagctccttgatttacacagtttgcccatttctgtggtataaatattgccaccatggccanttttaagctactgagttcatatcactgaatgtggagctgggaagtgaggctcataatcagctctcacaagaggtataagccagccccaggacaccattgcccacggcctggaagccaccatgtgaagaccacagcctgcaaagccaactacagtagccctacctgaaatcatgctttgtgccacatggggaaaactaccaaaataaaacctattataaaattggtgagtcgtttctgttttgtttttttcaaaatgagtcctaaacacaaactctaaaaataattgcatttcaaacatcatgcctttaaatcgtcatttcagaactctca

SEQ ID NO: 700 - DNA, 661 bp, Homo sapiens
  misc_feature [331]..[331]: Chromosome 2, SNP identification no. = rs16862066
  misc_feature [331]..[331]: allele = t, in linkage disequilibrium with rs4670019, respectively
  misc_feature [331]..[331]: n is a, t, c or g
ttttaagctactgagttcatatcactgaatgtggagctgggaagtgaggctcataatcagctctcacaagaggtataagccagccccaggacaccattgcccacggcctggaagccaccatgtgaagaccacagcctgcaaagccaactacagtagccctacctgaaatcatgctttgtgccacatggggaaaactaccaaaataaaacctattataaaattggtgagtcgtttctgttttgtttttttcaaaatgagtcctaaacacaaactctaaaaataattgcatttcaaacatcatgcctttaaatcgtcatttcagaactctcancttatttgaaattatacaacatttgaaagctaataatggacagaaacttcctgttttaagtaactcaatgatcattactataatttattactcattcgtggggataaaataatatattaaaaaagtagaatccagaaaaggctaagtaaggaatggaaataatgtcaaagaaaactattatatctttgaattgtgttgaagcacaaaatttattttagaaaatttctattcctgacactacttaataatgcaggggaaggctaagcaatatattacatagtcatgcaatttttctttgcctcagatgcttactttgtattgttttatata

SEQ ID NO: 701 - DNA, 661 bp, Homo sapiens
  misc_feature [331]..[331]: Chromosome 2, SNP identification no. = rs10174079
  misc_feature [331]..[331]: allele = t, in linkage disequilibrium with rs4670019, respectively
  misc_feature [331]..[331]: n is a, t, c or g
ttttgaggcttcaaagtctatctcagaatctttaagactgtaggaacttcataaacatttgttaaattaatcaaaaattagtgaacacaataaccctccacattaattctctagcctctagctctccatcaaagtaaataagcagaaagttaaggcttagtaacaggacccactgagattgaaagcagtcatatgcagccaagtccataccgatacataatggactcccacttgccagggcagggttggggggttccaagttacatgaggttattctgaaactatagataacggatcagagatcacatgtgacagatcttggacaatgtgnataaatttctctgagactcatctagaaatatttctcatctataaagtattcctacctcatgctgttatagtgaggactagaaatatgttaggtaaagtatctgtgacagagcctggtacatacgtgatcaataagtaaaaactcttactgtcattattatcactattcatttcataaacagtctgtatatctgtaccagataaatcaaagaacagtaggatactgtctccttattccttatataagctaagattctgaatcatttatgtgcgtattacaattcttaagaataagaaaaagccttggactgggaggtaggagacctggatt

SEQ ID NO: 702 - DNA, 661 bp, Homo sapiens
  misc_feature [331]..[331]: Chromosome 2, SNP identification no. = rs16862076
  misc_feature [331]..[331]: allele = g, in linkage disequilibrium with rs4670019, respectively
  misc_feature [331]..[331]: n is a, t, c or g
gtggaaatcgtcagattagcactgtaggtgagaactctctggtgacagtatggaggatacactagagaaaggcaacaccaaatagtagagaggagagaagagaggctgtggaagtgataacagattacatacaaaggaagtgcctagaaatgaacaggaggaataagctcaaaagacattaagggataaaatcaatagaagtttattaaacgtggtgagcaagaaagaaggatgagtcaatgatgacatattgatccctggcctagaagaccaagtcaatgatggtagcactcacctatttgcgaaattcagcaggcagaacagatttttnaggtaagaccaattgtacacatcaattgagatgtgtagaatttgaagtgccaatggaactatcagtagaagtgtccattaaacacatagatatataagtcagaagctcaggaaagtgagctgaaaatattggtattttgaatatatttgtgaaatataaacacacttccagaaaggcatataaaaataaatgtatggcatactgaattattataaattaaacatgtatgtaactcccggctaggtgaggagacagagcattcccagatagtcacctgcctaatgacaaccacatcccttcctcctaaaaaaaactactatcttgatttta

SEQ ID NO: 703 - DNA, 661 bp, Homo sapiens
  misc_feature [331]..[331]: Chromosome 2, SNP identification no. = rs7599584
  misc_feature [331]..[331]: allele = g, in linkage disequilibrium with rs4670019, respectively
  misc_feature [331]..[331]: n is a, t, c or g
ttccaaatttgccttgataaatttgagtattttgactctcatgtaaaggtctatgatttatctggaattgattttgcatatatcttgaagttaatagcaagtttcttttctcccatgtggatatccaatcgttgcagcaacataaatcaagtgctcttccgtgtgcgtgacttttcctgcattccatattctattacatttgactattcatctatattttaaccagctatcttaagtactgtagctttaaaacaagttttttatatctagcagaagatatattagctatgtgaagccctctattattccatataaatagcataattctgcntacagtcacacaaaccattggattttgatggggatcacatcaaatatgtagatacatttaggaagaattgataactttcttagattaagtcttctaattcatggacatggagtatttttccatttacttcagtattcattaatttctcccaaattttctagaggtcttacacatcttagattaattcctagaaatttgtttcctaattgcaagaggcaactttaaaattttattttttcatgtgtatttttattattgcatataaaaataaatgccttttattctatggattttctattagcaaccttgctaaactcatttttaaaatat

SEQ ID NO: 704 - DNA, 661 bp, Homo sapiens
  misc_feature [331]..[331]: Chromosome 2, SNP identification no. = rs1518790
  misc_feature [331]..[331]: allele = t, in linkage disequilibrium with rs4670019, respectively
  misc_feature [331]..[331]: n is a, t, c or g
ttagtgatataaattcataaataaaagctttcccaccaagaaaacttcaggctcaagtggctcctccagcaaattctaccagataagtattgaaggaatcttccacaaaattctctagaaaaaaggagaaacagcattctctacacagtttcataaatccagcaaaacctggatagcaaaatcagacaagggtattactaaaaagaaatattgaaggccagcttcctcaaggacttccatttctaaaatatgcaatttggacatgatatatttccctttttcatatattacagagttcacggtattcatatttagtttagaattttgcatnggcatctactacaaagattttccatttgagattgggaacaagagaatacctactctcattgctttttcttaatcctgagaggtctagctagtgcaggaaggtgagaggaacaaataaaagttataagaatggaaataaggaaataagactttcactctttgctaatgatgtgatttggtatgtaacaaatctaagaggtttgacagataaaattattaatattttaaaaatgagtttagcaaggttgctaatagaaaatccatagaataaaaggcatttatttttatatgcaataataaaaatacacatgaaaaaataaaattttaaagt

SEQ ID NO: 705 - DNA, 661 bp, Homo sapiens
  misc_feature [331]..[331]: Chromosome 2, SNP identification no. = rs1518789
  misc_feature [331]..[331]: allele = c, in linkage disequilibrium with rs4670019, respectively
  misc_feature [331]..[331]: n is a, t, c or g
aaacataaaatctaaatagttttattactattagtgatataaattcataaataaaagctttcccaccaagaaaacttcaggctcaagtggctcctccagcaaattctaccagataagtattgaaggaatcttccacaaaattctctagaaaaaaggagaaacagcattctctacacagtttcataaatccagcaaaacctggatagcaaaatcagacaagggtattactaaaaagaaatattgaaggccagcttcctcaaggacttccatttctaaaatatgcaatttggacatgatatatttccctttttcatatattacagagttcacngtattcatatttagtttagaattttgcataggcatctactacaaagattttccatttgagattgggaacaagagaatacctactctcattgctttttcttaatcctgagaggtctagctagtgcaggaaggtgagaggaacaaataaaagttataagaatggaaataaggaaataagactttcactctttgctaatgatgtgatttggtatgtaacaaatctaagaggtttgacagataaaattattaatattttaaaaatgagtttagcaaggttgctaatagaaaatccatagaataaaaggcatttatttttatatgcaataataaa

SEQ ID NO: 706 - DNA, 661 bp, Homo sapiens
  misc_feature [331]..[331]: Chromosome 2, SNP identification no. = rs1157907
  misc_feature [331]..[331]: allele = t, in linkage disequilibrium with rs4670019, respectively
  misc_feature [331]..[331]: n is a, t, c or g
gctccttaaagcagcagaactgatggcatgacaacaattgtacactatctttaataatacaagctaacactttttgagcatttactacatggcaggttctgttctaggtactttatatgtattaccgtatttaattctttcatcaaccctggaatataggtgctattattatcccttttgtacagatgctttaactgagtcagggaggtgttaaatcaactgctcatggtcacatagctagtaaataacagcttgggcagccagaatagtacaccttcgatgtccttgtccttaatcccaaagcctcgagtccatgtgttattgggcactntgttttctcctttacaatacattatttccttttaattctcaccacaaactcaaaatgaaggtctgtttttcatgtttagtagaaaaggattctgagtttagaaaacttaaagaactgaccaaggctcaaacagctattagaaatgggagaatgggacttggatattcgctgtttctgtacctgtgccactacctggttaccctatggctacctgttgggtagtatgaatagtatgaatagtcttgaaataaggattcaagtcttggctgttttattctttctttcttttttttttttttttttgagatggagcctcgctctgtcacccag

SEQ ID NO: 707 - DNA, 661 bp, Homo sapiens
  misc_feature [331]..[331]: Chromosome 2, SNP identification no. = rs4670032
  misc_feature [331]..[331]: allele = g, in linkage disequilibrium with rs4670019, respectively
  misc_feature [331]..[331]: n is a, t, c or g
tgagaatactgtggtaagcaacacagcccagtgctctccatcagggagctgacattccaatgagaggaggcatacagtacgaaaacaaataaactcaaatactaacaagtgctgtggaggaaataaacaggtgacataatggaaggtgactggaagatcattttcaggaatgtaatcgaggaagctctctcagaagagatgcctttgagctgaatggtgacagaatccagtgatatgaaaaccaaggtaaagagagttcagacagatgaatcagtaagtacaaaggcactgaggtaagaggaggaaagaagcccttggtagacagacaatntgagacaaagggagagagaacacacaaggccagagaagaggctgagtccacactgtatagggccttgaagaccaggcccaggatttgagatttttattccaagttcaatgagcagtcatgaaagactcttaaagatggaaataacacattctgatttatgtaggtagatgttactcttactactatgtagagaatggatttggggtgatgacaagcatggaagctccagaaaattagttgtttagggaagagataatggtagctcggactagagtattgagagtagagatggagagaaatgggtgagtttgagatatatattttaaaagg

SEQ ID NO: 708 - DNA, 661 bp, Homo sapiens
  misc_feature [331]..[331]: Chromosome 2, SNP identification no. = rs908788
  misc_feature [331]..[331]: allele = t, in linkage disequilibrium with rs4670019, respectively
  misc_feature [331]..[331]: n is a, t, c or g
cctctttggagctgacagccagctgcatctatctgacttagaccttaagaataaaacatcgtagtgaatggaagcagggttatgttatgactttcatgggctctagaagctttgaacttcatggacccctttctgcataaagaaatattaaattatacattattaaattatagttaacacatttatgacagtgttgatattaaaaaaatagtataatacttattttcttcaacttaaacccaaaaaagaaggggagaatggtcaatagttttgatggatatagagaaatcatagagaatgagatttgatgggtctgattttctatggtcantaaaaaaaaaagggggggccgggtgccgtggctcagggccaggcatggtggctcacgcctgtaatcccagcactttgggaggccaaagcaggtggatcacttgaggtctggagttcaagagcagcctggccaacatgatgaaaccttgtctctactaaaaatacaaaaattagccgggtgtggtggcacacacctgtaatccaagctactcaggaagctgaggcaggataaccacttgaacccaggaggcggaggttgccgtgagctgggattgtgccactgcactccagcctgggcaacagagtgagactccgtttcaaaaaataaata

SEQ ID NO: 709 - DNA, 661 bp, Homo sapiens
  LOC391353
  misc_feature [331]..[331]: Chromosome 2, SNP identification no. = rs340781
  misc_feature [331]..[331]: allele = a, in linkage disequilibrium with rs340779, respectively
  misc_feature [331]..[331]: n is a, t, c or g
ggtaagaggtctgtgaggcagctcccagctgcctcgggacagcagtttggacctgagcctgtccagccttccttcctcacccccgccatgttcctgccactgcaacagagtgcagcggaaggatgacagccacgagcaggcttgcttgcattttccctcaaggtccttccacaaatcttttcttttctgtacaaagcagatattgtcattcctgttatacgcgaagaaactgagaatgaagtgtatgaagccacttcccaaggtcccaaagcaagcctgcagcacctttctgaacatgcggggagtagcatttaacccacagcttgtcccnaaacggaaggcattttttgtgtcccatcccagacaaccagctctcgttgaggatttgggaaggtgcctcaagaggggcaggccacgcgcccctggccactaggagctgcacgcgcagcccatacctatgggctggcagcattggatgcagctttaattagatcaccatggtaacgagctagggagaacaatagacagttgtgtacttgcgagaatcctcagcctcagacaaggccctgctaaactgtaattacgctggagtggaagcggatcttcatttctgggagagaaataaactgccatcctggtcttcttgtcttcccatgttatt

SEQ ID NO: 710 - DNA, 661 bp, Homo sapiens
  LOC391353
  misc_feature [331]..[331]: Chromosome 2, SNP identification no. = rs340779
  misc_feature [331]..[331]: allele = g, c
  misc_feature [331]..[331]: n is a, t, c or g
tgtcaatattcccctgtggcgaagtcagctttaacccacgacatttacatacaaattgtaaggcatctctacaccttagtcacttccactaggaagagctactgtgatcattttgctccttcctctttgcagcagcaacaaaagagaactccaaccagaatgcatggagcatgtactatttccaggactcctggggccatggggagccagggtctgggacccccaaagagctgtatgtttaattgaggtgacaatgatcagaacaaaagcagaaaacagaagagtaaatgtagtgagtgcttttctatgttagatatacacacactagcantttctcagtattgcatgaaaccacgactgttgcagtaagctagagctttcctctcaggggactcattacattggaacaatcagacaccaacatgagagctggtttccttattttctgcagtaagcataaagcactgcaatgatattatcacatcaccaagcatcaagatgtggtcagctcttccttttctttttcttggcctttatagcagcatccactgagctagacccagtatctacgcaacatgaatagagcaaagattacaaattcagtagataaggacatcataaagtcagaagagaaaaaaagcggtttatgtataaattatac

SEQ ID NO: 711 - DNA, 661 bp, Homo sapiens
  LOC391353
  misc_feature [331]..[331]: Chromosome 2, SNP identification no. = rs186875
  misc_feature [331]..[331]: allele = c, in linkage disequilibrium with rs340779, respectively
  misc_feature [331]..[331]: n is a, t, c or g
ttctcagtttgcccaaactgttagcacacaattcagctcccatttgcttggtgtcaatttaatattgcattaattagacaattagggaggggccaaaaaagattctcagctgaagtactctaagtgggagtcaggttcattagaaattgtttttttaaaaatttttaaatagtttggttttgacttagcacagaaatgttagttgattaaagtcttagaagctgctaatgaattgactcaatgagattaaggtatttccttggaatcagtactccaagaaaagcatctgaccctccccacagttactgtgtgccaccttggaaaaaaagantaactcgtagctttgtttataacatgcaaacagccagaagaaaagtaaaagattcagtctgatggatgaggctacagctctccttagttccagcacgattgctttggattgtagtcaagatccggagaaatctgtaagtgcagtagaggggtcaggacgctaggctccagctccagcattctgtagctgtaaaatcgggggctgattgtttttctctcagtctcaatttcggcacctgggaaggtggtggtaattatgtcaactgtgcaggatcatcaccaggatctaaaacagaggttaggttacactgacatggaatattcagacaaa

SEQ ID NO: 712 - DNA, 661 bp, Homo sapiens
  LOC391353
  misc_feature [331]..[331]: Chromosome 2, SNP identification no. = rs340802
  misc_feature [331]..[331]: allele = c, in linkage disequilibrium with rs340779, respectively
  misc_feature [331]..[331]: n is a, t, c or g
caaaaaaaaaaaaaaaaaaaaaaagaaatgagcactcagcacatgttcaatatctatgagtaggcattgtatggtatgaaatggatgacatttgctttccttagacttctgcaaaagtgtttatttttacaaaaggagtttgtcaaactgcaaattagcatgcacatatcccttcctcttctctgctcccatctggcttatgcacagaaattacacttcttctcagtttgcccaaactgttagcacacaattcagctcccatttgcttggtgtcaatttaatattgcattaattagacaattagggaggggccaaaaaagattctcagctnaagtactctaagtgggagtcaggttcattagaaattgtttttttaaaaatttttaaatagtttggttttgacttagcacagaaatgttagttgattaaagtcttagaagctgctaatgaattgactcaatgagattaaggtatttccttggaatcagtactccaagaaaagcatctgaccctccccacagttactgtgtgccaccttggaaaaaaagagtaactcgtagctttgtttataacatgcaaacagccagaagaaaagtaaaagattcagtctgatggatgaggctacagctctccttagttccagcacgattgctttggattg

SEQ ID NO: 713 - DNA, 661 bp, Homo sapiens
  LOC391353
  misc_feature [331]..[331]: Chromosome 2, SNP identification no. = rs340799
  misc_feature [331]..[331]: allele = t, in linkage disequilibrium with rs340779, respectively
  misc_feature [331]..[331]: n is a, t, c or g
agtccacagtggtttttgtctcctggtttcaatttagggtccactctcctctaatcactggatgccagtgtgttttctaataattcctgttttgccagtttctgagttaacagacttcctctgccgctgggtctgaagctctgtcctgccagtggcagctgagacacttcagccttaattatgagatatctttctaagtcctggatgaagccaaaataacaattagcttcatataaatattgagccaggacatttccttctcgtgttctggagaaggtatgagcttgtcctggtaaaatgcctgggcatatacaaaatttcatttcctgcngatggttgaatcctgaatcctaaccagagttcctcaaagagcattccctgagagtcttgtggaggtgtgcagggtcactttgggggctgctccccccatgccacatgtgttgggcattttgtggtggtggtagttctctgggtcagcaccacccctgctgcccatatgcctagtgatactttgcaatactggctgccctacagtctgtggttatgtctattgggacagtttgctgtgggatcctcaggctcagtttcatcttggggatctgctgccctccaagcgaatcacactgtttgtttattttgtttgtctgtttgtttgttttgg

SEQ ID NO: 714 - DNA, 661 bp, Homo sapiens
  LOC391353
  misc_feature [331]..[331]: Chromosome 2, SNP identification no. = rs163772
  misc_feature [331]..[331]: allele = a, in linkage disequilibrium with rs340779, respectively
  misc_feature [331]..[331]: n is a, t, c or g
tctgcacatctagcataacagtctcttcttccaattttttaatttgattttttggggaaggacattttcctgaagatgtatctgtggagttggttgagtatggtactttggctttgattctgggattgtgcagtagtgtagtctctgtatgatttctttggctaaaaacagcatcagtggtatctgtgatttcctcagtggcttagggtgcagttgttagtggaggcagtggtgaagttctgctggggactgagacaccatgtgggccagtcttcagggcccattgatggcagcagcaggctgagcatgcctatccttgggcaccagggtngtatatgctggcatgtgttagccagtccaggaagtctgattattggccttcaaggtggcttgctcaggtgccaggaatgacagtggtgggctgggcaggtggattattgagcccctgggcagcaggtgtggcatgggcaatcacagtagcagtggtgggacaatctttgggacccaagagatccctgctgtttttgatgatggctacaatgggctggatgggccagtccccaggtctgcaggtggcacatgcagatgagtggcagctgtggtggtagtaacaggttcagggggttcaacctcaaataccagaaggactgctcaggtgtca

SEQ ID NO: 715 - DNA, 661 bp, Homo sapiens
  LOC391353
  misc_feature [331]..[331]: Chromosome 2, SNP identification no. = rs2333848
  misc_feature [331]..[331]: allele = c, c, in linkage disequilibrium with rs340779, rs919432, respectively
  misc_feature [331]..[331]: n is a, t, c or g
ctcttgttccgtacaacaacaatgaaccatttcttgatcggattgtgatgtgcgatgaaaagtggcttttatacggtaactggctatgaccaactcagtggttagactgagaagaagctccaaaacacttcccaaagccaaatttgcaccagaaaaagtaatggtccctgtttggtggtctgctgccagtctgatccactacagctttctgaatcccagtgaaacaattacatctgagaagtatgctcagcaaatcaatgagatgcactgaaaattgcaatgcctgcagcctgcattggttaacagaaatggcccaactctccacaacaanacttgacagcacgttgcacaaccaatgcttcaaaagttgaacaaattaggctacaaagttttgcctcatctgccatattcccctgacctctcaccaatcaacaaccccttcttcaagcatcctaatgactttttgcaaataaaatgcttccacaaccagcagaatgcagaaaatgcttcccaagagttcatcgaatcctgaagcatgcatttttatgctacaggaaggaacaaacttatttattgtttgcaaaaacgtgttgattgtaatggttcctattttctttaataaagatgtgtttgagcctagttataatgatttaaaattcac

SEQ ID NO: 716 - DNA, 661 bp, Homo sapiens
  LOC391353
  misc_feature [331]..[331]: Chromosome 2, SNP identification no. = rs2163062
  misc_feature [331]..[331]: allele = t, in linkage disequilibrium with rs919432, respectively
  misc_feature [331]..[331]: n is a, t, c or g
ctctggctaggacttccagtactatgttgactaggagtcacaaaagtgggccatacagtatgatgttttgttagctttggatttgccatatatggcctttttgttttgaggtatttaccttctatgccccatttgtttacggtttttatcacaaagcgatgttgaattttatcaaatactttttctacatcttttgagagggtcatatggtttttgtccttcattctgttgatgtgatgtatcacatttatttccctatgttgaaccatccttgcaaccctggagaaaattccacttgatcatggcatatatatgtatatatatatatatnttttttgatgtgctgttggattcagtgtgctcaattcttgagaattgttgcatctatgttcattagggataatggcctgcagtttttttcttgtcattgcattcctgtctggtttgggtgttagggcaatggtggtcttatagaatgagtaaaagggagaattacgtcctctttcattttttagaatagtttgaggacaattcgtattatttcttctttgaaagtttggtaggatttagcagctaagtcatctggtcctgcattttacttttgggggagactttttattacagattcaatctcattatttgttattggtctgttcagatt

SEQ ID NO: 717 - DNA, 661 bp, Homo sapiens
  LOC391353
  misc_feature [331]..[331]: Chromosome 2, SNP identification no. = rs1430040
  misc_feature [331]..[331]: allele = t, in linkage disequilibrium with rs340779, respectively
  misc_feature [331]..[331]: n is a, t, c or g
tctaggtttattcttggactggtcagcttccccaaaggaggctcttccaaactcctgctaagctttgtaagtgtggcttccctttctgaggctaagtgagagaagagagctgaatggtggtagggttaggggtgggggttcaactttttcttcttctcagctatacttctcttcatatgccaagagagcctctgttttgcaatcaacagagaataagtctttattcttctgccgaagtgaaggaagaaatctagggttttacagcatcaaatataattttaattgattctcctgtttttaacttcacctgtatctccacttttagatgtanatagagccacaaattccagaaccttttgagatttcttctgtttctggaagctttctccaacactggcttaggatacagctttctggactcagccaagccactaatccacggtcctactgctccatagctgtcaaaattttgttgcaattgtccttttcaccgattgttcttgttcttgtaaaaaaatcagtttattgacacattactggagtttctggaaggagctgaaggtagtgtatatgctcagtctaccatcttgaatggaagtgttagaattatttctttgtctcttcagcattgtatgaatctctagtcataacactgataact

SEQ ID NO: 718 - DNA, 661 bp, Homo sapiens
  LOC391353
  misc_feature [331]..[331]: Chromosome 2, SNP identification no. = rs1430041
  misc_feature [331]..[331]: allele = c, in linkage disequilibrium with rs340779, respectively
  misc_feature [331]..[331]: n is a, t, c or g
agagaagagagctgaatggtggtagggttaggggtgggggttcaactttttcttcttctcagctatacttctcttcatatgccaagagagcctctgttttgcaatcaacagagaataagtctttattcttctgccgaagtgaaggaagaaatctagggttttacagcatcaaatataattttaattgattctcctgtttttaacttcacctgtatctccacttttagatgtatatagagccacaaattccagaaccttttgagatttcttctgtttctggaagctttctccaacactggcttaggatacagctttctggactcagccaagncactaatccacggtcctactgctccatagctgtcaaaattttgttgcaattgtccttttcaccgattgttcttgttcttgtaaaaaaatcagtttattgacacattactggagtttctggaaggagctgaaggtagtgtatatgctcagtctaccatcttgaatggaagtgttagaattatttctttgtctcttcagcattgtatgaatctctagtcataacactgataactcaaacctagagcaaaccaaagtagtttgcataatcttcagaatctcttttgacttttattctcctctttttctcagtgatcactctctgtcctgaata

SEQ ID NO: 719 - DNA, 661 bp, Homo sapiens
  LOC391353
  misc_feature [331]..[331]: Chromosome 2, SNP identification no. = rs7568268
  misc_feature [331]..[331]: allele = c, c, in linkage disequilibrium with rs340779, rs919432, respectively
  misc_feature [331]..[331]: n is a, t, c or g
taagacagacagggcaggggcatgggatgtgggtttgaggcaaacagtcaaactcgaaggaaccttgatctctacctgtgtaccagggctcacttagcctgtggccaacccaaggttgtatttcctggatcaggtggctatggccttaatgattctcaaagcttttataaatatcttcatgaaacccctgctgacaaagtgagaaatctggaacaattgtgcaaagtttgtttttaataattggaaaatgatatctaaaaagaatatatgatttaggctgaaaaagcagaaatttgattcatttttttccaccaagaaactatgtgcaatnctctgttaacaccagagcatcacagggaaatagacttttggggaacagattcaactgccttgagtccagagtgagatcaacaagacagaaaatagagcagggtaggaggagagatcctcctcagttagtggtgtctttgtcatttatattcctagaaagaaagacaaatggcttcagactcttgaggccatctggtagtctttagcatctactagggggatcttgttaacattctgaaacttgggcccctatagacctcccaactcttcagtagcaggacctgagatgctctcagggtctctcaaattttacctttctttaaaatcgcct

SEQ ID NO: 720 - DNA, 661 bp, Homo sapiens
  LOC391353
  misc_feature [331]..[331]: Chromosome 2, SNP identification no. = rs7355442
  misc_feature [331]..[331]: allele = a, in linkage disequilibrium with rs340779, respectively
  misc_feature [331]..[331]: n is a, t, c or g
catttatattcctagaaagaaagacaaatggcttcagactcttgaggccatctggtagtctttagcatctactagggggatcttgttaacattctgaaacttgggcccctatagacctcccaactcttcagtagcaggacctgagatgctctcagggtctctcaaattttacctttctttaaaatcgcctataaaactacagatggctggacccaaccccagcgtttctgattcagtgagtctgagttgtcatctgagaatctgcattcataacaagctcccaggtgttgctgatactgctggtccagggatcacccctttgagaaccacngttttgcattgacagccctcctcagacatctctgataatcagtcagattttgtaaaccctttgagaaacagccatctgtgggaaccaccaatagcttttgtctttctttggatttagttttcaaaatcatacctctggaggtagggaaggaaatgcaagctataataaaagtgaggaaataaaatgatcaattcatgggaggttttcctagtctggccccttttctaatccgcacattcattgcatatggtgtcttctacaccaaggcaagatatgatttgggtctgtgtttccacccaaatctcatgtcgaatagtaattcccaatgtt

SEQ ID NO: 721 - DNA, 661 bp, Homo sapiens
  LOC391353
  misc_feature [331]..[331]: Chromosome 2, SNP identification no. = rs11680088
  misc_feature [331]..[331]: allele = c, in linkage disequilibrium with rs340779, respectively
  misc_feature [331]..[331]: n is a, t, c or g
ttcagtgagtctgagttgtcatctgagaatctgcattcataacaagctcccaggtgttgctgatactgctggtccagggatcacccctttgagaaccacagttttgcattgacagccctcctcagacatctctgataatcagtcagattttgtaaaccctttgagaaacagccatctgtgggaaccaccaatagcttttgtctttctttggatttagttttcaaaatcatacctctggaggtagggaaggaaatgcaagctataataaaagtgaggaaataaaatgatcaattcatgggaggttttcctagtctggccccttttctaatcngcacattcattgcatatggtgtcttctacaccaaggcaagatatgatttgggtctgtgtttccacccaaatctcatgtcgaatagtaattcccaatgttgggggaggggcatgatgggaggtgattggatcatgggggcagattttccccttgctgttctcatgacgatgagtgagttctcatgagatctggttgtttaaaatgtgtagtaccttctgtcttgctctgtgtctcctgctctgctatggtaagacatgcttggttccccttcacccttctgccatgattgtaagtttcctgagacctttcagtcatgcttccagtgagaat

SEQ ID NO: 722 - DNA, 661 bp, Homo sapiens
  LOC391353
  misc_feature [331]..[331]: Chromosome 2, SNP identification no. = rs2333850
  misc_feature [331]..[331]: allele = t, in linkage disequilibrium with rs340779, respectively
  misc_feature [331]..[331]: n is a, t, c or g
gatttagttttcaaaatcatacctctggaggtagggaaggaaatgcaagctataataaaagtgaggaaataaaatgatcaattcatgggaggttttcctagtctggccccttttctaatccgcacattcattgcatatggtgtcttctacaccaaggcaagatatgatttgggtctgtgtttccacccaaatctcatgtcgaatagtaattcccaatgttgggggaggggcatgatgggaggtgattggatcatgggggcagattttccccttgctgttctcatgacgatgagtgagttctcatgagatctggttgtttaaaatgtgtagnaccttctgtcttgctctgtgtctcctgctctgctatggtaagacatgcttggttccccttcacccttctgccatgattgtaagtttcctgagacctttcagtcatgcttccagtgagaatggactatatagaatattggtactagagaagcagggcattgctataaagatacctgaaaatatgaaagtggttttggaactgggtaatgggcagaggttggaacagtttggagggctcagaaaaaagacaggaagatgagggaaactttggaacttcctagagacttgtcaaatggttgtgatcaaaatgctcatagtgatatagacagtg

SEQ ID NO: 723 - DNA, 661 bp, Homo sapiens
  LOC391353
  misc_feature [331]..[331]: Chromosome 2, SNP identification no. = rs969605
  misc_feature [331]..[331]: allele = t, in linkage disequilibrium with rs340779, respectively
  misc_feature [331]..[331]: n is a, t, c or g
accaaagtatccattacagcaatgttctcatggcaaaaacaattagaagcaacccaaatgcctgtcaaagggagagtaaatgcagtgtgatatattctcacacttgtatattatacaacagttataaaagaaacacagagaagtgtaacaatatgtattaatcttgaaaatgtaaagttaagtaaaagaagtaaatctcaaaggattacatacagtataacatccttttggtaaaaataaaaacaactaaagtgaatatgtttgcatttacacacaattatatataatgtgcacatcatatataatctgtatacacaatggtgttacatanagaggcaataacactttataataaaggaagcaagtgaactaacacaggatctcagacattgattgccttgtgagagggaacaaggaggcagaaggatgggttggttatagtcaaggtcttagcttttgttttagatggtgttttcaagaatacttgctgcattattaaaaataattaggctgggtgtggtggcttacgcctgtaatcccagcattttgggaggccaaggtgggtggatcacgaggtcaggagatcgagaccatcctggctaacattgtgaaaccccgtctctactaaaaatacaaaaaattagctgggtgtggtggtggg

SEQ ID NO: 724 - DNA, 661 bp, Homo sapiens
  LOC391353
  misc_feature [331]..[331]: Chromosome 2, SNP identification no. = rs969604
  misc_feature [331]..[331]: allele = c, in linkage disequilibrium with rs340779, respectively
  misc_feature [331]..[331]: n is a, t, c or g
accttactatgaagctgtaataattggatcagtctggtattgatggaaggacagccacattgaccaatggaatagaatagagagctcagaaacaaacaaatgcatgtaaataactttatgatgtcacagaggcaccatgtcctactagaatggaaaagagaaactattggaggatataggatacatgtaccaaagtatccattacagcaatgttctcatggcaaaaacaattagaagcaacccaaatgcctgtcaaagggagagtaaatgcagtgtgatatattctcacacttgtatattatacaacagttataaaagaaacacagagaantgtaacaatatgtattaatcttgaaaatgtaaagttaagtaaaagaagtaaatctcaaaggattacatacagtataacatccttttggtaaaaataaaaacaactaaagtgaatatgtttgcatttacacacaattatatataatgtgcacatcatatataatctgtatacacaatggtgttacataaagaggcaataacactttataataaaggaagcaagtgaactaacacaggatctcagacattgattgccttgtgagagggaacaaggaggcagaaggatgggttggttatagtcaaggtcttagcttttgttttagatggtgtt

SEQ ID NO: 725 - DNA, 661 bp, Homo sapiens
  LOC391353
  misc_feature [331]..[331]: Chromosome 2, SNP identification no. = rs969603
  misc_feature [331]..[331]: allele = t, in linkage disequilibrium with rs340779, respectively
  misc_feature [331]..[331]: n is a, t, c or g
aattttaatgagatgattataaaatatatatgaaggagttaagtgctaaaagtagtctaacaaggatacttctgaaaaaaaacaagaataaggaacttgccttaccaaacaccaccttactatgaagctgtaataattggatcagtctggtattgatggaaggacagccacattgaccaatggaatagaatagagagctcagaaacaaacaaatgcatgtaaataactttatgatgtcacagaggcaccatgtcctactagaatggaaaagagaaactattggaggatataggatacatgtaccaaagtatccattacagcaatgttctcntggcaaaaacaattagaagcaacccaaatgcctgtcaaagggagagtaaatgcagtgtgatatattctcacacttgtatattatacaacagttataaaagaaacacagagaagtgtaacaatatgtattaatcttgaaaatgtaaagttaagtaaaagaagtaaatctcaaaggattacatacagtataacatccttttggtaaaaataaaaacaactaaagtgaatatgtttgcatttacacacaattatatataatgtgcacatcatatataatctgtatacacaatggtgttacataaagaggcaataacactttataataaaggaa

SEQ ID NO: 726 - DNA, 661 bp, Homo sapiens
  LOC391353
  misc_feature [331]..[331]: Chromosome 2, SNP identification no. = rs1030509
  misc_feature [331]..[331]: allele = c, in linkage disequilibrium with rs340779, respectively
  misc_feature [331]..[331]: n is a, t, c or g
tcagacctctataattttttttagtttactgagatattaaagaagatatatatagagaaatatatttgtgagtagactatttatatgctatcagttctccccaatcaatctattgattcaaattgattcaatggaatttaaataaaaattccacctagggtattgttaaatgaattttaatgagatgattataaaatatatatgaaggagttaagtgctaaaagtagtctaacaaggatacttctgaaaaaaaacaagaataaggaacttgccttaccaaacaccaccttactatgaagctgtaataattggatcagtctggtattgatgnaaggacagccacattgaccaatggaatagaatagagagctcagaaacaaacaaatgcatgtaaataactttatgatgtcacagaggcaccatgtcctactagaatggaaaagagaaactattggaggatataggatacatgtaccaaagtatccattacagcaatgttctcatggcaaaaacaattagaagcaacccaaatgcctgtcaaagggagagtaaatgcagtgtgatatattctcacacttgtatattatacaacagttataaaagaaacacagagaagtgtaacaatatgtattaatcttgaaaatgtaaagttaagtaaaag

SEQ ID NO: 727 - DNA, 661 bp, Homo sapiens
  LOC391353
  misc_feature [331]..[331]: Chromosome 2, SNP identification no. = rs13404283
  misc_feature [331]..[331]: allele = g, in linkage disequilibrium with rs340779, respectively
  misc_feature [331]..[331]: n is a, t, c or g
ctcctattattttttttcttttctttctttatttttgagacagagtctctctctttgttgtccaggctggagtgcagtggcatgatcttggctcactgcaacctccacctgcagggttcaagcgattctcctgtctcagcctcccaagtagctgggattacaggtgcccaccaccacgcccagctacttttcgtatttttagtagagatgggggtttcaccatgttggccaggctggtctcgaactcctgacttcaggtgacccacccaccttgacctcccaaagtgctgggattacaggtgtgagccactgcacccagcaaactctcctnttattctaatcatgtacaggtagttccttttggttttgtaagtaaaaaagcattatcatctgcaagtattgacagctttttatcaacttaaaaagtttttatgcacctttttattttttctggttttattgccctagcaaaactcttcaatacattgttgcctaaatgtggcaatagaataattttttttttccatttctaacttggaagaggattcttccaacaatttttcatttagggtaagttttgctttaaatatttaatgtacattgtttattgtgtttatttatttcaaattttctaagagtcttattaagaacaggtgttgag

SEQ ID NO: 728 - DNA, 661 bp, Homo sapiens
  LOC391353
  misc_feature [331]..[331]: Chromosome 2, SNP identification no. = rs10202013
  misc_feature [331]..[331]: allele = a, in linkage disequilibrium with rs340779, respectively
  misc_feature [331]..[331]: n is a, t, c or g
gtaatcccagcactttgggaggccgaggcgggaagatcacaaggtcagctgtttgagaccagcatggccaacgtggtgaaacccgatctctactaaaagtacaaaaattagctgggcatggtggcgggcacctgtaatctcatctactcgggagggtgagacagaagaattgcttgaacctgggaggtggaggttgcagtgagccaagatcacagcactgcactccagcctgggtgacacagcaagactccatctcaaaaaaaaaaaaaaaaaaaaaaaaaacaatgaatgtgaattttaccaaatgtttgtaaaatgaatggttgttttngggattaaggttatactagcttcattgaagaaattgggtcattctctctttttctgctgtctaaaggagaatatatttgtttaaagtttggtagaacttgaatgtaaaatcatctggttctggtgttttctttgtgggaagattttaattgctgcattagtttatcaataattataagactatccaatttattttttcttgagttctgtttatacttttcaaaaatatttgtccattttacctaagttttcaaagttgcaggcaaatagttgctatattagttttttgtcccttctaatgtcttatttatctgtctttatggcccaaatt

SEQ ID NO: 729 - DNA, 661 bp, Homo sapiens
  LOC391353
  misc_feature [331]..[331]: Chromosome 2, SNP identification no. = rs11096501
  misc_feature [331]..[331]: allele = a, in linkage disequilibrium with rs340779, respectively
  misc_feature [331]..[331]: n is a, t, c or g
ttaattctctataatactatgattttgcagaaatatctgtaataagccacaaaggaagctagacccatttttagagccagagcaattaccatctgcctcccaattttatgggctggccatcataatcttggctttcttgttccagagtctgtcaaacaaggtctcactacaatgactatacaactgagatattttgcagttcttttatatccttcctaatttttttcagcttgtacgatcaataatcaagagagatgtgttgaaatcttaaaatgtaataggaaatttgttcacttctctttgtatattttgcttcacttgtattgagacntttttattaagttcaaaatatttaaaagttgctgtagcttctaaattcattaaaatgtctattctagtcatgcaaggatggctcaatcattagaaaataactcactacattcttaataatgctttatatttcaaaattagttttacttgtttaatgtaggttttaaagagcttagttaaaatagttaaagcaggtttcttttagttagcatttgtcttgtatttactttatctttttaattttaatcttttcaaaatttttatttatttatttatttatttttgagatggagtctcgttctgttgcccaggctggagtgcagtggtgcaa

SEQ ID NO: 730 - DNA, 661 bp, Homo sapiens
  LOC391353
  misc_feature [331]..[331]: Chromosome 2, SNP identification no. = rs12466763
  misc_feature [331]..[331]: allele = g, in linkage disequilibrium with rs340779, respectively
  misc_feature [331]..[331]: n is a, t, c or g
acaatgactatacaactgagatattttgcagttcttttatatccttcctaatttttttcagcttgtacgatcaataatcaagagagatgtgttgaaatcttaaaatgtaataggaaatttgttcacttctctttgtatattttgcttcacttgtattgagacatttttattaagttcaaaatatttaaaagttgctgtagcttctaaattcattaaaatgtctattctagtcatgcaaggatggctcaatcattagaaaataactcactacattcttaataatgctttatatttcaaaattagttttacttgtttaatgtaggttttaaanagcttagttaaaatagttaaagcaggtttcttttagttagcatttgtcttgtatttactttatctttttaattttaatcttttcaaaatttttatttatttatttatttatttttgagatggagtctcgttctgttgcccaggctggagtgcagtggtgcaacctcggctcactgcaacctctgcctcctgggttcaagagattctcctgcctcagcctcccgagtagccgggattacaggtaccccctaccatgcccagctaacttttgtatttttagtagagactgggtttcaccatgttggccagtctgatctcgaactcctaactt

SEQ ID NO: 731 - DNA, 661 bp, Homo sapiens
  LOC391353
  misc_feature [331]..[331]: Chromosome 2, SNP identification no. = rs7588594
  misc_feature [331]..[331]: allele = c, in linkage disequilibrium with rs340779, respectively
  misc_feature [331]..[331]: n is a, t, c or g
caatcttggctcactgcaacctccgcctcccaggttcaagtgattctcctgcctcagcctcctgagtagctgggattacaggcgtgtgccaccacacctagctgattttgtatttttagtagagatggtatttctctatgttggtcaggctagtctcgaacttctgacctcaggtgatctaccctccttggcctcccaaagtgctgggattacaggcgtgagccactgcgcctggccaggcaaaacacacttttataggtgtaatcaagaaaatggagatgagcttactgacagtaattctgtgtggcccctgtgccaataagcgtatggnccagataattgagaccttttcttctcccattttgcaaacatctattgggatatgaatgcctccacctcttaatggtcatacttaagcttcttaaattcatttctatcttttaaatttttctgtctcagtcctcatggtaagattttcagttatcaactcttgcttctagtgttttcttttagttagtttgttagatctgtttagtaaatgtatacagaaagaatatatcaacaggcttcatatagaagactggaatatgtccagttaattatgaccatgagtttaatgacattttttgcatgctcagatattttcttgctttttcaaggt

SEQ ID NO: 732 - DNA, 661 bp, Homo sapiens
  LOC391353
  misc_feature [331]..[331]: Chromosome 2, SNP identification no. = rs7594175
  misc_feature [331]..[331]: allele = a, in linkage disequilibrium with rs340779, respectively
  misc_feature [331]..[331]: n is a, t, c or g
ctgtgccaataagcgtatggcccagataattgagaccttttcttctcccattttgcaaacatctattgggatatgaatgcctccacctcttaatggtcatacttaagcttcttaaattcatttctatcttttaaatttttctgtctcagtcctcatggtaagattttcagttatcaactcttgcttctagtgttttcttttagttagtttgttagatctgtttagtaaatgtatacagaaagaatatatcaacaggcttcatatagaagactggaatatgtccagttaattatgaccatgagtttaatgacattttttgcatgctcagatnttttcttgctttttcaaggtataagaaagaacttaattagtgtattttggtaatgaaaaataaaaattttaaacctcttcagtttatgtacagagatcatcatcagtgtgggtctctgggaagtcacagaatgctgatacacccttggcctggcagtgagaaagcagaggacagcggggatggggagtgctagttaccatgtgacccatagggcttttctaatgttgagtctatatctctcaattgagaccaatttgatttccaattctggctcccccattatctcattttgtgagtttgtacaaatgaattatcatcactgggtctctg

SEQ ID NO: 733 - DNA, 661 bp, Homo sapiens
  LOC391353
  misc_feature [331]..[331]: Chromosome 2, SNP identification no. = rs11690983
  misc_feature [331]..[331]: allele = t, in linkage disequilibrium with rs340779, respectively
  misc_feature [331]..[331]: n is a, t, c or g
tagttagtttgttagatctgtttagtaaatgtatacagaaagaatatatcaacaggcttcatatagaagactggaatatgtccagttaattatgaccatgagtttaatgacattttttgcatgctcagatattttcttgctttttcaaggtataagaaagaacttaattagtgtattttggtaatgaaaaataaaaattttaaacctcttcagtttatgtacagagatcatcatcagtgtgggtctctgggaagtcacagaatgctgatacacccttggcctggcagtgagaaagcagaggacagcggggatggggagtgctagttaccangtgacccatagggcttttctaatgttgagtctatatctctcaattgagaccaatttgatttccaattctggctcccccattatctcattttgtgagtttgtacaaatgaattatcatcactgggtctctgcttccctatccatataggaagtctatttggaaaatctccatagtgtcttccagctctggaaaacaaatttttctggttggaatgaagttgaacctctatgtttttgtagaaatatttgtgaaaaactgcaaagaaagctagactcattcttagagctacagcaatgaccatctgcttgccaatattatgggctggtcatc

SEQ ID NO: 734 - DNA, 661 bp, Homo sapiens
  LOC391353
  misc_feature [331]..[331]: Chromosome 2, SNP identification no. = rs919432
  misc_feature [331]..[331]: allele = g, a
  misc_feature [331]..[331]: n is a, t, c or g
tattacgttactccctgagtaccatgtctttcagcttgtgctataactgcaaagaaaaaaatttaataaatttcccaatttctctggtatttcctgatgcagtgcttctcaaactgtgtcaaaggacaatttcattgcttgtttttttcccagtcgtgacgtgctgattctttggtacctctactctgttcaaagcaatgaatacattgatcatgactttatttgtagggacattgtcaagttgctataatgcttctaaatggtttctctttgattctgtactcatctaggatggacctgtaataaaccgccccaagcctggcacgagtcntttctctaatgggttagaaacatgtgcttcagaatcagataagcttaggtttgatttcctcctctatcacttactacctgcttggataagcagattagctctctgagcctttgtttcttcctctataagatgataatgaaaaatatttgatagaataataaagaggaaggtctggaacaagatgaatgaagcactcactcactgcagggttcacagctgagactgaggcctctcaaaactttgcatcctaggtgtctcccttgctttacctaatctgtgagggctaaatgaaattgggtaaaaaaagtgcttaaacaacgtgtggcacag

SEQ ID NO: 735 - DNA, 661 bp, Homo sapiens
  LOC391353
  misc_feature [331]..[331]: Chromosome 2, SNP identification no. = rs6531074
  misc_feature [331]..[331]: allele = c, in linkage disequilibrium with rs340779, respectively
  misc_feature [331]..[331]: n is a, t, c or g
cctccatgatcatatctgctttcctttcacctctcttaacattatgtcactaagaatcacccatgttctagctatggatattgttgcttaaagttgttcattcatttccatggtgataatattctgtgatgtgaatgtccttattttctccttaatgggcatttgggatacgtgtcagccattatttcattgtctctcttccagagccacccttcattgctgttctgtgacaatgggtacagaccctgtaaacatttcacctttgtcagtgatgggtactagatggcaacacaagacttctcttccagcgccagtgtgctccttgggaagncttctccagtgccagctctagtgctggctactgtagtacatggcaggcagcagcacatggggctggcaacatgtggagttcctgtttaggaagcttcccgtggtgcccctcaggtggctacacaatgagttctgagccacattgcctccctgtgagtggtttctactggcatcctagagagtggattcccaccggacacctcagtggacttctttaccatctgtgagccacagcagagagctttccagtggagtctgcatcttaactttggggaaggggtcctcttttaggtgtattcttttctttagtgctctaattcagttctagggg

SEQ ID NO: 736 - DNA, 661 bp, Homo sapiens
  LOC391353
  misc_feature [331]..[331]: Chromosome 2, SNP identification no. = rs13020939
  misc_feature [331]..[331]: allele = g, in linkage disequilibrium with rs919432, respectively
  misc_feature [331]..[331]: n is a, t, c or g
tttccagtcttctgaggacggcctcaaatgggaagacatccctcacagaacagggtcaaatgggaagacatccctcacagaacagggagaacactacagctacttagtacaggtccttgactaaaccgcatttgttttcactcttttgatcttgcctattttggggcagattaagctgtgagattccagaatgaagaatgaccactagggtcaactaattcagtctctttattttgctgagggagaagattcagaaaaagcaagggagtcaacgggggccacacagtgattggagatggaacccttacctagccagctgttactgcaaccnccccctctcttaacatttctacccgagattttgagagtaacctcacgtgcagaaccagctaatcctgctcatttgctatctgggtactatctttgtttttagcttcacctaaaatggttattaaaagattcagcagacttttaacagcaactagatgccctaagtgctagtatctgtaaagcacttactatgtatcaggcactatttaagtactctctatgtcttgacttatttaatcctcacaacaatccttcaaagtaggtattattattcttttcacttttggagatgaggaagttgaggcattcagatacacaacttaatcaaaat

SEQ ID NO: 737 - DNA, 661 bp, Homo sapiens
  LOC391353
  misc_feature [331]..[331]: Chromosome 2, SNP identification no. = rs891275
  misc_feature [331]..[331]: allele = g, in linkage disequilibrium with rs919432, respectively
  misc_feature [331]..[331]: n is a, t, c or g
gccaacagctttgtatatgatctaagtagtatacaatattaatcttacgtcttttacaaaaagacatctcactttgcaattgatttggatagcacggttggtagtttataataaatatttgatatctaaaagatagcaaacaactgatagctactgaaacaatgggtaggaagagatgttagtgttaagtggagaagggtatttatagactaatttataaatgatcattactgtttcaaagactgccacttccttttggaacctgataactgtaagacccagataatgtattctggtctgacaatgagaaaattctacttagatgatacanagttatatcacacatgtgaattctacttaatgaaattgtcttagactgtatatttctgatatttcattcctgtagttaggcatttcctagaccttgaatttcatcacttcaaacacattttcaatactgttcacattattgaatttaccagaaagtgtgcgctaaatttcttttcttttctgaatagcagtccatatgttatttaagacatttgctgcattgtgttatttgagccagagacgtaagtcttgggagaaaaacataaaataaatacattgatgctatatgtcttgaatataactctgagagcttccgaactatcctaaaacc

SEQ ID NO: 738 - DNA, 661 bp, Homo sapiens
  misc_feature [331]..[331]: Chromosome 2, SNP identification no. = rs10495695
  misc_feature [331]..[331]: allele = g, in linkage disequilibrium with rs11694107, respectively
  misc_feature [331]..[331]: n is a, t, c or g
ctcactgcaagctccgcctcccaggttcacgccattctcctgcctcagcctcccgagtagctgggactacaggtgcctgccaccacgcctggctgattttttgtaattttagtagagacggggtttcaccttgttagccaggatggtctcgatctcctgacctcgtgatccacctgcctcaacctctcaaagtgctgggattacaaacatgagccactgcacctggcccatagtttgagttctgaagggaaatttgagtcagtgttacccattcaccaagcagagggtcacctggaatggctggataagggctttgtacactcatcattcntagtctcggtaggtgctgcctcttgcctcaaacattgacgtctaaacaatcagcaacttctaccagtacgactttaataaactcctcaacattctaaatgtagcatctgaaactccataaacaggagtgaactagtagcagtctgaagttgtcatcattgacagcttatgatttatcttaactctccctagccatttggccatgactttaagtaaacactttccgtcttcctcatgttctcgttactgccacctcccactaataagaaagactgccaagaaaagcatccagacagttcatttacctcccaaacttgcctgaaagtagccg

SEQ ID NO: 739 - DNA, 661 bp, Homo sapiens
  misc_feature [331]..[331]: Chromosome 2, SNP identification no. = rs4511684
  misc_feature [331]..[331]: allele = a, in linkage disequilibrium with rs11694107, respectively
  misc_feature [331]..[331]: n is a, t, c or g
caatcagaaactggttgaagctgaacagagtaaccaatctcactggtgcaagtgactggttcagaaatggatccatcatcctgcctggaagtcaaatcccgggctttatattgttgtgaaaataatcttatccttgttctggacttaaagtgggagtatgtgtattcagaaactactgatcttgtaatcattaaaagagagtctgaccaagaaagaagccagcttacagggttttatgttagatgggggtgaaagaaactgagtcacagagacaccagttgaacccatggttcagccttgcctaaagctagacctacagttggatgtttcngttacattaagcaataaaattcctatgtagatttgggccaggttttataattcttgaaatccaaaatttccaactgatgcaatttttggagcctttgcatggactaaaactgatcttgaattttcatatagtatagccgagctggatggattacaggatagatggggccagggcaggagcagtggctcatgcctgtaattctagcacattgggaggctgaggtgggaggacagcttgagcccaggagttcaaaactagcctgggcaacagagtgagacctcaccttgttttatatatatataaatatatatatggatagatggatggatg

SEQ ID NO: 740 - DNA, 661 bp, Homo sapiens
  misc_feature [331]..[331]: Chromosome 2, SNP identification no. = rs6715010
  misc_feature [331]..[331]: allele = t, in linkage disequilibrium with rs11694107, respectively
  misc_feature [331]..[331]: n is a, t, c or g
ggtgtttggataatgcctttatccagtttatcactaaactggtagttctggtgaagtagaatgtctttatccagttgcacagaactagtatctcctctatcccattaaagagaaaattgatttattaactgttgatatttacacttggggaattcatcaggctacttgatcagtagaaccaggaatcctgcatagattgctgtggtataaggagaagataccaataggaaataggtgagggtatagagttgagtggttttgttgtgcatgaaatgttaatgcttgttcatcacgaagaatatcttatttctgaaaccaagtatgaccacantctgtcactctcaagtgtctaaggaatatatttccacttttgttgtccctataagaatgttttgctggggtcctgcaaacttactgccagtcagaaggcaggctgcaggctgggcatggtggctttcacctgtaatcccagtactttgggaggccgaggcaggcggatcacctaaggtcaggagttcgagaccagcctggtcaacatggcgaaactctgtctctactaaaaatacaaaaattggccaggcatggtggcaggcacctgtaatcccagctactcgggaggctgaggcaggagaacccaggaggtggagttgcagtgagcaga

SEQ ID NO: 741 - DNA, 661 bp, Homo sapiens
  misc_feature [331]..[331]: Chromosome 2, SNP identification no. = rs6725361
  misc_feature [331]..[331]: allele = a, in linkage disequilibrium with rs11694107, respectively
  misc_feature [331]..[331]: n is a, t, c or g
tgagtaaatttaatgtttaaagtgtaaatatatagatagggctcacaaagtagttttcataaaatagtccctagggcactgatagctgctaagattgctgttttagaagccttgctctgtttgtaaatgagagacattgtcttatgtgaatagtgagaatgatacaaagtcctggttgtgcaagtgtctctatgaagggagcagctggcccttcctacagaagttccttctgtagcctgagtcacacagtcagcacttgtggctctattggctgcctttatcttctgcataatggatatgaaggttgcattcatagtattaatgagtagtnactccagtggccatggctggcaccaaaaatagcatgttgatcattacctttggtcttaaagaatgagtagcacagaatgcctgtgtcccaccctatatgaggccttttctcccctgcagagcaaactggcatctttctttggcttctttcagagaacgggtttccaagccagccatgagtagcctctggagctttttctgagccagctcctggtggggcattgggctgtggtctattctaaagagagtagttggcatacacaaagaatgagtttatttgtaaaccacaatcacataaacgtgaaggaacacacaatgtctgccagcaatg

SEQ ID NO: 742 - DNA, 661 bp, Homo sapiens
  misc_feature [331]..[331]: Chromosome 2, SNP identification no. = rs13027962
  misc_feature [331]..[331]: allele = a, in linkage disequilibrium with rs11694107, respectively
  misc_feature [331]..[331]: n is a, t, c or g
gtgtcccaccctatatgaggccttttctcccctgcagagcaaactggcatctttctttggcttctttcagagaacgggtttccaagccagccatgagtagcctctggagctttttctgagccagctcctggtggggcattgggctgtggtctattctaaagagagtagttggcatacacaaagaatgagtttatttgtaaaccacaatcacataaacgtgaaggaacacacaatgtctgccagcaatgtctttgacctgtgtgtggaatacactagcaagcagtggaataaactagaaccattggtgtcagagctggaagggccttcagcntcataagggccaagtccacaatgatgaccaagaataagcaacctccccaaggccattccaccattaagtgaaagatctggtcacttctaactccagtccaggtggctttctattgaaccaaagaccctcagttccctgacttataagagagaacaatacctgtcccgcaggatgcccataatgactaagtgggttaacatctatgcaagtacctcacacaaaaataggccccaattaaatgtttaataatatttttcttatcagattaaaaccctggagcttacttcactcaccattgtccattttcaccatgatcagtgctgatgctac

SEQ ID NO: 743 - DNA, 661 bp, Homo sapiens
  misc_feature [331]..[331]: Chromosome 2, SNP identification no. = rs12053016
  misc_feature [331]..[331]: allele = g, in linkage disequilibrium with rs11694107, respectively
  misc_feature [331]..[331]: n is a, t, c or g
cccaaggttttctaatgatataactaaactaaaaacaaaacaaagcacacaaccccccaccccctgcagtgtgagcagagttgaattaacgacataaaagacaaaactgaaaagcagcatcatatggagaggaagaaaaacagatgtaaatagtaagaatgatgacagatacatagaaagaatactaaaaagacaatgtatgaattccagttcataaaaataaggactaggagaactaccatttacttagtgtcaacaatgtgccagttcctctgctcagtttttttctgttgtttaagaactcaaatgtgagaaaatttagaagaagaanatatttgaaatacagacagcaaggacccctttaagaatgtggtgccatgcctttcggtcatgttattaaggaggcatatgatttgttaatgccacccagggctggactccttccatactttatcatgagtaattttcaggacaatgctgtgaggtaggtagcatttttctctattttatagatgaagaaacaagcttacagaaattaagaagaaaatatagcaaaaaaaaagcaattagacgtatagcaaaaagaaattttccttgtttgaaaaagatattaagacaagacacattggtagctattaataaggaaaactcattaaatgaa

SEQ ID NO: 744 - DNA, 661 bp, Homo sapiens
  LOC388927
  misc_feature [331]..[331]: Chromosome 2, SNP identification no. = rs4666320
  misc_feature [331]..[331]: allele = c, in linkage disequilibrium with rs11694107, respectively
  misc_feature [331]..[331]: n is a, t, c or g
atatatcttttttttttttcttttttttagacagtgcctggctttgtcgcccaggctggagtacagtagtgtgatctcggctcactgcaagctccgcctcccgggttcacgccattctcctgcctcagccttcccagtagctgggactccaggcgcccgccaccacgcccggctaatttttttgtatttttagtagagacggggtttcaccgcgttacccaggatggtctcgatctcctgacctcatgatccgcccgcctcggcctcccaaagtgctgggattacaggcatgagccaccgcgtctggccaatatatcttaacatagaactntataccagttaaaccatgattcaagaatggaagcaaaataaagacattttcagggtattgcccacagaccatgactgaaagacaggcctactgcagtttatatttcatcaagtagcaaattgagccgccaaggaagcacagagacactaaacataaaagtgagaaaaaaattagaaaatgactctcccaatactaagtagccaaaattatatcagtggtcaatatgtagcatttaatgcattcattgccaaaaataaataaattggaatttttaaaaaccatgaaagactactaaggatagtaggacaaagaaaataattaagttaacca

SEQ ID NO: 745 - DNA, 661 bp, Homo sapiens
  LOC388927
  misc_feature [331]..[331]: Chromosome 2, SNP identification no. = rs11694107
  misc_feature [331]..[331]: allele = a, g
  misc_feature [331]..[331]: n is a, t, c or g
tattagttttttctaataaatatgaaatactgatgaagtgaactgaaaaccctttttgttagcaaacaaactcaacttggaatgtaaagcctaaataaaaaacaatcaaggaaaaagtgtttaactaccccaaaacagaaaaataaacaataacaacaaactctaggcttgaatgattttattggagaagtatttcacatgtttagagagaaagattatttctcatgctacagaagctcttccaacaacacatgccaaggctttgttccaaaataatattttctctccatcacacttcatatactgggaaaaggccttgaggtcctctcancttgtggggaaatttttatgtctcttgcagagtgagacagaagccatgcccaggacctgggctggaagacacctctccttttccaagtacgtttgggaaaaccacacagggtttgtctgctcgagttttcaattttgattgtccttgaaaggtctttgcctggtgcaatcgcatttccccaaacctctctcagttactgccaggccagcccaactcagaacaccctttctttctccacatggggctaattttattcataggggctctgtcccaccaagtgggagataatagaagtttgaccagagtgattatttaaaacaaaatctaggc

SEQ ID NO: 746 - DNA, 661 bp, Homo sapiens
  LOC388927
  misc_feature [331]..[331]: Chromosome 2, SNP identification no. = rs10207804
  misc_feature [331]..[331]: allele = g, in linkage disequilibrium with rs11694107, respectively
  misc_feature [331]..[331]: n is a, t, c or g
cttcatatactgggaaaaggccttgaggtcctctcagcttgtggggaaatttttatgtctcttgcagagtgagacagaagccatgcccaggacctgggctggaagacacctctccttttccaagtacgtttgggaaaaccacacagggtttgtctgctcgagttttcaattttgattgtccttgaaaggtctttgcctggtgcaatcgcatttccccaaacctctctcagttactgccaggccagcccaactcagaacaccctttctttctccacatggggctaattttattcataggggctctgtcccaccaagtgggagataatagaantttgaccagagtgattatttaaaacaaaatctaggcttctggttcaaataaagaaaaagaatttacatttatctctgctccattttgaaaatacatctaaatgcagtaagaactacaaaacaaaaagaagtacataaataactgggaaaagttatcagccaaccaaagatactgttcttttacattttctgtttctttctttgtacggcaaaataacacaaacccattatagctggtagaagaaagcaagatacagcaaaaaaaggagataacttccctctcttcccatttcacttttcttacagatttaaggcaacaaatatcaatact

SEQ ID NO: 747 - DNA, 661 bp, Homo sapiens
  LOC388927
  misc_feature [331]..[331]: Chromosome 2, SNP identification no. = rs4666451
  misc_feature [331]..[331]: allele = a, in linkage disequilibrium with rs11694107, respectively
  misc_feature [331]..[331]: n is a, t, c or g
acccattatagctggtagaagaaagcaagatacagcaaaaaaaggagataacttccctctcttcccatttcacttttcttacagatttaaggcaacaaatatcaatactctgttagggtcagtgctcacccttccccatggctgagaaagaacatagctagaccacacattcacagatgaaagcatttggtgtagtcattatgctgtgttttatttttacaaaaataatgaaaatactagataacttgcttctttcattaagcattacaggcatccatttaggatgacagggtctgaatcatttttttggatagctgcataatgttctatntgatggatattacatgattcttgaaagcacaactactgatgagtgttcatatttccaatatgttgctattaaaaataatgcttccaggccgggcgcggtgtctcacgcctgtaatcccagcactttgtaaggccgaggcgggaggatcacaaggtcaggagatcgagaccatcctggctaacacagtgaaaccccatctctactaaaaatacaaaaaattagccgggtgtggtggcgggcacctgtagtcccagctactcgggaggctgaggcaggagaatggcatgaacccgggaggcggagtttgccgtgagccgaaattgcaccact

SEQ ID NO: 748 - DNA, 661 bp, Homo sapiens
  LOC388927
  misc_feature [331]..[331]: Chromosome 2, SNP identification no. = rs4426493
  misc_feature [331]..[331]: allele = t, in linkage disequilibrium with rs11694107, respectively
  misc_feature [331]..[331]: n is a, t, c or g
tcaaaaagttataactactgggtatgatcactttaatttttagagtctaatggtgaaaaatattatcttattgctgctttaatttgcctttccctcaatactagtgagggttggcatcattcaatatgtgtatagtctgcttggattaatcttctttgactttcctattcacatctgtccatttttcttttgagttgtgtttttctctgatgggcttgaatacactctcaagattttagcaatattaactcttttcctgtctgagaagtcagaaaaacttctacttatgtattatctgtctattttttaagcatacacatctgtcaataanatttagtttacatatatattgatatatttgtgtgtatagttaatgcatattgttatataacatagttagtatatatatccatcattatacatatttaacctactatgatcagaaatatctactattgtttttacccgagtttctttctttccttccgtaatgagatatttcccctagctttttctaatgcatttttccttcttcttttcctatatatttaatcaacatggactatggatatatataatatcatatatataaaatatcatatataatatatataaaatatcatatatatatgaggtaaaggacctcaatttgctttaatct

SEQ ID NO: 749 - DNA, 661 bp, Homo sapiens
  LOC388927
  misc_feature [331]..[331]: Chromosome 2, SNP identification no. = rs4574071
  misc_feature [331]..[331]: allele = c, in linkage disequilibrium with rs11694107, respectively
  misc_feature [331]..[331]: n is a, t, c or g
cattttattgttgtccgcaaacttgaatcaacagtgactaaacttcacaatcccatgttatgattcaaaaaatgtcaaaccccaagtaaaattcttgaggtaaattccagtttcagatgcctaatgaggtattcataaattaaagattttaatcaaatattttattttatgatcccctcagtgtgatacaaaggaaccccaaaaaaacattgaactatgaattcatagtttgttattgttagtattagtggtggtggtggtggtgtgtgtgtttccctgtattttagatgtctcctgtctcagagaaacgacagctgtcttctccaaagantgtttaagcacaaacaggacattttgctcattcattgttgtttgtcacacaaagaagttgcttttgtattttgtggtactgcactattaaggctgaatttcttttcaaataaaaatctgactcaagggagtgaacagctccatgctctaagcagggttaaccactgttttcaaaagctctggcagggagatggaagcttggaggtaaattgaaagatatagtttaccaaatgcttgggcaaacctcactgagaaggacataaatggatggtagctccaggagttgtaagcagaagaggcagtagtgacattggggttggtcttttcactg

SEQ ID NO: 750 - DNA, 661 bp, Homo sapiens
  LOC388927
  misc_feature [331]..[331]: Chromosome 2, SNP identification no. = rs11694012
  misc_feature [331]..[331]: allele = g, in linkage disequilibrium with rs11694107, respectively
  misc_feature [331]..[331]: n is a, t, c or g
aaagattgtttaagcacaaacaggacattttgctcattcattgttgtttgtcacacaaagaagttgcttttgtattttgtggtactgcactattaaggctgaatttcttttcaaataaaaatctgactcaagggagtgaacagctccatgctctaagcagggttaaccactgttttcaaaagctctggcagggagatggaagcttggaggtaaattgaaagatatagtttaccaaatgcttgggcaaacctcactgagaaggacataaatggatggtagctccaggagttgtaagcagaagaggcagtagtgacattggggttggtctttncactgcatcaaagtgcacccatctctctccagtaagtctgggatacagctggccagaggcacattaagatcacgtgcaaaagcagaaaaacaggaactgaaaaccaagttcaacaaaagagggagaaataaatgaaggaaccaggactgagtaccacgtttggctctgagatttactagaaggtaacctcagaaagaaatgaaacgtggtaaattacttagtccttattatcaaaaaggatgaggtcaacctaggtctttcttggcattacctatactataaatttctcaaatgagactttttacacagggggcaatgaacaataagcct

SEQ ID NO: 751 - DNA, 661 bp, Homo sapiens
  LOC388927
  misc_feature [331]..[331]: Chromosome 2, SNP identification no. = rs4480951
  misc_feature [331]..[331]: allele = c, in linkage disequilibrium with rs11694107, respectively
  misc_feature [331]..[331]: n is a, t, c or g
tggagaggctttaagttttagaacttgtacaaagcttctgcgccttgtggtggtgatggtggtggtggcatgtgtgtgtgtttctgagagagaactactcctctggccacctatttagtgagtgaaaatatctcagccttgcaagcaactgcctagaatgtttgattcaacctctactccaatactttctatcccaatgaaaattatagctataacatctttgccagctgattgtacagctctcatcaaaccattcctgtgttaaagtgggccctgcctttcatgtagcccatgaaattgcacctcattctcactgttggacgttctttcntgaatctagctaaaactacctgcttgcctcctggaatctcacttatataggcatgcatctacacaaagtgaatgagaaggccaaattaactgttactcattcagacataaaatcttcctgattcttcactcagatgcaagggctatcttggtcaaaataccctcaattatctgtataatttgtgtccagattccatcttctcctttattctatagatcacaaaatctcatctcactgacttctcatgagggtggcccaggcccggactggactaggtgacttctaccaagttatatggctgtgaatgttagagtcagaggaaattttaaa

SEQ ID NO: 752 - DNA, 661 bp, Homo sapiens
  misc_feature [331]..[331]: Chromosome 2, SNP identification no. = rs163507
  misc_feature [331]..[331]: allele = g, in linkage disequilibrium with rs163503, respectively
  misc_feature [331]..[331]: n is a, t, c or g
ttttaaattcaccatttctgaaagactcaggattaatgtcaaactgtatgaaaagacccagcctttcacctttctttctcttgaccatagaatgcgggtctagtagggggagagcaaagggggcactttagaagaattgtgaagcaagcacagacagggtcacagagagccctggtatagcagaggtccacccccaccctggtgtcctcatacacattatcgcactaaggaactaggcagaactctaagaagggctggtgaaggagagaagacacggggactcagcacattggctgtgctgacatatgtgagcctgagttggaagatggcntgaattaagactgaagccaagaccccctccctcaaaaacagcacttatagatgttagagggcagaaaggcaaagtcagaggaagcctaaggttaagtgagtacgtaccctgcaccgggcactatccaaggtactttacatgaattcttaaagagcttctgagatataaatattattataaaacccatttgactaatggaaacctgagggtcagagaggttaaataatgcactaaatgacatacttgaggtcaccgagatagagagtggcatattcagaatcggaaactaaatctgtaatacctcccaggctcatgttccttttatgccac

SEQ ID NO: 753 - DNA, 661 bp, Homo sapiens
  misc_feature [331]..[331]: Chromosome 2, SNP identification no. = rs163503
  misc_feature [331]..[331]: allele = a, g
  misc_feature [331]..[331]: n is a, t, c or g
taggaagttctgcgcaagtggaaggtgggagctgccattggcaggaactgggagagttgagggtgagagtgaggcatgtttggggtaggaacaggagcaatcaggatttcaggttggacatgttgagtctgagcatctgtgaaacattcagatagagaggttaagtgggcagttgggcctatgagtaggagctcgggagaggtggacaggttcgagttttcggcagattttatagagatgatgtttaaggccacagagtgggatgacctcactaagggagagtggagaaggagaaaagaaaaggaaaaaggccagaaccctgggcactccnactgttatgggctggggagaagagagacgaggaagagccagcaaaacaagctgatgcgtgaccggggacacaggaggaaaaccaagagagtgttgtccaggaagtcaacgcagcacaggaaggcagagggctgccatgatgaacatacaggaatgcaagtgcaggtctgaacagggcttggacatatgaacaactcagcaagtgatagctatttttttttttttttttttgagacagtgtcttgctctgtcacccaagctggagtgcagtggtacaatcatgattcactgcagtctttacctcctgggctcaagcaatcctcctgtttca

SEQ ID NO: 754 - DNA, 661 bp, Homo sapiens
  FSHR
  misc_feature [331]..[331]: Chromosome 2, SNP identification no. = rs3788981
  misc_feature [331]..[331]: allele = a, in linkage disequilibrium with rs10865238, respectively
  misc_feature [331]..[331]: n is a, t, c or g
ctcctaccttcatttttcctcgttgcctctgcactctgcaagtgatgttcaccctccctctccccattactttcatgcttcttcctttcttctctttccacttggtctagttgggaagaacccacagacattatcagagaaatgaaccaaagggcagccagccctctgggcaaggtcaagcaggcatcccttgaaacatttcaatggacagtgaaggtagtggtttgggtctttcatctcttccttgcataaagaggtgctcacctccatgtagcactgactgtacttaaaatgattaattgcctggtacttagatctgggtagctacagnttacagcaacataaaagctaatgaaacagggaggaagtaactaacagagagcatgtctacaaatacacattgatccagcaagacaaggaaagggcaggctgtctgtgttggaatccaaatgtgaacatgctcacttccagactgttgatcaagacacagcacaagccaaaatagggcagaagtcacccctttccatgagctctgagtgagcagcctcagtctactgcataaagggaatcaatggccattcccagctactgtatgcttggatttcatgcttaaaagcaaaaagatatcgattgtttttctcccaactttctttttctttgc

SEQ ID NO: 755 - DNA, 661 bp, Homo sapiens
  FSHR
  misc_feature [331]..[331]: Chromosome 2, SNP identification no. = rs2349415
  misc_feature [331]..[331]: allele = t, in linkage disequilibrium with rs10865238, respectively
  misc_feature [331]..[331]: n is a, t, c or g
gaaggctgtggctcaccttggagattatccagtctatagttgtagaaagtgaggtccaggaaggaagagatttgcttaaagatatttagggaatatacaggatgagaacaaaatttaagttccctagaccacgggtcagtaaacattttttttttttttttacagggctagatagtaaatacttttttgcccttgctgtggtatttggtctctatcacaactgcccaattgacattgtagcccaaatgtaaccaaaggtaacacatgaatgaattagcctgtgttccaataaaactttattcataaaaacaggtgtcaggctggatttganccattggctgtagttcagtgacactgtcctagatcgtggagttgttttctctctgctaatctggctttgagagatgagaacttcaatccagtctcttttaaaatacacatatgtttgttggccccattaatgtctaacgtaggaacagaaagccaaacaccgcatattctcacttataagtgggagctaaacaatgagaacacatgaacacagggaggggaacaacacacactggggcctgtcagggggtaggattgagggagggagagcattaggaaaaatagctaatgcatgctgggcttaatacctaggtgatgggttgataggtgc

SEQ ID NO: 756 - DNA, 661 bp, Homo sapiens
  FSHR
  misc_feature [331]..[331]: Chromosome 2, SNP identification no. = rs9807991
  misc_feature [331]..[331]: allele = a, in linkage disequilibrium with rs10865238, respectively
  misc_feature [331]..[331]: n is a, t, c or g
gtacttttggaggctgagatgggtggatcacctgaggtcaggagtttgagaccagcctgagcaacatggtgaagcctgacctctactaaaaatacaaaattagtcatgcgtggtggtgcatgcctgtgctcccagctactcaggaggttgaggcaggagaatcacttgaacctgggaggagtttgcagtgagccgagactgtgcctaaactccagattttggtgagtaaataatatatccctgaaatgaataaaataaacaataaaaataaaagaataagaaatcaaaaacagaaacttctttttcactttctttctgatagaggagatanagtccccctctgggtctttcccatcttgtccctcctcccctgcctttctcttcacagagcatttttctccaatatatccaaaatatttctccctaactcagtaaattaagagactcaactgcattaaaatatttgtaatagtcactgaatcaaatttttcttttgttgttaataagctcaaactaaattcagttgactgttttccttccctgagtccccagtggttgaggatttccatagaccctctgttactgccccttgcatattgcattgggtttgcattctgctttgtttccctcactaggctaagaactgctggaggacagtgac

SEQ ID NO: 757 - DNA, 661 bp, Homo sapiens
  FSHR
  misc_feature [331]..[331]: Chromosome 2, SNP identification no. = rs10171892
  misc_feature [331]..[331]: allele = a, in linkage disequilibrium with rs10865238, respectively
  misc_feature [331]..[331]: n is a, t, c or g
cctttttgataccgtacctgtaacaaatggcttccccaaatggcttttctcctgcttccagcctctgttttcactctgtaatttataattactctattttttatgcccctccattttatacctctttaaatcttatcttggcttgaaagagcttcctttatgagccacagtgaaggagcaacaaggagctcacatttggctgcttttgtatttgagtcacactgatggtcttattttatcccttggaagccttgaatgtagcacccttatgagtgccctgcatgcaaagctgttatccatcctgccctttgcaacaattcagaaatttacnggtctgtattctctgactccatatttaactggttttatatccatttttgaacagtagttatcccccattctacccccaaattataggcaaaagccctactcctgcacctcctttgtctcctattggtcctgagactgtccgtgtttttacagtgaagggacctgcaaggtcaggaaaaggaaatggtttttaaatgcttcctattttatgagactaccaatgcctagagaaaaacgccatcattctagggaggaataagaagactggattattttttaacatgagtctttcatgttagtgatccagccagttaggccacccaagatattg

SEQ ID NO: 758 - DNA, 661 bp, Homo sapiens
  FSHR
  misc_feature [331]..[331]: Chromosome 2, SNP identification no. = rs10865238
  misc_feature [331]..[331]: allele = a, g
  misc_feature [331]..[331]: n is a, t, c or g
tttgctgtttctgaaaagagacagcaagcctttttgcttagcctagcttctgagggtgacatgtcagggagctcctcctgccatacagaaatcatgaattatactagaaaatggaaattgtaattaggatgggcaggactgagaccctgtcttccttccagatacgtgcatatctattttaagatttccaagctgtatgaagaattattttagtcttcatgttatttgattgatggtcctagaggattttattttactatttctagattattctgaggaaggcccaagataggtcttgggtctttcaattctggaattggaagggaatccnaggagatctataccaggcaatgcattatttccttgagattatccccttgacatccttacctgaaaggaagaagacagactctctcagccttagggaacttccttcctttctcagcatcagacatttaaagaagtgaaaaaaaaaaagaaagcacactgaagaaatggtgcaatgatagtagcctaaagtaccttaaccaggctgggcacaatggctcatgccttttatcttagcatgttgggaggccaaggcaagcagattgcttgagcctaggagtttgagaccagcctggcaacatggtgggactgtgtctataagaaatacaaaaac

SEQ ID NO: 759 - DNA, 661 bp, Homo sapiens
  FSHR
  misc_feature [331]..[331]: Chromosome 2, SNP identification no. = rs12614817
  misc_feature [331]..[331]: allele = g, in linkage disequilibrium with rs10865238, respectively
  misc_feature [331]..[331]: n is a, t, c or g
tgacatagatctaactcccacgtctttcaactgctttggcaccaaagatctggacagcaacatttaggggttgcttatattctggtttatactctgttttacgtgaattccaatttctgtaactacattataaatttcttcggggttagaaccaaatcctatctgttcttttagctcctaatatggaagactggcagcgatgaatggatagctagattgataaaaacagcttaggagctactagtaagaatgaatatgagaatataagtgatatgctgtttttttctgattatataaagtcataaacagctgggggaaactcacattttcngttggtgaggagcacctattttgtttattactgtttcttccaggaaccctctcgccttcccaccttccctggttccttttatacaccacacttaaaattggaggcataaccttgttcaagcatgtgcaaaacgggaacatggtaatgaactcttattgctgctataaacttgatgaatggcttgtggaggaagggcattaaatggcaatctcagtccagtgattagctctgcagcattcctcctttggaactcatgcagaccagcacagatttcattctgctctaggtttcctgtgggctccatcaggtgtgcagaaatgctactgggcc

SEQ ID NO: 760 - DNA, 661 bp, Homo sapiens
  FSHR
  misc_feature [331]..[331]: Chromosome 2, SNP identification no. = rs3850344
  misc_feature [331]..[331]: allele = t, in linkage disequilibrium with rs10865238, respectively
  misc_feature [331]..[331]: n is a, t, c or g
ctgtgcactttctccatatagtgttttgttttgtgccatgttgcctgtcatctattaaaagaaattagatcttgagagtcttatagtcatgtcagtacaaaatagtaagtgtgtccaagtctgaagaaaacaataacccttaaatttctgccaagtatgtaaccttcatatgcacatgtttttgctcaatatttctcatacttcccactcagcgttgagcacttggcactggggaaaaaaaggatgttttagaagcggatggatgtctaatccaagcagtaaaaatccaagtgcaaagctggccttttccacgccaaagagaaaatgctcnaataaggtgtatccattaataaaaattgacccaagctgtcccggcaaaacatttttttaaagaaaatttcctaagtcaactagacttattggctttcttttttcttgtttttgcctacctctgtctgccttcccttgaaattaacattctagtgacatgtagattcaaccagaacctcttagccaagatttcatctctgcaagagaggatttttcttttagttaaattcaatgagcatttcatgagttcctgttcaatgtctcctacataaagcacttcaaaatttaatgtgcatacaaatcactgaggatctaactactgtggagagtc

SEQ ID NO: 761 - DNA, 661 bp, Homo sapiens
  FSHR
  misc_feature [331]..[331]: Chromosome 2, SNP identification no. = rs6716567
  misc_feature [331]..[331]: allele = g, in linkage disequilibrium with rs10865238, respectively
  misc_feature [331]..[331]: n is a, t, c or g
gggagattaatgagctaaggggtatatgaggcattttgaaattataaaataggatagccacatgaagatattcatactactactacaaattaaatggatgataactctgaatttgtgtttatgtacgtcctacttctctccattagggagcaaggttatcattgtcctacatcttatattatctgggctacacttttgcattcataaatatctcagaatagtagattaatgcatgaactttggagtaagaatgcctggatttaattcctggcttcatcacttatcaactgtgtgctgatgggcaagtcacataaccactttggcttcaacnttctcactataaaattagaatgatagtaagattcttatgatcagataagacaatgcatataaagtggcttagctcagtttctggcaaaataatcacacaacaaatggcagctgtgattaatgttgttgttaagcaatatgagaactccttgagtgcagggactgtgtatcttcatctttattgctcacagcatctatcagtgactaccaggtaagtttcatcaaatcatgtcctcatctaattagcacacattttgtagctcaagaagaatttgttgaatcattgattggtggacggattatgcttctcttagttggcttggtctctctt

SEQ ID NO: 762 - DNA, 661 bp, Homo sapiens
  FSHR
  misc_feature [331]..[331]: Chromosome 2, SNP identification no. = rs11125197
  misc_feature [331]..[331]: allele = c, in linkage disequilibrium with rs10865238, respectively
  misc_feature [331]..[331]: n is a, t, c or g
agcttatttattattattttttgagatggaatcttgctttgttgtccaggctggagtgcaatggcacaatctcagctcacggcaaactccgcctcccaggttcaagtgagtctcctgcctcagcctcccaagtaattgggtttacaggtgcccaccaccatacccagctattttattttttctgaatttttagtagagatgggctttcatcatgttggccaggctggtctcaaactcctgacctcaagtgatctgccagtcacagcctcccaaaatgctgggattacagatgtgagccatcgtggccagcctgtatagcttaaattgatanaatttttatatgtcaatcatacctcaagaagactggaaagaaaaagttgaggatgataaaaaaaaagtaaaataaataaaaagtggttttcttatagaaaaaaaacctggggctctgaaaagttgggaaaggaatcaagaggtagagactgcaaattaataaacatcacctgccattatcattccagtgtgcctaactctgtgctaggtgctttcgaggaatatgggaagagggaaagggcaggattagtagtcagcgtgtagtcagtcaagctgagacactataaatgggaaacagagcaaacatgctgtccttattattcataccttg

SEQ ID NO: 763 - DNA, 661 bp, Homo sapiens
  FSHR
  misc_feature [331]..[331]: Chromosome 2, SNP identification no. = rs11125198
  misc_feature [331]..[331]: allele = c, in linkage disequilibrium with rs10865238, respectively
  misc_feature [331]..[331]: n is a, t, c or g
tgagtctcctgcctcagcctcccaagtaattgggtttacaggtgcccaccaccatacccagctattttattttttctgaatttttagtagagatgggctttcatcatgttggccaggctggtctcaaactcctgacctcaagtgatctgccagtcacagcctcccaaaatgctgggattacagatgtgagccatcgtggccagcctgtatagcttaaattgatacaatttttatatgtcaatcatacctcaagaagactggaaagaaaaagttgaggatgataaaaaaaaagtaaaataaataaaaagtggttttcttatagaaaaaaaanctggggctctgaaaagttgggaaaggaatcaagaggtagagactgcaaattaataaacatcacctgccattatcattccagtgtgcctaactctgtgctaggtgctttcgaggaatatgggaagagggaaagggcaggattagtagtcagcgtgtagtcagtcaagctgagacactataaatgggaaacagagcaaacatgctgtccttattattcataccttgcatttgcactcacttttaacttttcaaagcatgctcacgtccaagtgcatattacgtgtttataaaacatttggcataaacaattgctatctctctgcccagactc

SEQ ID NO: 764 - DNA, 661 bp, Homo sapiens
  FSHR
  misc_feature [331]..[331]: Chromosome 2, SNP identification no. = rs3913665
  misc_feature [331]..[331]: allele = a, in linkage disequilibrium with rs10865238, respectively
  misc_feature [331]..[331]: n is a, t, c or g
ccaggtgctaagatatgacagaggttactcaaggcatttctgacttgctatcaaacgcaatcttcttccattttctaatcaacagccaagtgaggtcatcttatctatcttttacaacttctgcttcagcaacactttccctttggactctccttgacaaagcaagctgtgtgtgagaccttccagtgaattatatttgtcagtgctcagagatataccagaaaatgaattggccttttttttttcctccttgctggtaactcaatgtttttgtctatccagtgaagatacaattaaggcagcataatactcgagttaaaaatatccttgnggctctgctctggggatttttctagcttttttttttaatagatggtgttaaaataaaaagaagcaatctaaaggtaagctgcaatcaatgcatgaactatttatttttatttcctcatttagcccatgcccatcacaaccacatccatctgggctgtgtatgacttaataagatgctttaaacagtaaaagattcaaatagaatatggaccctcttgcctgtccaccttccaacaaataaattacctgaatcttacacttcataaacctcccctgcagtgctcagattcaccctggccagcctacacagcaatcaaatgaccaaagatgt

SEQ ID NO: 765 - DNA, 661 bp, Homo sapiens
  FSHR
  misc_feature [331]..[331]: Chromosome 2, SNP identification no. = rs1504175
  misc_feature [331]..[331]: allele = g, in linkage disequilibrium with rs10865238, respectively
  misc_feature [331]..[331]: n is a, t, c or g
gaggtttccttcactctgtgactataggagtagagaatcactctaggttctggtttgtggcagttccaagggcttaggcacagacatcctctcctctgataataaatgtcaccaaaggaagctaatagctttaattttcctgtcaatccctcttttaccttagcaggaacatgtgggaaaatggtagattccaactaaaagaagccttgtgtagcagaaaggaccagactaccttgggtttaaatcctagcttcaccacataaggatactctgatgttgcttggtttcttaccttttgtgaatgtcagtatccctgtctatacagtgtganttaactgagatgtagtatttaaaacacctgtcccagaataggtgtggaataattgctgattttaaaaatcaactttgttgaagtataatttgacaaataataaaatgcattcattttaactcttccacctgttactactaccacaatcaagatataaaatatcttcaccacgttaaaaaagtttccttgtctgccttcccagacaatccctaacaccaccctgggaaccaggcaactaatctttctgttaccatagattagattttcttcttttttgaggttcatataaatagaatcatatggtataccttctgtgtctggcttctttgc

SEQ ID NO: 766 - DNA, 661 bp, Homo sapiens
  FSHR
  misc_feature [331]..[331]: Chromosome 2, SNP identification no. = rs2134811
  misc_feature [331]..[331]: allele = g, in linkage disequilibrium with rs10865238, respectively
  misc_feature [331]..[331]: n is a, t, c or g
ttcagatattttgcccattttaaattagattgtgtgtctacttattttttacttctttatatatagaaagatatgttcttgatacaagtcctttttcagatatatgtattgcagatattttctctcattatgtgatttggttgtcattttcttgatggtgtctttttttactttttttattgtcttttgaaaagcagaagttttttcttttaatgaagtccaaaataacacttttattttatgcttaatgtgttctacttaaggaatctttgcctatcccctgattgtaaaatatttttctcctaacagttttaaaattttagtttttgcntttaagtcaattatccacttaaagttaaattttgtgtataacatgaggtaagggttgggatttattgtttttccaatatggatacaaagttgattcagcatcatttgtggaaaaaaactattctttccgtattgaattctagaaaacaaacacttttgggatatagatgatgagagaacatttcccaactcattttataatacaggtagaacaaaatcaaacaaagaaacgacaagaaaataaatatacagactaatattgctacaaatatagataaaacattttaaacaaaatattagcaaatcaaaatttgtgtgtatggacaatttt

SEQ ID NO: 767 - DNA, 661 bp, Homo sapiens
  FSHR
  misc_feature [331]..[331]: Chromosome 2, SNP identification no. = rs13032266
  misc_feature [331]..[331]: allele = g, in linkage disequilibrium with rs10865238, respectively
  misc_feature [331]..[331]: n is a, t, c or g
caaagaaacgacaagaaaataaatatacagactaatattgctacaaatatagataaaacattttaaacaaaatattagcaaatcaaaatttgtgtgtatggacaatttttaacaaatgcaaatcagattatgtcactttgttgctcaaaacaccccatttaatcccaatcacactaaatatgacacccaaatacatccccatggtctatcaggtactaatatgacctcactcccagcttcctctttgatcttatgtcctgccaacctcctctttgttttattcttctttagctacaacatgtagatgatacactttacatactcatgaatnttctttgtacaaattggattctgactaaactatcatctacctcagtggctttcaattttagatgtacattagaatcatcaagggagctttaaaaaatgattaatgcttagacctcgtcctggaaaaatggaataaaaatatctggaagtgatacttgggtgtgtacattatttttaaagttctccaggggattctaaagtgcagtctaagaagagaaccactcaacgtcatttccttgttattcccagggactcaaatcccctcttcccattcagagatctaaccagtctaacactggcctttcatttttcaccaggagccagtagaatc

SEQ ID NO: 768 - DNA, 661 bp, Homo sapiens
  FSHR
  misc_feature [331]..[331]: Chromosome 2, SNP identification no. = rs11689714
  misc_feature [331]..[331]: allele = c, in linkage disequilibrium with rs10865238, respectively
  misc_feature [331]..[331]: n is a, t, c or g
aaatggccaaaaaatagaaccctagaatacctaaatttttgaagggcagttgaagaacaagagagatgaagagaactggatatggagcaatctgggaggttaatagggaggcaggagagtgtggtatcccagaagttaagtggggaaagggcattgagaagaatgacattaatggttaatgaaatttaaagactacatataaggtaagtagaagaggataaagtagaattcactggatcttgtaactgtggtatttttgagatctttgatagaataatttaatagtgttgaagaatttttgtccaaatagcaagtgggcaggctaagaagngattgaaaagaaaggatagagaggcagtgaatgtaggcaactctttcaacacagtggtcttgatggggaagagagaagaagggagcagaataggaaggtggaatttatacagaatacttttcttttattctttccaacatggataggtgaaagttggtcacatgtgcagaatgaatgaaaaggactttgtgatttgtggagggggagatactgaagaaaaggccaatatttattaagttcaggaaactgattaacaactggaagaacacaagtgaaggagataggtctggaaaggagatgagaatttcttggtgaccaagagtgtaaggt

SEQ ID NO: 769 - DNA, 661 bp, Homo sapiens
  FSHR
  misc_feature [331]..[331]: Chromosome 2, SNP identification no. = rs12052611
  misc_feature [331]..[331]: allele = c, in linkage disequilibrium with rs10865238, respectively
  misc_feature [331]..[331]: n is a, t, c or g
cagtgatatatttcatgttactctaagaatgagatatgtgtcttgatttttgacagttcctaatttgacagtagctattgatctaaaaaataaatattcctgttaaaaggggtctttgcactaatgtaagcctgaaaaatgatagtggagagctgagtcactgctagtgatgatgcagatttacatagtctgcaccaggcttttctaatcccgaactgtgtgtgcaaagcgtgtacattctagctagcagggacgctgaccactcgaaaaagacttaccagtggctaaaaggcaaaaagaccaggaaaaatgaactaacatttattgaagncctatcatgtacaggcattttccagggttgtttatcacatgatcttgcttttagttctcactacagtgaaacaaagcaagttttttcttttttaactaacatacagtaaaatcgagtgtgtgtgtgtgtgtgtgtgtgtgtgtgcatgtgtgtgtgtaaaattctatgagtttgaacatgtgcatagattcatgtaaccaccacaatcgggatatggaacagctccatcaccacaaaactcccttggactgacattttgaggaaacactgtccctccacttttaactgctagtaatgaccaatctgttctctgttactataactttgtct

SEQ ID NO: 770 - DNA, 661 bp, Homo sapiens
  FSHR
  misc_feature [331]..[331]: Chromosome 2, SNP identification no. = rs974894
  misc_feature [331]..[331]: allele = c, in linkage disequilibrium with rs10865238, respectively
  misc_feature [331]..[331]: n is a, t, c or g
agatcctctcttctgtagaaattaaaggattgtaaataaactcaggctcacatcaaaaagtggcactggcaaatctctcacaacacagtcagtcataagacaagatttagaaacaaacgtaaggcctatttcaggtagaactacagaggcctcctctgcttgtcttcttccaagccaagaactcagaatttgccttgcagaaccccttgtgcatagttgtgatcctcagcacagatctaggggcagggggcagccaataactgacatccaaggatgtcaaagggcacattctgagatggcatccctacagaaccgatggcctgcctctaanggctggctcattggtacagtgaggacctatccctatcttttaaattgagggcaaaaatggcaggaaagagaggggaaaagtctctaaagagtgtatctgattctcttggccttactggaataacctacataagggtcagggttttcctctcatgatgttcagggataagaaagactacagtcatgactctatctatgccctggatgaaatttgggataaagacagatcattttattgcattgtgaatagaggacaacaggtgctttgtttggttttcttttagtgtgccttgctgccccattggttttccccaaagctcaaatgtcatgg

SEQ ID NO: 771 - DNA, 661 bp, Homo sapiens
  FSHR
  misc_feature [331]..[331]: Chromosome 2, SNP identification no. = rs4510264
  misc_feature [331]..[331]: allele = a, in linkage disequilibrium with rs10865238, respectively
  misc_feature [331]..[331]: n is a, t, c or g
aggtgagggttccaaggaagcttactttaagtttcttaatgccttagaaagtcaggcccctccccttttgtgcttaaaaaacaaaggttggcaattaaacttcaagagtcgtgaggctgggcaaaaataaatggaaaagatttaaatgagaaaaacaactaagtttctgctttctcagaaagatcaggctctgcaagctgattctcatcaatgtgccctgttggctctcatttcccaaaggcccatcccagtctccacattgatacattcagtctttcaggacaaagcagtgctgtctttgtgagccgtgctctactgccagctgcctgcnagctgccccactcaaggccactgagcagacaaacaaagctttaggaagaggtgcatctggatgttttgacctctctccaccatgtgaggctggctgtatgttccaagttgatggaagttgaagaacactgactcagacaagagtttcatggcaaggtgagggttctcctcatccctcccaatcagcaagctagaccttactcccaaaagcaaactgggcagtcataagaaaatcactcaatccctctggatctcagttttctcctctgtaaaatgggcatatgactatctgctctgccttctgagcagcttattaggaaggccaaaggag

SEQ ID NO: 772 - DNA, 661 bp, Homo sapiens
  FSHR
  misc_feature [331]..[331]: Chromosome 2, SNP identification no. = rs924819
  misc_feature [331]..[331]: allele = a, in linkage disequilibrium with rs10865238, respectively
  misc_feature [331]..[331]: n is a, t, c or g
gcccctccccttttgtgcttaaaaaacaaaggttggcaattaaacttcaagagtcgtgaggctgggcaaaaataaatggaaaagatttaaatgagaaaaacaactaagtttctgctttctcagaaagatcaggctctgcaagctgattctcatcaatgtgccctgttggctctcatttcccaaaggcccatcccagtctccacattgatacattcagtctttcaggacaaagcagtgctgtctttgtgagccgtgctctactgccagctgcctgcaagctgccccactcaaggccactgagcagacaaacaaagctttaggaagaggtgcntctggatgttttgacctctctccaccatgtgaggctggctgtatgttccaagttgatggaagttgaagaacactgactcagacaagagtttcatggcaaggtgagggttctcctcatccctcccaatcagcaagctagaccttactcccaaaagcaaactgggcagtcataagaaaatcactcaatccctctggatctcagttttctcctctgtaaaatgggcatatgactatctgctctgccttctgagcagcttattaggaaggccaaaggagggaatatttaagaggtattagggacaactttcaagtgcaatgtcaggagtatgaa

SEQ ID NO: 773 - DNA, 661 bp, Homo sapiens
  misc_feature [331]..[331]: Chromosome 2, SNP identification no. = rs1032838
  misc_feature [331]..[331]: allele = a, in linkage disequilibrium with rs10865238, respectively
  misc_feature [331]..[331]: n is a, t, c or g
atggccacccagtagattttaactgctttgagagaaggggccgtgttttatttacctttgtgtctctaattccaagcatgtgtctggcacatttatcatataaatggtaaatgtaactggaaagccccccttattttcttcctaaaatgggtactaaatgtttcatgaataacttttttttgaaaatccatctttctcctagttttctcttccagaggggctccccaaggaagccttagaggttcttcaaactaatcttagtagtcacttgttatcctgtccaccaactcagctctaaagcattgttttcccccaatgccacattatcacnttatcttataattcatttctcctggctgctggtgggcacagtctcctcttcaaaagtacagctaaggccagattcatttatggattgctgatgaagtaatagaagcaccaccccaagtataatgtgcattgtcgcagcagtggctgcttctgcaacccacagacactaatctgtgagcctgagaatgttttatttcctcttcaatatgaacttccatttgtttcaagggaactctagaaaagtcagtggcaatagtcaacaatatattttcccaagtctacagtattcttatttaaataatgccatataaggagcattaattattaaact

SEQ ID NO: 774 - DNA, 661 bp, Homo sapiens
  misc_feature [331]..[331]: Chromosome 2, SNP identification no. = rs11125217
  misc_feature [331]..[331]: allele = a, in linkage disequilibrium with rs10865238, respectively
  misc_feature [331]..[331]: n is a, t, c or g
attttttactattttgaatgtgcctatggaaatttttaagtttcttttgtggcttgtattaaatttttattggacagtgctgctttagggtatggataatatattcttaggagtggaacttctgaatctgagggtaatgtaaatcagtcttacaagatgaggttaattttatttccaaatggttgtactaatttgaattctcattactagtgtataatcctcattgctccacattcctttcatacttggtattatctgattcttaaatttttgtcatattggtgattgcagattgaatttcatttgtcttattttgaagttctctgattancatttcaggtaaatttttttcccacatattccttagtcatttgtttttcttcttctggaaaatggttgttaatatattttgaccatttttatgtggggttttggccttttacttgttgagtttttgcaggtattttaaaatggaatatttgttctaatattcctcatagtttatggctcatattttcattttcttcctggaatattttgatgagcagaagttctttttttgtcatttttttaattatagtttaagttctgaggtacatgtgaagaatgtgtaggtttgttacataggtatacacatgccatgggggtttgctgcacccat

SEQ ID NO: 775 - DNA, 661 bp, Homo sapiens
  misc_feature [331]..[331]: Chromosome 2, SNP identification no. = rs11685850
  misc_feature [331]..[331]: allele = t, in linkage disequilibrium with rs10865238, respectively
  misc_feature [331]..[331]: n is a, t, c or g
tgtctcttttctttgttttttagcccccaaatggttattataatactcagtttcattgtgtttccttccctatctcatcagtaaggagtttgcagagggagtctctggagtcaagataaataggagactgggagttctataaggctaaacatacattatgtgaaagttgtggatgttagatatgaggtcctcaaaaacaaatctgttcatgcctgctttgtctagctcagcaaagagttgtggactattgttgaggggttggtctactctgatgtcctcttttctctggaaattgttctttctccactatattctgtgatcctagtaggantttctatcatagcacccagtctcactggccattgggatagacatgtgaccaagaccagcaatttccttatagtatccatagtgcctggcttaactgcctctgcatttatgaacggaaaactacgaactgaggtttggctctcctgtcttagaagacatcactgtctacagaaggagggaataaaatcagagaaggtaggtttaagagctggatgtacaagtaaatgatcatatcagcatcaacttcttaggctagttctcattggtcccagagcttcccttcttcccttagtgacacttttgtttctgtgagcccatccagtctaatggg

SEQ ID NO: 776 - DNA, 661 bp, Homo sapiens
  misc_feature [331]..[331]: Chromosome 2, SNP identification no. = rs9309160
  misc_feature [331]..[331]: allele = c, in linkage disequilibrium with rs10865238, respectively
  misc_feature [331]..[331]: n is a, t, c or g
gtggatgttagatatgaggtcctcaaaaacaaatctgttcatgcctgctttgtctagctcagcaaagagttgtggactattgttgaggggttggtctactctgatgtcctcttttctctggaaattgttctttctccactatattctgtgatcctagtaggattttctatcatagcacccagtctcactggccattgggatagacatgtgaccaagaccagcaatttccttatagtatccatagtgcctggcttaactgcctctgcatttatgaacggaaaactacgaactgaggtttggctctcctgtcttagaagacatcactgtctanagaaggagggaataaaatcagagaaggtaggtttaagagctggatgtacaagtaaatgatcatatcagcatcaacttcttaggctagttctcattggtcccagagcttcccttcttcccttagtgacacttttgtttctgtgagcccatccagtctaatgggacaataaggcccttttagtgtgagccactttctgttgagtttctgttacataatatacattcctgaaaaaatagaaatcactcattagaagtagggtgtcatcaggccctagaattcggaattgtttgactttgggtggtgtatgattgacaggattgccttcttgtg

SEQ ID NO: 777 - DNA, 661 bp, Homo sapiens
  misc_feature [331]..[331]: Chromosome 2, SNP identification no. = rs4564810
  misc_feature [331]..[331]: allele = t, in linkage disequilibrium with rs10865238, respectively
  misc_feature [331]..[331]: n is a, t, c or g
tgtatacatagcaagtacagcaatcatctaatgataatcttattattggaacagtgcctggcacatagcaagtgttccatacacattgttgaagaataaatgaatgaattaattaatgctggtctatatcggtcaccaggtgaggcagtgttggaatgtggtgatagcagtgaggagagattataaacccaccaaatcatgcttaggatgtgggagaataaccccaatcttagtctgtttggtaggggtgaggggtgaggttaagatcagagcaagatgagggttatcaaaagcagggagtgtgggtgagtgagatgttttgggagaaccnggattaaaaacacccagaagaaaaaagaaccattaaaatacaggacttgaggtgacccagcatctggagcagctttcaggacctttggcctttttcagaagtcagactgctccttaccaaggtctcagttcctctagatgagttgagtctcaagagtattctcccctccacagaagagcccactgactggaagtatggaaaaactgctacctgaatataaacaaaacaccctcgttacaattagacagtgatatgcccaagtacacaataccctttatcccagtacaatcaggaatatggatttccaccccagaatgggttccagttcct

SEQ ID NO: 778 - DNA, 661 bp, Homo sapiens
  misc_feature [331]..[331]: Chromosome 2, SNP identification no. = rs11125222
  misc_feature [331]..[331]: allele = t, in linkage disequilibrium with rs10865238, respectively
  misc_feature [331]..[331]: n is a, t, c or g
gatggtaaccatgggtgcaacaagaattggaagaaaggctcaaacaagagcttcagtagatcctgtttgctgccatagctgatctcatatctgtttagcattgcagtgtatccaaatgctggcctcagccttcctgacctttcttcatgttctattgcaatactcttacttgcttccttcaggttgttctctctcatccttgcacttcttcctcagttctggttacgtacctgtcttggctcaggctatcaccatcacttggaaatatattctcaagaatgtaagctcttatgatctatgaaactttttcaggttcccaagtcccaggacntttctatattcatcggactcctttaaagtactctttattttgcacagtttaataattagaatcataagatgtgagagttgaaggggtccttacagaccatatctagccatctcctttcatttgtcagatgagacaactgagctttggtgacagggtgttactcacgttagatcgtatgcttggaatatatgttaacatgtttgtttataaactgaaagttgctatagaaatagtagttagtactctttgagtggcagagcggcatctagaagccaagtcccctgactcctttctgcactatctgttatatcaagctgcctctactaaatt

SEQ ID NO: 779 - DNA, 661 bp, Homo sapiens
  misc_feature [331]..[331]: Chromosome 2, SNP identification no. = rs1876087
  misc_feature [331]..[331]: allele = c, in linkage disequilibrium with rs10490155, respectively
  misc_feature [331]..[331]: n is a, t, c or g
gggaagctgacgaatgaggattgcttgaacctagaagttcaagagtagcctggtcaacaaagggcaatcctgtctcaaaacaacaacaacaaaatgtatattattaactagtttattcatacatagggattaatacgatcaatattagctataggaaacgttgggtaaagtgacctcaggggttggtacttggaaaagatgtgttgtattaaaaaaaatctgaaacaatgtaaatgttagaaaaaggctcatcattttagggactcctaagtgttttgaaagttgttaagggttaagagataaaaggcaaagagatagatgaagctttctncagagtcagctttctctagagtcaatcatgaatgcactcatggaaatagggttgtgattctaaaatagttctgggaactaaaatggcatatactctgccatgatttccaattaagtcaagtaagtcatgggatttatactgcttatccaaagaaagaggaatatccattttccatattccattgaaagtctgtttttctcttttatttccaaggttggttgatattaggtggccagtctgttcaaaacactgaaaggcattgtaattcctcaggtttttcaacccattttcacttgccactaaaatacacataaacataagttctaaaac

SEQ ID NO: 780 - DNA, 661 bp, Homo sapiens
  misc_feature [331]..[331]: Chromosome 2, SNP identification no. = rs17576609
  misc_feature [331]..[331]: allele = t, in linkage disequilibrium with rs10490155, respectively
  misc_feature [331]..[331]: n is a, t, c or g
ctacctgagtgtcaatttaaatcataactatggcatttattacatgtgtgcctttgaacatataattaaattttatagtctcaggttcctcatttgttaaatagggcaaaggacactcatcttaaataattgttaagtaattgaacatagaaatgtctagcatattgctggggcatgggaaacacagtaaatattaactaaatctgcaaaaaaagttttaaatctgaaaaagtgtcctgagacacttgaaaatagaaaataactttggaaaacaggaaataataattttattgttttttgtcccaaagagaagacaatggattccataaantattgatccatgagcttgatatctctcaagagcaaaattctgcagtggattaaatacatgctctgtgagcatttaccagaggaaatggttatgatcaagagctattgaatatttatagaacatatacattttaaattgaccttttatatgtatttcataggtacctgacaaactatgaaggtggtttattgtagccaaacatttgtgaggtatttactgatattattagtatttagtaaatattcctaaatatataaaagtttcaaatcaagctaagaaacagttacataaaaaattatttgatcttacaactttgcaaattatatcttt

SEQ ID NO: 781 - DNA, 661 bp, Homo sapiens
  misc_feature [331]..[331]: Chromosome 2, SNP identification no. = rs10490158
  misc_feature [331]..[331]: allele = t, in linkage disequilibrium with rs10490155, respectively
  misc_feature [331]..[331]: n is a, t, c or g
tgagggtggtgcccccaaagggcactagctcctttaccaaaagaaaaagagactagcacactccctctttccacaatatgagcatagaagaaggtagctatttgcaaactggagagggtctttgccagacacacaatttgctggcatctgaatcagagatttcctagcctctagaactttgaaaataatttttgttatttaagccacccactgtatggtattttgttatagcagccccaatggactaagatgcatacctgtagatgtgatatcctgaaaaggacacgacatcatgacctaggcagtattttggatgagaatgcataagtcnaaactacatccaataaaatgtcagaaaacaaaaatgtgaaatgttctattaagaaaaacaaaacaacacaaaatgaaacaaaacacagtgagaggcactgactgtattcttccaaaatgtccatgtcataaaagtgaaagaaagcactggaactgttctggactaaaggagtacaaagagacatgaaaatcaaatgcaattcctaaccctatcctgtatcccttactaggggaacaaaatgttatatttttgagtcaatctttgaagtacaatggtagacctgataaatgtatgatatacccagttaaatgtactgaagttgtgactaaa

SEQ ID NO: 782 - DNA, 661 bp, Homo sapiens
  misc_feature [331]..[331]: Chromosome 2, SNP identification no. = rs17517594
  misc_feature [331]..[331]: allele = c, in linkage disequilibrium with rs10490155, respectively
  misc_feature [331]..[331]: n is a, t, c or g
ctggtttttcccttggatgctgaggagagcacaggctgggctcctcacaccatagtgatgatcaggcaggcataactgaacacaagtcagacaagaaccacaagagtgtctgccaacataaacaagtttcccatgtgaaggatgcccctgttaggcattagactgtcttccaggtaaattaagcatcccatgaaaatcacactgtaaacaaccacgtccatctccccttcggttcccattagagcaggattgctagatgctctggtactggaatgccaatttatgtgggggcactctaaacaaacacaagaacaaagactatctgagaagntaacaacatgaaatccagacaggcaactcagcattaggttagtctgttggaaaatagtagaggcttaactatgaaaacgaaccttcagcacctgggctaggaggaattaaaatagcaagacagggatttagatttagggttaaagtaatagatgaggcaccgtgaatgagaatgacacaggcaacaggtttgaaattcaccttccaaaaggaggctctagtttgtttaatgacacagatctaaataaaagtcagttttccagtgggggactgtgagggcaagaaaaagatgtttatgcagagttcctcaattttttatattcttttagct

SEQ ID NO: 783 - DNA, 661 bp, Homo sapiens
  misc_feature [331]..[331]: Chromosome 2, SNP identification no. = rs17576934
  misc_feature [331]..[331]: allele = g, in linkage disequilibrium with rs10490155, respectively
  misc_feature [331]..[331]: n is a, t, c or g
gccaatttatgtgggggcactctaaacaaacacaagaacaaagactatctgagaagctaacaacatgaaatccagacaggcaactcagcattaggttagtctgttggaaaatagtagaggcttaactatgaaaacgaaccttcagcacctgggctaggaggaattaaaatagcaagacagggatttagatttagggttaaagtaatagatgaggcaccgtgaatgagaatgacacaggcaacaggtttgaaattcaccttccaaaaggaggctctagtttgtttaatgacacagatctaaataaaagtcagttttccagtgggggactgtnagggcaagaaaaagatgtttatgcagagttcctcaattttttatattcttttagcttgaatttattattggttcttggaattggaactggcttaaaccacaggtgaaatatcaagaaagcccagctgagaggaagctttggaactttgcagggtctaataaaaaccacctagagaaatgaggttacctcaggtgccctcacttgcagagtgacaatgctaccagataaggtgcagatgagaaactttgagccctagtaacaactaagattatgattccagactcagctggggctaccagacacaagaaacgtgtagtcgtttgagtgcag

SEQ ID NO: 784 - DNA, 661 bp, Homo sapiens
  misc_feature [331]..[331]: Chromosome 2, SNP identification no. = rs17517741
  misc_feature [331]..[331]: allele = t, in linkage disequilibrium with rs10490155, respectively
  misc_feature [331]..[331]: n is a, t, c or g
aagaaaaagatgtttatgcagagttcctcaattttttatattcttttagcttgaatttattattggttcttggaattggaactggcttaaaccacaggtgaaatatcaagaaagcccagctgagaggaagctttggaactttgcagggtctaataaaaaccacctagagaaatgaggttacctcaggtgccctcacttgcagagtgacaatgctaccagataaggtgcagatgagaaactttgagccctagtaacaactaagattatgattccagactcagctggggctaccagacacaagaaacgtgtagtcgtttgagtgcagcggganaagcatagtacaggactaatttgttcagctactgttgtagcttattgctagtctttggcagatagtagtgctcaattgctatagatgtggccactgatgctactacagggctctgtctgacctgtttttctctgaaatatttcagaaaggtgaacatgagctctaaggccagaaattagttctctttaaagctatattcttcctcctcaacctatgtgtttaatgattatttttgaatcattaaatttcacaggtgaaaattcaggaaactcactcaaaagaccatgacaatgatgtgccctaggaaagaaaaagaaatattcccattaa

SEQ ID NO: 785 - DNA, 661 bp, Homo sapiens
  misc_feature [331]..[331]: Chromosome 2, SNP identification no. = rs17517896
  misc_feature [331]..[331]: allele = a, in linkage disequilibrium with rs10490155, respectively
  misc_feature [331]..[331]: n is a, t, c or g
acactacgagacaataggatcttgacccaatgagcagattttcttatttcagcatattctaagagcattcaaaatgcattatgccttgagagaggaacataatgtttctcattgtaccaagaaatgaacataatgtttctcaaaattgaccacgaaacccctttcccccataatgtttcatagtgttggtggtttgggggatttgcttcaggatattttgctttgcaaggttgttcaggtggtaaatctagtctctctttctgaccctttggaatggattgcctcccctcctcaaacacaaattggctcttaaaacaaattatctgaactntcagcctgtctcggtgggcgcttccttgtgtgtttattttcttctttggcttgtgattgttcccctggtactaagttttagactccatgaactttttataatagcagaatggcagattaagtggaggaacctcttctctccctaccgctagtacctaaaataatttggtctgcatacttagcttctaaccctccactgtgctctaaaggagtattgcctattcatgcctagtttgggtgtttttatgacatagaatagaataaattgagggagacagaggaaatatagtgggaaggagattaacaacaatactaataataaaaataatat

SEQ ID NO: 786 - DNA, 661 bp, Homo sapiens
  misc_feature [331]..[331]: Chromosome 2, SNP identification no. = rs17517917
  misc_feature [331]..[331]: allele = t, in linkage disequilibrium with rs10490155, respectively
  misc_feature [331]..[331]: n is a, t, c or g
ctccactgtgctctaaaggagtattgcctattcatgcctagtttgggtgtttttatgacatagaatagaataaattgagggagacagaggaaatatagtgggaaggagattaacaacaatactaataataaaaataatattgcttacttttcaaggagagctactgtttgtcaagactatgtatagtaaacaaagctgaaactaaaggaatagacatagaaaaggctgtcaagtggcaaaataaaaaattcataaaggcaagaggaaagaaatagaaaacctttgctgggtgaagcagcaggagatgatatagttaggattaggcttgaanaaagtctttcagactactagagagatgtaaaataatttagggtgagagtaaaggcaattttgaaaagtgtcactgttaagtatgaactggatatcctctaactgtctgtttagagatactaggtaaaaacccagatgccttgttaattacttttagctactggtctatgtttttatgaatgaatataaccgtatgtaagaataatgccaccaggcaccttgagttacgtttaggttgtattagcttcttgcattggccaaccttctggacctgtggctcagctttttggattttagttttctagaagttccttgccctacccactgtttt

SEQ ID NO: 787 - DNA, 661 bp, Homo sapiens
  misc_feature [331]..[331]: Chromosome 2, SNP identification no. = rs17577275
  misc_feature [331]..[331]: allele = g, in linkage disequilibrium with rs10490155, respectively
  misc_feature [331]..[331]: n is a, t, c or g
tgaataaagtctttcagactactagagagatgtaaaataatttagggtgagagtaaaggcaattttgaaaagtgtcactgttaagtatgaactggatatcctctaactgtctgtttagagatactaggtaaaaacccagatgccttgttaattacttttagctactggtctatgtttttatgaatgaatataaccgtatgtaagaataatgccaccaggcaccttgagttacgtttaggttgtattagcttcttgcattggccaaccttctggacctgtggctcagctttttggattttagttttctagaagttccttgccctacccactnttttggttttgacagtcctttctgccttgagtaaaaaatgtctgtatgctttcaaagtcctgccattccacaagacactactccttatccctgggttctttcttcccaccatcttttcctatccctagtcattgtgatagggtacttagttaattcccttcccctacctccttctgggaatttggagaagttcttagatggtactgaagaattggtttccctctttgaagaattgggtttgttgatcctgtcaatctttgtccgctctgtgccacagtgtttttagaccaaacagatgaaggttgcaatggcagtttcctcatagcagag

SEQ ID NO: 788 - DNA, 661 bp, Homo sapiens
  misc_feature [331]..[331]: Chromosome 2, SNP identification no. = rs17577359
  misc_feature [331]..[331]: allele = a, in linkage disequilibrium with rs10490155, respectively
  misc_feature [331]..[331]: n is a, t, c or g
gtgtttttagaccaaacagatgaaggttgcaatggcagtttcctcatagcagaggctcaagatgtcaatgcctcatctgagacgtctgtcaagtcagggttcctgggcataggaagggtaaaattctgagagttatgcctatgaatatgtagagccaaaagtgggaaatgaaagagaggttggaaggagagagatcagaagctgtgaggccctggattgtgtaaagtagaccaaagtggggatcaaggataagtgtgtgtggatactaagacctttgccctagcagtcaacagattggagggtgccatgaagtatgcagagggcaggtgangacatgtgtagatcatccctttatgcaaccagtgcttggaagaatctatatccaccccctaccaggttggatgtgctgtgccatctgtagagaactgtcaataatattgtaactatgcaaagttcagatatcatatttcaaaaccttaaaaacatgtattttgttgcaccaacctaagaaggttattctgtctccaatgctctgtgccaaatatttgttctcatttatgtattacctgagcatggcatgtctctatcagtgcaacaatgcctctctcctctaggcaccctgtgagttggcagcatgccatggtaatgcatcacattttat

SEQ ID NO: 789 - DNA, 661 bp, Homo sapiens
  misc_feature [331]..[331]: Chromosome 2, SNP identification no. = rs2353307
  misc_feature [331]..[331]: allele = c, in linkage disequilibrium with rs10490155, respectively
  misc_feature [331]..[331]: n is a, t, c or g
agaaacactgtagtaatctttgtgaccaaagtgggtgggtaggagattctgtggcacctgaggatggagatgcacagccaaaggcagagcagagagatggagaaaatcaagtgctagggatgcaattacaatgtctgcctaagctttagagccagctgtatactgagacctattagctacatgagaaaatgcattctctatttgcttaaattatttttagttgagctttatgttttttgcgactgaaagattcttcactgataccaagggaaaatcactaagactccaccttagaaaaaacacacaaactcacctttgttctctcttcttntccaagtataaaatggaattttacatctcaactgtttaagtagtggcaaccaaactgtacccgaactatgctctcactcaagtactcctgagagaagagaggagaatagagacacagagctctagaatagtatgctagatcaaaaagcgacactccagaccttcactccaaatcttagaattatgctggatcaaccagagaccctccagacctccactccaaatcacaaaattatactggatcaaccagagacactctagatctccactccaaatcttagaattatgctggatcaaccagagacactccaaatctcaatattatgctgga

SEQ ID NO: 790 - DNA, 661 bp, Homo sapiens
  misc_feature [331]..[331]: Chromosome 2, SNP identification no. = rs888239
  misc_feature [331]..[331]: allele = c, in linkage disequilibrium with rs10490155, respectively
  misc_feature [331]..[331]: n is a, t, c or g
cttgaaaccaagcaggcagtagcagtactaaagcttatttatattactctgttttaaacagcctaactccatccaacactacagactcacatgtctataatatttataatctcttcccttgataaaaatggcattattcggtggtaactgaaatcactctacagtttatgacattttttaactttcatcattcagtgtgttactttttttcacccactgaataatgtaaatgcttgctacccttcacataattttaatatgcatgatagacccatttctttagctagtactttattaattaagccaaattaagcattcacatttatccagnggtagtttagcttaatagaagaatccattaaattcctcaaaattttataaatatttagacttgcattgaaatattttattgattactaaaggatccaagtctgccatcaacttcctggtatctttcaatgagacagttgttataaacaagaaggagtataatgtatataaatgagattgtgcattaaaaaagtattgcttagtgctaggcatacaactcattagtcatcatcacaatcataacttttatcaaccatcactacctctttaagattatcagctgcaaaattatttacaattaaatatttaacaaatctatcagtaattatta

SEQ ID NO: 791 - DNA, 661 bp, Homo sapiens
  misc_feature [331]..[331]: Chromosome 2, SNP identification no. = rs17577575
  misc_feature [331]..[331]: allele = c, in linkage disequilibrium with rs10490155, respectively
  misc_feature [331]..[331]: n is a, t, c or g
aagtcaccctaacgaaatgctggcaacattttcttggatttcacagcttccagaatcatgaaccaaataaatttcttttttttttttttaaataaactacccaaactgtatcatgttatggcagcagcagacagaccaaaacaggttataattaaattttcctctggtcactacaggttccatagtggattatggactgccacctgcacctgacttagcagtgtagacttatacttttgctgattctcatttcttttcgtgtgctgacccctgatgctgacttcacagttattcagaaactgtacttttaaaatttacttctagataacangaacttgtcaaaaaggaattaccctaacttgtataaagccccagactcatttcatatgtaatatatctctaggatatcagtctatgtcactccccagtacttttttggtataattcaggccattaactaaatgtactatttaaaatagggcacacttcaagttgccttttcctaacccatacagattttacatggtttgcttaatttcaagcctttatatataattgctggcaggatgtcgtcaattcctgggaatataacaggaaacacaactgaagtggatgataaacaatagcaacaaaaacaaatgttatttgggaagtaatcgta

SEQ ID NO: 792 - DNA, 661 bp, Homo sapiens
  misc_feature [331]..[331]: Chromosome 2, SNP identification no. = rs17577582
  misc_feature [331]..[331]: allele = a, in linkage disequilibrium with rs10490155, respectively
  misc_feature [331]..[331]: n is a, t, c or g
tattcagaaactgtacttttaaaatttacttctagataacacgaacttgtcaaaaaggaattaccctaacttgtataaagccccagactcatttcatatgtaatatatctctaggatatcagtctatgtcactccccagtacttttttggtataattcaggccattaactaaatgtactatttaaaatagggcacacttcaagttgccttttcctaacccatacagattttacatggtttgcttaatttcaagcctttatatataattgctggcaggatgtcgtcaattcctgggaatataacaggaaacacaactgaagtggatgataancaatagcaacaaaaacaaatgttatttgggaagtaatcgtattggatgttctaaatacaaatgtgaaatccaaggcttaaatgtaattactaatgtaaaggtttacattgaaagtcactgataggttggttgagggagcatttggtataaaaataaaaaataaaaatctacacgagggctaaaccttaaagcctccctgaagaagaatttctatacttcagtatacataggaaatatttgagggaatcattaaaaattcagatcctttggacccatcttctatgtataataaaaattgcccttgttaaatgagagaaatttattgaaaat

SEQ ID NO: 793 - DNA, 661 bp, Homo sapiens
  misc_feature [331]..[331]: Chromosome 2, SNP identification no. = rs17577659
  misc_feature [331]..[331]: allele = a, in linkage disequilibrium with rs10490155, respectively
  misc_feature [331]..[331]: n is a, t, c or g
tattgctgcaacatttttgaaagacactttagcagaatttatcaaatgacatcaagagtcccataatttttcatttaataattctgcgatttgaatttagtctaaatgtgtatataaacatatacacaagaatttcagttttacacttgtatattgtagcatacatttaaaattaaatgtctcacaaatattaaattatgacaaccatgaaaaaattactatgtactcgtaagtgattgttttttacatgggaagatgttttgatttgtgttttacatggaaagatgtttattgtgttgaatgatcacttatgatagaaagtaatatgcantttgttatacccatgagactatttctggctgtaaagatactggatattttatctatatcttttatttgtatttttccatacgtatgttacctatgtaagtacaatatttttaatttacagagagttaaaaaactgatgtttcccagttggtaaaaaggcagagaaattgataatccacgtagtttgttaattctgtcaatagttttagccatatgtgtcaaaattcttgggattattgggtctaatgaatttcttagaaataaaaccaaaggagatagagattcagaaaaagataagggagtttcaaaagtttgtggaaaaatggaatta

SEQ ID NO: 794 - DNA, 661 bp, Homo sapiens
  misc_feature [331]..[331]: Chromosome 2, SNP identification no. = rs10490157
  misc_feature [331]..[331]: allele = a, in linkage disequilibrium with rs10490155, respectively
  misc_feature [331]..[331]: n is a, t, c or g
atcctagacatgaaacagatatttagtattgatcacgagcaaactgccagacactgttctcaatatctcagtcataggaaatgtagtttcttgatgcagctactttttaactttattccttcacatgactagcaaggtgaatcatactcagtttagttcaaaaaatatttacccatctactctggccttggcagcactgcaaaagcttcttggaagagatgcccaagctaactcttgaagaatgaatttaaaaagccgagcacataaaagtgaaaggattttccaggtagggcaattaatatgataggaatggtgtgagataatacacaangaatagctatcagaaattcaacagtagtagaatgtgaactataaggcccttttggaggaggcagggcttgtgcataaatctggagagagttttagagggtatgattgtcgcatgtaactgtttatgtgactacagtttcccttttgtgtgtcttccttcccctcagagaaaattcctcttttctgcttgcattagtcactgtaggctaccataacaaacaatgacatttaagtcgtgtaacatgtgaaaagttcacttcttgctcacatcacagttcggagtgggttaatgtggaggagggaaaggtagatggattgtgttccacagaac

SEQ ID NO: 795 - DNA, 661 bp, Homo sapiens
  misc_feature [331]..[331]: Chromosome 2, SNP identification no. = rs10490156
  misc_feature [331]..[331]: allele = c, in linkage disequilibrium with rs10490155, respectively
  misc_feature [331]..[331]: n is a, t, c or g
caaatcctaacttcttgatgccttctttgactatgctggcctctatcagtctcttttatctgaaatcctacaagcttatagtttatgtagttcaattcactggagtatgtattcttctctcatggcttaattgtctcatttcaatcacaggctgaatgcctatagacagtagactaggtacaagtgattgtcattcaggaagggcacagactggtgcagtgttgctaattctggtctgcagagcacttgcatgagaatcaaccaacaatctacattttgagcaggatgagtttgttgcatctaaatctaaaaatcactagcctagttagtnaagcctatctcctccatccagatagaaattctttataaggcagacactgtgtcacaattccttgggtttgcattataccaaaggaaatcctagacatgaaacagatatttagtattgatcacgagcaaactgccagacactgttctcaatatctcagtcataggaaatgtagtttcttgatgcagctactttttaactttattccttcacatgactagcaaggtgaatcatactcagtttagttcaaaaaatatttacccatctactctggccttggcagcactgcaaaagcttcttggaagagatgcccaagctaactcttgaagaatg

SEQ ID NO: 796 - DNA, 661 bp, Homo sapiens
  misc_feature [331]..[331]: Chromosome 2, SNP identification no. = rs10490155
  misc_feature [331]..[331]: allele = t, c
  misc_feature [331]..[331]: n is a, t, c or g
ctaagaacagcctaaccaatctgtgagtatctactttgcaggcccagcctctgaagaggtacctgaatctagtcagaataggctttccttccacaagcgctgcaccttgtgttattttctacctattattctttcaggattaaaactgccttttagatttcaactaagatatttaatatttttttaatgcccatattttttccatattttgcttctttttatttctgatcacacagcaaagcttttggtaaataatctctgaagaatgtgacctaaaccttcagtgtatgctaaggtcagtccttggtttcttttttccacgtaatgtacnactccattttaggacacaaatgaagcaaaagccagcagttaaatgggaatgaaggctgtctgaacatctcttctgatgttccaggaactttgggacttattttcttttgaagaaaaaaatacatctttttagataagaccattcaattgttgtaataaaaaaatgcatacctctaataatcccttcttatactgttcagatttgagttttgcttctaaatttctctgtgacccagagtactttcattttattatatttatatctgaaacacaattaaatgagctgattatagcaataaataatacaaatttagatcactagttaaaagat

SEQ ID NO: 797 - DNA, 661 bp, Homo sapiens
  misc_feature [331]..[331]: Chromosome 2, SNP identification no. = rs17577847
  misc_feature [331]..[331]: allele = c, in linkage disequilibrium with rs10490155, respectively
  misc_feature [331]..[331]: n is a, t, c or g
tgtattatttattgctataatcagctcatttaattgtgtttcagatataaatataataaaatgaaagtactctgggtcacagagaaatttagaagcaaaactcaaatctgaacagtataagaagggattattagaggtatgcatttttttattacaacaattgaatggtcttatctaaaaagatgtatttttttcttcaaaagaaaataagtcccaaagttcctggaacatcagaagagatgttcagacagccttcattcccatttaactgctggcttttgcttcatttgtgtcctaaaatggagtcgtacattacgtggaaaaaagaaancaaggactgaccttagcatacactgaaggtttaggtcacattcttcagagattatttaccaaaagctttgctgtgtgatcagaaataaaaagaagcaaaatatggaaaaaatatgggcattaaaaaaatattaaatatcttagttgaaatctaaaaggcagttttaatcctgaaagaataataggtagaaaataacacaaggtgcagcgcttgtggaaggaaagcctattctgactagattcaggtacctcttcagaggctgggcctgcaaagtagatactcacagattggttaggctgttcttagatgctgatggttcttacgagccct

SEQ ID NO: 798 - DNA, 661 bp, Homo sapiens
  misc_feature [331]..[331]: Chromosome 2, SNP identification no. = rs17577896
  misc_feature [331]..[331]: allele = t, in linkage disequilibrium with rs10490155, respectively
  misc_feature [331]..[331]: n is a, t, c or g
attagaggtatgcatttttttattacaacaattgaatggtcttatctaaaaagatgtatttttttcttcaaaagaaaataagtcccaaagttcctggaacatcagaagagatgttcagacagccttcattcccatttaactgctggcttttgcttcatttgtgtcctaaaatggagtcgtacattacgtggaaaaaagaaaccaaggactgaccttagcatacactgaaggtttaggtcacattcttcagagattatttaccaaaagctttgctgtgtgatcagaaataaaaagaagcaaaatatggaaaaaatatgggcattaaaaaaanattaaatatcttagttgaaatctaaaaggcagttttaatcctgaaagaataataggtagaaaataacacaaggtgcagcgcttgtggaaggaaagcctattctgactagattcaggtacctcttcagaggctgggcctgcaaagtagatactcacagattggttaggctgttcttagatgctgatggttcttacgagccctctttcctttgttacacaggctcttttggttgtgtggccagcaccattagttaataagcacagatgtctaagtaccaccatgtcattggatctccaaacccatttctttgtcaccatccagtgctctttt

SEQ ID NO: 799 - DNA, 661 bp, Homo sapiens
  misc_feature [331]..[331]: Chromosome 2, SNP identification no. = rs17577972
  misc_feature [331]..[331]: allele = g, in linkage disequilibrium with rs10490155, respectively
  misc_feature [331]..[331]: n is a, t, c or g
ctaagtaccaccatgtcattggatctccaaacccatttctttgtcaccatccagtgctcttttgcagtaaacaagccccgtttcttgcttcctggtctctgtctttgtgctcagcaatactgagttgcattgatttccaggagacaccaaggtcttctttgaaccttgctgaaatcttctcctctctctggactgctcattctgttcactttcttcatctctaacacattactggttaaatattgaatctgtctttaacatttggatcaggcaggcattttatccaacaagaagaaaaatctgactaaacttccacttcttagagtcttgnttagatgtttgcaggtagagagtggaatcattggaaaactgacatctttatgttattatgtctttctactaaatagcttgatacctttctcatttattgaagtctttttttatgtttgtaagtggaggtttatatctttcttaatataattttataaactttatttctagtttttggttttttattagctgttttgactgggctctctcatctctctgtgaatatatatgtgtgtgtgtatatgtatgtatgcttacaggttttagctgttataaactaaaacagtaggtttgtaatatatatagttatttgtactgtcactttactgaa

SEQ ID NO: 800 - DNA, 661 bp, Homo sapiens
  misc_feature [331]..[331]: Chromosome 2, SNP identification no. = rs17518720
  misc_feature [331]..[331]: allele = a, in linkage disequilibrium with rs10490155, respectively
  misc_feature [331]..[331]: n is a, t, c or g
actttatttctagtttttggttttttattagctgttttgactgggctctctcatctctctgtgaatatatatgtgtgtgtgtatatgtatgtatgcttacaggttttagctgttataaactaaaacagtaggtttgtaatatatatagttatttgtactgtcactttactgaattatatgtttatgtttagagttttagaattatatgtctttgatttcacagcaatattactaagatcatatgcaaaaattaaaataaaatttcagatgtcaaaatctattttatgacatatactggaaggtttcagaataatttaaatgttagtatcantggaaaagtttgttttttttttattttagtggtattgactctagtttgagtaaataaatatggttcacagcttttactcaataaaagaggatcctcttgaatatctaactgtctacttctccattaattaccattaatgccattcccctgtgttcccagtaagtataactcttacatctagcttaatgagttgaatatttagtcacttattttaattaccttgatttcatagtaaaagcagcaaaagctatgaacttcctgtacttccttggcttctttgcaacacacatatatgtatatgtgtgtgtatatatgtgtatatatatatgt

SEQ ID NO: 801 - DNA, 661 bp, Homo sapiens
  misc_feature [331]..[331]: Chromosome 2, SNP identification no. = rs17578056
  misc_feature [331]..[331]: allele = g, in linkage disequilibrium with rs10490155, respectively
  misc_feature [331]..[331]: n is a, t, c or g
caatattactaagatcatatgcaaaaattaaaataaaatttcagatgtcaaaatctattttatgacatatactggaaggtttcagaataatttaaatgttagtatcaatggaaaagtttgttttttttttattttagtggtattgactctagtttgagtaaataaatatggttcacagcttttactcaataaaagaggatcctcttgaatatctaactgtctacttctccattaattaccattaatgccattcccctgtgttcccagtaagtataactcttacatctagcttaatgagttgaatatttagtcacttattttaattaccttnatttcatagtaaaagcagcaaaagctatgaacttcctgtacttccttggcttctttgcaacacacatatatgtatatgtgtgtgtatatatgtgtatatatatatgtgtgtatatatatatgtgtgtgtgtatatatataaaatggtcattcttttatgactagtctggtatctatatttttgattatgattttgctctgttttaaatgtattcttgacacatagcagatgtacaataaatgagttccctcagctatataggtgagtagtttggggaacagtttgtaagtgaccgtattttgtttatccttttgctattactttgaagtt

SEQ ID NO: 802 - DNA, 661 bp, Homo sapiens
  misc_feature [331]..[331]: Chromosome 2, SNP identification no. = rs2883133
  misc_feature [331]..[331]: allele = g, in linkage disequilibrium with rs10490155, respectively
  misc_feature [331]..[331]: n is a, t, c or g
ctcgctttttcgtgtctttactgatctggcatttgtgtatattatttttgtgttattttacttaaaacaaatgtatatgtgtgtgtatatacatatatgtgtatatatgaaagcttttcgatagataatttaattttgtttcttcttttaacctaaaggataaatatacattgagtaaaccaacttgagatccaatatcaagatttttatttcccctttccgttgtatcccttctctgttttgtttaaataacttcttaagatttagattgatattattcatgactttatgggttttacacatttttaagattaggtttatttcattttcnttggatatcaagatatgttaatatcagtttttgaaatttattcaattttatcagttttatgattattcttttacattttgctttctcttattcaaacttataaaaaggtttgtttatatttttgaataattattttccctaggaggaccattaaataccagttagtcttggcgtgtgtgaaaatattttcctctttcatcaatgaaaattaaatttatatagaattttaggataaaccttctccccacctcaaactctgtaaatcatttactatcctcttgcatttaatactttaaaagtctactgtacaaccttgtttttttttatttg

SEQ ID NO: 803 - DNA, 661 bp, Homo sapiens
  misc_feature [331]..[331]: Chromosome 2, SNP identification no. = rs4408757
  misc_feature [331]..[331]: allele = a, in linkage disequilibrium with rs10490155, respectively
  misc_feature [331]..[331]: n is a, t, c or g
ttatttcccctttccgttgtatcccttctctgttttgtttaaataacttcttaagatttagattgatattattcatgactttatgggttttacacatttttaagattaggtttatttcattttcgttggatatcaagatatgttaatatcagtttttgaaatttattcaattttatcagttttatgattattcttttacattttgctttctcttattcaaacttataaaaaggtttgtttatatttttgaataattattttccctaggaggaccattaaataccagttagtcttggcgtgtgtgaaaatattttcctctttcatcaatganaattaaatttatatagaattttaggataaaccttctccccacctcaaactctgtaaatcatttactatcctcttgcatttaatactttaaaagtctactgtacaaccttgtttttttttatttgataaatttttccctttaaatgattgcaggtctttatccccttttaaatatctatttaaatatctatttagtcagtttgtgggttcttctgtatctaaatgtggatctatgaacatcaaaatgcctacattaagatcatcatcaaattagttttatcttataaaatatttgtcttgtgattttaaatggtaaattattttaattcat

SEQ ID NO: 804 - DNA, 661 bp, Homo sapiens
  misc_feature [331]..[331]: Chromosome 2, SNP identification no. = rs17518964
  misc_feature [331]..[331]: allele = g, in linkage disequilibrium with rs10490155, respectively
  misc_feature [331]..[331]: n is a, t, c or g
cagtttttgaaatttattcaattttatcagttttatgattattcttttacattttgctttctcttattcaaacttataaaaaggtttgtttatatttttgaataattattttccctaggaggaccattaaataccagttagtcttggcgtgtgtgaaaatattttcctctttcatcaatgaaaattaaatttatatagaattttaggataaaccttctccccacctcaaactctgtaaatcatttactatcctcttgcatttaatactttaaaagtctactgtacaaccttgtttttttttatttgataaatttttccctttaaatgattncaggtctttatccccttttaaatatctatttaaatatctatttagtcagtttgtgggttcttctgtatctaaatgtggatctatgaacatcaaaatgcctacattaagatcatcatcaaattagttttatcttataaaatatttgtcttgtgattttaaatggtaaattattttaattcattatttatgtgttgtagtaactaatatagttcttggcacaaagaatgatgtactgattgacaaatattttaagaaacaccttgcttttacaatgtcattttgcaagggagaggtatcaaggaaattcctgctttcttagaggatcactgt

SEQ ID NO: 805 - DNA, 661 bp, Homo sapiens
  misc_feature [331]..[331]: Chromosome 2, SNP identification no. = rs17578308
  misc_feature [331]..[331]: allele = c, in linkage disequilibrium with rs10490155, respectively
  misc_feature [331]..[331]: n is a, t, c or g
cttctgtatctaaatgtggatctatgaacatcaaaatgcctacattaagatcatcatcaaattagttttatcttataaaatatttgtcttgtgattttaaatggtaaattattttaattcattatttatgtgttgtagtaactaatatagttcttggcacaaagaatgatgtactgattgacaaatattttaagaaacaccttgcttttacaatgtcattttgcaagggagaggtatcaaggaaattcctgctttcttagaggatcactgttcaaaggagaaggaggataaagttggcaatggaccaagcccagtgaaaagaagttgctangtagtgtggcaattctatctgggtcttccctgttctggccaggacttgagtgctcatcttcccttcacttcaggggattagaccagaggcccccaaccctggtactggtctatggactagttcctaactagtcttagttaggaaccaggccacacggaaggaggtgagcggcaggcaagctagtgaagcttcatctgtatttacagctgctccccatcactctcattaccgcctgagctctgccccctgtgagatgagtgatagcattggattctaataggagcacgaaccctattgtgaactgcacatgcaagggatctagggtgaatg

SEQ ID NO: 806 - DNA, 661 bp, Homo sapiens
  misc_feature [331]..[331]: Chromosome 2, SNP identification no. = rs11903875
  misc_feature [331]..[331]: allele = a, in linkage disequilibrium with rs10490155, respectively
  misc_feature [331]..[331]: n is a, t, c or g
tctgtcaaataaaaagaaaaacagtaaaatccagacagtaaaaatgacttgtccatgattaaagaattggtcagttttcagcaaatgactacacagacccaaggatttgtaacaactactctatgaaataatacctaatatttattggattcttataatatactaggtagggtcatactatccaaatttatcctctcatgaacactaagaaatgagtaatagtgacaatgcaaagaaaactgcagataggaggcaggactaactggcagatgaacaggacaccatgtggagactcatattgtgaactcttgctccaagaaatactgcaggnacatatcaggaaagctgagagaatccacagaccctttgaaggaagcagcctgtctctgcaggctccgcaaggcagctgaaaaactgaatgcccaaagtgtgagggggaaatgtctacccctgaacacacatgttcattggggaaactgaaggtccagatctcaggagaaggacttgaccttacctgaagctgagatgaatttagagatctgagcaaaatacaggggtagacgaagcagcaggagaagccttgtgggcactcttagccctagggaagtcatttctgactttgtctcacagcaatctttggggtgggctgccagtggaacgg

SEQ ID NO: 807 - DNA, 661 bp, Homo sapiens
  misc_feature [331]..[331]: Chromosome 2, SNP identification no. = rs4485597
  misc_feature [331]..[331]: allele = c, in linkage disequilibrium with rs10490155, respectively
  misc_feature [331]..[331]: n is a, t, c or g
gaggatgcaaaggtataagaagatacaatggaccttgggtactcaggggaaagggtgagagggaggtgaggaataaaggactacacattaggtatagcatacacaggataagtatatcaaaacacttatgtggtatatgttaaatatatgcaataaaacagtgaaaaaagaaaaaaacatcattattcaagtcaaaaagtagaaaatcgtcagcacccacagaagacccctcagatccctcccaatcactgtactctgtcttgctttcaagaaagcactaactatcttaccattatggtcactttcctgcttttctttagagtatgcacancttatttctgtttcccaatgataggttatctttgttatttcatgtggctatataaagtcattttcaatgctttattcttatagtgtagcaacatatcccaatttaattatccattcttctgttgtggacatttagtttgttacttttgctatataaataagatacatgcatacatacatttgtgttatgtatatactgaggattgaaatcactgagtcatattatatgcaaatcttcaactttagtagataatgtcaaactgatttgtaggtttgtgaaaatctacactcccgccaagggagtatgagagatctctaatttacttttttg

SEQ ID NO: 808 - DNA, 661 bp, Homo sapiens
  misc_feature [331]..[331]: Chromosome 2, SNP identification no. = rs17519239
  misc_feature [331]..[331]: allele = g, in linkage disequilibrium with rs10490155, respectively
  misc_feature [331]..[331]: n is a, t, c or g
ataaatacaccttcagacatagacgtggagtattttccctctatttctcaagtttcattttaactggtatgattttgcatgtttcagatctttgaatcttatatgtatgccctggtttatacttgtgacattattccctgtgctttgactattttcaactccattttatcccaattacatccctgccccttctcatgcttatgccaaatcatacattaacttgtggtttctaaatgttgatttgattttagaaaccgagagagaaaaggcagctaaaatgaacagtttccagatggttgtggaatttaaaatacaatatgtgggttatacncctagctttcctgcaaacctggtaaatgacctcagatacctcatataacattgtgaaacccatgtttccttatctgtacaattaagacattggattaaataccttcaaacattttgtcaggtttagttactacaatgaaattattccatgttctccgagttcaacaatgtcaaggaaaagctggttctcactcatccattgtggccagcacatgagggagacagcaggtatcaagcacaacatttgtctgctaactggtatagagaggtacctttgactattctttcattcatagggtgatgggcccttgaacaatttggcctctttact

SEQ ID NO: 809 - DNA, 661 bp, Homo sapiens
  misc_feature [331]..[331]: Chromosome 2, SNP identification no. = rs6715400
  misc_feature [331]..[331]: allele = a, in linkage disequilibrium with rs10490155, respectively
  misc_feature [331]..[331]: n is a, t, c or g
taaatgttgatttgattttagaaaccgagagagaaaaggcagctaaaatgaacagtttccagatggttgtggaatttaaaatacaatatgtgggttatacgcctagctttcctgcaaacctggtaaatgacctcagatacctcatataacattgtgaaacccatgtttccttatctgtacaattaagacattggattaaataccttcaaacattttgtcaggtttagttactacaatgaaattattccatgttctccgagttcaacaatgtcaaggaaaagctggttctcactcatccattgtggccagcacatgagggagacagcaggtntcaagcacaacatttgtctgctaactggtatagagaggtacctttgactattctttcattcatagggtgatgggcccttgaacaatttggcctctttactgtaattgcctgtgcaagcacaataacagatgtttccaaatacatactatgtgtatatccacttgatatatctccgattacaaagggtctattgttctaaaaagtttttcacattcatggtggaataataaagagaagaaattacttttaggttacaaggcagcatttttgcctttcaagtcaaaacactgtgacaagtgccttttgcttatttggcaaatttataatgaa

SEQ ID NO: 810 - DNA, 661 bp, Homo sapiens
  misc_feature [331]..[331]: Chromosome 2, SNP identification no. = rs6715541
  misc_feature [331]..[331]: allele = a, in linkage disequilibrium with rs10490155, respectively
  misc_feature [331]..[331]: n is a, t, c or g
aatgacctcagatacctcatataacattgtgaaacccatgtttccttatctgtacaattaagacattggattaaataccttcaaacattttgtcaggtttagttactacaatgaaattattccatgttctccgagttcaacaatgtcaaggaaaagctggttctcactcatccattgtggccagcacatgagggagacagcaggtatcaagcacaacatttgtctgctaactggtatagagaggtacctttgactattctttcattcatagggtgatgggcccttgaacaatttggcctctttactgtaattgcctgtgcaagcacaatancagatgtttccaaatacatactatgtgtatatccacttgatatatctccgattacaaagggtctattgttctaaaaagtttttcacattcatggtggaataataaagagaagaaattacttttaggttacaaggcagcatttttgcctttcaagtcaaaacactgtgacaagtgccttttgcttatttggcaaatttataatgaatttttaaaaggtgaacattacaagttacagtaaaaatcttgaaataagttatgtactccctgatttatttattctttatcaagtattacttgatcactttctgtttggtcgctgtgtccaccatt

SEQ ID NO: 811 - DNA, 661 bp, Homo sapiens
  misc_feature [331]..[331]: Chromosome 2, SNP identification no. = rs1468895
  misc_feature [331]..[331]: allele = g, in linkage disequilibrium with rs10490155, respectively
  misc_feature [331]..[331]: n is a, t, c or g
taatacctaggagcatattatctcctgcagcctcacactgaaatttacctgaaattcactgactaaatgaggcatcattaagaagaatgtgacataaaccgttattgcaaggtaggagtactgtatcagagttaagtaagaaaaatagagcccatgcatgccagatagaacaatagagaagagttaatagtgggcattcatttacaagatgttgggaaaactgaaatccaagcatgaggaaagtgaggtcacctaggaattagcagtggcaggaagccagtttctttccttgggttggagagaaacagtgagaatcagagcccagaactgnaatcacctggagggaactagaaccatgaagggaagaaccagtgaaaaagaaatttccttttccactccctctaattccctgtgtctcctagtggttgaatctatccagaagccagttgacaaggaagcctgaaaatgtaaccttgcagcgcccagttccctacaatatagagcaagaagcagagaatgaagataaaagaaaatcataagtgaccagcagacttagaatcactgttttaatcccttcatcaattgtatacatgattgcttcaattatctccagatgaagaagacttctcaaatttccttaccaacaaatgtcatagtcaca

SEQ ID NO: 812 - DNA, 661 bp, Homo sapiens
  misc_feature [331]..[331]: Chromosome 2, SNP identification no. = rs1468896
  misc_feature [331]..[331]: allele = t, in linkage disequilibrium with rs10490155, respectively
  misc_feature [331]..[331]: n is a, t, c or g
atatagagcaagaagcagagaatgaagataaaagaaaatcataagtgaccagcagacttagaatcactgttttaatcccttcatcaattgtatacatgattgcttcaattatctccagatgaagaagacttctcaaatttccttaccaacaaatgtcatagtcacactctcatagccaggaagttatctttctgttattaaaaaattattttagaagttatttatttttgtatacaatgggtaattactgtcttgtgtagttttgtcatcattatatttttaaaactgtaggaatacatttgccatacttattttagtgttgatctttgangttcaaaaaaaaatttattttaatgtttagatttttatgtatttccctgtttcaaaattatctgataagaatatatcatctgtttcctactttttcttaaaattcatggaagagcatttttcctcctccagctatatacaccagaacttaagaatcttcattcaatgtttttaacaaagtcttatgaaggtagaagaaaatacaatgttaaggctttgaaaaggattaaatttctttaataagttactcaataatgtaaaagtagaataatagtatttagtctactttcaaatggtataccaagtgccttttatgttctgactcatgttc

SEQ ID NO: 813 - DNA, 661 bp, Homo sapiens
  misc_feature [331]..[331]: Chromosome 2, SNP identification no. = rs17519819
  misc_feature [331]..[331]: allele = t, in linkage disequilibrium with rs10490155, respectively
  misc_feature [331]..[331]: n is a, t, c or g
tgtttattttctttgccaaaattaccaaagatcattataaaatatatatgtgtaccttgtgcatttcaaataatttaaagaacatatctattattttgactccataaggtaggcagagtaattaatattttctttattttatagaaaaatatgcagaagggttaagtgtttgctcaaattctccccaatttggggccgatagaatgaaacagaatttcagcctactaatctaggacttctttttatgtagctgtaaccaatcaagtatatatattttcccctgggttaatgttgatggcactttactaagtgcagccttaaatgatggagngaaataaccaagtccttttgggaaactggcgtggcacactaattatcatggcatatagcaatcatcagtgattcaatccactattagtaaaggtcataaggtgagaaaagggttgcaagaaacactcagtgtagaaatttcaatcctaaagactaaaaattgccttcaggactatagtgaataggaaacactgctgtttagattatcagttatttcagtcttatcaatacaaaatattgatattagaaatatttattgtcaaactaataactttctttccaaagtctctgtgactgtgagtcaggttttgagaaaacaatgttttcacta

SEQ ID NO: 814 - DNA, 661 bp, Homo sapiens
  misc_feature [331]..[331]: Chromosome 2, SNP identification no. = rs17520196
  misc_feature [331]..[331]: allele = g, in linkage disequilibrium with rs10490155, respectively
  misc_feature [331]..[331]: n is a, t, c or g
gatagatactcagcagattacatcatgcagggtccagggaatgctagaaaattagtctattcaaccacattgagtgtcctcctcttcagacaacagtttctttgcaggttgacaatgtaggagcaatgaaaaaaaaatgagaaacacaaaacaaaaagatttcatgtgtgttcatgaactttaatgacacttttgtttccaagaaggaaggaaaggcagacaattagttactcttatgcaatttcctggtactcttttattgtgctgataaatatatcccttttgacaaactagatagtgtattagagtctgtgataaaagctcttaaatntggatttccttttcctcagggaactagactacacatttattgttcctgttattgttcctctgagcaaaaatgtgagtttatataagaggagagttccaaagggaagcttattttccactgggactttttaatttaaaacatacacacacttgcgcacacacacacatcctattctgtggtagaatttatagtaaaagatgctttatgttcctctaagctattaataatatgtgagatatctataagttatattctgatgttcaaggcactgaactattaaaagccatagtatacatagaaaatgtttcaaatatgaagaaaataaagaat

SEQ ID NO: 815 - DNA, 661 bp, Homo sapiens
  misc_feature [331]..[331]: Chromosome 2, SNP identification no. = rs7589574
  misc_feature [331]..[331]: allele = g, in linkage disequilibrium with rs10490155, respectively
  misc_feature [331]..[331]: n is a, t, c or g
aatgtcttatattccccggtattaattgtcaacacagaccctcagtctgatggtgtcaaaatatctaggtatcacctttctcaagtgcatgggtatctgagtaaaagtctatatgactctttggagaagggcagaattgttttattacacatacatatttgccatatttatgcagggccctttctcatgaatcattggcctcctcaccagttaatggatcctaagtctgagaactggctcagatatggaaactgggtaagtgatcatgactttattggagcagctgccttcagcctcctgatgatcagtcattgactgattctggtaatanagatggatcgataacctttttaactgcccatctaatatgctcctgggagtgcagtgttccattaaacatctctatagttctctacaagtggggcacttctgacttccactctgacctactgcctaatacaataattgcacctatcttgcttctgattgttaagcaccatcaagcagcctctattttttgaaatccaatcattgccattgttacaaggaacctaagtctgtagccacataatctgcttcaactcttacttacaaaagagagtcaccattgaacttaaaaatacctgttcttcattttatcaaaccattccttactgctttg

SEQ ID NO: 816 - DNA, 661 bp, Homo sapiens
  misc_feature [331]..[331]: Chromosome 2, SNP identification no. = rs6719913
  misc_feature [331]..[331]: allele = a, in linkage disequilibrium with rs10490155, respectively
  misc_feature [331]..[331]: n is a, t, c or g
gattcaactaactggaaaatatacttagagactctgaaatttgtgtgcagagggcttttgggggagtgagctcagtaataacatcactgaggcaggcagagtgcaggactgggtagaaaaagaagttgaactgagaagtcattgcaaaggagacctcaactaattccatggagcgtactggagctgggatgcccctttagagtctttctgaattccagcaagaagcagggcctcagaacccataccataaccacctgttgcatgcagaatacctttagggaggaaagcaaccttcactgagtcagctttatacaaatgtgcattatttccntagagaaacactgctatgagctatcagcaattaacattctgagtacttgaaggaatgagtgtatgggccctaaagatcactctaggtggcctgcaataatgtccatggctttatttgataataacaagaaatgatttccaatttcatccatgtccctacaaaggacacgaactcatcattttttatggctgcatagtattctatggtgtatatgtgccacattttcttaacccagtctatcattgttggacatttgggttggttccaagtctttgctattatgaatagtgccgcaataaacatacgtgtgcatgtgtctttatagcagca

SEQ ID NO: 817 - DNA, 661 bp, Homo sapiens
  misc_feature [331]..[331]: Chromosome 2, SNP identification no. = rs6707439
  misc_feature [331]..[331]: allele = g, in linkage disequilibrium with rs10490155, respectively
  misc_feature [331]..[331]: n is a, t, c or g
aaaggattatgggaactacaattcaagatgagatttgggtggggacacagccaaactatatcattccaccccaggcccctcccagatctcatgtcttcacattttaaaacacaatcatgcccttccaacagcattaacccaaaggtccaagttcaaagtctcatctgagacaaggtaattcccttccacctataagcctataaaataaaaaacaagttagttacttcctaaatacaatggaagtacaggcattgggtaaatacacccattccaaatgggagagatcggccaaaacaaaagggctacaggctccatgcatatctgaaatccnatgaggcagtaagtaaatcttaaagctccaaaataatctcctttgactccacgtctcacctccaggttatgttgaagtaagaggtgggctcctacagccttgggcagctccacccctgtggcttttcagggtgcagcccccctcccagctgctttcacaggttggcattgagtgtctttggattttccaggcacacggtgcaagctgtcagtgaatctaccattctggggtttggaggactgtggccctcctcacagctccactaggcagtgccccagtggggactctgtgtgggggctccaatgccatatttcccttctgcactgtcct

SEQ ID NO: 818 - DNA, 661 bp, Homo sapiens
  misc_feature [331]..[331]: Chromosome 2, SNP identification no. = rs13009036
  misc_feature [331]..[331]: allele = c, in linkage disequilibrium with rs1406421, respectively
  misc_feature [331]..[331]: n is a, t, c or g
tatggttttaaaagtgttcggtaggtgttctgttgctttttctcgctcttgctgttctctgaagttccttctgccgtgattgtaagtttccggaggacttccccagccatgatgaactgtgagtcacttaaacttctttcctttataaattacccagtcccaggcagttctttatagcagtgtgaaaatgaggactaatgtaccatctctactatataatctaacaattaaaaaataacaggtaagagtttttgagtcacgcaagattgatttgggttctgttgaaaaaaaattgtagcaaaatgatccattgcaaaattttgagtaatanactttgtggtataggtttttgtctattttgggagcttgaaatgtgaatattttttgaaaatactttttcacaattaaaatatgaaaattttccataagcaaaatctgttaacatatagaagacttggtaaatcaataaggacattaaaaataattagaagattatttgtagtgttactttgaaagttacgtggctaaatttgtcagatatttgaaagtttaaaacttcaaatgattatagttttgaatttcatttgctatgttttgtaggttagatttttttttcttcaagaggagtaggaagagtgtgaagctctagaaaaaaatgtag

SEQ ID NO: 819 - DNA, 661 bp, Homo sapiens
  misc_feature [331]..[331]: Chromosome 2, SNP identification no. = rs10199046
  misc_feature [331]..[331]: allele = c, in linkage disequilibrium with rs1406421, respectively
  misc_feature [331]..[331]: n is a, t, c or g
accatctctactatataatctaacaattaaaaaataacaggtaagagtttttgagtcacgcaagattgatttgggttctgttgaaaaaaaattgtagcaaaatgatccattgcaaaattttgagtaatatactttgtggtataggtttttgtctattttgggagcttgaaatgtgaatattttttgaaaatactttttcacaattaaaatatgaaaattttccataagcaaaatctgttaacatatagaagacttggtaaatcaataaggacattaaaaataattagaagattatttgtagtgttactttgaaagttacgtggctaaattngtcagatatttgaaagtttaaaacttcaaatgattatagttttgaatttcatttgctatgttttgtaggttagatttttttttcttcaagaggagtaggaagagtgtgaagctctagaaaaaaatgtagattgtacgtgatttagttatatttcagtacttttggtgctggcctttttcttataactattgaatgtttatatatcttcagcgaatttaataaaaaatagttttcttcattgacagagaacattatatcaccaagttaagataacaaagttattaataattcccaatcccgattgagttctttactgtagtaatagcagtt

SEQ ID NO: 820 - DNA, 661 bp, Homo sapiens
  misc_feature [331]..[331]: Chromosome 2, SNP identification no. = rs11563100
  misc_feature [331]..[331]: allele = t, in linkage disequilibrium with rs1406421, respectively
  misc_feature [331]..[331]: n is a, t, c or g
tggtataggtttttgtctattttgggagcttgaaatgtgaatattttttgaaaatactttttcacaattaaaatatgaaaattttccataagcaaaatctgttaacatatagaagacttggtaaatcaataaggacattaaaaataattagaagattatttgtagtgttactttgaaagttacgtggctaaatttgtcagatatttgaaagtttaaaacttcaaatgattatagttttgaatttcatttgctatgttttgtaggttagatttttttttcttcaagaggagtaggaagagtgtgaagctctagaaaaaaatgtagattgtangtgatttagttatatttcagtacttttggtgctggcctttttcttataactattgaatgtttatatatcttcagcgaatttaataaaaaatagttttcttcattgacagagaacattatatcaccaagttaagataacaaagttattaataattcccaatcccgattgagttctttactgtagtaatagcagtttttaaatttaaaacacacacacacactcacacacacacacacacacacacacacacacgtatatacaaaagtactttatggataacctcccaattctcaatctggagtttcataatccacagactaggttaattga

SEQ ID NO: 821 - DNA, 661 bp, Homo sapiens
  misc_feature [331]..[331]: Chromosome 2, SNP identification no. = rs888107
  misc_feature [331]..[331]: allele = g, in linkage disequilibrium with rs1406421, respectively
  misc_feature [331]..[331]: n is a, t, c or g
aataaaaaatagttttcttcattgacagagaacattatatcaccaagttaagataacaaagttattaataattcccaatcccgattgagttctttactgtagtaatagcagtttttaaatttaaaacacacacacacactcacacacacacacacacacacacacacacacgtatatacaaaagtactttatggataacctcccaattctcaatctggagtttcataatccacagactaggttaattgataaggaaaattgtcacatataaaagatactatttataaaagatactacttgtatttgaaaacttcaaaatcatcacagtgtnatccttttgactatagacctcgaatataagaaaaatgtgtattaagaacaaacaagaaggaattatggcaattagaaactgatgagcaaatgctaagtctcaggctataatgtttctaaataaataccaattcagttcagctgtgggcagccatcagcaccattattgtgatttccatttgagctcgacttttcctaacaccagctgattccctccacattgcattccaacaaacacaggtttgactgtgcttcttcgcacagctttcagtcaccatgcacaatgaacttccagggtacattattatggtcgaataagacaactggatgg

SEQ ID NO: 822 - DNA, 661 bp, Homo sapiens
  misc_feature [331]..[331]: Chromosome 2, SNP identification no. = rs11563101
  misc_feature [331]..[331]: allele = g, in linkage disequilibrium with rs1406421, respectively
  misc_feature [331]..[331]: n is a, t, c or g
actgttttgcccttagtatttcattgccatttagttaggatacagtagatacagaccagtcttattgttcattaacaaaatattctttctcaaaatatttcatttaactataaactattcttactggtcatttccatatgcaaaagtgtttcctttcccttgaatttcacaaccttttagattaattcaggatatgtatattggacatttacattccacttattaatagaactaagcaagccatactttcaatgaataatccaaggaagaagtattgattaagtagtttcatttggcttggcaattcttttttcttgtacataaaattggnattttgaaacgtgagtttaaattgaattactttgtagctacatccaatgttctgaatgactatctgaacaagatccaaaatctatatattaccacagtttaatatctcaggcatttttcatattaactgtaaatcactttaattaaatcttataagcgcaggagttttcaaggctgttaaataagctgctcacttgaagtattaaagtccaaactgtcatatttttatacaatgttaagctcgcattggcctcagtctgatgaaatgacagcattcttcactggtaaagtgaagacatgttaatttattagcttaatttctgctggtgca

SEQ ID NO: 823 - DNA, 661 bp, Homo sapiens
  misc_feature [331]..[331]: Chromosome 2, SNP identification no. = rs11562989
  misc_feature [331]..[331]: allele = c, in linkage disequilibrium with rs1406421, respectively
  misc_feature [331]..[331]: n is a, t, c or g
acaaaatattctttctcaaaatatttcatttaactataaactattcttactggtcatttccatatgcaaaagtgtttcctttcccttgaatttcacaaccttttagattaattcaggatatgtatattggacatttacattccacttattaatagaactaagcaagccatactttcaatgaataatccaaggaagaagtattgattaagtagtttcatttggcttggcaattcttttttcttgtacataaaattggcattttgaaacgtgagtttaaattgaattactttgtagctacatccaatgttctgaatgactatctgaacaaganccaaaatctatatattaccacagtttaatatctcaggcatttttcatattaactgtaaatcactttaattaaatcttataagcgcaggagttttcaaggctgttaaataagctgctcacttgaagtattaaagtccaaactgtcatatttttatacaatgttaagctcgcattggcctcagtctgatgaaatgacagcattcttcactggtaaagtgaagacatgttaatttattagcttaatttctgctggtgcaaccattgtatgcgtaacaggggtacttgaagcaaagaacagaaatatgaagtacatactgagatgagtagaatc

SEQ ID NO: 824 - DNA, 661 bp, Homo sapiens
  misc_feature [331]..[331]: Chromosome 2, SNP identification no. = rs11563024
  misc_feature [331]..[331]: allele = g, in linkage disequilibrium with rs1406421, respectively
  misc_feature [331]..[331]: n is a, t, c or g
ctttctcaaaatatttcatttaactataaactattcttactggtcatttccatatgcaaaagtgtttcctttcccttgaatttcacaaccttttagattaattcaggatatgtatattggacatttacattccacttattaatagaactaagcaagccatactttcaatgaataatccaaggaagaagtattgattaagtagtttcatttggcttggcaattcttttttcttgtacataaaattggcattttgaaacgtgagtttaaattgaattactttgtagctacatccaatgttctgaatgactatctgaacaagatccaaaatctntatattaccacagtttaatatctcaggcatttttcatattaactgtaaatcactttaattaaatcttataagcgcaggagttttcaaggctgttaaataagctgctcacttgaagtattaaagtccaaactgtcatatttttatacaatgttaagctcgcattggcctcagtctgatgaaatgacagcattcttcactggtaaagtgaagacatgttaatttattagcttaatttctgctggtgcaaccattgtatgcgtaacaggggtacttgaagcaaagaacagaaatatgaagtacatactgagatgagtagaatccaaggatctt

SEQ ID NO: 825 - DNA, 661 bp, Homo sapiens
  misc_feature [331]..[331]: Chromosome 2, SNP identification no. = rs11563122
  misc_feature [331]..[331]: allele = a, in linkage disequilibrium with rs1406421, respectively
  misc_feature [331]..[331]: n is a, t, c or g
cagtttaatatctcaggcatttttcatattaactgtaaatcactttaattaaatcttataagcgcaggagttttcaaggctgttaaataagctgctcacttgaagtattaaagtccaaactgtcatatttttatacaatgttaagctcgcattggcctcagtctgatgaaatgacagcattcttcactggtaaagtgaagacatgttaatttattagcttaatttctgctggtgcaaccattgtatgcgtaacaggggtacttgaagcaaagaacagaaatatgaagtacatactgagatgagtagaatccaaggatcttgtataaatgangggtgactggatttctacttaaaaaaaagagcaatctctttttactcttcgttaaaatgttaatgccttgtgcaaagtcctgatattataatttttctgtatattcttgtctaacagtgatttttcttaattaattacaatttaaaagcattgatgtgttcaaatatgttaatattttattgtgacctaaaatgtccatcttaattcatttacaaatttcaaaaagactaataatatcctaaatgcccatcttaattcatttacaaatttcaaaaagactaataatatcctaaatgcccattaatagaagaatgggtaaataaatagtgg

SEQ ID NO: 826 - DNA, 661 bp, Homo sapiens
  misc_feature [331]..[331]: Chromosome 2, SNP identification no. = rs7578318
  misc_feature [331]..[331]: allele = c, in linkage disequilibrium with rs1406421, respectively
  misc_feature [331]..[331]: n is a, t, c or g
catttacaaatttcaaaaagactaataatatcctaaatgcccatcttaattcatttacaaatttcaaaaagactaataatatcctaaatgcccattaatagaagaatgggtaaataaatagtggtatctaatggaataaaatagaaaaaagaaaataacagagtaacagtccatgtccttgaaagatgagtaatgctgtgaggggcacaagagggtttttggaggtacctgaaacgttttctgtcttgatctgggtgctggttatgtgttcacttgtaaagttcatcacattttatttgtgtctctttattgatgtatcagtaagaagtantaaatattttatttttcaataaaatgcgtcacttgttctctgaaaggggaaacaccagtttcctcagtatattaaaaaacctattaaagtataaaaagttaaattacataaattttgataagctcctttaataagctcatttaaataataccaatgtttgagaatagtggctaaatgaataagatatatttttaaccaaacttggtctctagtaaagcctccatggtgccaagatcttgttgtgtgaaatttccggttaaattagggcggaaagagtgaaggtgggacgataatacaactactgagaccagttttgggatgtcaggagaa

SEQ ID NO: 827 - DNA, 661 bp, Homo sapiens
  misc_feature [331]..[331]: Chromosome 2, SNP identification no. = rs11888857
  misc_feature [331]..[331]: allele = c, in linkage disequilibrium with rs1406421, respectively
  misc_feature [331]..[331]: n is a, t, c or g
agagttgtttctggctccttattttgagtaggactcattccctgactcctgagtgagaagtctttcttcctgactgttttgagagagaatttatttcgtaactccatgagctgagtttatttcttcatggctcgctcttttgagtggaaatttatcccctgattctgtgggctacaagcctttttttttttctgggtctctgtgtcaagtggggattgctccctgacattttgggttggaagattgtttttttccaggctctatgtgagtacttctgtttctttatttgatcctgtttctcacatgataacttctagtcaactcaaatcanctttgtgaatccctcttcactgtatgtcctgccaactctgtccatgttcttttttttttttttcttcgagatggagtctcgctctgtcacccaggctggagtgcagtggcgccatctcggctgactacaagctctgcctccagggttcacgccattctcctgcctcagcctcccgagtatctgggactacaggcgcccgccactatgcccggctaattttttgtattttttagtagagacggggtttcaccgttttagccaggatggtctggatctcctgacctcgtgatccgcccacctcagcctcccaaagtgctgggattacaggcg

SEQ ID NO: 828 - DNA, 661 bp, Homo sapiens
  misc_feature [331]..[331]: Chromosome 2, SNP identification no. = rs13012231
  misc_feature [331]..[331]: allele = t, in linkage disequilibrium with rs1406421, respectively
  misc_feature [331]..[331]: n is a, t, c or g
gactacaagctctgcctccagggttcacgccattctcctgcctcagcctcccgagtatctgggactacaggcgcccgccactatgcccggctaattttttgtattttttagtagagacggggtttcaccgttttagccaggatggtctggatctcctgacctcgtgatccgcccacctcagcctcccaaagtgctgggattacaggcgtgagccaccgcgcccggcctgtccatgttctttttgttggcttgaatttactaaggataaattggaatgtctttagcctttttggaaaacttatgatctccccaaactagcatctccaagacntctcctttctcattctttctactcttccttatttcttttaccaccttgggttctcattcagttctattgaatcctttaatgtgtcctccttcaaaatcctaacagtttgtccctgccttttagttttctaaagacacttgaagtttaaactctctactgcataaggagcccctcaaggatctgccaaaagcagcaacctgagactgaaaaggggaaatgctaagtggaaacagtctgaacattgtatcaactcaggtaagctttagagacatctgggtagctgctaggtgtttcctcagtcactcgtctaaaatgtggtccacagcctct

SEQ ID NO: 829 - DNA, 661 bp, Homo sapiens
  misc_feature [331]..[331]: Chromosome 2, SNP identification no. = rs13006383
  misc_feature [331]..[331]: allele = c, in linkage disequilibrium with rs1406421, respectively
  misc_feature [331]..[331]: n is a, t, c or g
ggggtttcaccgttttagccaggatggtctggatctcctgacctcgtgatccgcccacctcagcctcccaaagtgctgggattacaggcgtgagccaccgcgcccggcctgtccatgttctttttgttggcttgaatttactaaggataaattggaatgtctttagcctttttggaaaacttatgatctccccaaactagcatctccaagacctctcctttctcattctttctactcttccttatttcttttaccaccttgggttctcattcagttctattgaatcctttaatgtgtcctccttcaaaatcctaacagtttgtccctgccntttagttttctaaagacacttgaagtttaaactctctactgcataaggagcccctcaaggatctgccaaaagcagcaacctgagactgaaaaggggaaatgctaagtggaaacagtctgaacattgtatcaactcaggtaagctttagagacatctgggtagctgctaggtgtttcctcagtcactcgtctaaaatgtggtccacagcctctgtaagattacgtatcagggcaaaagaaaatcttaaaagttctctctacaaataatgattttttaaaaaaagctttagctcttattcaacttatcttatttttgtcagaaacacaattt

SEQ ID NO: 830 - DNA, 661 bp, Homo sapiens
  misc_feature [331]..[331]: Chromosome 2, SNP identification no. = rs17862653
  misc_feature [331]..[331]: allele = a, g
  misc_feature [331]..[331]: n is a, t, c or g
caaaatcctaacagtttgtccctgccttttagttttctaaagacacttgaagtttaaactctctactgcataaggagcccctcaaggatctgccaaaagcagcaacctgagactgaaaaggggaaatgctaagtggaaacagtctgaacattgtatcaactcaggtaagctttagagacatctgggtagctgctaggtgtttcctcagtcactcgtctaaaatgtggtccacagcctctgtaagattacgtatcagggcaaaagaaaatcttaaaagttctctctacaaataatgattttttaaaaaaagctttagctcttattcaacttntcttatttttgtcagaaacacaatttggataaaatgcaaagtggaaataagttttgtatgactgtgttgcctgacttatgactaaaattttcaaataaaatctataaaataactttgtctctatgaatgtacctatatatggtgtttgtacatatgcatatatacacatatgtacatacacttttttctttcaggatgatattaccaaattataaaatcccttaaagaaattctacttaaattggcttaaaaataattgaacacttatataagttaaatactcctaaaattcatagaaatatgaaacttacccagtgcttttcaagttta

SEQ ID NO: 831 - DNA, 661 bp, Homo sapiens
  misc_feature [331]..[331]: Chromosome 2, SNP identification no. = rs6734029
  misc_feature [331]..[331]: allele = a, in linkage disequilibrium with rs1406421, respectively
  misc_feature [331]..[331]: n is a, t, c or g
aattggcttaaaaataattgaacacttatataagttaaatactcctaaaattcatagaaatatgaaacttacccagtgcttttcaagtttacatgatttgagtaaatctttagtaaataaaatcagtttaatattgttggtttaatacaaacagctatatcttctgagttatgagctttaagtataagacaagcataaatttttattctgtttgagtttactagttgaataaagtaataatgtatgtacttgatgtttgaaattgtaaaaatttaaattcaacctaaaacaaatgtataattccacaaacaggagaaatgagttacttganatccagtacttcatatatatcaaacacaacagtaaaacaaagaaactcgtgtatttaacttattaaagttttctatttgcttttatttagtctagcctgcatatgctgtgaaaatagttaaccagaaagtaacttgagattatggctgactgtgtctggtgttacagtatatctgcccaaaaacagttttcaaaatcttcttgctaactatcaagcttagtgttacgttaagtaatacatattcattaataattaattaggatacactactaaaatattcattactaatcacacatttaagtttatatagttttggtgtcttgtttttat

SEQ ID NO: 832 - DNA, 661 bp, Homo sapiens
  misc_feature [331]..[331]: Chromosome 2, SNP identification no. = rs6721908
  misc_feature [331]..[331]: allele = g, in linkage disequilibrium with rs1406421, respectively
  misc_feature [331]..[331]: n is a, t, c or g
ttaagtataagacaagcataaatttttattctgtttgagtttactagttgaataaagtaataatgtatgtacttgatgtttgaaattgtaaaaatttaaattcaacctaaaacaaatgtataattccacaaacaggagaaatgagttacttgatatccagtacttcatatatatcaaacacaacagtaaaacaaagaaactcgtgtatttaacttattaaagttttctatttgcttttatttagtctagcctgcatatgctgtgaaaatagttaaccagaaagtaacttgagattatggctgactgtgtctggtgttacagtatatctgcncaaaaacagttttcaaaatcttcttgctaactatcaagcttagtgttacgttaagtaatacatattcattaataattaattaggatacactactaaaatattcattactaatcacacatttaagtttatatagttttggtgtcttgtttttatacaatatacagaagttgaatatatttgggtctgttaacaaaaatgagaaatgtactatgaggaaacagcatataactataagaaatatgagatggtatattcataaaatttgcaagtctgttatcaaaatcctggtatatgacagataattgtctactttgtctatttcttgatttt

SEQ ID NO: 833 - DNA, 661 bp, Homo sapiens
  misc_feature [331]..[331]: Chromosome 2, SNP identification no. = rs6737158
  misc_feature [331]..[331]: allele = c, in linkage disequilibrium with rs1406421, respectively
  misc_feature [331]..[331]: n is a, t, c or g
gaaatgagttacttgatatccagtacttcatatatatcaaacacaacagtaaaacaaagaaactcgtgtatttaacttattaaagttttctatttgcttttatttagtctagcctgcatatgctgtgaaaatagttaaccagaaagtaacttgagattatggctgactgtgtctggtgttacagtatatctgcccaaaaacagttttcaaaatcttcttgctaactatcaagcttagtgttacgttaagtaatacatattcattaataattaattaggatacactactaaaatattcattactaatcacacatttaagtttatatagtttnggtgtcttgtttttatacaatatacagaagttgaatatatttgggtctgttaacaaaaatgagaaatgtactatgaggaaacagcatataactataagaaatatgagatggtatattcataaaatttgcaagtctgttatcaaaatcctggtatatgacagataattgtctactttgtctatttcttgattttctcagtgaaagaatggctgctaatagttaataattataatcaatatatgtaattaaaactactagaaataataagagtgatgggaaacaactcatatgaaaagtatgcaaggaatgtcggttttttttatatgaaaa

SEQ ID NO: 834 - DNA, 661 bp, Homo sapiens
  misc_feature [331]..[331]: Chromosome 2, SNP identification no. = rs6737381
  misc_feature [331]..[331]: allele = c, in linkage disequilibrium with rs1406421, respectively
  misc_feature [331]..[331]: n is a, t, c or g
gttaaccagaaagtaacttgagattatggctgactgtgtctggtgttacagtatatctgcccaaaaacagttttcaaaatcttcttgctaactatcaagcttagtgttacgttaagtaatacatattcattaataattaattaggatacactactaaaatattcattactaatcacacatttaagtttatatagttttggtgtcttgtttttatacaatatacagaagttgaatatatttgggtctgttaacaaaaatgagaaatgtactatgaggaaacagcatataactataagaaatatgagatggtatattcataaaatttgcaagnctgttatcaaaatcctggtatatgacagataattgtctactttgtctatttcttgattttctcagtgaaagaatggctgctaatagttaataattataatcaatatatgtaattaaaactactagaaataataagagtgatgggaaacaactcatatgaaaagtatgcaaggaatgtcggttttttttatatgaaaagatatacaaagtaggaaggatgtgttttttgttaaagggatataaaagagtaattttcttctaaagtaagatgactggtgttccagaaagagaaaaatgtagaagaaaaaaaaaattgaatggatataagaag

SEQ ID NO: 835 - DNA, 661 bp, Homo sapiens
  misc_feature [331]..[331]: Chromosome 2, SNP identification no. = rs13020816
  misc_feature [331]..[331]: allele = c, in linkage disequilibrium with rs1406421, respectively
  misc_feature [331]..[331]: n is a, t, c or g
aaaagattctgtgttttttaaaaaataatatgtgcattatattaacctttaaccaaggacttgactagaatatcatatttgaggatgacataaccattcagctttaaagaactaaggcctactttactgagccaatgcttaaaaagccctcctggaaaaactggcctggtatctggcttatgggatttccagttttacagatgagtaagtaaggttccttgcaggctcaggaacatcaagatattttgaggactttaagaaaaaagaatttcatctaaatctatatgtactgcaagcaaaatctggtggtgagttcttggctttgcttccnggtcttgagagatttataaaagtccaatctgagattccaatgaaaagttccaggaagacaaattcaaaaagacctatgtagtcagttaccattcttgctgcacttatgtaaataaccaagccaaatctaatgagaccagatttattttgtaagcaacaatcaaaaggggtcgggggtgagtgtagggagaaatgttctgtttcaacaaaaaactatagcgtacactgcgtgttactatctgaaaactggactgtatcaattctagtttcttccaatatttggctatgactctccaaaccaatggagagtttccatttttttttctcccac

SEQ ID NO: 836 - DNA, 661 bp, Homo sapiens
  misc_feature [331]..[331]: Chromosome 2, SNP identification no. = rs12995306
  misc_feature [331]..[331]: allele = t, in linkage disequilibrium with rs1406421, respectively
  misc_feature [331]..[331]: n is a, t, c or g
cctggtcttgagagatttataaaagtccaatctgagattccaatgaaaagttccaggaagacaaattcaaaaagacctatgtagtcagttaccattcttgctgcacttatgtaaataaccaagccaaatctaatgagaccagatttattttgtaagcaacaatcaaaaggggtcgggggtgagtgtagggagaaatgttctgtttcaacaaaaaactatagcgtacactgcgtgttactatctgaaaactggactgtatcaattctagtttcttccaatatttggctatgactctccaaaccaatggagagtttccatttttttttctccnaccttcctgacttggcatcactgagaactgaaactgcccttttccccaagctcagcaagctgaagctagatgttttgatacaaacttcaaagaaaccaccacacaagtaaaaaaatatgtatgggcaatctacatgcttgctgctgtatgggccactaagaaaggttacagaaatacccagtgtcataaccaaagacattaatactgcaaaccaggaaattaattggattgccactaccaactttgagcccaacatccagaaatcttactgactggctaccctctgaactcagactgggtttacaactattaatatttttcttcttttat

SEQ ID NO: 837 - DNA, 661 bp, Homo sapiens
  misc_feature [331]..[331]: Chromosome 2, SNP identification no. = rs7591147
  misc_feature [331]..[331]: allele = a, in linkage disequilibrium with rs1406421, respectively
  misc_feature [331]..[331]: n is a, t, c or g
cttggcatcactgagaactgaaactgcccttttccccaagctcagcaagctgaagctagatgttttgatacaaacttcaaagaaaccaccacacaagtaaaaaaatatgtatgggcaatctacatgcttgctgctgtatgggccactaagaaaggttacagaaatacccagtgtcataaccaaagacattaatactgcaaaccaggaaattaattggattgccactaccaactttgagcccaacatccagaaatcttactgactggctaccctctgaactcagactgggtttacaactattaatatttttcttcttttattttcatagaantcctcttcattaatgcctgactgcttgcaccagccagcaaatatcttctactactgacatggtttggctatgtccccacccaaatctcatgttgaattcccacgtgttatgggagggacctggtggggagggagttgaatcatgggggcagatctttcccatgctgttcttgtgatattgaataagtcccatgagatttgatggttttaaaaatgggagttttcctgcacaagctctgtttcttgcctgccaccatccatgcaggatgtgacttgctcctccttgccttctgctttgtgagacctccccagccatgtggaactgtaagtc

SEQ ID NO: 838 - DNA, 661 bp, Homo sapiens
  misc_feature [331]..[331]: Chromosome 2, SNP identification no. = rs17868123
  misc_feature [331]..[331]: allele = a, in linkage disequilibrium with rs1406421, respectively
  misc_feature [331]..[331]: n is a, t, c or g
tcagactgggtttacaactattaatatttttcttcttttattttcatagaattcctcttcattaatgcctgactgcttgcaccagccagcaaatatcttctactactgacatggtttggctatgtccccacccaaatctcatgttgaattcccacgtgttatgggagggacctggtggggagggagttgaatcatgggggcagatctttcccatgctgttcttgtgatattgaataagtcccatgagatttgatggttttaaaaatgggagttttcctgcacaagctctgtttcttgcctgccaccatccatgcaggatgtgacttgctcntccttgccttctgctttgtgagacctccccagccatgtggaactgtaagtccaataaacacctttcttatgtaaattgcccagtatgtctttatcagcagtgtgaaaaagccctaatacaataaattggtaccactagagtggggcattgctgaaaagatacttgaaaatgtggaaatgactttggaactgggtaacaaacggagcttgaaacagtttggagagctcagaagaggagaagaaaatttgggaacctttggagcttcctagaggtgaatggctttgccccaaatgctgatagccataaggacaataaagtccaggttgagat

SEQ ID NO: 839 - DNA, 661 bp, Homo sapiens
  misc_feature [331]..[331]: Chromosome 2, SNP identification no. = rs10207943
  misc_feature [331]..[331]: allele = g, in linkage disequilibrium with rs1406421, respectively
  misc_feature [331]..[331]: n is a, t, c or g
gatttgatggttttaaaaatgggagttttcctgcacaagctctgtttcttgcctgccaccatccatgcaggatgtgacttgctcctccttgccttctgctttgtgagacctccccagccatgtggaactgtaagtccaataaacacctttcttatgtaaattgcccagtatgtctttatcagcagtgtgaaaaagccctaatacaataaattggtaccactagagtggggcattgctgaaaagatacttgaaaatgtggaaatgactttggaactgggtaacaaacggagcttgaaacagtttggagagctcagaagaggagaagaaaatntgggaacctttggagcttcctagaggtgaatggctttgccccaaatgctgatagccataaggacaataaagtccaggttgagatgctctaagatggaaatgagaaactttttgggggctggagcaaagatgactctttttatgtcttagcaaagagactggtggcattttgcccctgccctagagatttgtggaactttgaacttgagaaagatgatttagggtatctggcagaagaaatttctaagcagcaaagcattcaagaagtgacttgggtgctgttaaaggctttcagttttataagggaagctgagcataaacatttggaaac

SEQ ID NO: 840 - DNA, 661 bp, Homo sapiens
  misc_feature [331]..[331]: Chromosome 2, SNP identification no. = rs13001835
  misc_feature [331]..[331]: allele = g, in linkage disequilibrium with rs1406421, respectively
  misc_feature [331]..[331]: n is a, t, c or g
gacttgctcctccttgccttctgctttgtgagacctccccagccatgtggaactgtaagtccaataaacacctttcttatgtaaattgcccagtatgtctttatcagcagtgtgaaaaagccctaatacaataaattggtaccactagagtggggcattgctgaaaagatacttgaaaatgtggaaatgactttggaactgggtaacaaacggagcttgaaacagtttggagagctcagaagaggagaagaaaatttgggaacctttggagcttcctagaggtgaatggctttgccccaaatgctgatagccataaggacaataaagtccnggttgagatgctctaagatggaaatgagaaactttttgggggctggagcaaagatgactctttttatgtcttagcaaagagactggtggcattttgcccctgccctagagatttgtggaactttgaacttgagaaagatgatttagggtatctggcagaagaaatttctaagcagcaaagcattcaagaagtgacttgggtgctgttaaaggctttcagttttataagggaagctgagcataaacatttggaaactttgcagcctgacagtgtgttagaaaagaaaatcccattttctgaggagaaattcaagccagctgcagaaatttg

SEQ ID NO: 841 - DNA, 661 bp, Homo sapiens
  misc_feature [331]..[331]: Chromosome 2, SNP identification no. = rs13016411
  misc_feature [331]..[331]: allele = t, in linkage disequilibrium with rs1406421, respectively
  misc_feature [331]..[331]: n is a, t, c or g
agtcttgggtatgtcttcatcagcagtgtgaaaatggactaatacaactaccaaatcccaacaaatgatttagctgcttcttaatgaacagaagaaatgaatttatattgttcaaaggacttcacatttgttcaaatgaaaggactaacaacagcctttctccttcattaaactagtcaggctcttctgaatcctcttcccaactaagctttaacttttatacttctgttcttctttgcattgcctaattttggaaagagtcctgttaagtcagttaggccagaagaacaacccttgatacataattaccctcaatttcccactaaatttntcatcttccaccatcacccaggtgatatctgatcactctggtctgccttcaccaagaatcctgttaggtcattttagccagaatcttcccttacccctggtgtttcctcttagtaatgttctttgcactgacatccccaccctactccttggctataaattcccacttttccttgttgcatttttgtagtggaggccaacctctctcccccgctgcagaacttcattgcagtagtccctatacctattgtgatagtccgtctgaataaagtgtgctgtaactgtgtttttaacaccttagaaatatttttcacaggtgatggtaggtatg

SEQ ID NO: 842 - DNA, 661 bp, Homo sapiens
  misc_feature [331]..[331]: Chromosome 2, SNP identification no. = rs13017345
  misc_feature [331]..[331]: allele = a, in linkage disequilibrium with rs1406421, respectively
  misc_feature [331]..[331]: n is a, t, c or g
gtcctgttaagtcagttaggccagaagaacaacccttgatacataattaccctcaatttcccactaaatttctcatcttccaccatcacccaggtgatatctgatcactctggtctgccttcaccaagaatcctgttaggtcattttagccagaatcttcccttacccctggtgtttcctcttagtaatgttctttgcactgacatccccaccctactccttggctataaattcccacttttccttgttgcatttttgtagtggaggccaacctctctcccccgctgcagaacttcattgcagtagtccctatacctattgtgatagtccntctgaataaagtgtgctgtaactgtgtttttaacaccttagaaatatttttcacaggtgatggtaggtatggaaaaaaataagtttaatgtgtgaaaaccataaagtgcttggttactaaacataaggactagagaagggaaggaaataaggaaatcttctgtttcaactctaagtcaaaagaacagtggtagagcagacagagttaagaaacttccaacaggacttagaaagacatgtaaatatttaagtcataaatatctctctttaaatggaactgcctctaaaatatatctgaaaacaaaacaaaacaaaacaaaaaaaagaatcg

SEQ ID NO: 843 - DNA, 661 bp, Homo sapiens
  misc_feature [331]..[331]: Chromosome 2, SNP identification no. = rs13022923
  misc_feature [331]..[331]: allele = a, in linkage disequilibrium with rs1406421, respectively
  misc_feature [331]..[331]: n is a, t, c or g
gaaaaccataaagtgcttggttactaaacataaggactagagaagggaaggaaataaggaaatcttctgtttcaactctaagtcaaaagaacagtggtagagcagacagagttaagaaacttccaacaggacttagaaagacatgtaaatatttaagtcataaatatctctctttaaatggaactgcctctaaaatatatctgaaaacaaaacaaaacaaaacaaaaaaaagaatcgatttcctaacacagaaggcattcaaaagttttcccttgatgttcagtcttttcccactcttctttgtaatcacgaaattcaatattgtgattcnttgtttatcatatctgccttttctaccagcctgtaatcttctagagatcttcttaataactctagtatctagcacaatataaattctcaatgaattaaaacagtatctaagaccagggtgattctctaattcttttaccaaatgagggagggtaagatattttggacccatattttgagtcctaccaactacccagaatgctataatagcctgggaagaagaaatctttatattccttgaactcttaatgtagtcctctaaaaaacccctgaggtggttctgatacttgcctattgccttctgcctgccttcctcattgagtctccactg

SEQ ID NO: 844 - DNA, 661 bp, Homo sapiens
  misc_feature [331]..[331]: Chromosome 2, SNP identification no. = rs11563049
  misc_feature [331]..[331]: allele = c, in linkage disequilibrium with rs1406421, respectively
  misc_feature [331]..[331]: n is a, t, c or g
ctaccagcctgtaatcttctagagatcttcttaataactctagtatctagcacaatataaattctcaatgaattaaaacagtatctaagaccagggtgattctctaattcttttaccaaatgagggagggtaagatattttggacccatattttgagtcctaccaactacccagaatgctataatagcctgggaagaagaaatctttatattccttgaactcttaatgtagtcctctaaaaaacccctgaggtggttctgatacttgcctattgccttctgcctgccttcctcattgagtctccactgggtcacttcagtttaaattgaanataaaacttctaaacagtgtcttcacagcaactatcaattttaaatattttttggcatgcaaactctccattagtaaaaattcatcctgaataatctattcaaaatacttcttatatttgatgcctcgctgtcatgaatcaaaatcactaattattctgactcctttaaatttattcatagctcatgaattggtccttcactatactgacctcatagtagttcttgaaatggacaatggattatcttgtccttgtgttagaaaagtaacttctaggacttctacttcaagtcagcttagtagaaatcccatgtgttttcccatgcaagaa

SEQ ID NO: 845 - DNA, 661 bp, Homo sapiens
  misc_feature [331]..[331]: Chromosome 2, SNP identification no. = rs10221925
  misc_feature [331]..[331]: allele = a, in linkage disequilibrium with rs1406421, respectively
  misc_feature [331]..[331]: n is a, t, c or g
aagaagaaatctttatattccttgaactcttaatgtagtcctctaaaaaacccctgaggtggttctgatacttgcctattgccttctgcctgccttcctcattgagtctccactgggtcacttcagtttaaattgaatataaaacttctaaacagtgtcttcacagcaactatcaattttaaatattttttggcatgcaaactctccattagtaaaaattcatcctgaataatctattcaaaatacttcttatatttgatgcctcgctgtcatgaatcaaaatcactaattattctgactcctttaaatttattcatagctcatgaattgntccttcactatactgacctcatagtagttcttgaaatggacaatggattatcttgtccttgtgttagaaaagtaacttctaggacttctacttcaagtcagcttagtagaaatcccatgtgttttcccatgcaagaaaagaaagtgatgtaactatctgtttctggtgaattaaattgcgtagtcttcatattgtgcaaggtaataggacatatttaaggtgtataatatttatttttttaaacatcttcctcagtgaaatgagaattcattccataatttaaagcctcttttttgttccggcttaaaaaatttcctgttaagactctaa

SEQ ID NO: 846 - DNA, 661 bp, Homo sapiens
  misc_feature [331]..[331]: Chromosome 2, SNP identification no. = rs13023625
  misc_feature [331]..[331]: allele = t, in linkage disequilibrium with rs1406421, respectively
  misc_feature [331]..[331]: n is a, t, c or g
cccctgaggtggttctgatacttgcctattgccttctgcctgccttcctcattgagtctccactgggtcacttcagtttaaattgaatataaaacttctaaacagtgtcttcacagcaactatcaattttaaatattttttggcatgcaaactctccattagtaaaaattcatcctgaataatctattcaaaatacttcttatatttgatgcctcgctgtcatgaatcaaaatcactaattattctgactcctttaaatttattcatagctcatgaattggtccttcactatactgacctcatagtagttcttgaaatggacaatggattntcttgtccttgtgttagaaaagtaacttctaggacttctacttcaagtcagcttagtagaaatcccatgtgttttcccatgcaagaaaagaaagtgatgtaactatctgtttctggtgaattaaattgcgtagtcttcatattgtgcaaggtaataggacatatttaaggtgtataatatttatttttttaaacatcttcctcagtgaaatgagaattcattccataatttaaagcctcttttttgttccggcttaaaaaatttcctgttaagactctaattttcataaataaactgcctccatttcttttatatgtaatcttgcaataa

SEQ ID NO: 847 - DNA, 661 bp, Homo sapiens
  misc_feature [331]..[331]: Chromosome 2, SNP identification no. = rs13024366
  misc_feature [331]..[331]: allele = a, in linkage disequilibrium with rs1406421, respectively
  misc_feature [331]..[331]: n is a, t, c or g
aaatattttttggcatgcaaactctccattagtaaaaattcatcctgaataatctattcaaaatacttcttatatttgatgcctcgctgtcatgaatcaaaatcactaattattctgactcctttaaatttattcatagctcatgaattggtccttcactatactgacctcatagtagttcttgaaatggacaatggattatcttgtccttgtgttagaaaagtaacttctaggacttctacttcaagtcagcttagtagaaatcccatgtgttttcccatgcaagaaaagaaagtgatgtaactatctgtttctggtgaattaaattgcntagtcttcatattgtgcaaggtaataggacatatttaaggtgtataatatttatttttttaaacatcttcctcagtgaaatgagaattcattccataatttaaagcctcttttttgttccggcttaaaaaatttcctgttaagactctaattttcataaataaactgcctccatttcttttatatgtaatcttgcaataaaagaaggataatcttctagccaagaaatttctcagagacaaatttaaatactggttattcagttgggttttagcaaaaggtaaatttctaaactataggacaatgcatttataacttacttggttttgac

SEQ ID NO: 848 - DNA, 661 bp, Homo sapiens
  misc_feature [331]..[331]: Chromosome 2, SNP identification no. = rs11563182
  misc_feature [331]..[331]: allele = a, in linkage disequilibrium with rs1406421, respectively
  misc_feature [331]..[331]: n is a, t, c or g
gcaaactctccattagtaaaaattcatcctgaataatctattcaaaatacttcttatatttgatgcctcgctgtcatgaatcaaaatcactaattattctgactcctttaaatttattcatagctcatgaattggtccttcactatactgacctcatagtagttcttgaaatggacaatggattatcttgtccttgtgttagaaaagtaacttctaggacttctacttcaagtcagcttagtagaaatcccatgtgttttcccatgcaagaaaagaaagtgatgtaactatctgtttctggtgaattaaattgcgtagtcttcatattgtncaaggtaataggacatatttaaggtgtataatatttatttttttaaacatcttcctcagtgaaatgagaattcattccataatttaaagcctcttttttgttccggcttaaaaaatttcctgttaagactctaattttcataaataaactgcctccatttcttttatatgtaatcttgcaataaaagaaggataatcttctagccaagaaatttctcagagacaaatttaaatactggttattcagttgggttttagcaaaaggtaaatttctaaactataggacaatgcatttataacttacttggttttgacagtgatctgatcctcc

SEQ ID NO: 849 - DNA, 661 bp, Homo sapiens
  misc_feature [331]..[331]: Chromosome 2, SNP identification no. = rs10221616
  misc_feature [331]..[331]: allele = c, in linkage disequilibrium with rs1406421, respectively
  misc_feature [331]..[331]: n is a, t, c or g
tcttctagccaagaaatttctcagagacaaatttaaatactggttattcagttgggttttagcaaaaggtaaatttctaaactataggacaatgcatttataacttacttggttttgacagtgatctgatcctcctggcaaatttaaaaggtgtcaggtataaagtaacaggcatattttctggaaatgtgtgtatcatctccctgttattgaggatcagcttgacatcattgcgaaatttatatttgaaacgtattctttggttgtcacagtaatgtttggaaattcgaaagccagaagaactggcagtacttttccaaagcttcatttngaggaagtataaatagagaatattactgccatgtaggccatttctggagggataactgtttaaataagaagaaaacacctgggcagagtccttgatcgttacaattagagactttaaatgacaaccttagggacaggtctagcaagaattttacttgcatttccaatcacttaatagtcagacatttattacctatgtatattttttactcatcaaacatatattgcactcttacagtttttaaagccttgtctaataactaaatacacagatagttcagatgtggtccctgtctctgcctctttgttcttttcaaaacattttaacaga

SEQ ID NO: 850 - DNA, 661 bp, Homo sapiens
  misc_feature [331]..[331]: Chromosome 2, SNP identification no. = rs11563050
  misc_feature [331]..[331]: allele = a, in linkage disequilibrium with rs1406421, respectively
  misc_feature [331]..[331]: n is a, t, c or g
ctgatcctcctggcaaatttaaaaggtgtcaggtataaagtaacaggcatattttctggaaatgtgtgtatcatctccctgttattgaggatcagcttgacatcattgcgaaatttatatttgaaacgtattctttggttgtcacagtaatgtttggaaattcgaaagccagaagaactggcagtacttttccaaagcttcattttgaggaagtataaatagagaatattactgccatgtaggccatttctggagggataactgtttaaataagaagaaaacacctgggcagagtccttgatcgttacaattagagactttaaatgacaancttagggacaggtctagcaagaattttacttgcatttccaatcacttaatagtcagacatttattacctatgtatattttttactcatcaaacatatattgcactcttacagtttttaaagccttgtctaataactaaatacacagatagttcagatgtggtccctgtctctgcctctttgttcttttcaaaacattttaacagagctaatttttttcttacattaaaaggaaactgaactgattttatgtttaaaaatgaatgaagtagtaattccatcatccaaatgcaatttattttttaaactgtaaagaagtacacatgacaaag

SEQ ID NO: 851 - DNA, 661 bp, Homo sapiens
  misc_feature [331]..[331]: Chromosome 2, SNP identification no. = rs13036132
  misc_feature [331]..[331]: allele = g, in linkage disequilibrium with rs1406421, respectively
  misc_feature [331]..[331]: n is a, t, c or g
tatattgcactcttacagtttttaaagccttgtctaataactaaatacacagatagttcagatgtggtccctgtctctgcctctttgttcttttcaaaacattttaacagagctaatttttttcttacattaaaaggaaactgaactgattttatgtttaaaaatgaatgaagtagtaattccatcatccaaatgcaatttattttttaaactgtaaagaagtacacatgacaaagaatttaccatcttgaccatttttaagtggtctatgattcagttaagtgtgtgttgcacagctacccccagatgtcttttcttcctgtaaaactgnagctctctacacattaaacaaaaactcacctctcccccagcccctggcaacgccattctactttctttctctgagtttgactaatttaggtaccttatataagtggaataatactgtacttgtctttttgtgaccacttgttaaaatataacatcctcaagtttcatccatgtgtaccatgtatcagaccaaatgcagtttcttctaatattttacttcctttcagtcatatttattttaattttacaaatattttgctgtctgcagtgttcacttaacctgacaagtattttcttatgtgttagaaaatcttgggagtgtaatttttca

SEQ ID NO: 852 - DNA, 661 bp, Homo sapiens
  misc_feature [331]..[331]: Chromosome 2, SNP identification no. = rs17864893
  misc_feature [331]..[331]: allele = c, g
  misc_feature [331]..[331]: n is a, t, c or g
ggtccctgtctctgcctctttgttcttttcaaaacattttaacagagctaatttttttcttacattaaaaggaaactgaactgattttatgtttaaaaatgaatgaagtagtaattccatcatccaaatgcaatttattttttaaactgtaaagaagtacacatgacaaagaatttaccatcttgaccatttttaagtggtctatgattcagttaagtgtgtgttgcacagctacccccagatgtcttttcttcctgtaaaactgaagctctctacacattaaacaaaaactcacctctcccccagcccctggcaacgccattctactttntttctctgagtttgactaatttaggtaccttatataagtggaataatactgtacttgtctttttgtgaccacttgttaaaatataacatcctcaagtttcatccatgtgtaccatgtatcagaccaaatgcagtttcttctaatattttacttcctttcagtcatatttattttaattttacaaatattttgctgtctgcagtgttcacttaacctgacaagtattttcttatgtgttagaaaatcttgggagtgtaatttttcatgactgcatttacacatttacagcacgtgtatttgctattttgaattcagcttgactctgtgact

SEQ ID NO: 853 - DNA, 661 bp, Homo sapiens
  misc_feature [331]..[331]: Chromosome 2, SNP identification no. = rs11563183
  misc_feature [331]..[331]: allele = a, in linkage disequilibrium with rs1406421, respectively
  misc_feature [331]..[331]: n is a, t, c or g
agtggtctatgattcagttaagtgtgtgttgcacagctacccccagatgtcttttcttcctgtaaaactgaagctctctacacattaaacaaaaactcacctctcccccagcccctggcaacgccattctactttctttctctgagtttgactaatttaggtaccttatataagtggaataatactgtacttgtctttttgtgaccacttgttaaaatataacatcctcaagtttcatccatgtgtaccatgtatcagaccaaatgcagtttcttctaatattttacttcctttcagtcatatttattttaattttacaaatattttgctntctgcagtgttcacttaacctgacaagtattttcttatgtgttagaaaatcttgggagtgtaatttttcatgactgcatttacacatttacagcacgtgtatttgctattttgaattcagcttgactctgtgacttttaattggggagatcaatttttatatattttggcataattttttttggcatttaaaaaaaatttttcgagccatggaaagccactgctgggttttacacaaaggattcacattttgaatttgtgttgtaagaagctcacactgattgaaggacagagaaaggattggagagcagccagagggaatgcagaaagt

SEQ ID NO: 854 - DNA, 661 bp, Homo sapiens
  misc_feature [331]..[331]: Chromosome 2, SNP identification no. = rs1528799
  misc_feature [331]..[331]: allele = c, in linkage disequilibrium with rs1406421, respectively
  misc_feature [331]..[331]: n is a, t, c or g
tgctgggatgacaggcatgagccactgcacccagcccacttggccatctttcaatagatgtctcaaagacagctgagacttactatgtcccataacaaacctgtagtcttcctcccaacaaacttagtcccaatatttctacaaatggcaccagcatccagttagttatgcaatgcagaattccaagaatcatccttgtcacctcttatctcccaccatctagttccaatctaataaatgcagtgagtttttagctcccatctactttcttcatctgtataatccatatcatcagtagaagtgtccattacctcaattctggatcacaaanatagctatctacctaaactttctgcattccctctggctgctctccaatcctttctctgtccttcaatcagtgtgagcttcttacaacacaaattcaaaatgtgaatcctttgtgtaaaacccagcagtggctttccatggctcgaaaaattttttttaaatgccaaaaaaaattatgccaaaatatataaaaattgatctccccaattaaaagtcacagagtcaagctgaattcaaaatagcaaatacacgtgctgtaaatgtgtaaatgcagtcatgaaaaattacactcccaagattttctaacacataagaaaatacttgtcaggtt

SEQ ID NO: 855 - DNA, 661 bp, Homo sapiens
  misc_feature [331]..[331]: Chromosome 2, SNP identification no. = rs12988318
  misc_feature [331]..[331]: allele = a, in linkage disequilibrium with rs1406421, respectively
  misc_feature [331]..[331]: n is a, t, c or g
tattttgaattcagcttgactctgtgacttttaattggggagatcaatttttatatattttggcataattttttttggcatttaaaaaaaatttttcgagccatggaaagccactgctgggttttacacaaaggattcacattttgaatttgtgttgtaagaagctcacactgattgaaggacagagaaaggattggagagcagccagagggaatgcagaaagtttaggtagatagctatttttgtgatccagaattgaggtaatggacacttctactgatgatatggattatacagatgaagaaagtagatgggagctaaaaactcactncatttattagattggaactagatggtgggagataagaggtgacaaggatgattcttggaattctgcattgcataactaactggatgctggtgccatttgtagaaatattgggactaagtttgttgggaggaagactacaggtttgttatgggacatagtaagtctcagctgtctttgagacatctattgaaagatggccaagtgggctgggtgcagtggctcatgcctgtcatcccagcactttgggaggccgaggcagggggggtcgcctgaggtcaggagttggagaccagcctgaccaacacagtgaaatcctgtctttactaaaaa

SEQ ID NO: 856 - DNA, 661 bp, Homo sapiens
  misc_feature [331]..[331]: Chromosome 2, SNP identification no. = rs2091574
  misc_feature [331]..[331]: allele = c, in linkage disequilibrium with rs1406421, respectively
  misc_feature [331]..[331]: n is a, t, c or g
ctgtttttgcagtaagatttttattgaaacatagtaatatccattcatttatctactgcctgtttttgctgctgtaaagacagagttgagtacttgcatagagacagaccatatgttccataagacttaagtatttactatgtggacattaaacaaaagtttgctaatcactgctctaaaccattataaatggtaatataaaccaaatagcctacaccaaaaaacaacaatcattatgaaacactaagaaaacaaaaccactaattattaagcaacagaccttcacagccaactcttcacttggccatctctttttttttttttttttttnggggagacagagtctaactgtgtcacccaggctagagtgcagtggcatgatctcggctcactgcaacctctgcttcctgggttcaagctattctcctgtcccagcctcccagtgcctgtagcctcccatgcctgtagctgggattacaggcatatgccaccaggcctggctaatttttgtatttttagtaaagacaggatttcactgtgttggtcaggctggtctccaactcctgacctcaggcgaccccccctgcctcggcctcccaaagtgctgggatgacaggcatgagccactgcacccagcccacttggccatctttcaatagat

SEQ ID NO: 857 - DNA, 661 bp, Homo sapiens
  misc_feature [331]..[331]: Chromosome 2, SNP identification no. = rs6712493
  misc_feature [331]..[331]: allele = c, in linkage disequilibrium with rs1406421, respectively
  misc_feature [331]..[331]: n is a, t, c or g
gaccaacacagtgaaatcctgtctttactaaaaatacaaaaattagccaggcctggtggcatatgcctgtaatcccagctacaggcatgggaggctacaggcactgggaggctgggacaggagaatagcttgaacccaggaagcagaggttgcagtgagccgagatcatgccactgcactctagcctgggtgacacagttagactctgtctccccaaaaaaaaaaaaaaaaaaaagagatggccaagtgaagagttggctgtgaaggtctgttgcttaataattagtggttttgttttcttagtgtttcataatgattgttgttttttggngtaggctatttggtttatattaccatttataatggtttagagcagtgattagcaaacttttgtttaatgtccacatagtaaatacttaagtcttatggaacatatggtctgtctctatgcaagtactcaactctgtctttacagcagcaaaaacaggcagtagataaatgaatggatattactatgtttcaataaaaatcttactgcaaaaacagttgagtttgttgacccccgaattagagaagtttttaccctttaaatccttggaggtaccctagtttttatgttcatatccctgtctgtgtaccttatctatggttctcaaattgt

SEQ ID NO: 858 - DNA, 661 bp, Homo sapiens
  misc_feature [331]..[331]: Chromosome 2, SNP identification no. = rs6754612
  misc_feature [331]..[331]: allele = g, in linkage disequilibrium with rs1406421, respectively
  misc_feature [331]..[331]: n is a, t, c or g
cacagtgaaatcctgtctttactaaaaatacaaaaattagccaggcctggtggcatatgcctgtaatcccagctacaggcatgggaggctacaggcactgggaggctgggacaggagaatagcttgaacccaggaagcagaggttgcagtgagccgagatcatgccactgcactctagcctgggtgacacagttagactctgtctccccaaaaaaaaaaaaaaaaaaaagagatggccaagtgaagagttggctgtgaaggtctgttgcttaataattagtggttttgttttcttagtgtttcataatgattgttgttttttggtgtaggntatttggtttatattaccatttataatggtttagagcagtgattagcaaacttttgtttaatgtccacatagtaaatacttaagtcttatggaacatatggtctgtctctatgcaagtactcaactctgtctttacagcagcaaaaacaggcagtagataaatgaatggatattactatgtttcaataaaaatcttactgcaaaaacagttgagtttgttgacccccgaattagagaagtttttaccctttaaatccttggaggtaccctagtttttatgttcatatccctgtctgtgtaccttatctatggttctcaaattgtgaatct

SEQ ID NO: 859 - DNA, 661 bp, Homo sapiens
  misc_feature [331]..[331]: Chromosome 2, SNP identification no. = rs2103316
  misc_feature [331]..[331]: allele = a, in linkage disequilibrium with rs1406421, respectively
  misc_feature [331]..[331]: n is a, t, c or g
tatgatggtgaaggtgccagttcaagattcacaatttgagaaccatagataaggtacacagacagggatatgaacataaaaactagggtacctccaaggatttaaagggtaaaaacttctctaattcgggggtcaacaaactcaactgtttttgcagtaagatttttattgaaacatagtaatatccattcatttatctactgcctgtttttgctgctgtaaagacagagttgagtacttgcatagagacagaccatatgttccataagacttaagtatttactatgtggacattaaacaaaagtttgctaatcactgctctaaaccattntaaatggtaatataaaccaaatagcctacaccaaaaaacaacaatcattatgaaacactaagaaaacaaaaccactaattattaagcaacagaccttcacagccaactcttcacttggccatctcttttttttttttttttttttggggagacagagtctaactgtgtcacccaggctagagtgcagtggcatgatctcggctcactgcaacctctgcttcctgggttcaagctattctcctgtcccagcctcccagtgcctgtagcctcccatgcctgtagctgggattacaggcatatgccaccaggcctggctaatttttgtatttt

SEQ ID NO: 860 - DNA, 661 bp, Homo sapiens
  misc_feature [331]..[331]: Chromosome 2, SNP identification no. = rs6754634
  misc_feature [331]..[331]: allele = t, in linkage disequilibrium with rs1406421, respectively
  misc_feature [331]..[331]: n is a, t, c or g
catgggaggctacaggcactgggaggctgggacaggagaatagcttgaacccaggaagcagaggttgcagtgagccgagatcatgccactgcactctagcctgggtgacacagttagactctgtctccccaaaaaaaaaaaaaaaaaaaagagatggccaagtgaagagttggctgtgaaggtctgttgcttaataattagtggttttgttttcttagtgtttcataatgattgttgttttttggtgtaggctatttggtttatattaccatttataatggtttagagcagtgattagcaaacttttgtttaatgtccacatagtaaatanttaagtcttatggaacatatggtctgtctctatgcaagtactcaactctgtctttacagcagcaaaaacaggcagtagataaatgaatggatattactatgtttcaataaaaatcttactgcaaaaacagttgagtttgttgacccccgaattagagaagtttttaccctttaaatccttggaggtaccctagtttttatgttcatatccctgtctgtgtaccttatctatggttctcaaattgtgaatcttgaactggcaccttcaccatcatagtagaaatgcaattttccagcgtatccagacttacagaaccaggaactctgggga

SEQ ID NO: 861 - DNA, 661 bp, Homo sapiens
  misc_feature [331]..[331]: Chromosome 2, SNP identification no. = rs13021773
  misc_feature [331]..[331]: allele = g, in linkage disequilibrium with rs1406421, respectively
  misc_feature [331]..[331]: n is a, t, c or g
gttgacccccgaattagagaagtttttaccctttaaatccttggaggtaccctagtttttatgttcatatccctgtctgtgtaccttatctatggttctcaaattgtgaatcttgaactggcaccttcaccatcatagtagaaatgcaattttccagcgtatccagacttacagaaccaggaactctggggagtggagcccaaggatctgtttatcaagacttacacacacacacacacacacacacacacacacacacacacacacacacacacaagacttctaagtgatgctgatgcatgctaaaatctgggaaccactacagcagaanagtagttcttgatcctggctacatattaaaattacttgtgaggttttacaaaaaaacttattctaagaacactatccagaacaattaagtcaatatctggctatgaagaccagcaaatatatcattatttttagaatgttctcagatcattttcatatgctgccagcatttaagagtcattgtttttatataaatatcctgtaataggtgatcaatttctcctgaaatttaagttaatttcaacaatgcacctaaggaattaatattaggggagttaaactggaatttaagtggaaagagagttttcctgatttgacagtcatgggcaaa

SEQ ID NO: 862 - DNA, 661 bp, Homo sapiens
  misc_feature [331]..[331]: Chromosome 2, SNP identification no. = rs11562938
  misc_feature [331]..[331]: allele = a, in linkage disequilibrium with rs1406421, respectively
  misc_feature [331]..[331]: n is a, t, c or g
gaatagtagttcttgatcctggctacatattaaaattacttgtgaggttttacaaaaaaacttattctaagaacactatccagaacaattaagtcaatatctggctatgaagaccagcaaatatatcattatttttagaatgttctcagatcattttcatatgctgccagcatttaagagtcattgtttttatataaatatcctgtaataggtgatcaatttctcctgaaatttaagttaatttcaacaatgcacctaaggaattaatattaggggagttaaactggaatttaagtggaaagagagttttcctgatttgacagtcatgggnaaaattcttgttataggatatggtttttgtctaaagaaattgattataggcttgttgaaactaacctataggtcacctgaaatttgttttctttgttttgtttttgaaaaatgtctacaaatccctttaaattctggcaaaggttgggagaagaaacttaaaatttacctcaagtcattcaaaatttattaggaggtgactttttttttcaaacttaaccattaaaaattgaattgtagaagacatttaaatgatctattttggcctcagaaatcacaaatcctgtatggatattgccacagagtttgatttttttaaagtgcagatgtg

SEQ ID NO: 863 - DNA, 661 bp, Homo sapiens
  misc_feature [331]..[331]: Chromosome 2, SNP identification no. = rs11562962
  misc_feature [331]..[331]: allele = g, in linkage disequilibrium with rs1406421, respectively
  misc_feature [331]..[331]: n is a, t, c or g
ttgttttctttgttttgtttttgaaaaatgtctacaaatccctttaaattctggcaaaggttgggagaagaaacttaaaatttacctcaagtcattcaaaatttattaggaggtgactttttttttcaaacttaaccattaaaaattgaattgtagaagacatttaaatgatctattttggcctcagaaatcacaaatcctgtatggatattgccacagagtttgatttttttaaagtgcagatgtgtagcagttatttctgattgtacaactcacataatttaattataaagtcctatcattcaaatttactgacagctaattaaatatnatctcaattgtgaagatttagcattcattctacttaaatcatttgcttgaatcaaaaatactaaaaatttcaatcgtagtcatcttctttccttgaattcatgaaatgaaaactctcagcatatttaaagctagtaatatgctcaagagacatattccacatagatccattcgttccattcacttgaaagcaaaaattcctaacttctctgtgtagtgtttttatttaacaaggattataaaaattttataaaaattttaatgtgtatcatgttcacaatacattacaaaaacttatttccctaaaaatagaaacattgattaaaaattt

SEQ ID NO: 864 - DNA, 661 bp, Homo sapiens
  misc_feature [331]..[331]: Chromosome 2, SNP identification no. = rs11563184
  misc_feature [331]..[331]: allele = a, in linkage disequilibrium with rs1406421, respectively
  misc_feature [331]..[331]: n is a, t, c or g
aaaatttacctcaagtcattcaaaatttattaggaggtgactttttttttcaaacttaaccattaaaaattgaattgtagaagacatttaaatgatctattttggcctcagaaatcacaaatcctgtatggatattgccacagagtttgatttttttaaagtgcagatgtgtagcagttatttctgattgtacaactcacataatttaattataaagtcctatcattcaaatttactgacagctaattaaatataatctcaattgtgaagatttagcattcattctacttaaatcatttgcttgaatcaaaaatactaaaaatttcaatcntagtcatcttctttccttgaattcatgaaatgaaaactctcagcatatttaaagctagtaatatgctcaagagacatattccacatagatccattcgttccattcacttgaaagcaaaaattcctaacttctctgtgtagtgtttttatttaacaaggattataaaaattttataaaaattttaatgtgtatcatgttcacaatacattacaaaaacttatttccctaaaaatagaaacattgattaaaaatttgattattatacataaagagcttcagatctattgcagtttccatgtcaaactggtttgaagagttactagttccatt

SEQ ID NO: 865 - DNA, 661 bp, Homo sapiens
  misc_feature [331]..[331]: Chromosome 2, SNP identification no. = rs6721305
  misc_feature [331]..[331]: allele = a, in linkage disequilibrium with rs1406421, respectively
  misc_feature [331]..[331]: n is a, t, c or g
ccattcgttccattcacttgaaagcaaaaattcctaacttctctgtgtagtgtttttatttaacaaggattataaaaattttataaaaattttaatgtgtatcatgttcacaatacattacaaaaacttatttccctaaaaatagaaacattgattaaaaatttgattattatacataaagagcttcagatctattgcagtttccatgtcaaactggtttgaagagttactagttccatttaaatctgctgcaataatgatggtttgtgtgagttattcagaaagcccaaattgccagattctacttcactttgattcatttatctcaacngagtttaagagattgaggggtcattgcagatgaacagtgaaaaatttgtgaagcactgtaaatagtgaaagggcaggctgggtgtgatggctcatgcccataatcccagcactttgggaggctgaggtgggtgggatcatttgaggccaggattcaagaccagcttggccaacatggtgaaatgctgtctctattaaaaatacaaaaattagccagccatggtggcaggcttctgtaatcccagctacccagcaggctgaaggtggagaatcacttgaactggggaggcagagattgcagtgagcggagatcgcaccattgcattccagg

SEQ ID NO: 866 - DNA, 661 bp, Homo sapiens
  misc_feature [331]..[331]: Chromosome 2, SNP identification no. = rs11563051
  misc_feature [331]..[331]: allele = a, in linkage disequilibrium with rs1406421, respectively
  misc_feature [331]..[331]: n is a, t, c or g
tcctgacctcaaatgatctgcccacctcggtctcccaaagtgctgggattacagggatgagccacgttgcccagcctgttcagtctcttaattagtggatacttcaatggcagatgtagtttccatttttgtttttatcacccactaatgttgaataatttcaaaaaggatgggaaaaacttttaggtaagagtatgaggtgcgatcatgttaaaaaacagtcatgcaattctgatgtttttgttcctatatatttcttatgtaactttttaagccaaaatgtaatttgtataaaggcaaatcatcttgtctcattattaattcaataccnacatctatggttttaaaagtatagtgtgcttcaaaagcactctgattcagtaggtctgagacagaaccaataatgtgcatttctaacaagttctaagttaatgttgatgctgctttgagacccttcctttagaactaacagacatcatcaataaacaaggaatagactacttaattttattcactaggacaaagcttacaactgatttaagaatgtggctaattgagggtcataaaacttttgttttgtttttggctcttggagactaaacaaaagtctttggctcttatagcctgagcatatatgggaattaaactctgatccacaacc

SEQ ID NO: 867 - DNA, 661 bp, Homo sapiens
  misc_feature [331]..[331]: Chromosome 2, SNP identification no. = rs11563048
  misc_feature [331]..[331]: allele = g, in linkage disequilibrium with rs1406421, respectively
  misc_feature [331]..[331]: n is a, t, c or g
ctgccaccagagttgctgtcattattattaatttatcataatttaaaagacctcatgtatcaaagattttgcaatttaataatgtaaataaggcaaacatttggccaacacattagtgtcaaatgatccattgtatgagatataaaagacgaatttataggaaaataattcaagattctcatagatatgctaaaatataaatttggatcaaagacacaatcaataaacaacacccccacccctgccatgtgttaacacagagctagtgaaaacctttcacagagggctataaacaaatttcaaacccataaggttgccagacatattcttncttatatgaagacggagggttatgaaaggcagaagcttttcttccgtagcaatatttggactctgttttgcctgcagctcattgctgctttaaatagaaagtcagggagatgctctccttaggcaagagcatcttggccaggagtttttcagtgtaatcatctttgtttatgaggaccctaattatgtgacatacccttaatggctcttctttctcattactgttgaccccaatcctctctgacttgtcccaccagcatcataaagcttttctaaaaaactccccccggctgaatttccgtggctttcactctggtattcaacaatgcaa

SEQ ID NO: 868 - DNA, 661 bp, Homo sapiens
  misc_feature [331]..[331]: Chromosome 2, SNP identification no. = rs11563179
  misc_feature [331]..[331]: allele = c, in linkage disequilibrium with rs1406421, respectively
  misc_feature [331]..[331]: n is a, t, c or g
atcttggccaggagtttttcagtgtaatcatctttgtttatgaggaccctaattatgtgacatacccttaatggctcttctttctcattactgttgaccccaatcctctctgacttgtcccaccagcatcataaagcttttctaaaaaactccccccggctgaatttccgtggctttcactctggtattcaacaatgcaaggagcatagttgtgttccatggaaatagtcttttattccactgatatcatgtaaattctgaaggatgaaatgtgatcttttagtgatcttgcagagctgagaacccagaatgatctaatatattttgttgngtgagcttcatcgaaccattattaatttctttatatttttctcatgctctaaatatcctcagaattccctgaattattattctacctattttctagtgaagaagagagcatgttgtagaacaattcagttttctcttgttgcatttgaagttctttgccttgtataagaactccagacataatttatgagcacaaggcttggagtttgattattttaaagcagagcagcaatgtgtctgcacagaatccacagctgctgtagctgcacatttgcatctggactcacctcacccacactaaatctgctgcaccatcaagctcttttgaagt

SEQ ID NO: 869 - DNA, 661 bp, Homo sapiens
  misc_feature [331]..[331]: Chromosome 2, SNP identification no. = rs11563178
  misc_feature [331]..[331]: allele = a, in linkage disequilibrium with rs1406421, respectively
  misc_feature [331]..[331]: n is a, t, c or g
ctctattttgtctggaatagaccaagtgtacaagtttatagttagttttctagcacagttataaatagggaacagtttcactttaaatactgttaagattgaacaaaaaatcttacagctacactaattatattggtcgttatttcaaaggatttaaaatatttgtattcacaagatacgatagataaattatttatagcccctggtgcctagcatgttaaaataatggatatacttaaaattaatatttatgttaatataagaataatataccatatattttaatacttttacctatgggaagtaataatatcacaatgattattttaanatctcaaggtagtcttttattaagaactttaatgtatgtaaagtctgcaaaatgctcaggaaaaaagtgggtaatattttacctataaaaagtgaaattttagagatgttagaagaatggcctataaaatattctgtctggaaacagattttggatggaggtatagaaaaacaaacttttttgtccaagaatttccatttttatcatggtgcttcagggtttaggatttagtctgtacaccagatgtacttataaacagccacctaaacaatattcacttctactgtataacgtctttattcatttccccttggtacacttttagcatta

SEQ ID NO: 870 - DNA, 661 bp, Homo sapiens
  misc_feature [331]..[331]: Chromosome 2, SNP identification no. = rs28958890
  misc_feature [331]..[331]: allele = g, in linkage disequilibrium with rs1406421, respectively
  misc_feature [331]..[331]: n is a, t, c or g
acctagaacactgttgaatacataaaaaggtgcccaataaatattttcttgaagaaacaaaatgccattttataaaacacacctaaaagtgatgttaaagtgaggacacatgattaatacaaaatgcttttggagatgaactaattcacctcctctacttcactatacagtagtccccccttatccacgagggataatttcaaagtcccccagtagaggcctaaaatgtgaatagcactgaaccccgcatatactgtgtatgaatttctttttcctccttcacagtttcaagggtagaagatgcattcttaccatagatctcagcaacatnagcatacgatttcttcttttcttattatattgagaacttttgccttttcacttaaaggaagcttcactttttgaagcttctctttggtatatctgatttgccagtgtcactactctcatcccttggggccattactaagtaaaataagagttacttgaacagaagcactgtgaagccccaacagtcaacctgataatccatgaggctactgcgtgaataaggggtggatagcatatatagtgtggatacgttgaacaaagagatgattcacgaccctggtgggacacagtgagatggtgtgagatttcatcacactactcagaatggcat

SEQ ID NO: 871 - DNA, 661 bp, Homo sapiens
  misc_feature [331]..[331]: Chromosome 2, SNP identification no. = rs12995489
  misc_feature [331]..[331]: allele = t, in linkage disequilibrium with rs1406421, respectively
  misc_feature [331]..[331]: n is a, t, c or g
tcactcagatcaaaattttttagttttctatttagacttatacttttccctgtgggttacatagaaataaattgtttaatcaacaagtatgtgagaagttatttcaattgcaattttaagacatattttgaattatttgtattcctttaaatttgttaagatttgttttatgacccaaaatatggtctatctttgtgcatgtttcatttgcacttgaggataatgtatattctcctgttgtttgaaatgtactataaatgttaatcacgtcaagtttattgatcattttatttagatcatctatgtctattttctgcctacttgttttatngattatttgaagaaaaggtggtgatttctgctaaaatgattgtggatttgtctatttctccgttcaaatcaatcagcttttgccacatgtattattaagctctgttgttagttttttgtgcatatagaatttttatgtcttggagaattttatgtccctttctacccttgattattttccatgttctgaaatctacttcgattgatgttaatacagctactccatctttcttttggttagtgtctacatgggttttctcatccttctatgtttttaaaaaataaacttttctttgatgatgattttagatttgccaggaattgcaatata

SEQ ID NO: 872 - DNA, 661 bp, Homo sapiens
  misc_feature [331]..[331]: Chromosome 2, SNP identification no. = rs12996042
  misc_feature [331]..[331]: allele = a, in linkage disequilibrium with rs1406421, respectively
  misc_feature [331]..[331]: n is a, t, c or g
agaaataaattgtttaatcaacaagtatgtgagaagttatttcaattgcaattttaagacatattttgaattatttgtattcctttaaatttgttaagatttgttttatgacccaaaatatggtctatctttgtgcatgtttcatttgcacttgaggataatgtatattctcctgttgtttgaaatgtactataaatgttaatcacgtcaagtttattgatcattttatttagatcatctatgtctattttctgcctacttgttttatcgattatttgaagaaaaggtggtgatttctgctaaaatgattgtggatttgtctatttctccnttcaaatcaatcagcttttgccacatgtattattaagctctgttgttagttttttgtgcatatagaatttttatgtcttggagaattttatgtccctttctacccttgattattttccatgttctgaaatctacttcgattgatgttaatacagctactccatctttcttttggttagtgtctacatgggttttctcatccttctatgtttttaaaaaataaacttttctttgatgatgattttagatttgccaggaattgcaatatataaatattgcaaatacaaagagtacccacatatctctcactcaattccattttaccttacca

SEQ ID NO: 873 - DNA, 661 bp, Homo sapiens
  misc_feature [331]..[331]: Chromosome 2, SNP identification no. = rs7603902
  misc_feature [331]..[331]: allele = g, in linkage disequilibrium with rs1406421, respectively
  misc_feature [331]..[331]: n is a, t, c or g
ccatgttctgaaatctacttcgattgatgttaatacagctactccatctttcttttggttagtgtctacatgggttttctcatccttctatgtttttaaaaaataaacttttctttgatgatgattttagatttgccaggaattgcaatatataaatattgcaaatacaaagagtacccacatatctctcactcaattccattttaccttaccagagtttattttaaaaatctttgataccaacatttgttattttccaaattttatttccctgtcccaggatccaattcaggatatcgcatttatctagtcaccatttctccttagtctnttctggtctgtggcaatttctgtctttccttgtttctcatgttgttactagactttataaatcctggccagacatgtgtaaaatgagtcttaatgtgggattgtctgatgttttcctcattgctaggctggtattatgaattttagggaagaaaactgtagaactgaagtgcccttctcatcctaacatatcagggagtacatgacataaacgtgatgtactggtgatgctaacattgatcacttggttaaagttgtgctgatatgtttctccagtataaagttactatttttccactttgtgtcttctattcattgaaaacaagtcact

SEQ ID NO: 874 - DNA, 661 bp, Homo sapiens
  misc_feature [331]..[331]: Chromosome 2, SNP identification no. = rs13010881
  misc_feature [331]..[331]: allele = t, in linkage disequilibrium with rs1406421, respectively
  misc_feature [331]..[331]: n is a, t, c or g
gtcagttagttacacaatggtaacatcttagctagaaaactgggggaatagagaggattggggggaatatttatatgaatgttccaaagttaccttggtgacataaatataatctctgtattgtgtactagaaacataatatataaagtattatgtgaaaattataataaataagttataggtacaattactgagtaataattttatactgtttatataacaattaatagagtagtttgtttgtaagtaccagggtcactagccaaaacagtaaagatttctgtttctgtatccctcttaaacttttactgccttcctatcaagatctccngtgatcagttttcaatacttagttgacctgtcagctgatttgacatgattgatcacttgtgtattcttgaaactattaggtcacctcattagccactttttacatttcttcttattagttgctttttaaaaaatctcaagagagaataatgttaacaggattgtggaataggatttttcagatttcatccccttatataaacaccaattttgacaaaaaacacagacaagagtgccttatgggaggctaggagtccaccagggagatctcagcaccttattggagtagaaaatttgagaatagatgtatttaaaagaggggaagcagaca

SEQ ID NO: 875 - DNA, 661 bp, Homo sapiens
  misc_feature [331]..[331]: Chromosome 2, SNP identification no. = rs7565729
  misc_feature [331]..[331]: allele = c, in linkage disequilibrium with rs1406421, respectively
  misc_feature [331]..[331]: n is a, t, c or g
ttgattagaatacaaaataacatagccataattgaacacagtatgaaggttcctaaggcaattaaatgtataactaccatatgatccagcaattttacttctgggtatatatccaaatgaaatgaaatcagtatgttgaagaaatatctgcacccaagtttattgcagcactgttcataatagccaagatgtagaaaaaaacctgtcttcattggcagataactgaataaagaaaatgaggtatctttatatgtatctatttatctaatagaatattatttatccttaataaagaagggaaccttgccatttactaaaacatggataagcntgaaatagagcaaaagtgaaataagctagacacagaaagacaaatacattatatgatctcccttatatgtggaatcaaaaacaactgaacctataaaaacagtagaatggtgttgtccaggtgtagggagggctggagaaatggggaaatgttggccaaaggttacaaagtttcagttatgtaggataaataagttctggaggcctaatatacagcatattgactgtacttaataatattttcagtctatatttgaaatttgctaagagagtggatcttacacacagaaaagataactatatgaagtgttggatgtattagttttattgt

SEQ ID NO: 876 - DNA, 661 bp, Homo sapiens
  misc_feature [331]..[331]: Chromosome 2, SNP identification no. = rs13030730
  misc_feature [331]..[331]: allele = g, in linkage disequilibrium with rs1406421, respectively
  misc_feature [331]..[331]: n is a, t, c or g
ttgaactcctgatctcgtgatccacccgcctcggcctcccaaagtgctggggtgtgagccaccatgcctggcctatctcttctacttctaaaagtctaagtgcctccagggtaaattctcagcttctctataaagctcagccccacaataatatcttctagtttttaagcgttaagtactatgtgtatttcctatatgctcataattcccaaatttatatctacgatctgcttggtatgcttggaacccttcttggaatgcaatgctcatatttacaattgcctacgtgacatatttatttaaatgtctaataagtatctcagattcagcntgtccagtgatgtgacttggctgtgtcctcacccaaatgtcatcttgaattgtagttccccaaatccccacatgtcatgagagggacccagtgggaggtaattgaatcatgggggtggttacccccatgctgttattctcatcatagtgactgagttctcagaaaatctagtggttttataaggggcttttcccacttttgcttggcacttctccttctggtcatcacatcaagggcatgtttgcttcaccttccatcaggattgtaagtttcctaaggcctccccagccatgctgaattgtgactcagttaactgtctttcctttatac

SEQ ID NO: 877 - DNA, 661 bp, Homo sapiens
  misc_feature [331]..[331]: Chromosome 2, SNP identification no. = rs13031889
  misc_feature [331]..[331]: allele = a, in linkage disequilibrium with rs1406421, respectively
  misc_feature [331]..[331]: n is a, t, c or g
aataagtatctcagattcagcatgtccagtgatgtgacttggctgtgtcctcacccaaatgtcatcttgaattgtagttccccaaatccccacatgtcatgagagggacccagtgggaggtaattgaatcatgggggtggttacccccatgctgttattctcatcatagtgactgagttctcagaaaatctagtggttttataaggggcttttcccacttttgcttggcacttctccttctggtcatcacatcaagggcatgtttgcttcaccttccatcaggattgtaagtttcctaaggcctccccagccatgctgaattgtgactcanttaactgtctttcctttatacattacccagtctcaggtatgtctttattagccacgtgagaaggaaataacacatccagaaacaaacacatttcgttttcctttacaaccccctactcttcttacttcccatatccaaaaatggcaactcagtttgtctacctatgtagaataaaatctatgttacctttctttctccttttgcttatatattatgtacatccatttctaaatatattagctcaatcctcagtagatataaaaatccaatctctttatcatctcttaactgctttctcagtctccattctttgcttctgatacatttatt

SEQ ID NO: 878 - DNA, 661 bp, Homo sapiens
  misc_feature [331]..[331]: Chromosome 2, SNP identification no. = rs12995616
  misc_feature [331]..[331]: allele = g, in linkage disequilibrium with rs1406421, respectively
  misc_feature [331]..[331]: n is a, t, c or g
caaataaaagagctcttttgtagcaccttgtgtttcatccatctagtatcaaacacagtgaaattaacaggtcaagtaaaacttctaattaaacactcaggttaaatacatagatctggagtttggatttaaaagctaaaactgtcttagagtcacgaagtatatagaattataaatttaaggcaagcacactttaaatgtatagtgcgtacctctatgcagcagcagtagctatgaccctgttttaccacaaatacatgcatcaaagagttacaccataaacacacccaggagaaatttacactggctaatgatgaagatgtgtaacccngagaacatttatcatttatgttttaacacaacaactgtatcccactattgagactttcaagttctgtttatggaaatagaaagcattttgagttcacactgctcttgaaaccagctgcaaatgacccctcaggcaattctctattgctgcctaaagcaatagcaatgaattcagtttaaccgtactcaaacactgtgattatctactataaagaacaccaaattattacatgcaaatactatgatttcttcaactgtgtctcggtctggaccaggactactccctgcagagttactatcctcaggtatgctggatcagttctcttttgaa

SEQ ID NO: 879 - DNA, 661 bp, Homo sapiens
  misc_feature [331]..[331]: Chromosome 2, SNP identification no. = rs13008379
  misc_feature [331]..[331]: allele = g, in linkage disequilibrium with rs1406421, respectively
  misc_feature [331]..[331]: n is a, t, c or g
tttgacctttgtcatgtcttgatgcagcacaaaatccttcaccagaagccaagcagatgccagtgccatgcttctactacaatcctgtagaaacatgagttaaatagagctcttttctttataaatttccccacctcaggtataccttcatagcaacacaaaataaactaagataaacacaaactttaaaaaaatttttttgaagaattccttccgtcctagcttaaaattcctccatattttcccagcatcatcagttaacattgcctttactggattacttccatgattattcaaacagtagacctgaaattaacagaaacaaaagcancccctcaaaacttatctcaggacctgaccccctattttttccagcagccatcacatctcattatttttgctgtaaaactcctcacagtattttctctattcagtgtctctatttcccaatctccatttgcctcctcaacctactttttctgggcttctgtctctaccgattccctaaaactgttgttttcaaagctatcagtgacaacagaagctgttctctgtttcttcttttcccataatttacacactcaaatcactggaaaatcttgtggactctaacttcagcacatatttcagcttcccccaattttctccatctgtaccacaa

SEQ ID NO: 880 - DNA, 661 bp, Homo sapiens
  misc_feature [331]..[331]: Chromosome 2, SNP identification no. = rs13035437
  misc_feature [331]..[331]: allele = g, in linkage disequilibrium with rs1406421, respectively
  misc_feature [331]..[331]: n is a, t, c or g
cataagtgactcagtttaaaacattttgttgttgcagcagtagcagactacgaaactgctatagtcttatttcaagtcttaaccaaagcccactagagttaatgcagtagccccaaatcttacctttcttaactctatcttttacattgtgatcagataatcttttcaaaggatggctatgtgataggcacttaggaaatatgcaatgtgcaaaaagtccactaaactactcaagttcctttaacattcttccatcactttaagaataaaatgtaaatacagtatttgagacctattcatgggccatttgaccttgactgcctcagcattntcttttcctgacgctccccaaacactttgtgccccacatcaagaaaaccatagtttcccaaaggaacgaaatctctcactatgtcactatgtcaaatacatgagtgaataaattctttagaagaggtcattaggagggaataaaatctgaaggccgtagcaaaacatgaagcaagaatctgttttccacacaaagataaatcacaatgaacttcccagagaagatgaaacactctaaagaaaataaatcactgactaagacacaaggcttctagtaatcagatttacatgtgtcataatatgaaatgaattgatatgttttctgctccat

SEQ ID NO: 881 - DNA, 661 bp, Homo sapiens
  misc_feature [331]..[331]: Chromosome 2, SNP identification no. = rs17862679
  misc_feature [331]..[331]: allele = a, in linkage disequilibrium with rs1406421, respectively
  misc_feature [331]..[331]: n is a, t, c or g
atttaatcctaacattaaacctgtaatatagatactatcactactatttcgcagatgaagttattgagactaatgcagtttcaataacttttcaaggaaatatggatagtgagcaggagaaattggcctcaagcctagaattgatattcctaatctcaaaatgcagataataaatatcttaagagtttctgtgattcttaaataagagagtgtattaaagctgtccatcacaagattcagtttacattatatgttaagaagaagaatcctttcttcttagtaataaggatacttcaatacatcaagtgtttcaactgctttagaacaattnttttggcaaatatcatacatattatagactttcacttaaattttctaacattagggttgtacatttcagtaactcctagaaccagttaaataacagcaacctcctagtggggctgatagggcttgaagaatattggacagtgtatgccacaaccacaggtattcaattgaaaacaaaacaaagcatgccagctgttcaagcaaaaaagtattcgctaatgtaactaaggataagggccaactgtttgtaaacttgacccacttggtatgggcgaagagagaccactgttagcttgacctagaatccagaatcacagagctgatactatat

SEQ ID NO: 882 - DNA, 661 bp, Homo sapiens
  misc_feature [331]..[331]: Chromosome 2, SNP identification no. = rs1919420
  misc_feature [331]..[331]: allele = a, in linkage disequilibrium with rs1406421, respectively
  misc_feature [331]..[331]: n is a, t, c or g
catttcagtaactcctagaaccagttaaataacagcaacctcctagtggggctgatagggcttgaagaatattggacagtgtatgccacaaccacaggtattcaattgaaaacaaaacaaagcatgccagctgttcaagcaaaaaagtattcgctaatgtaactaaggataagggccaactgtttgtaaacttgacccacttggtatgggcgaagagagaccactgttagcttgacctagaatccagaatcacagagctgatactatatcctagtctctttcattctgaacgttagctttgcttgctgtaggcatatggctgcaaaagtgnctatcacctctggcatagtgccatagtgttactttccttcccagggctccccatccctcaggctagactgatgtatcaaatataacatctagcttagggctgagccataattcttctagttaagaaccaattagtttttcccttttgaaaatgtgaactgcatacagagactccagctgacctttgttaagtattcaagcagaatgataatgtagagtttggatttgagttgttgtgagtgcattgcagattcacaagggactggaataaacagaagagcaagaactgcaagtagagtgctgatagggagagaaatgagcagaggatgaa

SEQ ID NO: 883 - DNA, 661 bp, Homo sapiens
  misc_feature [331]..[331]: Chromosome 2, SNP identification no. = rs13006788
  misc_feature [331]..[331]: allele = g, in linkage disequilibrium with rs1406421, respectively
  misc_feature [331]..[331]: n is a, t, c or g
ctctggcatagtgccatagtgttactttccttcccagggctccccatccctcaggctagactgatgtatcaaatataacatctagcttagggctgagccataattcttctagttaagaaccaattagtttttcccttttgaaaatgtgaactgcatacagagactccagctgacctttgttaagtattcaagcagaatgataatgtagagtttggatttgagttgttgtgagtgcattgcagattcacaagggactggaataaacagaagagcaagaactgcaagtagagtgctgatagggagagaaatgagcagaggatgaagactcacnaagggaaagagaaatgagagatggtgtagtcactcagagttacagaggtaactctagctccaaactttctgagtctgatttttgtgaagtccagctgtaaagtagctttgatattacatgtccatgagatgttcagacatttccaatatgccattcattttatggaaatgtatttgagtgtgtgtttagattttggaatctaaggaaacttggtaaaaacaaatattataaattcttctattaggtggatttttttttaatttgctccatttccagtttagaagttatgtgtattttctgttcttggaaatttgccttagctctatgtct

SEQ ID NO: 884 - DNA, 661 bp, Homo sapiens
  misc_feature [331]..[331]: Chromosome 2, SNP identification no. = rs6545223
  misc_feature [331]..[331]: allele = g, in linkage disequilibrium with rs1406421, respectively
  misc_feature [331]..[331]: n is a, t, c or g
tattacatgtccatgagatgttcagacatttccaatatgccattcattttatggaaatgtatttgagtgtgtgtttagattttggaatctaaggaaacttggtaaaaacaaatattataaattcttctattaggtggatttttttttaatttgctccatttccagtttagaagttatgtgtattttctgttcttggaaatttgccttagctctatgtctatgcttaggatatcttgtcatttttcaaatttcctaaattcctatgtaatcctgagacaagaaacaggggtcgatagataggatactaagcttccttctgcagggccagggntctctggagatgtatacttgttttatttttatcgatattcccccaaattctttctaaaagtcctaatattgagcaatgcaatactgtagcggtttcattatagcattgctgttactgtgaattttttaattacatgaggatattaacatataaagccctgataaaagaggactgctgatggctttttggtgtggtagcaataacaacaacgggaaagatatagtttgagtactcctggaagaggagactcttgagtatttttaaaaagaacagcatgctactgtaaaacaacaagaatatgaagaaaaatacttggaacctgatactggt

SEQ ID NO: 885 - DNA, 661 bp, Homo sapiens
  misc_feature [331]..[331]: Chromosome 2, SNP identification no. = rs13014691
  misc_feature [331]..[331]: allele = a, in linkage disequilibrium with rs1406421, respectively
  misc_feature [331]..[331]: n is a, t, c or g
gaaaaatacttggaacctgatactggttttgaggctagttttgtgatacagaggtgaagttaaaaaaaaattccttaatctagatatgatattctaaaggggaagttttgaaaagcagtagtattgatttacattctttaacctattaatcggtctacaagtgcgtattgagagcctgtatgtaacaggcatgtaacaggttcagtgtgccctcatgaaatttgtaatttaagcgacaaagactgatattaaacaaataacacacaaacaaatgcctacttttattttataccaaatatgtgacagaaaaaaacacagtgtatatgagagnatataaaaagaacatttattgttggatcaaagaaaacctcttaagaaaagttgaagtacagttgagacttaaaggatggattggtgttagccagaaagagagtagagaagggggaatgtcctccaggttaaagagagagcatataaagaatccttaaactggtaaaaagcttgagttgttagaagaataggcaaaaagtctggtggatgacagtacatcgcaaaaacgtgacaataaaggctgaagatgtaagtagcgaaaaatcactataggtcttgtaggacagtgtatttaggttttattctttgagctatgggataccatttaaga

SEQ ID NO: 886 - DNA, 661 bp, Homo sapiens
  misc_feature [331]..[331]: Chromosome 2, SNP identification no. = rs1528802
  misc_feature [331]..[331]: allele = g, in linkage disequilibrium with rs1406421, respectively
  misc_feature [331]..[331]: n is a, t, c or g
tatatgagaggatataaaaagaacatttattgttggatcaaagaaaacctcttaagaaaagttgaagtacagttgagacttaaaggatggattggtgttagccagaaagagagtagagaagggggaatgtcctccaggttaaagagagagcatataaagaatccttaaactggtaaaaagcttgagttgttagaagaataggcaaaaagtctggtggatgacagtacatcgcaaaaacgtgacaataaaggctgaagatgtaagtagcgaaaaatcactataggtcttgtaggacagtgtatttaggttttattctttgagctatgggatnccatttaagaattttaaattggatatcatttttgtgtttatcaatttctctgcacacatatgcattatttaatatgtatatacattatattagtacatatttttgtatgtatacatatatgtttctagttactgtataacaaatgcagtatactttatgttagtacatataatgttgatatgtatacatacacacatatatttctagctgctgtataacaaatgtggtagaaagggagaatgaatgaatagtagcttattgtggaattctgaaactaagaagatttagactagacacattgaaacaaaatggaaaaacttcactgtctta

SEQ ID NO: 887 - DNA, 661 bp, Homo sapiens
  misc_feature [331]..[331]: Chromosome 2, SNP identification no. = rs1569193
  misc_feature [331]..[331]: allele = t, in linkage disequilibrium with rs1406421, respectively
  misc_feature [331]..[331]: n is a, t, c or g
aaattcatatttagatttttcatattgaagatacctttgtgaaattatacaaatgacatcattatgtcaatagttatgtagatgaattcagtgttcaagatagaggtcatgagtgaaaggataaatttgtcagtagatgtatttatgaacataatagtggattagtcaatatcagtggttatcaaccatggcagtaaaatgggaggattttgaaaacacaatattgatttttgacaattcagggtaaatctcctgatgacaataacccagattttcttgagagactgagaagctgaacaattctgagagactcaggctgggggacaaacantggagttaagtgtctaagggagaacaaataaattttctgagctttaatacagaatgacacattggtaccctacgcatgagggtaaatcagaaatagactgttctataaggaaccaaagcccaattctgaatcatctcaactattaaattcttttaatccaggatgatttgcttatagccacatgcaagaaacaaacctgtatcttacctgaaataaaatgatagttttgtttttcaagcaatttacattaaaaacattctgacatataatatgaccaaaatatcagatttaacatcaagctacagatagaaaataaacacagaatcatag

SEQ ID NO: 888 - DNA, 661 bp, Homo sapiens
  misc_feature [331]..[331]: Chromosome 2, SNP identification no. = rs17869182
  misc_feature [331]..[331]: allele = a, g
  misc_feature [331]..[331]: n is a, t, c or g
agtttgaaatgcctaatattagcagggatatagagcatctggaactatattatgttgttagtgggtatatagcaacatatatatatatatatatatgtgtatatatatatatatatatatatatataaacatacacacatatgtatacacacacacacatctatacacacagagagcatctggaagtatgttgctagtgggtatatagcaacatatatatatattgaaacgaaatggaaaaatgcactgtcttatgtattttacaagcaacaactggaaagggatgcattgaatgtactacatcatggtactacatcattgaatggaaaanctgcactgtcttacatattttgcaagcaacacctggatatatataattttgaacatatctcatatctgataacccagcagtgtcacttcaatgtattcattcaatataaactgtattaactaaatcattaattccatataaaatagagaataaatcatgcatatactcaagaacacacgattcaatatatgatgttgtttgacacaggaaaaaaatcaaaagtttataataatacagaattaaaaataaactaaacctacatttataaacatggatatatcttaaaaacaataacagaagatatatggacatatggtactgttggggcac

SEQ ID NO: 889 - DNA, 661 bp, Homo sapiens
  misc_feature [331]..[331]: Chromosome 2, SNP identification no. = rs13012225
  misc_feature [331]..[331]: allele = c, in linkage disequilibrium with rs1406421, respectively
  misc_feature [331]..[331]: n is a, t, c or g
ttgctagtgggtatatagcaacatatatatatattgaaacgaaatggaaaaatgcactgtcttatgtattttacaagcaacaactggaaagggatgcattgaatgtactacatcatggtactacatcattgaatggaaaagctgcactgtcttacatattttgcaagcaacacctggatatatataattttgaacatatctcatatctgataacccagcagtgtcacttcaatgtattcattcaatataaactgtattaactaaatcattaattccatataaaatagagaataaatcatgcatatactcaagaacacacgattcaatatangatgttgtttgacacaggaaaaaaatcaaaagtttataataatacagaattaaaaataaactaaacctacatttataaacatggatatatcttaaaaacaataacagaagatatatggacatatggtactgttggggcacagaaaacaatgccccacaatgaagtcctcagaacaaaaaagattttctctgaccttctgtttctttgtcccattctccccagaggctagccatagaaactagaatcccttttccccaagactagtcatggaaaccaaatctctttcttccaaagccagacataagacctaaaaatattactctacctatc

SEQ ID NO: 890 - DNA, 661 bp, Homo sapiens
  misc_feature [331]..[331]: Chromosome 2, SNP identification no. = rs13035555
  misc_feature [331]..[331]: allele = t, in linkage disequilibrium with rs1406421, respectively
  misc_feature [331]..[331]: n is a, t, c or g
tagcaacatatatatatattgaaacgaaatggaaaaatgcactgtcttatgtattttacaagcaacaactggaaagggatgcattgaatgtactacatcatggtactacatcattgaatggaaaagctgcactgtcttacatattttgcaagcaacacctggatatatataattttgaacatatctcatatctgataacccagcagtgtcacttcaatgtattcattcaatataaactgtattaactaaatcattaattccatataaaatagagaataaatcatgcatatactcaagaacacacgattcaatatatgatgttgtttgacanaggaaaaaaatcaaaagtttataataatacagaattaaaaataaactaaacctacatttataaacatggatatatcttaaaaacaataacagaagatatatggacatatggtactgttggggcacagaaaacaatgccccacaatgaagtcctcagaacaaaaaagattttctctgaccttctgtttctttgtcccattctccccagaggctagccatagaaactagaatcccttttccccaagactagtcatggaaaccaaatctctttcttccaaagccagacataagacctaaaaatattactctacctatccttccacttctctgt

SEQ ID NO: 891 - DNA, 661 bp, Homo sapiens
  misc_feature [331]..[331]: Chromosome 2, SNP identification no. = rs17864517
  misc_feature [331]..[331]: allele = g, in linkage disequilibrium with rs1406421, respectively
  misc_feature [331]..[331]: n is a, t, c or g
aaaatagagaataaatcatgcatatactcaagaacacacgattcaatatatgatgttgtttgacacaggaaaaaaatcaaaagtttataataatacagaattaaaaataaactaaacctacatttataaacatggatatatcttaaaaacaataacagaagatatatggacatatggtactgttggggcacagaaaacaatgccccacaatgaagtcctcagaacaaaaaagattttctctgaccttctgtttctttgtcccattctccccagaggctagccatagaaactagaatcccttttccccaagactagtcatggaaaccaaatntctttcttccaaagccagacataagacctaaaaatattactctacctatccttccacttctctgtgtaaaagctggccatgaagaaattatctgacctaccttgtttgactataggtcataagtcctcttctatggaggatcctgtcccatacccagaagaagggaatccatggacagagagacaaagaagaatctacataggcaggccttgctgggttttgctactgagtctattagcattagatcatcccctttttgtttaatcacattccaacatggctatccatgctttgttaaacctaagcataaaattgggcaatttttcttct

SEQ ID NO: 892 - DNA, 661 bp, Homo sapiens
  misc_feature [331]..[331]: Chromosome 2, SNP identification no. = rs1919421
  misc_feature [331]..[331]: allele = g, in linkage disequilibrium with rs1406421, respectively
  misc_feature [331]..[331]: n is a, t, c or g
aagctgtcagacagggatgtttaagtctgcagaagtttctgctgccttttgttcagctatgccctgcccccagaggtggagtctacagaggcaagcaggcctctttgagctgtggtgggctccacccagtttgttttgtttacctagtcaagcctcagtaattgcagactcccctcctcgagcctcgctgcggcctcacaattcaatctcagactgctgtgctagcagtgagcaaggctctgtgggtgtgggacccaccgagccaggcatgggatataatctcctggtgtgccatttgctaagaccattggaaaatcgcagtattagggcnggagtgtaccaagtttccaggatccatctgtcatggcttcccttggccaggaaagggaaatcccctgaccttttgcacttcccagttgaggtaatgccccgtcctgctttggctcacattctgtgggcttcactcactgtccgacaagccccagtgagatgaacccagtacctcagttggaaatgcagaaatcacccgtcttctgcattgctcacgctgggagctgtagactggagctgctcctatttggccatcttggaacgatctttttgcaagttaatttttaagcaagccttcagagggccaagccttggcccctacaataccatt

SEQ ID NO: 893 - DNA, 661 bp, Homo sapiens
  misc_feature [331]..[331]: Chromosome 2, SNP identification no. = rs1528803
  misc_feature [331]..[331]: allele = g, in linkage disequilibrium with rs1406421, respectively
  misc_feature [331]..[331]: n is a, t, c or g
tctttatccatgtctttaattgatagacagttaaattgattccatgtctttgctattgtgaatagtgctgcaataaacataagtgtctatgtgtctttataatagaacaatttatattcctatgggtatataacaactaatgggattgctgggtggaatggtattctgtctttatatctctgaggaactgccacactgtcttccacaatggttgaactaatttacactcccaccatcagtgggagtaaattttcaccacaccctccccagcatctgcaatttattgacttttaataatagctaagtaatactttatttcttaagctaggangtatggtcaagcatattatcagttattcttaaaaacattttgattatttaaaaattcttaaaatattaaataatgagattgtgttaatttgtccatagaattgatgtgtccaaagtattcaaaaaaattcaaatgaaatagagtaacatgtcattttatctatcagattattaatggttttagaaaagaatgagaaagtgctcccatttgtacactattagttgaaagtgaaatgtttaatatgcatgaaagattccaatatgtaaatatctacatataattttatttaacattttcacttcggagagttttgtctaacaaattatttct

SEQ ID NO: 894 - DNA, 661 bp, Homo sapiens
  misc_feature [331]..[331]: Chromosome 2, SNP identification no. = rs2715067
  misc_feature [331]..[331]: allele = g, in linkage disequilibrium with rs1406421, respectively
  misc_feature [331]..[331]: n is a, t, c or g
taagctaggatgtatggtcaagcatattatcagttattcttaaaaacattttgattatttaaaaattcttaaaatattaaataatgagattgtgttaatttgtccatagaattgatgtgtccaaagtattcaaaaaaattcaaatgaaatagagtaacatgtcattttatctatcagattattaatggttttagaaaagaatgagaaagtgctcccatttgtacactattagttgaaagtgaaatgtttaatatgcatgaaagattccaatatgtaaatatctacatataattttatttaacattttcacttcggagagttttgtctaacnaattatttctatgaagataattatatttcacattttcatttatagtagtaaacattctgaggaacataaagttcaaaactagagtatattcaaatacgttcatatagtagaaaattatgcagatattaaaaatacttacaaataatgagtacaaaattataaaacatttagaaatgcataaatactgtatcgaaataatcattaaatatacatatatttttatcaggtttataaaacatagagggtaaaaaagctcaaatgttagtcaggctttttttttggtttataacattattcttttgtttacaagtttctttgttttgtaacaaa

SEQ ID NO: 895 - DNA, 661 bp, Homo sapiens
  misc_feature [331]..[331]: Chromosome 2, SNP identification no. = rs13030120
  misc_feature [331]..[331]: allele = g, in linkage disequilibrium with rs1406421, respectively
  misc_feature [331]..[331]: n is a, t, c or g
tttcatttatagtagtaaacattctgaggaacataaagttcaaaactagagtatattcaaatacgttcatatagtagaaaattatgcagatattaaaaatacttacaaataatgagtacaaaattataaaacatttagaaatgcataaatactgtatcgaaataatcattaaatatacatatatttttatcaggtttataaaacatagagggtaaaaaagctcaaatgttagtcaggctttttttttggtttataacattattcttttgtttacaagtttctttgttttgtaacaaagaaactttgttacaacttaatggtgacaacatantaattttataattcaatatgtagccctctattaatatatactttttttacattagtgggtcatttttaaatacattctttcatatacaagagtccaaatatgcacaaagccatggctcaatgctataaagaatacatttgcatacagtagggtcactgcccttatggataaagaacgtcaggagaaaacaatacataaactttcttagatcctaaagcgaagtatttgtgaacctgaaagccctagtcttgatgcagaaatatggaaattaagaattccaattggctgtatatacttaagattttcatttctaaagagaaagaacatcaa

SEQ ID NO: 896 - DNA, 661 bp, Homo sapiens
  misc_feature [331]..[331]: Chromosome 2, SNP identification no. = rs13003791
  misc_feature [331]..[331]: allele = g, in linkage disequilibrium with rs1406421, respectively
  misc_feature [331]..[331]: n is a, t, c or g
aggaacataaagttcaaaactagagtatattcaaatacgttcatatagtagaaaattatgcagatattaaaaatacttacaaataatgagtacaaaattataaaacatttagaaatgcataaatactgtatcgaaataatcattaaatatacatatatttttatcaggtttataaaacatagagggtaaaaaagctcaaatgttagtcaggctttttttttggtttataacattattcttttgtttacaagtttctttgttttgtaacaaagaaactttgttacaacttaatggtgacaacatattaattttataattcaatatgtagccntctattaatatatactttttttacattagtgggtcatttttaaatacattctttcatatacaagagtccaaatatgcacaaagccatggctcaatgctataaagaatacatttgcatacagtagggtcactgcccttatggataaagaacgtcaggagaaaacaatacataaactttcttagatcctaaagcgaagtatttgtgaacctgaaagccctagtcttgatgcagaaatatggaaattaagaattccaattggctgtatatacttaagattttcatttctaaagagaaagaacatcaaaatatcttgcaagaaatctcacaggc

SEQ ID NO: 897 - DNA, 661 bp, Homo sapiens
  misc_feature [331]..[331]: Chromosome 2, SNP identification no. = rs17863608
  misc_feature [331]..[331]: allele = c, t
  misc_feature [331]..[331]: n is a, t, c or g
cccaagactgggtagtttataaaggaaaggggtttaactgactctcaattctgcagggctgtagaggcctcaggaagctcacaatcatggcagaagggaaagcaaacatgtccttcatcacatggtggcaggaagaagtgctaagcaaaaggagaaaagccccttataataccatcaaatctcatgaaaactcactattaggagaactgcatggagctaactgcccccatgattcagttgcctcccactggttcccttccacaacatgtggggattatgaaatcacaattcaagatgagatttgggtgaggacacagctaaaccgtatcantgacaatagattcttctctcaggggaagactcacatttatcaatatcgctagactaatgtataatttcacaatcccaagttactaaattgtatacatatctctcataacactcataatattcacacccaaatgacaatgccattttctccatagccaatgttattattatacaagaaatattaaaaaagagaatacatttttttaataaaaagactagtctcactttagataaagctatttagaattaatctacactttagaatcaagtttgcctgcagtcatcttataatatggatgctttgccagaagagctgcaaatagtgtgaaat

SEQ ID NO: 898 - DNA, 661 bp, Homo sapiens
  misc_feature [331]..[331]: Chromosome 2, SNP identification no. = rs13408179
  misc_feature [331]..[331]: allele = g, in linkage disequilibrium with rs1406421, respectively
  misc_feature [331]..[331]: n is a, t, c or g
aactgcatggagctaactgcccccatgattcagttgcctcccactggttcccttccacaacatgtggggattatgaaatcacaattcaagatgagatttgggtgaggacacagctaaaccgtatcactgacaatagattcttctctcaggggaagactcacatttatcaatatcgctagactaatgtataatttcacaatcccaagttactaaattgtatacatatctctcataacactcataatattcacacccaaatgacaatgccattttctccatagccaatgttattattatacaagaaatattaaaaaagagaatacattttttnaataaaaagactagtctcactttagataaagctatttagaattaatctacactttagaatcaagtttgcctgcagtcatcttataatatggatgctttgccagaagagctgcaaatagtgtgaaattactttgaatccattgggtgaggccatcacttatctatggaaatcccttttaaaaaaacattattttttatttcaattagtctttgggtaaaaggtggtatttggttacgtaaataatttcttcagtggtgatttctgagattttggtgcatccatcacccaagcagtgtacactgtacccaatgtgtagtcttttatccctta

SEQ ID NO: 899 - DNA, 661 bp, Homo sapiens
  misc_feature [331]..[331]: Chromosome 2, SNP identification no. = rs2715070
  misc_feature [331]..[331]: allele = g, in linkage disequilibrium with rs1406421, respectively
  misc_feature [331]..[331]: n is a, t, c or g
ctctcataacactcataatattcacacccaaatgacaatgccattttctccatagccaatgttattattatacaagaaatattaaaaaagagaatacatttttttaataaaaagactagtctcactttagataaagctatttagaattaatctacactttagaatcaagtttgcctgcagtcatcttataatatggatgctttgccagaagagctgcaaatagtgtgaaattactttgaatccattgggtgaggccatcacttatctatggaaatcccttttaaaaaaacattattttttatttcaattagtctttgggtaaaaggtggtntttggttacgtaaataatttcttcagtggtgatttctgagattttggtgcatccatcacccaagcagtgtacactgtacccaatgtgtagtcttttatcccttatccacctctcaccctttcattatatcatccttatgcctttgagtccccatagttcattgtatcattcttacgcctttagtcctcatagcttagttcccaattatgtgataacgtacaatatttggtttttcattcctatgtgacttctagaataatactttccagttccatccaggttgctgcgaatgccattatttcattcccttttatggctgaggagtatttc

SEQ ID NO: 900 - DNA, 661 bp, Homo sapiens
  misc_feature [331]..[331]: Chromosome 2, SNP identification no. = rs1609360
  misc_feature [331]..[331]: allele = g, in linkage disequilibrium with rs1406421, respectively
  misc_feature [331]..[331]: n is a, t, c or g
aaatagtgtgaaattactttgaatccattgggtgaggccatcacttatctatggaaatcccttttaaaaaaacattattttttatttcaattagtctttgggtaaaaggtggtatttggttacgtaaataatttcttcagtggtgatttctgagattttggtgcatccatcacccaagcagtgtacactgtacccaatgtgtagtcttttatcccttatccacctctcaccctttcattatatcatccttatgcctttgagtccccatagttcattgtatcattcttacgcctttagtcctcatagcttagttcccaattatgtgataacntacaatatttggtttttcattcctatgtgacttctagaataatactttccagttccatccaggttgctgcgaatgccattatttcattcccttttatggctgaggagtatttcagtgtgtgtgtgtgtgtgtgtgtgtgtgtgtgtgtgtgtgtgtgcatatgtgtatatatatatgtatatatatatacgtatatatgtgtgtatatatatatatatacacacacatatatatacacacacacacacatatatatatatcacattttctttatccagttgttgattgataggcatttgggctggttccatatatttacaattgcaaatt

SEQ ID NO: 901 - DNA, 661 bp, Homo sapiens
  misc_feature [331]..[331]: Chromosome 2, SNP identification no. = rs13026025
  misc_feature [331]..[331]: allele = c, in linkage disequilibrium with rs1406421, respectively
  misc_feature [331]..[331]: n is a, t, c or g
acccaaataaggaaccagaatggcaattctggtaaaatgacaaaacggttctttaaaacccccaaaagatcacaccagctcaccagaaatggatccaaaccaagacgaaatctctgaattcccagaaaaacaattcagaaggtcaatcattaagctaatcaaggaggcaccagagaaaggtgaagtccaacttaaagaaatcaaaaatatgatacaagatatgagaggaaaaatcttcagtgaaatagatagcatgaacaaaaaacagtcacaacttctagaaatgaaagacacacttagaaaaatgcaaaatgcactggaaattctcatnagtagaattgaacaagcagaagaaagagcttcagagcttgaagacaggctttcacatgaatccagtctatcaaaaacaaaaagaatttaaaaaatgaacaaagcctgcaagaagtttgggactatgttaactatctaaacctaagaataattggtgttaccaaggaagaggagaaatctaaatgtctggaaaacgtatttgagaaaacaattgaggaaaactgccccagcctttccaaagatttagccatcaaaatgcaagaagcttaaagaacacctggcaaattcatttcaaaaggattatcacctaagcacttagtcatcaggttat

SEQ ID NO: 902 - DNA, 661 bp, Homo sapiens
  misc_feature [331]..[331]: Chromosome 2, SNP identification no. = rs1528804
  misc_feature [331]..[331]: allele = g, in linkage disequilibrium with rs1406421, respectively
  misc_feature [331]..[331]: n is a, t, c or g
cacccatggatgataaatgatcactggatgactggttacacccctttctgacttgtatctttgagtgttagtatattcacactgaatttggaactattctgtttctgaggtgactttgcatatgtcttctctaatttattatagattaattttatattttaactcaccgaaggtactcctacttgtcttatttctaacatttttaaaacctcacatatataaactgacaacagaaaaattactgttgctcttcttaagtgaaataactaaaactactgcaaccatacaggtatgagtattatggaaagttgtttctgttgattattgttgntctaaaaaagagtccgatgataatgttaacagctgctatttcaacttacctagtgaacaataatatttttttcataccatttacaggtccttaaggactaactgacaggcattgtgcaatgcataaatggttcttcttgacactgtaaaaactgacaatcagagagcaagtagttaagcttgtgagtgaagtagtggtacataaatctacagatacacttcaaaagtacttgaaaatctgaagactattgagagattctgtgccaaataattaaggaaaatctgataatttgaaatagttaaaaggcaaatgtgagagcagcgttatctt

SEQ ID NO: 903 - DNA, 661 bp, Homo sapiens
  misc_feature [331]..[331]: Chromosome 2, SNP identification no. = rs1919424
  misc_feature [331]..[331]: allele = a, in linkage disequilibrium with rs1406421, respectively
  misc_feature [331]..[331]: n is a, t, c or g
cataccatttacaggtccttaaggactaactgacaggcattgtgcaatgcataaatggttcttcttgacactgtaaaaactgacaatcagagagcaagtagttaagcttgtgagtgaagtagtggtacataaatctacagatacacttcaaaagtacttgaaaatctgaagactattgagagattctgtgccaaataattaaggaaaatctgataatttgaaatagttaaaaggcaaatgtgagagcagcgttatcttgaccagaaaattggtttaatatagtccaacaaaaagaagcatcttgcatataatatagtcctatgcactcaangaatttaaatagcagataatacatgtgacatattggtatgactaaatagtgggttgggagggggaagtgaatgaatggcttggaatgttgtgaatttaaggctttctattccaggaaccttgggagaatgtgctatgtttatattcctgactgagttttatatatatatatatatatatatatatatatatatatatatatatatgtatataactgagttataactgtaaactgatctctctgcttgagcaaggtctttcaaagggatgccttattagagagaatgagggttttctggataagaataagtaaatccagtcattttacaga

SEQ ID NO: 904 - DNA, 661 bp, Homo sapiens
  misc_feature [331]..[331]: Chromosome 2, SNP identification no. = rs1919425
  misc_feature [331]..[331]: allele = g, in linkage disequilibrium with rs1406421, respectively
  misc_feature [331]..[331]: n is a, t, c or g
tggttcttcttgacactgtaaaaactgacaatcagagagcaagtagttaagcttgtgagtgaagtagtggtacataaatctacagatacacttcaaaagtacttgaaaatctgaagactattgagagattctgtgccaaataattaaggaaaatctgataatttgaaatagttaaaaggcaaatgtgagagcagcgttatcttgaccagaaaattggtttaatatagtccaacaaaaagaagcatcttgcatataatatagtcctatgcactcaaggaatttaaatagcagataatacatgtgacatattggtatgactaaatagtgggtngggagggggaagtgaatgaatggcttggaatgttgtgaatttaaggctttctattccaggaaccttgggagaatgtgctatgtttatattcctgactgagttttatatatatatatatatatatatatatatatatatatatatatatatgtatataactgagttataactgtaaactgatctctctgcttgagcaaggtctttcaaagggatgccttattagagagaatgagggttttctggataagaataagtaaatccagtcattttacagatgaaactgaaattcaaagaaactgtctagctttctagagtttctagataagaata

SEQ ID NO: 905 - DNA, 661 bp, Homo sapiens
  misc_feature [331]..[331]: Chromosome 2, SNP identification no. = rs1919426
  misc_feature [331]..[331]: allele = g, in linkage disequilibrium with rs1406421, respectively
  misc_feature [331]..[331]: n is a, t, c or g
tcttcttgacactgtaaaaactgacaatcagagagcaagtagttaagcttgtgagtgaagtagtggtacataaatctacagatacacttcaaaagtacttgaaaatctgaagactattgagagattctgtgccaaataattaaggaaaatctgataatttgaaatagttaaaaggcaaatgtgagagcagcgttatcttgaccagaaaattggtttaatatagtccaacaaaaagaagcatcttgcatataatatagtcctatgcactcaaggaatttaaatagcagataatacatgtgacatattggtatgactaaatagtgggttgggngggggaagtgaatgaatggcttggaatgttgtgaatttaaggctttctattccaggaaccttgggagaatgtgctatgtttatattcctgactgagttttatatatatatatatatatatatatatatatatatatatatatatatgtatataactgagttataactgtaaactgatctctctgcttgagcaaggtctttcaaagggatgccttattagagagaatgagggttttctggataagaataagtaaatccagtcattttacagatgaaactgaaattcaaagaaactgtctagctttctagagtttctagataagaataagga

SEQ ID NO: 906 - DNA, 661 bp, Homo sapiens
  misc_feature [331]..[331]: Chromosome 2, SNP identification no. = rs1919427
  misc_feature [331]..[331]: allele = g, in linkage disequilibrium with rs1406421, respectively
  misc_feature [331]..[331]: n is a, t, c or g
atgttgtgaatttaaggctttctattccaggaaccttgggagaatgtgctatgtttatattcctgactgagttttatatatatatatatatatatatatatatatatatatatatatatatgtatataactgagttataactgtaaactgatctctctgcttgagcaaggtctttcaaagggatgccttattagagagaatgagggttttctggataagaataagtaaatccagtcattttacagatgaaactgaaattcaaagaaactgtctagctttctagagtttctagataagaataaggaaatccagtcattttacagatgaggtnactgcaattcacagaaactgtccagatttctaaagtttccaagcatgtaagagattgatataatcatatacactcgataaactaattgactgtaaataggatgagaaggtatagctttaaagaaaaattcatatgaaatattaaatagtatgaaatgacaagtttcattagaaactgcattatgaagtgatttcccaataattatatgaagcatatacaacatagaggaattttagatctagaatgtaggttttaagactttctctgaaagcagcattgtcaaactgattgtgtcacattttatagtttctagcatgagctctcaaacaa

SEQ ID NO: 907 - DNA, 661 bp, Homo sapiens
  misc_feature [331]..[331]: Chromosome 2, SNP identification no. = rs1112550
  misc_feature [331]..[331]: allele = t, in linkage disequilibrium with rs1406421, respectively
  misc_feature [331]..[331]: n is a, t, c or g
gagatattatctagaggctgtaaatattcaaaattaacaaaaaattagctggatgtaggatgggagattgaggccaaaaaactacacttaaacaaatgaatcaatgtaataaaactgaatccaagcagattttaacttaagagctaacagacacagaaaagcagattactgatatatgtctactttttgccactttctacaattttacctggttttcctttgactttaatacatagctgctgatttattctcctttctaatacttggttttggcttataagtgatatcttttgccaatagtgcctgcttgtctatttggccatgaactccntgaggagaaagattctagtttgtgagagccttgtttgagagctcatgctagaaactataaaatgtgacacaatcagtttgacaatgctgctttcagagaaagtcttaaaacctacattctagatctaaaattcctctatgttgtatatgcttcatataattattgggaaatcacttcataatgcagtttctaatgaaacttgtcatttcatactatttaatatttcatatgaatttttctttaaagctataccttctcatcctatttacagtcaattagtttatcgagtgtatatgattatatcaatctcttacatgcttggaaacttta

SEQ ID NO: 908 - DNA, 661 bp, Homo sapiens
  misc_feature [331]..[331]: Chromosome 2, SNP identification no. = rs1406427
  misc_feature [331]..[331]: allele = g, in linkage disequilibrium with rs1406421, respectively
  misc_feature [331]..[331]: n is a, t, c or g
aagaggccaggcacagtggctcacgcctgtaatcccagcactttgggaggccgaggtgggtggatcacgagatcagaagttcaagaccagcctggccgatatggtgaaaccccgtctttactaaaaatacaaaaataagcttggcatggtgttgcatgcctttagtcccagctactcgggaggctgaggttagagtatcgcttaaatctgggaggtggaggttgcagtgagccaagattgtgccactgcaatctagcctggacaacacagcgagactctgtttcaaaaaaaaaaaaaaaaaaagaacttaagatacatcatgtggttaaancaatacaaaaacaaaaacaaaacatttgactatgactagaaatcgggtgaccttgattcaagtcctggcaatatcagtggttccaaaacttagtgaatcatcagaatcatatttccatgtcccaccagcagaagttcccaattgaatagccttacagtgggtctgtaacttgtcagccaaccgctaccttcccctctaaacatacaactctgcaggtgattttgataatcagattaggggatcattaagttaaatgatattgtgcacttaactttacgtgtaatggtaagagatgatttctaaagggatttttgaactgcatattttatg

SEQ ID NO: 909 - DNA, 661 bp, Homo sapiens
  misc_feature [331]..[331]: Chromosome 2, SNP identification no. = rs1406428
  misc_feature [331]..[331]: allele = t, in linkage disequilibrium with rs1406421, respectively
  misc_feature [331]..[331]: n is a, t, c or g
tcatgtggttaaaacaatacaaaaacaaaaacaaaacatttgactatgactagaaatcgggtgaccttgattcaagtcctggcaatatcagtggttccaaaacttagtgaatcatcagaatcatatttccatgtcccaccagcagaagttcccaattgaatagccttacagtgggtctgtaacttgtcagccaaccgctaccttcccctctaaacatacaactctgcaggtgattttgataatcagattaggggatcattaagttaaatgatattgtgcacttaactttacgtgtaatggtaagagatgatttctaaagggatttttgaantgcatattttatgactcagatacacttcttgctttgtccaggggtttcttctagaaaatgcttgacaaatcatcattcaccttcactcaaagagagctcattctctctggaggctagttgttccattgttgaaagcttctttttctgagccaaaatgttgcaacttccattgatttgtctgggttctaccctttgaaaaaatatatacccttgtccaactgatagtgcttcaaatgctgaaagacagggctcccacatggaggcagtaaagtctgtcctaccagaatgaacaccaggacccacaaagcagacctgggccttagcctccca

SEQ ID NO: 910 - DNA, 661 bp, Homo sapiens
  misc_feature [331]..[331]: Chromosome 2, SNP identification no. = rs1534609
  misc_feature [331]..[331]: allele = t, in linkage disequilibrium with rs1406421, respectively
  misc_feature [331]..[331]: n is a, t, c or g
gttcctcatgccccagacatggtgaaaaggagaccagagttagcaagaatctcggaaaaggaaaaaaaaaaagggggggcccaggactccacagccttttcagtctggttctacaaggccacggttgctgtgtaaacttgctgtgaggggaaggagggccagaagcaggcagccttaggcagaaatggaagccaggaaccccagggagcacagcaggaagatgaagaaaaaaatccagcaagagggagacaccctcctaggccaccccaagccctccgggtgaacggagagcagccctaggaaagaaagtaaaaagaagccagttaaaatngaggctccagaatatatcccagcaggagatggccttcaagcccagtgaaaaagaaaatgaagttcaagaaagaggtagagccactaatcactgagcagctggctctgaaaaggaagaaaaagaagaagaaaagtggggtagaaggagaccctgggaagtagtaaccatacacagatttggaggtgatgttggaaaagaggctacatggatgaggcacacatagaccaggtgaggtgagagcccttgcaagaagacacccatcatgaagaggacaatacagacgcttccgaaaccaggaagtggacaggaacccattttggccagtgagat

SEQ ID NO: 911 - DNA, 661 bp, Homo sapiens
  misc_feature [331]..[331]: Chromosome 2, SNP identification no. = rs1534610
  misc_feature [331]..[331]: allele = t, in linkage disequilibrium with rs1406421, respectively
  misc_feature [331]..[331]: n is a, t, c or g
gagggccagaagcaggcagccttaggcagaaatggaagccaggaaccccagggagcacagcaggaagatgaagaaaaaaatccagcaagagggagacaccctcctaggccaccccaagccctccgggtgaacggagagcagccctaggaaagaaagtaaaaagaagccagttaaaatggaggctccagaatatatcccagcaggagatggccttcaagcccagtgaaaaagaaaatgaagttcaagaaagaggtagagccactaatcactgagcagctggctctgaaaaggaagaaaaagaagaagaaaagtggggtagaaggagaccctnggaagtagtaaccatacacagatttggaggtgatgttggaaaagaggctacatggatgaggcacacatagaccaggtgaggtgagagcccttgcaagaagacacccatcatgaagaggacaatacagacgcttccgaaaccaggaagtggacaggaacccattttggccagtgagatactgctggttttgagaacaaggaacagaaactgaaatttctcagacttacgagtggcttcgagaatctgccctctctgttcagctgctccatcagcatggttttgaggcccaaaattgccctcagcaagaaagcaaccaaaagcctgcagcag

SEQ ID NO: 912 - DNA, 661 bp, Homo sapiens
  misc_feature [331]..[331]: Chromosome 2, SNP identification no. = rs1528806
  misc_feature [331]..[331]: allele = c, in linkage disequilibrium with rs1406421, respectively
  misc_feature [331]..[331]: n is a, t, c or g
ccctgggaagtagtaaccatacacagatttggaggtgatgttggaaaagaggctacatggatgaggcacacatagaccaggtgaggtgagagcccttgcaagaagacacccatcatgaagaggacaatacagacgcttccgaaaccaggaagtggacaggaacccattttggccagtgagatactgctggttttgagaacaaggaacagaaactgaaatttctcagacttacgagtggcttcgagaatctgccctctctgttcagctgctccatcagcatggttttgaggcccaaaattgccctcagcaagaaagcaaccaaaagcctgcngcagagcctgcagcaggacagcaaccaaaccttccactggaaatacaactgaggaattggccttggtttctccacttccccaaacagaatattttacattgataggaaagcttccaaatcaatcaagttggaagattaaactctagtgttttgttccctaaaacagccagaattgctttattattcatttgtggagacgaaagccacctggcagttgtgtcacatcaaactcctttggagattaaagacaaggacagctatcttgatgggctcaaaagaactagggcaggggtagctcatgtttcaggagccaagagaacacgtgagtgg

SEQ ID NO: 913 - DNA, 661 bp, Homo sapiens
  misc_feature [331]..[331]: Chromosome 2, SNP identification no. = rs13007045
  misc_feature [331]..[331]: allele = a, in linkage disequilibrium with rs1406421, respectively
  misc_feature [331]..[331]: n is a, t, c or g
aagattatggccagaaaaagaatacattttcttctggataagcaacttaaagtgggacaagttcacagaatcaagatgttgtttcactagaaaagaagaaaaatcagtgaagtaatttggcagtcttgtatcaatacaagcatttgaaggaaatcttgctgaggagaaggttgaagaaaattgttggagtgttgcagtctaccaacagatggggtgtggtaaattcctagtgaagaatagaagattgacaaaaatataatgagggttgcacacattttagtgattttaaaaattaaactgtgtgggctgtagcatatttttaaaaaatcangttagtgttttgaatatcctgtttctattaagaaaaagtaatcaaattaagtcaatatccagattgttcttatatacagtcaattgaatgtacttatattcatatacaatgttaaaaaattcatttacataaacaataataagaaggtctaaaaaaggataaagaagttgtggtagaattctctttaactataagctcttgatcacagtaaaaataaattatacactaaatccaagaatgatataagcagtagatgccctctaatatttaaaaggtggcaaataaaagtaaattcaatttaccttttagggaaaggattattaaacttat

SEQ ID NO: 914 - DNA, 661 bp, Homo sapiens
  misc_feature [331]..[331]: Chromosome 2, SNP identification no. = rs7569458
  misc_feature [331]..[331]: allele = a, in linkage disequilibrium with rs1406421, respectively
  misc_feature [331]..[331]: n is a, t, c or g
agtgattttaaaaattaaactgtgtgggctgtagcatatttttaaaaaatcatgttagtgttttgaatatcctgtttctattaagaaaaagtaatcaaattaagtcaatatccagattgttcttatatacagtcaattgaatgtacttatattcatatacaatgttaaaaaattcatttacataaacaataataagaaggtctaaaaaaggataaagaagttgtggtagaattctctttaactataagctcttgatcacagtaaaaataaattatacactaaatccaagaatgatataagcagtagatgccctctaatatttaaaaggtgncaaataaaagtaaattcaatttaccttttagggaaaggattattaaacttatttcaagtggtgctgttatttgttacccacatatgtatgtataatcaaggctgctaatacctacagccttatcacttctttgtatttcataatacaatttttatttttatttatcgagttttctgttattttacacaaacttgctactatcttcaccactttttccaaactattattacacactttacaaaactgacaggtgaaaagtaaatctttttttcccaaatacgttgtagatatttttgtccctttaccttattgatcatattttcttcttga

SEQ ID NO: 915 - DNA, 661 bp, Homo sapiens
  misc_feature [331]..[331]: Chromosome 2, SNP identification no. = rs13031161
  misc_feature [331]..[331]: allele = c, in linkage disequilibrium with rs1406421, respectively
  misc_feature [331]..[331]: n is a, t, c or g
aatgttaaaaaattcatttacataaacaataataagaaggtctaaaaaaggataaagaagttgtggtagaattctctttaactataagctcttgatcacagtaaaaataaattatacactaaatccaagaatgatataagcagtagatgccctctaatatttaaaaggtggcaaataaaagtaaattcaatttaccttttagggaaaggattattaaacttatttcaagtggtgctgttatttgttacccacatatgtatgtataatcaaggctgctaatacctacagccttatcacttctttgtatttcataatacaatttttatttttntttatcgagttttctgttattttacacaaacttgctactatcttcaccactttttccaaactattattacacactttacaaaactgacaggtgaaaagtaaatctttttttcccaaatacgttgtagatatttttgtccctttaccttattgatcatattttcttcttgaaatttttacttttaagatcaaaggctttaaaatgccctgtttttcattctgtctctgtctttccttctggagatttcttctttcatttctccttctacaaaaagcaaacctattcttgtttctctctcattttttaaaatacaagatcaacaataatcag

SEQ ID NO: 916 - DNA, 661 bp, Homo sapiens
  misc_feature [331]..[331]: Chromosome 2, SNP identification no. = rs11125355
  misc_feature [331]..[331]: allele = t, in linkage disequilibrium with rs1406421, respectively
  misc_feature [331]..[331]: n is a, t, c or g
gcagtagatgccctctaatatttaaaaggtggcaaataaaagtaaattcaatttaccttttagggaaaggattattaaacttatttcaagtggtgctgttatttgttacccacatatgtatgtataatcaaggctgctaatacctacagccttatcacttctttgtatttcataatacaatttttatttttatttatcgagttttctgttattttacacaaacttgctactatcttcaccactttttccaaactattattacacactttacaaaactgacaggtgaaaagtaaatctttttttcccaaatacgttgtagatatttttgtcnctttaccttattgatcatattttcttcttgaaatttttacttttaagatcaaaggctttaaaatgccctgtttttcattctgtctctgtctttccttctggagatttcttctttcatttctccttctacaaaaagcaaacctattcttgtttctctctcattttttaaaatacaagatcaacaataatcagtgtttagtataaatctctacttctgaactctcagccagcttctaatcccttatctccaactttctcctcaacattatcacttagatgtcagactattatcgtatagaatcgaagggtgcgagaattccagctgacctgg

SEQ ID NO: 917 - DNA, 661 bp, Homo sapiens
  misc_feature [331]..[331]: Chromosome 2, SNP identification no. = rs11125359
  misc_feature [331]..[331]: allele = c, in linkage disequilibrium with rs1406421, respectively
  misc_feature [331]..[331]: n is a, t, c or g
ttgactcacacaaaactgtctgttggactgagtagaaggcatttttgaagtttttgagaagctataatttgctttgaattgattggctcagttcttgtttgttgatgcatttgatgtctcaactattactcaaaacttggaatctgttctaataactttattaagaaaatgccctgatcaactttggatgtcaggaatggcagcgtgaggagttctgcagagccaatcccaatgcaatgctgttgatgactggcaaaaattatttaaacagatgaccatttaaagtctctgaaagtagacctaagaaaaaaacagaaaattaataaatacntactttagaaaatcttctaaatattggtaagaacaatgaaagtcaaggaacttggtcacaacctgctccctctgtttcatgttcctatcctcatctccatgtgatgattgagagaagcttcagtttgggaagtgtgactaagaaaacagggttccctgtcccatcagttcctagtcaaaagatacagtatttcaagacaagggacaggttaccagaatttctctactccacactccaagttgcaaagactaaattccgttttttgttttgtatttttttttttttagacttgctcttttttgagtcttgctctgtagcccaggctggagt

SEQ ID NO: 918 - DNA, 661 bp, Homo sapiens
  misc_feature [331]..[331]: Chromosome 2, SNP identification no. = rs11901456
  misc_feature [331]..[331]: allele = c, in linkage disequilibrium with rs1406421, respectively
  misc_feature [331]..[331]: n is a, t, c or g
gttgatgcatttgatgtctcaactattactcaaaacttggaatctgttctaataactttattaagaaaatgccctgatcaactttggatgtcaggaatggcagcgtgaggagttctgcagagccaatcccaatgcaatgctgttgatgactggcaaaaattatttaaacagatgaccatttaaagtctctgaaagtagacctaagaaaaaaacagaaaattaataaatacttactttagaaaatcttctaaatattggtaagaacaatgaaagtcaaggaacttggtcacaacctgctccctctgtttcatgttcctatcctcatctccangtgatgattgagagaagcttcagtttgggaagtgtgactaagaaaacagggttccctgtcccatcagttcctagtcaaaagatacagtatttcaagacaagggacaggttaccagaatttctctactccacactccaagttgcaaagactaaattccgttttttgttttgtatttttttttttttagacttgctcttttttgagtcttgctctgtagcccaggctggagtgtagtggcacgatctcagctcactgcaagttctgcctcctggattcatgccattctgcctcagcctcccgagtagctgggactacaggcacccgccacca

SEQ ID NO: 919 - DNA, 661 bp, Homo sapiens
  misc_feature [331]..[331]: Chromosome 2, SNP identification no. = rs11125360
  misc_feature [331]..[331]: allele = t, in linkage disequilibrium with rs1406421, respectively
  misc_feature [331]..[331]: n is a, t, c or g
tggtcacagtatatcaggctcattttatactgcctgtatctaaaccctatcctgaacctttatatcaccaattcacactaacacactagatagagccttggtctcaattttaactcattacaaaatgcaagtcctttccaacccaaattacttcttgtattattgaattgtgtcaaaaccaaagtgtaaaattatagtgtttctttcttctacaaaaggtttttacgagtagcagatctgcctctttagataaaaaagaaagtaaatttaataattaatgtgagggtatgtatagtaaagctgtccattgcctctattccaacctttattngttccttctttcaagtgaaataattttttccatgaacactttctctcactgagaaatcctaaccaacaatctgctacatatttcctcttaatttttttgactcatttataataccacgtttctttaatgaaaatcatagtctttagattcagcagtaattctctcacaaaagtattttgaaagaatttaagagccatgtagtttaagaaaatacatttaaaaattcaagaatatttttgaagtgttttacagtaatatctaattatctttctatatatatggatttatttatttatttgatttgggaagtagaagttggtatttccagac

SEQ ID NO: 920 - DNA, 661 bp, Homo sapiens
  misc_feature [331]..[331]: Chromosome 2, SNP identification no. = rs11125361
  misc_feature [331]..[331]: allele = t, in linkage disequilibrium with rs1406421, respectively
  misc_feature [331]..[331]: n is a, t, c or g
tcattacaaaatgcaagtcctttccaacccaaattacttcttgtattattgaattgtgtcaaaaccaaagtgtaaaattatagtgtttctttcttctacaaaaggtttttacgagtagcagatctgcctctttagataaaaaagaaagtaaatttaataattaatgtgagggtatgtatagtaaagctgtccattgcctctattccaacctttattggttccttctttcaagtgaaataattttttccatgaacactttctctcactgagaaatcctaaccaacaatctgctacatatttcctcttaatttttttgactcatttataatancacgtttctttaatgaaaatcatagtctttagattcagcagtaattctctcacaaaagtattttgaaagaatttaagagccatgtagtttaagaaaatacatttaaaaattcaagaatatttttgaagtgttttacagtaatatctaattatctttctatatatatggatttatttatttatttgatttgggaagtagaagttggtatttccagacaaaaacaaagcttacaagtttttttctctttcttcagatgagaaaattcttgtcataagtatgacaagaaaattcttgtcataaccaagtgttcaatttaatttatagaaagca

SEQ ID NO: 921 - DNA, 661 bp, Homo sapiens
  misc_feature [331]..[331]: Chromosome 2, SNP identification no. = rs11563044
  misc_feature [331]..[331]: allele = t, in linkage disequilibrium with rs1406421, respectively
  misc_feature [331]..[331]: n is a, t, c or g
gaaaatcatagtctttagattcagcagtaattctctcacaaaagtattttgaaagaatttaagagccatgtagtttaagaaaatacatttaaaaattcaagaatatttttgaagtgttttacagtaatatctaattatctttctatatatatggatttatttatttatttgatttgggaagtagaagttggtatttccagacaaaaacaaagcttacaagtttttttctctttcttcagatgagaaaattcttgtcataagtatgacaagaaaattcttgtcataaccaagtgttcaatttaatttatagaaagcatgtaggcaaataccngggaattgaaaacatgtaaagtaacatcaattatgttaattattttaactactttagaagaactttttaaaagtattccagaaggctttattctgcatttaccttatactctactgtccttattttattctatttccattgagttttatcatttcttctagctacaattcacattttaaaaatttccaccagtgacatcatgaaagcttttgcctaaattgagaaattaattggtatagcaaaggaaactgctttttcccttttttcaaacttaaatccagatgtaaatcctatattttactttatatagtaactacgcagtaatttttt

SEQ ID NO: 922 - DNA, 661 bp, Homo sapiens
  misc_feature [331]..[331]: Chromosome 2, SNP identification no. = rs2141453
  misc_feature [331]..[331]: allele = c, in linkage disequilibrium with rs1406421, respectively
  misc_feature [331]..[331]: n is a, t, c or g
aattatctttctatatatatggatttatttatttatttgatttgggaagtagaagttggtatttccagacaaaaacaaagcttacaagtttttttctctttcttcagatgagaaaattcttgtcataagtatgacaagaaaattcttgtcataaccaagtgttcaatttaatttatagaaagcatgtaggcaaatacccgggaattgaaaacatgtaaagtaacatcaattatgttaattattttaactactttagaagaactttttaaaagtattccagaaggctttattctgcatttaccttatactctactgtccttattttattctntttccattgagttttatcatttcttctagctacaattcacattttaaaaatttccaccagtgacatcatgaaagcttttgcctaaattgagaaattaattggtatagcaaaggaaactgctttttcccttttttcaaacttaaatccagatgtaaatcctatattttactttatatagtaactacgcagtaatttttttagtcattaataagatgatataatgggttatctatccattttcccatgtaaactttagttttatatatatatatataaatatagttatgtataactttatatattttataaacttacatatattttataaat

SEQ ID NO: 923 - DNA, 661 bp, Homo sapiens
  misc_feature [331]..[331]: Chromosome 2, SNP identification no. = rs13010068
  misc_feature [331]..[331]: allele = a, in linkage disequilibrium with rs1406421, respectively
  misc_feature [331]..[331]: n is a, t, c or g
tataaaatatatattatatataaaactaaagtttacctcaggatatagattaataaaacatatctgattattaataattactaaataatggctaaataaatacacatttgcttctagaacggctgcaaaacctgatcattaaggcaatccttattagtccatagtatttatcatataagctacatacttagcagttcatcatatttattatataagctacatgttacctgatgagaatagcaaataataaagaataggacgtgaaactgtgtagattcgtccattctccagtgaatttttttatcataggttggcttccctgggaagcaanttctgatacagagtgttgggggaggaaatttatcattagccctgagtgatcctgtaagttcttgttacatgtgccaagagtgtagagccccaactactctttatagaagccatttctcagaattatatatacagtgagtaatcttgaggcatggcaaaacatttccctccatgacacagggcaggctttctcacttcctgttatatttccgaagtttattgttcctcctttgtaaggtagtatacatatgtgcagacatctctttgggcccttcattttgccactgttagactttagaggaatgggtagaactgataattttattctcat

SEQ ID NO: 924 - DNA, 661 bp, Homo sapiens
  misc_feature [331]..[331]: Chromosome 2, SNP identification no. = rs13027868
  misc_feature [331]..[331]: allele = a, in linkage disequilibrium with rs1406421, respectively
  misc_feature [331]..[331]: n is a, t, c or g
caaataataaagaataggacgtgaaactgtgtagattcgtccattctccagtgaatttttttatcataggttggcttccctgggaagcaagttctgatacagagtgttgggggaggaaatttatcattagccctgagtgatcctgtaagttcttgttacatgtgccaagagtgtagagccccaactactctttatagaagccatttctcagaattatatatacagtgagtaatcttgaggcatggcaaaacatttccctccatgacacagggcaggctttctcacttcctgttatatttccgaagtttattgttcctcctttgtaaggtantatacatatgtgcagacatctctttgggcccttcattttgccactgttagactttagaggaatgggtagaactgataattttattctcatgcttctgactgtaccatgattgataacaccatctgcctctgaaccagaagtcttgtgtctttttccagcatttatagtaagactaacttgttagcttataagtagggtacaattatgtttcaaaccctgataaagagatttatacatagaatggtgatcagagagtattttttacaggagagctattaaagaaaaattggccagaaggaggagttgggattcagtcacaccaaagatctc

SEQ ID NO: 925 - DNA, 661 bp, Homo sapiens
  misc_feature [331]..[331]: Chromosome 2, SNP identification no. = rs11563170
  misc_feature [331]..[331]: allele = a, in linkage disequilibrium with rs1406421, respectively
  misc_feature [331]..[331]: n is a, t, c or g
tgcttctgactgtaccatgattgataacaccatctgcctctgaaccagaagtcttgtgtctttttccagcatttatagtaagactaacttgttagcttataagtagggtacaattatgtttcaaaccctgataaagagatttatacatagaatggtgatcagagagtattttttacaggagagctattaaagaaaaattggccagaaggaggagttgggattcagtcacaccaaagatctcaatcaatgctacaaagaacttgggaactgagatgaccctggagagatattgagacaagatgtcctggcctttctattctcacatcaagcngcctttacatatggcctgcccccaagtaggaggcacaatcctgggcaatatggctttctttatctgaaggcaagaaaagtaatgaaaatcgggcagtgtacctcaacatccactatagcagcaaatcagaaagatcaaatgaatagcctctgttaaaacaatgaattcccttggaaacatataatatttctctatcatgcaatggcatttgtgagttttaaaaatacttttctgagttacaacactttaaaaaattctagattgcatgtgtgaatttactcaaaatagttgctttggcaagttttctgactcctactttgaaaaaactcc

SEQ ID NO: 926 - DNA, 661 bp, Homo sapiens
  misc_feature [331]..[331]: Chromosome 2, SNP identification no. = rs2698005
  misc_feature [331]..[331]: allele = a, in linkage disequilibrium with rs1406421, respectively
  misc_feature [331]..[331]: n is a, t, c or g
ataaggcataataatgatgattaagatttattgagggcttaatcctttcacatcacacagccaagaggaatatctcaaatgttgacaacaacccttcggtctaaatagttattatccacactgtactgaatagaaatttgtagcaaagacaaactaaagcaatgtgcccaaaatagaacaaaactaagagtttaggtgagaattctaatctaggttttctggaactgtaattcatgtgcttggatagcatacttcagttgtccagatattatataataaattaccaaagtgttcaggtgaatgataaagtaggcaagatttaattcagaangaaattattggtagattagttgataattgatacactggcacaattatgtttttctttcaaagtggagttttttcaaagtaggagtcagaaaacttgccaaagcaactattttgagtaaattcacacatgcaatctagaattttttaaagtgttgtaactcagaaaagtatttttaaaactcacaaatgccattgcatgatagagaaatattatatgtttccaagggaattcattgttttaacagaggctattcatttgatctttctgatttgctgctatagtggatgttgaggtacactgcccgattttcattacttttcttgccttcag

SEQ ID NO: 927 - DNA, 661 bp, Homo sapiens
  misc_feature [331]..[331]: Chromosome 2, SNP identification no. = rs13029605
  misc_feature [331]..[331]: allele = c, in linkage disequilibrium with rs1406421, respectively
  misc_feature [331]..[331]: n is a, t, c or g
cactatagcagcaaatcagaaagatcaaatgaatagcctctgttaaaacaatgaattcccttggaaacatataatatttctctatcatgcaatggcatttgtgagttttaaaaatacttttctgagttacaacactttaaaaaattctagattgcatgtgtgaatttactcaaaatagttgctttggcaagttttctgactcctactttgaaaaaactccactttgaaagaaaaacataattgtgccagtgtatcaattatcaactaatctaccaataatttctttctgaattaaatcttgcctactttatcattcacctgaacactttgntaatttattatataatatctggacaactgaagtatgctatccaagcacatgaattacagttccagaaaacctagattagaattctcacctaaactcttagttttgttctattttgggcacattgctttagtttgtctttgctacaaatttctattcagtacagtgtggataataactatttagaccgaagggttgttgtcaacatttgagatattcctcttggctgtgtgatgtgaaaggattaagccctcaataaatcttaatcatcattattatgccttatcttaggttatgcctggactcaaaagctttcccttcttcttctaagga

SEQ ID NO: 928 - DNA, 661 bp, Homo sapiens
  misc_feature [331]..[331]: Chromosome 2, SNP identification no. = rs13029262
  misc_feature [331]..[331]: allele = g, in linkage disequilibrium with rs1406421, respectively
  misc_feature [331]..[331]: n is a, t, c or g
gcaaatcagaaagatcaaatgaatagcctctgttaaaacaatgaattcccttggaaacatataatatttctctatcatgcaatggcatttgtgagttttaaaaatacttttctgagttacaacactttaaaaaattctagattgcatgtgtgaatttactcaaaatagttgctttggcaagttttctgactcctactttgaaaaaactccactttgaaagaaaaacataattgtgccagtgtatcaattatcaactaatctaccaataatttctttctgaattaaatcttgcctactttatcattcacctgaacactttggtaatttattntataatatctggacaactgaagtatgctatccaagcacatgaattacagttccagaaaacctagattagaattctcacctaaactcttagttttgttctattttgggcacattgctttagtttgtctttgctacaaatttctattcagtacagtgtggataataactatttagaccgaagggttgttgtcaacatttgagatattcctcttggctgtgtgatgtgaaaggattaagccctcaataaatcttaatcatcattattatgccttatcttaggttatgcctggactcaaaagctttcccttcttcttctaaggaacacttatgc

SEQ ID NO: 929 - DNA, 661 bp, Homo sapiens
  misc_feature [331]..[331]: Chromosome 2, SNP identification no. = rs1528794
  misc_feature [331]..[331]: allele = t, in linkage disequilibrium with rs1406421, respectively
  misc_feature [331]..[331]: n is a, t, c or g
gatattaggaatcttctgttgaacaaacatttacagacatttatcagcactgtactcagatacatttgtttcttaagccatgtttactgacagcctttttttatcttcatttgctatcaagatgtctaagtataaacttatgtttctgcatcaaacctagcaaagggaaaaatttattatttcattcattcattctttcaacaagtagttacgttcattttgtgtgtcaggcactttaataagcattgttaaataagacattgcccataccattaaagcccagtaggcagattcaggtgacgaagtaagtccaaggatttaactgcataantgttccttagaagaagaagggaaagcttttgagtccaggcataacctaagataaggcataataatgatgattaagatttattgagggcttaatcctttcacatcacacagccaagaggaatatctcaaatgttgacaacaacccttcggtctaaatagttattatccacactgtactgaatagaaatttgtagcaaagacaaactaaagcaatgtgcccaaaatagaacaaaactaagagtttaggtgagaattctaatctaggttttctggaactgtaattcatgtgcttggatagcatacttcagttgtccagatattatataataaa

SEQ ID NO: 930 - DNA, 661 bp, Homo sapiens
  misc_feature [331]..[331]: Chromosome 2, SNP identification no. = rs11562961
  misc_feature [331]..[331]: allele = c, in linkage disequilibrium with rs1406421, respectively
  misc_feature [331]..[331]: n is a, t, c or g
aaaaaggctgtcagtaaacatggcttaagaaacaaatgtatctgagtacagtgctgataaatgtctgtaaatgtttgttcaacagaagattcctaatatcacacatatggtgttcttaccgcttgatgcacttgagagcaaatttccctaccctttcttaaaatagtgataggtttaacagctggcagggactaaaagagtaagacaatttttgtttattattcaaggtgatcagtacattgatatatgaattcacatatggtagcacttaaggaaggacacttggtttctttcgaaaaacatcatggaagaggtggcgcctaagctagancttgaagagtaagcaaaactgattgagataagacacgtatagaagataaggttttagggaaagtgttccaggtagtcatataagtaatatgtgcaaagtagggtatgtgagtgagagaacttacttggaactctaagtactaaagctcattatggtgaaaaatgagtaaagggaaagggagaagagaagtgagagagaagatggggggaggtctttatttgattttctctaaagcagagcctgagccagggacttggacacagacactttctttggaggtgttcccaggaagcaaaggtgaaaggacaggaagggtaacaggcaagaagg

SEQ ID NO: 931 - DNA, 661 bp, Homo sapiens
  misc_feature [331]..[331]: Chromosome 2, SNP identification no. = rs17868162
  misc_feature [331]..[331]: allele = t, in linkage disequilibrium with rs1406421, respectively
  misc_feature [331]..[331]: n is a, t, c or g
acacttggtttctttcgaaaaacatcatggaagaggtggcgcctaagctagaacttgaagagtaagcaaaactgattgagataagacacgtatagaagataaggttttagggaaagtgttccaggtagtcatataagtaatatgtgcaaagtagggtatgtgagtgagagaacttacttggaactctaagtactaaagctcattatggtgaaaaatgagtaaagggaaagggagaagagaagtgagagagaagatggggggaggtctttatttgattttctctaaagcagagcctgagccagggacttggacacagacactttctttggangtgttcccaggaagcaaaggtgaaaggacaggaagggtaacaggcaagaaggaaaaggtaatgtatgactaaattatcaaggttactcctttttacggtggggtccatttaaccagcccccttgagaacagtaaataacaccacccagaattatcttcctgcaggaaaggaagctactgcatttacctgtatgcattcaacctctatcaactgaagttgtcctgaggtattaactccctcatatttccagggtgcacctagaagacttgccagcctggcaacaacttctactgtaggaagagaggcactaggctggaaagcaagtgaaag

SEQ ID NO: 932 - DNA, 661 bp, Homo sapiens
  misc_feature [331]..[331]: Chromosome 2, SNP identification no. = rs17863618
  misc_feature [331]..[331]: allele = a, in linkage disequilibrium with rs1406421, respectively
  misc_feature [331]..[331]: n is a, t, c or g
ttggtttctttcgaaaaacatcatggaagaggtggcgcctaagctagaacttgaagagtaagcaaaactgattgagataagacacgtatagaagataaggttttagggaaagtgttccaggtagtcatataagtaatatgtgcaaagtagggtatgtgagtgagagaacttacttggaactctaagtactaaagctcattatggtgaaaaatgagtaaagggaaagggagaagagaagtgagagagaagatggggggaggtctttatttgattttctctaaagcagagcctgagccagggacttggacacagacactttctttggaggtgntcccaggaagcaaaggtgaaaggacaggaagggtaacaggcaagaaggaaaaggtaatgtatgactaaattatcaaggttactcctttttacggtggggtccatttaaccagcccccttgagaacagtaaataacaccacccagaattatcttcctgcaggaaaggaagctactgcatttacctgtatgcattcaacctctatcaactgaagttgtcctgaggtattaactccctcatatttccagggtgcacctagaagacttgccagcctggcaacaacttctactgtaggaagagaggcactaggctggaaagcaagtgaaagactt

SEQ ID NO: 933 - DNA, 661 bp, Homo sapiens
  misc_feature [331]..[331]: Chromosome 2, SNP identification no. = rs11563000
  misc_feature [331]..[331]: allele = c, in linkage disequilibrium with rs1406421, respectively
  misc_feature [331]..[331]: n is a, t, c or g
ctttatttgattttctctaaagcagagcctgagccagggacttggacacagacactttctttggaggtgttcccaggaagcaaaggtgaaaggacaggaagggtaacaggcaagaaggaaaaggtaatgtatgactaaattatcaaggttactcctttttacggtggggtccatttaaccagcccccttgagaacagtaaataacaccacccagaattatcttcctgcaggaaaggaagctactgcatttacctgtatgcattcaacctctatcaactgaagttgtcctgaggtattaactccctcatatttccagggtgcacctagaagncttgccagcctggcaacaacttctactgtaggaagagaggcactaggctggaaagcaagtgaaagacttgctgtgtccacttgatattggatgctgctatcatgagatgaattggtgtttacataaactgtccttagctgcagctgagatcacagatgggctaaggggatatgatatggggcacaaaggtgtctgctccagatcaataagcagaggccaggccatgataagccttgttagggagcttgcaattcacctgtttaccttatgaactgaaccatttagagtaagagagcaatgtgaccagatgtagatttttctgagtatcat

SEQ ID NO: 934 - DNA, 661 bp, Homo sapiens
  misc_feature [331]..[331]: Chromosome 2, SNP identification no. = rs11895794
  misc_feature [331]..[331]: allele = t, in linkage disequilibrium with rs1406421, respectively
  misc_feature [331]..[331]: n is a, t, c or g
aagtgaaagacttgctgtgtccacttgatattggatgctgctatcatgagatgaattggtgtttacataaactgtccttagctgcagctgagatcacagatgggctaaggggatatgatatggggcacaaaggtgtctgctccagatcaataagcagaggccaggccatgataagccttgttagggagcttgcaattcacctgtttaccttatgaactgaaccatttagagtaagagagcaatgtgaccagatgtagatttttctgagtatcataaaacatcatcatgcccttgacataagtacatatgatagttaagaataccaagttcnagttcatgttaatttttaaaagatcacatgatatgatacctaagacctgctaatctggaggaaaaaatgttatttttaaaattttttttttcttgtccatttttataccagcaggttaaaaactcctccaaataggaaattaaatattagttattaacgtggaatagttctaacaaatattttgctattaaaaagtgatacattccctcaacgtattagtaaacagttgctgtataaaacacattattgaaatatagtgacttaaaactgtaattacttattgttagtctccatgttagctaggagccagctgattgagactgggcttga

SEQ ID NO: 935 - DNA, 661 bp, Homo sapiens
  misc_feature [331]..[331]: Chromosome 2, SNP identification no. = rs2698004
  misc_feature [331]..[331]: allele = g, in linkage disequilibrium with rs1406421, respectively
  misc_feature [331]..[331]: n is a, t, c or g
ttgtttgcttgcatgtgtgtttgtgtgtgtgtgtgagagagagaggcagagacagagtgtttgctgtgtgcctcccaaaacttgtaaaaaattatcagtttgtgacttgttttatatatgactgatatctattacattcatgtgtgcagaaccaaaatatgccctaacaacatgtaaaattaagaagcatatgatgtcatgtttctattattagctgttcaaggttttagtaacaattccaggtgacatttgtacatctaaattaagtcaaacctgcatattacattcatttctttttcacatgttaaatcttattttcatgttagtagcnaaatatattaggtgactcagtattttcatataggaaaaattttaatcatatcaaaatttggtttagttaagactgaaaagcctgtggtacttgaatactgaataatgaattatcaaggaattaaaatgacttcaaataaatataaaatcaaggtgttaaattgaaacactaaattataagcagtgatttgcattgtaaaacatccccaaaacaatataatatgaaatgaattggtgtagtgagttacatagtaatccctaaaatagataggtccacctggaaccgcagaatgtgatttttttaataaagatctttgctgatataattagg

SEQ ID NO: 936 - DNA, 661 bp, Homo sapiens
  misc_feature [331]..[331]: Chromosome 2, SNP identification no. = rs2715049
  misc_feature [331]..[331]: allele = g, in linkage disequilibrium with rs1406421, respectively
  misc_feature [331]..[331]: n is a, t, c or g
agtaaactgttttctattttcaacatactctaaagaatatgttaaaagctctgtctgatatcaaggtccacttcttcatttctaaggaatggttggaagccaggtgaaatgtctgctgatcacgtataaccctaaatactgttcatttataactcacaccctttattctagaagatattaggacatggtttttaagggtgtaagctctgcacttgttagtaaaggtacagttccttatcccagcccctgtaagttaactccaccctagataaggaatttaactttttatattctataaaatgggtatggtaatagtccctgaaatagtcanagttctcatatatgtgtgtgtgtacacacacacacacacacacatttacacatacacacacatatatatacacacacacatacacatacacatacacacacacacacacacacacacacacacacatacaaaggaattggcgtacacaattttgggtggcctaggcaagtataagttccacaggggggaaaagctctcaggcatgggctgtaactactatacaaaagcagaaattcttcatcaagacagcctcagctcttctattaagacctttctactgattgattcagggccaaaaaattatctagaataatctttttatttaacgtc

SEQ ID NO: 937 - DNA, 661 bp, Homo sapiens
  misc_feature [331]..[331]: Chromosome 2, SNP identification no. = rs1406421
  misc_feature [331]..[331]: allele = t, g
  misc_feature [331]..[331]: n is a, t, c or g
gatttggtcacttactggctctatgaccttaagcaagcctatttttattttctttaagtcttacatttcatggctgacaaaaagagaaaataacaacactatttcttagagttgttgtggagataaatagaaaaaagtcgttttgaaggcaaaatgcacattatacccaaactgaaaagcagaattctaaatggggagctgggaagaggaatggaagagctaaatatgtcttttctgctatagtctttgccagaatcttaacagtaatagtagaataggatcctcccactccagatatctatatataccatttcttatgagagtctgattntagcctgaaaaaaattgggcctgtcttagcccactttcactaatgagaactatattcagtaaactgttttctattttcaacatactctaaagaatatgttaaaagctctgtctgatatcaaggtccacttcttcatttctaaggaatggttggaagccaggtgaaatgtctgctgatcacgtataaccctaaatactgttcatttataactcacaccctttattctagaagatattaggacatggtttttaagggtgtaagctctgcacttgttagtaaaggtacagttccttatcccagcccctgtaagttaactccaccctagataag

SEQ ID NO: 938 - DNA, 661 bp, Homo sapiens
  misc_feature [331]..[331]: Chromosome 2, SNP identification no. = rs1406420
  misc_feature [331]..[331]: allele = a, in linkage disequilibrium with rs1406421, respectively
  misc_feature [331]..[331]: n is a, t, c or g
ttggcttgaagatagagtgggtagtgtcaaaagcatgagaagaatatgaattctagaacaaccattgatttagggaaaaatcccacactccagatgagaaccacagcatttgttgacagtttgatttcagccatctgagaccttgatcaaccatgccatgtcggacttcagaactatgaaaacagagctcataaacagattttgttataaatagctaagtttgtggtaatttgttgtgcagcaaaagaaaaggaaaatttgtttattctgtcatttccactgcatgaaccatgagtaaaacattttttcttggtgtttccttctttctaanatcatagattgggtcgtctagaaacatggaagaaagaaacactgcctgaaagataataaaatgcaggtgcataaaagtagaatggacttggaaaaactgcttttacattttgatttggtcacttactggctctatgaccttaagcaagcctatttttattttctttaagtcttacatttcatggctgacaaaaagagaaaataacaacactatttcttagagttgttgtggagataaatagaaaaaagtcgttttgaaggcaaaatgcacattatacccaaactgaaaagcagaattctaaatggggagctgggaagaggaatggaagag

SEQ ID NO: 939 - DNA, 661 bp, Homo sapiens
  misc_feature [331]..[331]: Chromosome 2, SNP identification no. = rs1528791
  misc_feature [331]..[331]: allele = g, in linkage disequilibrium with rs1406421, respectively
  misc_feature [331]..[331]: n is a, t, c or g
gcactggtcaaagtctatgggaagcctggaggaggtacagaggtcaactggtgggggagggaaagaagaggagtctttccttcaggggttgtggattggctagtttacagaaaacacacagtaagagaggaacttatttacaagactctggtgtttgactattaggttttatcatgttgaacagctgtgagtgtatggggtttgggtcagtggaatgaggctatatttcaaacaactacacagggagaggaagttttagctaggccaaaggtgatgaggtaaactgactttcaaagaacttaggtcaggctttaaaattaatgtcaggacngcaactatatgaaacaaatttatgacaaagtctacgtgggtgacttctacagaattgacttctgttaggccttagtttttgagtgacaccagtctaattaattgctgttcatgactcatagctatcacagatactgggtttcacatgaatcaacagttaataaaattcataagtattgcaaagaggtcatgaatctgagaagctctattagttttgcttaatttccccctttgtgaaatatggataagttgaaaagcactactcatattcatctttttactttttcttatttactgaacttttattgagtataatcagagaatcttggca

SEQ ID NO: 940 - DNA, 661 bp, Homo sapiens
  misc_feature [331]..[331]: Chromosome 2, SNP identification no. = rs1528789
  misc_feature [331]..[331]: allele = g, in linkage disequilibrium with rs1406421, respectively
  misc_feature [331]..[331]: n is a, t, c or g
gctactcaactgaccttgatatgggacgattatcctggatcattcaggtaggctcaatgtaatcacaaggtttctaataaagtaaaaaaggagaaagaagtgtcacagttagagtcatgcagcatgagaaaaattagattggcaattactgctgacttggaagatgtaaggaggtcagaagcaaaggtacgatggtggtctctaaaagctgaaaaaggaagaaagaaaatgaattcttccctagaatctccagtgaaaaaccctcttgacacttaattttagcccagtgaaaccaatcttggacttttgaccttccgagctttcacataanacatgtgtgttgttttaagcaacaaagtggtaacttgttacagcagcaatagaaaacgaatatagcacccagcctatagctgctggaaatactggctactgatgagtcatagatatgtctctcactgggaattgtccttaactacaaggaattgtctagtcttgtaggtttttcttcctctcaggggatgcaatgactagttgatacggggttacaaagacctaagttgaaggtaaattacaggtaagcttcttagtctgcccagtcctaccttcactttcttaaaatcgaatatcctgaggtcctttcctaataaaccttctgcatgca

SEQ ID NO: 941 - DNA, 661 bp, Homo sapiens
  misc_feature [331]..[331]: Chromosome 2, SNP identification no. = rs13012007
  misc_feature [331]..[331]: allele = g, in linkage disequilibrium with rs1406421, respectively
  misc_feature [331]..[331]: n is a, t, c or g
aaaggacctcaggatattcgattttaagaaagtgaaggtaggactgggcagactaagaagcttacctgtaatttaccttcaacttaggtctttgtaaccccgtatcaactagtcattgcatcccctgagaggaagaaaaacctacaagactagacaattccttgtagttaaggacaattcccagtgagagacatatctatgactcatcagtagccagtatttccagcagctataggctgggtgctatattcgttttctattgctgctgtaacaagttaccactttgttgcttaaaacaacacacatgtattatgtgaaagctcggaaggtnaaaagtccaagattggtttcactgggctaaaattaagtgtcaagagggtttttcactggagattctagggaagaattcattttctttcttcctttttcagcttttagagaccaccatcgtacctttgcttctgacctccttacatcttccaagtcagcagtaattgccaatctaatttttctcatgctgcatgactctaactgtgacacttctttctccttttttactttattagaaaccttgtgattacattgagcctacctgaatgatccaggataatcgtcccatatcaaggtcagttgagtagcaaccttaattccatcggcaact

SEQ ID NO: 942 - DNA, 661 bp, Homo sapiens
  misc_feature [331]..[331]: Chromosome 2, SNP identification no. = rs2698002
  misc_feature [331]..[331]: allele = a, in linkage disequilibrium with rs1406421, respectively
  misc_feature [331]..[331]: n is a, t, c or g
tcaaaaaaatttttaaaaagaacaaagttggaaagcataggatacctgacttctaaactttcaaagtacagtaataaagacaatgtaatcataatgtacatacagataagcatatagactaactggaccaaattcaaagtttggaaataaactcttaatttggttatttttagtaaagaatcaaagataattaaatggtgagagaatgggcttttgaagaaatagtaatagaacaacttagtattcctatgcaaaaacaacagaaaagaagaataaagaacttagcaacttaccccacactatacacaaaaattaaatcaaaatgggtcanagatgtaaatattgtataagaactaatactataaaacttctggagaaaacctaggagataatctttatggcctttggataggcaaaaatctcttggctacagtacaaaaatatgatttattaaaaacattatattgttgaacttcatgaacattagaaacttttatacttgaaacacaacataaaatgaaatacaagccatatttataagtcatatatctgataaaggacttacatctagaaaatatcaatattttcaaatcaatatttaaaagacataaattccaagtaaacgatagttgaaatatttgaataaacattttaccaaaga

SEQ ID NO: 943 - DNA, 661 bp, Homo sapiens
  misc_feature [331]..[331]: Chromosome 2, SNP identification no. = rs7566493
  misc_feature [331]..[331]: allele = g, in linkage disequilibrium with rs1406421, respectively
  misc_feature [331]..[331]: n is a, t, c or g
ttatctttgattctttactaaaaataaccaaattaagagtttatttccaaactttgaatttggtccagttagtctatatgcttatctgtatgtacattatgattacattgtctttattactgtactttgaaagtttagaagtcaggtatcctatgctttccaactttgttctttttaaaaatttttttgactattttaaagctattatatttacataataattgtaatgataggcttgtcaatttctacccaaaaaatctgataagctcatggagacttttttgaatcaatagatcaatttagggtgagttcgcaatttggggagagatcnaaagaattattgaatctttctatctatgaacgtgggatttttaccaattcatttggatcgttgaacagttttcctagcaatcttttatagattttcaacggacaagggttgcattttttaaattaattcctgagtagtattttgtttgttgtttttgtgaatggaattttaaaaaattatgtttgcagaatattcattgtaagtgtataaaaatataattgatttttgcatattgattttattacctgtgaccatattaaatgtgtttatcaaatctagtaggtatgtgtatgtgatttcctcagaattttctacatagaggattatgac

SEQ ID NO: 944 - DNA, 661 bp, Homo sapiens
  misc_feature [331]..[331]: Chromosome 2, SNP identification no. = rs2698000
  misc_feature [331]..[331]: allele = t, in linkage disequilibrium with rs1406421, respectively
  misc_feature [331]..[331]: n is a, t, c or g
ttcactgtatctattcaacagtgtacaagaatttctagctagtactttctttcaaaagaaagaatcaaaaccatttattatgtatattaattcacatatgtcataatcctctatgtagaaaattctgaggaaatcacatacacatacctactagatttgataaacacatttaatatggtcacaggtaataaaatcaatatgcaaaaatcaattatatttttatacacttacaatgaatattctgcaaacataattttttaaaattccattcacaaaaacaacaaacaaaatactactcaggaattaatttaaaaaatgcaacccttgtccnttgaaaatctataaaagattgctaggaaaactgttcaacgatccaaatgaattggtaaaaatcccacgttcatagatagaaagattcaataattcttttgatctctccccaaattgcgaactcaccctaaattgatctattgattcaaaaaagtctccatgagcttatcagattttttgggtagaaattgacaagcctatcattacaattattatgtaaatataatagctttaaaatagtcaaaaaaatttttaaaaagaacaaagttggaaagcataggatacctgacttctaaactttcaaagtacagtaataaagacaatgtaatca

SEQ ID NO: 945 - DNA, 661 bp, Homo sapiens
  misc_feature [331]..[331]: Chromosome 2, SNP identification no. = rs17862700
  misc_feature [331]..[331]: allele = t, in linkage disequilibrium with rs1406421, respectively
  misc_feature [331]..[331]: n is a, t, c or g
attgattttattacctgtgaccatattaaatgtgtttatcaaatctagtaggtatgtgtatgtgatttcctcagaattttctacatagaggattatgacatatgtgaattaatatacataataaatggttttgattctttcttttgaaagaaagtactagctagaaattcttgtacactgttgaatagatacagtgaaagtggacatctttcagtctttcaccattaagtatgatattgattgtaagttttcttgttgggtgccttttaatagtttgagaaaattctcatctttttctaattggctaagcatttcatcagaaatagatgtnggctatgtcaaatacagtatctgaatctactgagatgatactgtatgcttttcttccattattaatattatgtattacatggatttattttttggatgctaatatagtcttgcatttttgtggaaatcccagatgatgatggtgtgtaatcctttttaaatattactgaattcagtttgcaaatattttaagaacatttgcttattaggacattatgtattttccttttcttgtgatgtttttgtgtgatttggcatcagggagaatccagcctcaaagagtgatttgggatatgttctctcctctattttttgaggttcattaagggtt

SEQ ID NO: 946 - DNA, 661 bp, Homo sapiens
  misc_feature [331]..[331]: Chromosome 2, SNP identification no. = rs11884390
  misc_feature [331]..[331]: allele = a, in linkage disequilibrium with rs1406421, respectively
  misc_feature [331]..[331]: n is a, t, c or g
tataagtgttccattttttctgcaaccccaccagcatcgctatttttaaattttttaatagtagccattctgactattgtgagatggtatctaattgtggctttcatttgtgtttctctaatgatcagtgatactgagtttttttcatatgtttgttggccacatgtatgtcttttgaaaagtgcctgttcatgtcctttgcccactttttaatggggttgtttgttttttagatgcagagtcatatcatctgcaaacagagatagtttgacttcctttcttcttcttcgggtgccctctgtttctttctcttgcctgattaccctggctnggactttcagtactactttgaataggagtggtgagagaggacatccttgtcttgtgctggttttcaaggggaataatatttttagtacttaccagtgtggccatctaggtctgagtttgacttttctttgttcgaagatattttattagattacagtgtttgttatatatttattttaacatctgattttttcagtcgcttttggtaatttgcatctttgtagaaacatatccatttaatgtaagttatgcaatttgtgggcctagagttgttcatagtattcctttttaatgtttttaattttggaagggttagtgataatgtcccttt

SEQ ID NO: 947 - DNA, 661 bp, Homo sapiens
  misc_feature [331]..[331]: Chromosome 2, SNP identification no. = rs12996896
  misc_feature [331]..[331]: allele = t, in linkage disequilibrium with rs1406421, respectively
  misc_feature [331]..[331]: n is a, t, c or g
aaccaacttttgttttcattaatttttttcaagtgtttttcctattttattaattttcacttttttatttcatttcttctgctagattcaggtttagtttgctctccattttctggtttattaaagtggaaaattagatgattgatttgaagctatttgttttttatgacacattgtacaaatgacagatttgtctccatgtacagttttagtggtttctcatcagtttgaatataactttattttcctttttttcagcatattttctattttcctttttcttatttgtgttattggttaaccacaatcatcgtgtttcctttctaagtgnttggttatttcccttacgttttctctgtagctttcaaatttaatctttttggcattggaaaatacacgtttgtatcattttaatcgctttaaatttgttatgttgctttgtgatccagtatatggtctatcctgaaatgtgttccctttggacttggaaggaatgtgaattctcctgacatttggtggaatatgctataaaagatcaagctgcctaacactactgctcatatctttttaatactgttcaaattatctatatttttgctgaatttttgtctagttgctctgttactgatactactatatgaactctccaactaatattatt

SEQ ID NO: 948 - DNA, 661 bp, Homo sapiens
  misc_feature [331]..[331]: Chromosome 2, SNP identification no. = rs9989877
  misc_feature [331]..[331]: allele = a, in linkage disequilibrium with rs9309219, respectively
  misc_feature [331]..[331]: n is a, t, c or g
catcataatgctaaaattcatgaaaaatattacaaaccaacacaccaaaaattcaagaattgtcactaagtacctggtggctataagaccatttatcagtaacctatggttttgttctccccacacatttcaactaattagattatccaaaaaaagccttgtttctgaaagaaatgtgttgaatattgtttaatattagaggcaaaaaagaacagaggaaaaaaataacagaggttacttcccttgtttttgactcgcagcagagtgtcatggctgtactagagggcaattaggtagaaagatgatacagttatcagacgagacaaacttntaagcctcgtctctctagcatttaatgttctctgaaacccatctcaaatatcacagaaaggatagaaccttaatattagatagagggaaattttattagatctaagtgttttttaagaaattgtcaagaaaggctttcaaatatattctaacctggtcttagattccaccatgacccctggtagaagaagtacactgtgaagcactgttgatagatgagtgctcagtggtgaactactagaatgggcatgcattgcttccatgaatttataagtagcaatgtggcatgttattctaaaaagtaaataaaatttaaaaatatcatttagct

SEQ ID NO: 949 - DNA, 661 bp, Homo sapiens
  misc_feature [331]..[331]: Chromosome 2, SNP identification no. = rs12616608
  misc_feature [331]..[331]: allele = g, in linkage disequilibrium with rs9309219, respectively
  misc_feature [331]..[331]: n is a, t, c or g
ttaaaaatttaggatttttgtcctccttcactagctcacatttatgcttaggataaatttaaagacaatcaattgaatgttgaagaaaaattttaaaaatgcaaattaaccaggattcctgtgtactagaatgttttgaagccatagttctcaaccaaaaaggaagcattaaattcatctgctgagatttttcagactacacatcgtcccctttatttactctgctttagtgctaagctccttttttgtattatttgttaatgtttttgagaggggaaaaaatggaagttttggattatcaatatatatatttaatattttcttaaaaatntaagttgacagcagaatagttatattgtagatgttggctcggggcataatataacatacatgaaaataagaccaaatataattgaggtgtacttttgcaatagtagagtgggcatttctagatcaagttgtagtagaaaaaaaaaaaggtagaaaagttcactaaaaatagtaagttaaaataaatcaatcttttgtacagagcaaaaaggcaaagtactaggcctagtagcctggtagttgtccaattaatatgtggggtagttttcagcctaaaaataatatgatagagttgaggaaataatgtgttgaatcacaagacaataaccaa

SEQ ID NO: 950 - DNA, 661 bp, Homo sapiens
  misc_feature [331]..[331]: Chromosome 2, SNP identification no. = rs13405904
  misc_feature [331]..[331]: allele = c, in linkage disequilibrium with rs9309219, respectively
  misc_feature [331]..[331]: n is a, t, c or g
cagcctaaaaataatatgatagagttgaggaaataatgtgttgaatcacaagacaataaccaattatgctaaaatatgcagtatggattgatctaatatctaagtgatttttaatcattgtacatatgtaagttgtatgtcattctctcagtttttggaaactttatatggaggaagctaatgaacaattaagaattacctcagaagagaaaagaggcaaatttatgtcttggaaaaggagctgatattgaaagatgagttcaaatattgtggctgaacaagaagatataaagatttctaaatttcaaatttcaactattcttatccaaancggttaggattatttgtttttaaagtggattaattatattattaatgtggatttatagtattcacagaaatctggattgtttctcataatttgcatctatccatacattaaaatcttaaattttattttaatagagatcggacatatagcaatgtggttttagtacagtgcaaacgtcttttatttcaaaatgagagatttcgaacgagtcacataaagactcttagcagcatcaagttatttgaataaaaattcagagagacaagagcatgtggcaagtttagatgtgacaaatgctaagagtgactgaagaggtatcatataaatact

SEQ ID NO: 951 - DNA, 661 bp, Homo sapiens
  misc_feature [331]..[331]: Chromosome 2, SNP identification no. = rs13010288
  misc_feature [331]..[331]: allele = t, in linkage disequilibrium with rs9309219, respectively
  misc_feature [331]..[331]: n is a, t, c or g
tctgtgggacgttttttaaggtacaacgtttcagatgtgaaagttaacaagcatgagcccattctcctaaactttagggagatagagacaattatattttttaaaaagcagggaaacaaaataatgacagatgacaagcattgctgtgctggtaacaaaaggatgtttgctgtgatagagagtaaaagggggtggaaagctaattagaatatgatgctatttagggaaagcctctggggaggtgatatgtaagttgacacctgaaagctgagaagggaggaataagttcaagtatattgagaaaaagctttcaaaaaaagaaaataggaantacagagttgctgaggcagaaaactaaaggccagtgtggatgagtagcttctgaagccatatgctgaaatcaaaatttagataatcttttgtcttcagattattttcctgctgtttatgcttgcccacaaagatctatggagatttgatagatagatagatagatagatagatagatagatagatagatagatttttattcccgatcattcatctctattatccatacctgaaaatcataaatttcattttgtttcaatagacatctgacatgactctctacagcaatgtggtcttaaaacttcataaacactgcctagttcatagttgc

SEQ ID NO: 952 - DNA, 661 bp, Homo sapiens
  misc_feature [331]..[331]: Chromosome 2, SNP identification no. = rs12615199
  misc_feature [331]..[331]: allele = t, in linkage disequilibrium with rs9309219, respectively
  misc_feature [331]..[331]: n is a, t, c or g
acatatatttatgtttttaaatctcattggcttgtaatggacacataaagaggaggggatgccatggggaaagtagcaatcttgactgtcatcattctctctctttccagtgctaatcaaaataaagactctgttgccagacaacatttctccaaaatgtcacttatttcagcagagattggagtaagaaatacataccacaaacattgcctatgacttttgactttagaacttctcatcagtgactgatgcaaattcaacaacctgtcccaaacatgcaatatagtcatagagatttaagagacttaagagagcccctgatttttttttnaaataaacaacaaaaataaaccaggatattaaaccaggtaaaacaattgccaagttctttaactcttcccttgggatttccaaacttgaaacaattcctcctgaaaattcactatctttcttttgaatgtagtcagttcttcttttcatgatcagttcctgagccaagattattctgcaataaaaatatttgcgatgacatatgcaacacaaaaagacatcctcaaaccactcaatttgttcagttaaaaattcaatttttaaggatcaaaacaaaggactaaatcttttcctctctcagataaccgtcatgtccttttctacgaatcat

SEQ ID NO: 953 - DNA, 661 bp, Homo sapiens
  misc_feature [331]..[331]: Chromosome 2, SNP identification no. = rs10181888
  misc_feature [331]..[331]: allele = t, in linkage disequilibrium with rs9309219, respectively
  misc_feature [331]..[331]: n is a, t, c or g
aaatggtagacaggctgcccttgttcttgtttcgtgccttattaccacctctggaatagtacccgaatgtctgtatttgaattgtttctctctttcactctctctgttccctgccatgtctcaggaaggcctgggtggaaaacccttttacttctaacagactaggaagatgttagatagatatgcattagttcttcgaatgtctgataaattgctgctcattcatttatgtgtcatccatccttctaacgacaacgccattaacattgactggactattcgacagaacattagaatttattaattcatttaatcattttcttaagaaagnctgatctttcaaagtagctgcctaggtgagccaagcaaacacttttcattactatagagagggcatcctttacaagaaaggagtgaaaactagttgcatgaataagtaaaagtagaatttttccaacagcctgagatatttgagagaaaacacaattagaaaaagtaaggcattcctggaaataacattaagcagatttcaacaatatagtgatagctctgtaatttatcctaactatctgatcaccgagatgaggtaaataacttattgtattgccattagagggaaatagaggagccacaaaaccaagcttggtaagttacagtgttt

SEQ ID NO: 954 - DNA, 661 bp, Homo sapiens
  misc_feature [331]..[331]: Chromosome 2, SNP identification no. = rs17864557
  misc_feature [331]..[331]: allele = t, in linkage disequilibrium with rs9309219, respectively
  misc_feature [331]..[331]: n is a, t, c or g
gcggccacccctcccccagggaactcagtcatcttaggcagtctccatccagctgttgctaattataacccgagcggccactgagagtctgcacagttttgctcttgggacccagtgccctggttgtgtgagttcacgaggggatctcctgatccacgggttgcacagatccatggcaaaagcgtggatctccctggtgggttagcacattcactcactgcctccactggctgcggcagtagttcttcttattccatgtggctcctgggtgggccattattccaccctgattttccttgctctctgtgggtcatgccaaccacctagtcantcccgaggagggaacctggatacctcagctgaagatgcaggattcacttgcagttttcattcttggtggtagccactgactggagctgcttctaattggccatcttggtccctccccttaaattcatttcttaatcatctgtaaaagggtttcaactcctcagaaaatcagacccaaggacatagtttacaaatggagatgaatattttctgttaaagtcttcattttacatgtttcctttttaagatagccctcttccatagatgaaatagaaaatatccttcatcctgttcaagaaacagcccaccattaacctatgtgccaggtctt

SEQ ID NO: 955 - DNA, 661 bp, Homo sapiens
  misc_feature [331]..[331]: Chromosome 2, SNP identification no. = rs11125367
  misc_feature [331]..[331]: allele = g, in linkage disequilibrium with rs9309219, respectively
  misc_feature [331]..[331]: n is a, t, c or g
gccctcttccatagatgaaatagaaaatatccttcatcctgttcaagaaacagcccaccattaacctatgtgccaggtcttcatggagctgcttcgtcagaatgcaaaaatgacacagctgacaccagtgcaatgggaggtaccatcatgatctcccttcacagagtaaccaagagggataggatttatacagtgaagaaaaccacaatagaaaatcattgaaatacaaactaaaagttaattcaggaaaaaagttttcccctcactaacaggttgaagtgtccagaaatttgtaatattcacctttctttattaacaacgaagtttatantaaagtgcaaaagctgcttgatcaacaatgcattattctaacttcaaccatttgtgcattgattttaatgcatgttagttcattagataagacagtaacagaaaaagttggatgggaagatgagataggaaaaggcttctggactatgaactgttcattagccccttgctttgaggaggtatatggtgaaatattttggctaaacagaggacagcataaatcaataattagaaccctaaggcaccaggtctatggggaagggtttaggcaaggcagttaagcattgcgagaataaaatgcagagctctagttcttaataattaataatac

SEQ ID NO: 956 - DNA, 661 bp, Homo sapiens
  misc_feature [331]..[331]: Chromosome 2, SNP identification no. = rs10168197
  misc_feature [331]..[331]: allele = c, in linkage disequilibrium with rs9309219, respectively
  misc_feature [331]..[331]: n is a, t, c or g
cagggtcaggaagagcaatagttcttttaatatgatgatattcaagagaaactgctgggactgtcgcctggctagcacttaagtatctgtagtgaacttagtcgtttaccattgaaaatgagtaataggcctgtgttaaaaagataactctgctatacatttaatatataaaagggggtaatgaaattacatccttcttcaccttaactggattttgcttgcctcaaattcagtcaatgaccttgaaagtaaatgtcatacccaaataagactagatctaaaatgcacctgagaagtttctagggtgaaagtttcaccttcaaaggcatgnaactggatagatacacagtgtctaccattgtccttctctcttttggtcttataaaatattatcacagccattaagatgaaaagctttagattttgaaatgaagggaaaggttaggaccatttagttttgtctattccatctttgcctccacctgactatatggctgattaactcaattcatctctctggggtcagcttgctgctttaaaggaggtattggagttaatatgttatgaaatagcttattttttctaagacttcagggttcagtgggaggcatggctaatgcccagttttcatggctctttttatcttcccaggccctggttg

SEQ ID NO: 957 - DNA, 661 bp, Homo sapiens
  misc_feature [331]..[331]: Chromosome 2, SNP identification no. = rs6708550
  misc_feature [331]..[331]: allele = a, in linkage disequilibrium with rs9309219, respectively
  misc_feature [331]..[331]: n is a, t, c or g
ggatagtaattttgaggcaagatggcccactagacacagctcagagactcttccgctaagaccatccaaaatatctgtaaaccatcacacttgaaatagatgttttgagagaaagcactggaagttgatagagaggcaacagacaccattgttgaagagtgagaaagctggaaagcctttttggggtcctttggcacaaggactggccttggtcccaaacctgacctaaggggctaagagcctgtatgctggctcatactcttaagttcaacctactggactgtaccctaaattataccaccaaataaaaatgcattgcttcaacacacancacctgggaaacccaccacaggaacctatctacaaccaaggaattcacacagatctttggcccgctaaaagcacccagaaataaagccaattgactatatacaacatgtatcacagtcaattcgtcaagggaaaaaagaatgtaaaaacaaaaatccctctccagtgacagcatgttcaaaaacaaaaaggcatgccagctccctcagatgaggaggaataagtaaaagaactctgacaattcaaaaagtgagtgttttgttacttccaagtgattgcaatagctccctagctgtagaccctaaccagattgaaaggtctgaaatgatag

SEQ ID NO: 958 - DNA, 661 bp, Homo sapiens
  misc_feature [331]..[331]: Chromosome 2, SNP identification no. = rs1119247
  misc_feature [331]..[331]: allele = t, in linkage disequilibrium with rs9309219, respectively
  misc_feature [331]..[331]: n is a, t, c or g
aggctgatgacagcatgggtcggggaggggatgttgatagggaagctgtttcttctggcaaaataaggttcatcagagtttacaaatgcagtgtcctcagctttgttggagtcctctcacaaatccccattccacattgcagggtcccattcttttccaatcaatgccctcaccttaacagtgacatctggcaaggctgtgcatgcaccttttgttgcaggtcaagaaagtcttaattcattccagcattaacacaaaagtccaagtacaaagtctcatttgggacaaggcaagtcccttctgtcaatgaggctataaaatcagaagcagnttagttacttcctagatgccatgaaagtacaggcatttggtaaatacatcagttccaaatgggagaaattggtctaaaaaagggggctacaggccccgcacaagtctacaatccaacaggacagtcaaatcttagttttgaaatgatctcctttatgtctcatatccaggtcatgctgatgcaagaggtgggctctcacagccttagggaattccaccatgttgctttgcagagtatatcccttcttctggctgctttcatgggctggcattgagtgtctgttgcttttccaggagcatggtgcaaggtgttggtggatctgccatcctg

SEQ ID NO: 959 - DNA, 661 bp, Homo sapiens
  misc_feature [331]..[331]: Chromosome 2, SNP identification no. = rs2465526
  misc_feature [331]..[331]: allele = g, in linkage disequilibrium with rs9309219, respectively
  misc_feature [331]..[331]: n is a, t, c or g
ctattttgtgattatttcaatatttaacgtctttgttggtttgtttctctttcttgcagttactgctggctcttgttcattctacattctattcctatgtttttcagttattttttgtggtctcaaattccttggaatttcatttggggcaattctttgatgactgggttaaaaaggtagtcttctccaaaacagatttgtatttgaatttgccaaatacttgagggcatccaaaatctcagatccctttttcaccttaaggagtttcaggttacataataggccaatacagtgtttccttagaaattcagattatgcgttcagatttcantggacaatttttttccttatttcctttttccccagacccagggtcaaagtagtcattatctttttcctatatgtattagtccattttcgtgctgctgacaaagacatatccttacagttctacatgactgaggagacctcacaatcatggcagaaggcaaagaggagcaattcacatcttacatggatggtagcgggcaaagagagagcttgtgcagacaaactcccatttttaaagccttcagatcttgtgagacccattcactctcatgagaacagcacaagaaagacctgcacccatgattcagtcatctcccactgggcccgtccc

SEQ ID NO: 960 - DNA, 661 bp, Homo sapiens
  misc_feature [331]..[331]: Chromosome 2, SNP identification no. = rs2953298
  misc_feature [331]..[331]: allele = t, in linkage disequilibrium with rs9309219, respectively
  misc_feature [331]..[331]: n is a, t, c or g
caaaattgttaactcctgtttattcctctagactccctacttttggcttatgttctgtgtactactaacatacagctatttctattttctgaaaaacaaaagcccctgtattttatgtctttttttcttttcttttgagacagagttttgctcttgttgcctaggctggagtgcaatggcacgatctcgggtcaatgcaacttccgcctcccgggttcaagcaattctcctgcctcagcctctctagtagctgggattacaggtttgtgccacgatgcccgactaattttctatttttagtagagacgggggtctctccatgttggtcagnctggtcttgaactcccgacctcaggtgatccacatgccccggcttcccaaaatgctgggaatacaggctgagtcaccatgcccagcctattttatgtctttatgtattttctctgctcacattgtctctctgctccctggcaaaactcttgttactttttaaggtcaaagacagagatcttttcttttgggaagtagctcatgaatggctgtacatactcgctttcactgttctgtgtaagcaatggcccgtgtctgtaagaacacacatcttaatgtgctgtaattatgtttgtacatgtgttatcttattagaaaatggaaatttcta

SEQ ID NO: 961 - DNA, 661 bp, Homo sapiens
  misc_feature [331]..[331]: Chromosome 2, SNP identification no. = rs2953299
  misc_feature [331]..[331]: allele = t, in linkage disequilibrium with rs9309219, respectively
  misc_feature [331]..[331]: n is a, t, c or g
gttcaagcaattctcctgcctcagcctctctagtagctgggattacaggtttgtgccacgatgcccgactaattttctatttttagtagagacgggggtctctccatgttggtcaggctggtcttgaactcccgacctcaggtgatccacatgccccggcttcccaaaatgctgggaatacaggctgagtcaccatgcccagcctattttatgtctttatgtattttctctgctcacattgtctctctgctccctggcaaaactcttgttactttttaaggtcaaagacagagatcttttcttttgggaagtagctcatgaatggctgtanatactcgctttcactgttctgtgtaagcaatggcccgtgtctgtaagaacacacatcttaatgtgctgtaattatgtttgtacatgtgttatcttattagaaaatggaaatttctagagtgtaagaatagtgtcattttcatctggattccaaaaagtgtgggcattgtttgctgtggttcagtcagtaattcctcatggcattagtgaataacaacatttggcattctttcagagcatgtgattacatacaaactagatgactcaggttaggtcctaccgaatgaaaagtcttgtggaggacacaagacttttgggtaaagtatggttt

SEQ ID NO: 962 - DNA, 661 bp, Homo sapiens
  misc_feature [331]..[331]: Chromosome 2, SNP identification no. = rs2953300
  misc_feature [331]..[331]: allele = t, in linkage disequilibrium with rs9309219, respectively
  misc_feature [331]..[331]: n is a, t, c or g
gtcaaagacagagatcttttcttttgggaagtagctcatgaatggctgtacatactcgctttcactgttctgtgtaagcaatggcccgtgtctgtaagaacacacatcttaatgtgctgtaattatgtttgtacatgtgttatcttattagaaaatggaaatttctagagtgtaagaatagtgtcattttcatctggattccaaaaagtgtgggcattgtttgctgtggttcagtcagtaattcctcatggcattagtgaataacaacatttggcattctttcagagcatgtgattacatacaaactagatgactcaggttaggtcctacngaatgaaaagtcttgtggaggacacaagacttttgggtaaagtatggtttgctgttatttcttgctaaggataacatatttttgtaagactctaagtgaaatttaaatcatatcctttgtgtgacgattacttacaaatcaagccatcgatataaacatagttctgtgttagctatgattaaaaacatttactcctcaatgatatcgagaaaataactagggatttctcaatctactggtatgtatatatgtcccacaagcatatacagtaataactaataacttattgttcaggcttgctgacacagaaatgatttttttacatgatga

SEQ ID NO: 963 - DNA, 661 bp, Homo sapiens
  misc_feature [331]..[331]: Chromosome 2, SNP identification no. = rs2675025
  misc_feature [331]..[331]: allele = a, in linkage disequilibrium with rs9309219, respectively
  misc_feature [331]..[331]: n is a, t, c or g
ctgttatttcttgctaaggataacatatttttgtaagactctaagtgaaatttaaatcatatcctttgtgtgacgattacttacaaatcaagccatcgatataaacatagttctgtgttagctatgattaaaaacatttactcctcaatgatatcgagaaaataactagggatttctcaatctactggtatgtatatatgtcccacaagcatatacagtaataactaataacttattgttcaggcttgctgacacagaaatgatttttttacatgatgacctatggttggaatcattatgtcttgattttaaaatttattataattcttcncttcctagtgaaggaattctttcttacaactgcaaagcatagcaacctgagcaacactgttccgctgtcaactaaatgtaaaccttaaataattcacatcacttgtagttgcctaatttataaaatgagaataacaatgtttacataccctgcatcccaagttagttgtgaagcataattagacagtcaatattgttgaaacagcagaaatgtgagaaaacactttaaaacgttacaagtatcttataagactgtgtttttccctccaaggggagcatgttgtgctttcctttgattatttctaaataagaaatcttttttattatcatt

SEQ ID NO: 964 - DNA, 661 bp, Homo sapiens
  misc_feature [331]..[331]: Chromosome 2, SNP identification no. = rs1516172
  misc_feature [331]..[331]: allele = g, in linkage disequilibrium with rs9309219, respectively
  misc_feature [331]..[331]: n is a, t, c or g
aatgtattttcttcttcttggttggactccatttggtcagtgtgagccgtcagcttagatataattccttctgcatttctgcacatgtggagcagaagtcaagtccctgggtacatttcatacctgccagtttggccttgatgttttaaggaggagttttcttttctgccaagaggaggaattaggatggtaaagatcatcatggttcctacattgcttattcttcacaatatttcaattggctctaaaagaaatcatatctatcatgtggttggtagaacaatgctcacttaccgtacaattttgttaacaaacagctttgaaacatctnctcattcacagtcaggccactaattagttactagctgaatttggctgagattgatcttttgtctatattcattgctcggattacaaagaaaatgatgatttgaaatgcagtatttagaacttggaatcaaatactaactgaaaaattccttttgtgtattttcaactaaccatgatgttgaatccattgatctcttgtttttaatgtaattgtttacacagcatatttatagtcacaatcatttctactttcaatttattttttaaattatgaaaaaaatacatatattttggttaggaattcatgctgagggcttgctaatcctttact

SEQ ID NO: 965 - DNA, 661 bp, Homo sapiens
  misc_feature [331]..[331]: Chromosome 2, SNP identification no. = rs2675021
  misc_feature [331]..[331]: allele = c, in linkage disequilibrium with rs9309219, respectively
  misc_feature [331]..[331]: n is a, t, c or g
ttgattattcttgccctaatcaggtagctttattagcaacagcaacagtaaactaggaatcataaaagcaaaaagaaacttgccacttcatgggaagtgctattctctatgacttctacatgtgaaatgtacatgggaagttgacatttttacccacgttatactccttaatagcatcaactatagattttttagtcaatcacattttctttattttgggatggtcatagagaagatttccataaaagggtctactatctccacagaccacctcttcgaataacttgtttcttgaccagtgatctcaagtatctgctctttgacagaaatnagagtatcagaaatcagggccaagatgaagtcaaaacttctcaacaaaatatactcgtgtaaaatgggtactcctgatggttaatgaccaagtgatattatatttcttaggaggtctgaatatgaaattatctaggatacttagttgttggcattgaagcaagatgaaataagtagaaagagttacacaggtggaagaaataaataatactattagaagactgctagagttttaactactttatggaaggagcaaagttttaaccactgcacaagtagactggaagaagcaaaacaagtaacaagaagacagagagaagagctaagataa

SEQ ID NO: 966 - DNA, 661 bp, Homo sapiens
  misc_feature [331]..[331]: Chromosome 2, SNP identification no. = rs11562967
  misc_feature [331]..[331]: allele = a, in linkage disequilibrium with rs9309219, respectively
  misc_feature [331]..[331]: n is a, t, c or g
tccatgattaaggagatatgattagaaatatgtagagaaattatgctatgtatatattatgcagtaattgagtacaataaaatgcagctaaatgggcagatcatcaaaacaagtttgagtaaaaagaagtaaaaaaatagaataatatttaggtgacatatctattaaacgtaaacacccacatatacacaatccatgcatgcatatataaggaactgtgtcaaactttattaaagaaaatatctatgagggagagggctagggcagtgggaatcagacaggaggagaaaagcatatatgaaataaaatgataaaacatgaatttaaaaangatgatttactgtgaactgatattatgattaactcaattctgtgtgttccatagataaatgaggaaaaaccttgatcaatatcatagaagcctcgagaaatggggacaaagaactaagggctaaggaaaagatagtaaatggacaacacaaaattagatggcagagacttctatttgtgacaatgacagagtaccagacagcagatatacctcccagcctaaaacaactaagaaacttcgggagaatgtttgaaaaaaaaaattattttcaggcagtggacagcaggcagcacaatacagagatccctgagggttgagaaacaaataagg

SEQ ID NO: 967 - DNA, 661 bp, Homo sapiens
  misc_feature [331]..[331]: Chromosome 2, SNP identification no. = rs17862601
  misc_feature [331]..[331]: allele = c, t
  misc_feature [331]..[331]: n is a, t, c or g
gtccaagattcaacagcagagtggagaaattttgaaatacacagggcattggattcagtattaagaattgtatttcgtcaatgtggggacgcattagccacagactaaagcctgctccaacaccacctaaccaagctcaaaagcaagactggggcagggaagtgggagtatgcaaaatttcttctcagggaatatatcttcctcccagaacaaaactctaattaaaagaacatgcactcaaaagaaaacagcaaccaaacttttaaaattaaaaatgactggcatccaataaacaattatctggcatgaaaaaatatgtatttttaataangtggaaaaatataaatacccccaaattacacagatgacagaatttgttaaataatacattaaatagtcataaataaaagttcatatattcatgaatgtagagaaaagcataaatacattaaggagaaacaagatatgtttttaaaagactcaaacttctggagatgaaaaacacaatgtctgataggaaaaatactgactcctaagggagaattatttgcggattagacattatggcaggcaagattcttgaacttaaagacatagcagcagaaactgtctaaaatgaaaaattaataaggcatcagagaactatgaaatacttcaatac

SEQ ID NO: 968 - DNA, 661 bp, Homo sapiens
  misc_feature [331]..[331]: Chromosome 2, SNP identification no. = rs10197898
  misc_feature [331]..[331]: allele = a, in linkage disequilibrium with rs9309219, respectively
  misc_feature [331]..[331]: n is a, t, c or g
agaattgtatttcgtcaatgtggggacgcattagccacagactaaagcctgctccaacaccacctaaccaagctcaaaagcaagactggggcagggaagtgggagtatgcaaaatttcttctcagggaatatatcttcctcccagaacaaaactctaattaaaagaacatgcactcaaaagaaaacagcaaccaaacttttaaaattaaaaatgactggcatccaataaacaattatctggcatgaaaaaatatgtatttttaataatgtggaaaaatataaatacccccaaattacacagatgacagaatttgttaaataatacattaantagtcataaataaaagttcatatattcatgaatgtagagaaaagcataaatacattaaggagaaacaagatatgtttttaaaagactcaaacttctggagatgaaaaacacaatgtctgataggaaaaatactgactcctaagggagaattatttgcggattagacattatggcaggcaagattcttgaacttaaagacatagcagcagaaactgtctaaaatgaaaaattaataaggcatcagagaactatgaaatacttcaatacacatggaactaatatacatgtaattcaagtgtccaaagaaagggggttgtagaacatatattt

SEQ ID NO: 969 - DNA, 661 bp, Homo sapiens
  misc_feature [331]..[331]: Chromosome 2, SNP identification no. = rs1159982
  misc_feature [331]..[331]: allele = a, in linkage disequilibrium with rs9309219, respectively
  misc_feature [331]..[331]: n is a, t, c or g
gtgactgctttccaagtttacaggatacatctttaccttagcacactctgtgttagaataacattatatcatttcccaatttcacattataaatgagaatcttataacagtaaatttacatgtaccttctctcaaaatggtattttcatatgtattttccttctatacaggttaaaatctgtataatgcatagttattttgcttaatcttttaaagaaatttcaaaaataaggttatgtatcatatacttttattgttaatagttctagtgatattccttcctttgtgaagatacaggtttccttttgttattcacttggttacaacattncttacaaagggcttgtgctagtaataaatttattcagcatttttatgtctgaaagtgtatcttttttgttcttcacagatatttttaaacttttactgcaataaaattttaggttgacagttttcatctttagctctttaaacattttgtttcagtgtcgcttctgatgagatatattctgtcattcttatttctaagcttcgttatacaatatgcttctttttctggttgctttttaaaacctctcatcattattgttttgaacagttttcattatgatgtatcatgataaagtttacgaatctttcatgtgctagaagttttttatac

SEQ ID NO: 970 - DNA, 661 bp, Homo sapiens
  misc_feature [331]..[331]: Chromosome 2, SNP identification no. = rs2048846
  misc_feature [331]..[331]: allele = a, in linkage disequilibrium with rs9309219, respectively
  misc_feature [331]..[331]: n is a, t, c or g
tatcacacaccagagcatgttgcggggtgcgaggctaggggagggatagcattaggagacatacctaatgtagatgacaggttgatgggtgcagcaaaccaccatggcacaggtatacctatgtaacaaacctgcatgttctgcacatgtatcccagaacttaaagtataataaaaaagtggtaagaaaaaaaaacaaagatatactccagaaacctcacttgatatactttcttatggctcaaattcataaaatttaattcacactatggcaaagaatcataaaaagtcaataaaattttacttttcatgttgtgtagatgcctcacctntagataaactgttactcttatgtacaattttatttttcaagtgtatttctttttggaaaacatagatggctgttacttttagtatgacagtctcttctttttgattgaaattttagagcatttacatttattattcctatgttggggtttagatatttaattttgctatttgtatttattttgtctcatttattcttttttaaaaatgtttccttatattttagatacaaaatgggatccatctcacataagtcagaaaggctgttaataaaaagtcaacaacaacaacaacaacaacagatgctggtgaggctgcagagaaaaggaaat

SEQ ID NO: 971 - DNA, 661 bp, Homo sapiens
  misc_feature [331]..[331]: Chromosome 2, SNP identification no. = rs4531963
  misc_feature [331]..[331]: allele = t, in linkage disequilibrium with rs9309219, respectively
  misc_feature [331]..[331]: n is a, t, c or g
gattgcaaaaatgccattgggaaaactggctagccatatgcagaaaactgaaactggaccccttccttacaccttatacaaaaattaactcaagatggattacatacttaaacataagacctaaaactttaaaaaccctagaacaaaacctaggcaataccattcaggacataggcacaggcaaagacttcatgactaaaacaccaaaagcaatgtcaacaaaagccaaaattgacaaatgggatctaattaaagagcttgtgcacagcaaaagaaactatcatcagagtggagtatatcttatagacttaaaacccctccccaacaaatnattagttataactcccttggcaagtcacttgaacctctccaaatattgtgcttcttaactataaaatcatagcaataataacttatttcagataattgtggtggtaaattatatagactctttgcctttttggtatgaaataaatattgtaaggttattacacatttttctttgtggaaagtggtgttatatttaaagaaacttctatgatgtttattggagaaactgaagacttttaactagaaataattcttgattagaaagcataagcgtgcataaaatacaaagaagaattttgaattctgccctggcttagatctctgatgtctt

SEQ ID NO: 972 - DNA, 661 bp, Homo sapiens
  misc_feature [331]..[331]: Chromosome 2, SNP identification no. = rs7571441
  misc_feature [331]..[331]: allele = c, in linkage disequilibrium with rs9309219, respectively
  misc_feature [331]..[331]: n is a, t, c or g
tttttgtaagaagagataccagagagccctttctctttcttttcatgcacatgcaccaaggaaaggccatgtgagaacacagtaaaaagtaggctgtctgtaagccaggaaaaatacccttgccagaaactgaattggtcagagccttgatctttaccttctagcatctgtaattgagagaaaacaaatttctgttttttaagctacccagtccacagtcttttgtttttgcagcctgggctggctaataaatacttagttattttaaaattggcaatactaacaagttatgaggagtaatattgaagctattttcagaaaaatcagagtnataggagtcaaatgttttcttcattttattatgcttatattttgctctaggaattacaatgtatagagcatattatctttgctctaggttttatttttctacatctataaggtattatctccctatcgtaagttataccaacttccctgaagttattatacgaagaagaatgcaagaagagcaaattcaacaacacaggtgtcagttcttgtacatcagtgaatcaagctataaacgattaagtcccgactattgtctcaggtttaggttaggctgatatataaatggattatgtaggaaggctgccttaggaaaaataatttatttgaa

SEQ ID NO: 973 - DNA, 661 bp, Homo sapiens
  misc_feature [331]..[331]: Chromosome 2, SNP identification no. = rs1516174
  misc_feature [331]..[331]: allele = a, in linkage disequilibrium with rs9309219, respectively
  misc_feature [331]..[331]: n is a, t, c or g
tgatatatatagaaaatcctaaagacttctctaacggaatcctatatttgataaatgaattcagtcaagcctcaggttataaaaccaatgtttgttttcagttgagtttagatcagttgttctctcatgtaaggggtagaatgattttcattgaatctcagaccttaagtatggaattttgtaatctctgggtgatttttttttcctcttacctagagagttcacctatatctttgctggaaagatggaaccactactaatcaccttaatctaatttggcatcatcatgactaaaagttagattacattttgaattaagtctctactcttnggttcaccatggctctagagcatagacttcaagaggttccagctgcgaacctgggttggtctgtaactctgatctgcatccaagctgcactgtgattcaagggccttgagtatctatggtctttggtcttaacaatggctacaagatctctttttccatgtttcttagtattagaccatttctcaagtgttgctgagattctcaactttttactctgttctcagaattggaaaatattatgaggcaaatagctgctgcaaaatgtcctaccaaattccagcacaactcccattttcttgaaattgtatttcctcaagtcctagttgcctt

SEQ ID NO: 974 - DNA, 661 bp, Homo sapiens
  misc_feature [331]..[331]: Chromosome 2, SNP identification no. = rs925801
  misc_feature [331]..[331]: allele = a, in linkage disequilibrium with rs9309219, respectively
  misc_feature [331]..[331]: n is a, t, c or g
ggaaaagttgaaagcgttacccctaagaactggaaaaagacaaaggaggcccactttcaccccttgtattccacctagtattggatgtcctagccagaaaaatcaggcaagagaaagaaataaaggacaaccaaattggaaaaagggaagtcaaactatctctgtttgccaatgatataatgatatatatagaaaatcctaaagacttctctaacggaatcctatatttgataaatgaattcagtcaagcctcaggttataaaaccaatgtttgttttcagttgagtttagatcagttgttctctcatgtaaggggtagaatgattttcantgaatctcagaccttaagtatggaattttgtaatctctgggtgatttttttttcctcttacctagagagttcacctatatctttgctggaaagatggaaccactactaatcaccttaatctaatttggcatcatcatgactaaaagttagattacattttgaattaagtctctactctttggttcaccatggctctagagcatagacttcaagaggttccagctgcgaacctgggttggtctgtaactctgatctgcatccaagctgcactgtgattcaagggccttgagtatctatggtctttggtcttaacaatggctacaagatctc

SEQ ID NO: 975 - DNA, 661 bp, Homo sapiens
  misc_feature [331]..[331]: Chromosome 2, SNP identification no. = rs17864568
  misc_feature [331]..[331]: allele = t, in linkage disequilibrium with rs9309219, respectively
  misc_feature [331]..[331]: n is a, t, c or g
atttatcaaatataggattccgttagagaagtctttaggattttctatatatatcattatatcattggcaaacagagatagtttgacttccctttttccaatttggttgtcctttatttctttctcttgcctgatttttctggctaggacatccaatactaggtggaatacaaggggtgaaagtgggcctcctttgtctttttccagttcttaggggtaacgctttcaacttttccccattcaatatgatgttggctgtaggtttgtcatgtatgacttttattattttaatgtatattctttctgtgcttggtttgttgagagtttttantataaaggggtgctggatattattgaaggcttatttatgtctattaagatgatcatatggtttttgtttttaattctgtttatgtgatgaatcacatttattgacttgcatattttgaaccacccttgcatccctgggatgaaatgcacataatcatggtggattatcttttcgatatctttttggatttggtttgctactattttgttgaggatttttgcatctatattcattaggaatgttggtctatagttgtttttttttctttcttttttggttatttcatttctttctcaatcttttggtatagtttaagtaggactagtacca

SEQ ID NO: 976 - DNA, 661 bp, Homo sapiens
  misc_feature [331]..[331]: Chromosome 2, SNP identification no. = rs1606974
  misc_feature [331]..[331]: allele = a, in linkage disequilibrium with rs9309219, respectively
  misc_feature [331]..[331]: n is a, t, c or g
tatacaattaaaaagaagagattgaaaggaaggaacacacatacacatacacacacacacacacacacacacacacacacacacaccaacctaatccaactatatgccatcaacaagagactcatttcagattcaaagatgcaaataagttgaaagtaaaagtataaaaaaagatattccatgtaaacagtaacacaaaacaatttggaaaggctatgctaatgtctagcaatataaaccttaagacaaaactgatgacagacaaaagaagacagtaaataataataaaagtgtgtatccattaagacagtaaaaaattataggaatatangcacatttcaatggagccccaaaatacatgaaacaaaacgtaactgaattgaatggagaaatatatatttaaataaagattgttgaagactttaacatcccacttttattagtgaataaaacaacaagataaatcaccaaggaaatagaaagcataaaaacactatacaccaattagatctaatagacatctatagaactatccacccaacaatagattacatggttttctttagtgcatgtggcatattcttcagaatggaccatattaggccattaaacaagcctcaataaattaaaacttgaagtcatacaaagcatattctttgat

SEQ ID NO: 977 - DNA, 661 bp, Homo sapiens
  misc_feature [331]..[331]: Chromosome 2, SNP identification no. = rs7580286
  misc_feature [331]..[331]: allele = t, in linkage disequilibrium with rs9309219, respectively
  misc_feature [331]..[331]: n is a, t, c or g
gttgatggcatatagttggattaggttggtgtgtgtgtgtgtgtgtgtgtgtgtgtgtgtgtgtgtatgtgtatgtgtgttccttcctttcaatctcttctttttaattgtataatgtattattgtttaatatagttactggaaacaaatgacttctaccatttagtaatttgttttctatatgtcttatattctttgtcattcctcagattctctattactgacttcttttgtgtcaaatagatattttctagtgtgccatgtttattgccttagcatttcttttactatacatatttgagtaattttcttagtatttgcttttagaatnataattaacatcttaatttataataattcatttcacattagtaacaatttagtttctttagtatatgaaaatatagccctctcccctcaatatgttgttgtcacaaatattatctttaaacactgtgtttttatctacacagatttataatactgttttttgtacttgccttttaagtcataaggaaataagaggagtttcaaacaaaagatatatcaatcctgacatgcatatctgcttatgaaattgcccttactggtgttcttttctttgtatgtattcagattattaattttcttttatttcagcctaaaggacattctttaacat

SEQ ID NO: 978 - DNA, 661 bp, Homo sapiens
  misc_feature [331]..[331]: Chromosome 2, SNP identification no. = rs4029458
  misc_feature [331]..[331]: allele = t, in linkage disequilibrium with rs9309219, respectively
  misc_feature [331]..[331]: n is a, t, c or g
tgtgtgtgtatgtgtatgtgtgttccttcctttcaatctcttctttttaattgtataatgtattattgtttaatatagttactggaaacaaatgacttctaccatttagtaatttgttttctatatgtcttatattctttgtcattcctcagattctctattactgacttcttttgtgtcaaatagatattttctagtgtgccatgtttattgccttagcatttcttttactatacatatttgagtaattttcttagtatttgcttttagaattataattaacatcttaatttataataattcatttcacattagtaacaatttagtttcnttagtatatgaaaatatagccctctcccctcaatatgttgttgtcacaaatattatctttaaacactgtgtttttatctacacagatttataatactgttttttgtacttgccttttaagtcataaggaaataagaggagtttcaaacaaaagatatatcaatcctgacatgcatatctgcttatgaaattgcccttactggtgttcttttctttgtatgtattcagattattaattttcttttatttcagcctaaaggacattctttaacatttctggtaggaaaggtctactaatgacaaactatctgaatttttatttatctgtaat

SEQ ID NO: 979 - DNA, 661 bp, Homo sapiens
  misc_feature [331]..[331]: Chromosome 2, SNP identification no. = rs2102766
  misc_feature [331]..[331]: allele = g, in linkage disequilibrium with rs9309219, respectively
  misc_feature [331]..[331]: n is a, t, c or g
atttgtatcagaaattatagaagctagcaagtaggggaattatatttaaattgctaaagacaaaactcttaaccaagaattctgtatttggtaaacctcttcttgcaaaatgaaggaggcattacagataaataaaaattcagatagtttgtcattagtagacctttcctaccagaaatgttaaagaatgtcctttaggctgaaataaaagaaaattaataatctgaatacatacaaagaaaagaacaccagtaagggcaatttcataagcagatatgcatgtcaggattgatatatcttttgtttgaaactcctcttatttccttatganttaaaaggcaagtacaaaaaacagtattataaatctgtgtagataaaaacacagtgtttaaagataatatttgtgacaacaacatattgaggggagagggctatattttcatatactaaagaaactaaattgttactaatgtgaaatgaattattataaattaagatgttaattataattctaaaagcaaatactaagaaaattactcaaatatgtatagtaaaagaaatgctaaggcaataaacatggcacactagaaaatatctatttgacacaaaagaagtcagtaatagagaatctgaggaatgacaaagaatataagacatatag

SEQ ID NO: 980 - DNA, 661 bp, Homo sapiens
  misc_feature [331]..[331]: Chromosome 2, SNP identification no. = rs2090337
  misc_feature [331]..[331]: allele = g, in linkage disequilibrium with rs9309219, respectively
  misc_feature [331]..[331]: n is a, t, c or g
gacagaaagagtatttgaataaataatagctgacagcttcctaaatttaatgaaaaacattaatctatacagctgaaaagcacaatgaattccaaatagaataaactcaaagagatccacaccagacatgttataatcaaacttttggaggacaaagaaaaaaagaaaatcttagaagcattgagagagaatcaacttgccacatacaagagattctcaatgataataataactaatttgtatcagaaattatagaagctagcaagtaggggaattatatttaaattgctaaagacaaaactcttaaccaagaattctgtatttggtaaanctcttcttgcaaaatgaaggaggcattacagataaataaaaattcagatagtttgtcattagtagacctttcctaccagaaatgttaaagaatgtcctttaggctgaaataaaagaaaattaataatctgaatacatacaaagaaaagaacaccagtaagggcaatttcataagcagatatgcatgtcaggattgatatatcttttgtttgaaactcctcttatttccttatgacttaaaaggcaagtacaaaaaacagtattataaatctgtgtagataaaaacacagtgtttaaagataatatttgtgacaacaacatattgagggga

SEQ ID NO: 981 - DNA, 661 bp, Homo sapiens
  misc_feature [331]..[331]: Chromosome 2, SNP identification no. = rs4998483
  misc_feature [331]..[331]: allele = c, in linkage disequilibrium with rs9309219, respectively
  misc_feature [331]..[331]: n is a, t, c or g
gacatgcatatctgcttatgaaattgcccttactggtgttcttttctttgtatgtattcagattattaattttcttttatttcagcctaaaggacattctttaacatttctggtaggaaaggtctactaatgacaaactatctgaatttttatttatctgtaatgcctccttcattttgcaagaagaggtttaccaaatacagaattcttggttaagagttttgtctttagcaatttaaatataattcccctacttgctagcttctataatttctgatacaaattagttattattatcattgagaatctcttgtatgtggcaagttgattntctctcaatgcttctaagattttctttttttctttgtcctccaaaagtttgattataacatgtctggtgtggatctctttgagtttattctatttggaattcattgtgcttttcagctgtatagattaatgtttttcattaaatttaggaagctgtcagctattatttattcaaatactctttctgtcccccttttcctcttcttttctgctggaactctattatgtagatattggtaacacatcatagtgtcccaggactcttagtgtctatttattttgtctcatttttttatttatattctcagatcaaataatctcaattaaccta

SEQ ID NO: 982 - DNA, 661 bp, Homo sapiens
  misc_feature [331]..[331]: Chromosome 2, SNP identification no. = rs6545227
  misc_feature [331]..[331]: allele = a, in linkage disequilibrium with rs9309219, respectively
  misc_feature [331]..[331]: n is a, t, c or g
taaaggacattctttaacatttctggtaggaaaggtctactaatgacaaactatctgaatttttatttatctgtaatgcctccttcattttgcaagaagaggtttaccaaatacagaattcttggttaagagttttgtctttagcaatttaaatataattcccctacttgctagcttctataatttctgatacaaattagttattattatcattgagaatctcttgtatgtggcaagttgattctctctcaatgcttctaagattttctttttttctttgtcctccaaaagtttgattataacatgtctggtgtggatctctttgagtttnttctatttggaattcattgtgcttttcagctgtatagattaatgtttttcattaaatttaggaagctgtcagctattatttattcaaatactctttctgtcccccttttcctcttcttttctgctggaactctattatgtagatattggtaacacatcatagtgtcccaggactcttagtgtctatttattttgtctcatttttttatttatattctcagatcaaataatctcaattaacctatctttaggtttgctttattctttcttccgcctactcagattggccagtgaaactctctagtgtttttccttttacatttcagttttg

SEQ ID NO: 983 - DNA, 661 bp, Homo sapiens
  misc_feature [331]..[331]: Chromosome 2, SNP identification no. = rs13423007
  misc_feature [331]..[331]: allele = t, in linkage disequilibrium with rs9309219, respectively
  misc_feature [331]..[331]: n is a, t, c or g
aaagcacactagcacaattcttggcaggtaagtttcattctgcaactttgtgcaccaatacctgaacgaggaatatgattgttatcttcaaggtaaccaacgaactgagagtgggagtgggaacagggtaagttaaatgtcacaaaactcttttttcttaccgagattttcattattcatttatggattaatttatttattgaggttttttttggttatgcattcccatgtctgctgtaaattttagtttctagagttccaaaaattttgacttaagcaggatttccagtttattttttgcttttatggaggaatagattttggaatattntaatacatacatacatgaaattatcaaaagatggctatcttgctggaagctaaatttcagtatactcccaccatttttcaatctcaaatctgtttcccatttctgtttctgacacctggctgaaaacattggcatcagttttgcaggcattgtctttctttataccttacagttaataaattgtcagtaaattgtcagcaccccatttctgtacaccatctccttacaagaaattctcaggatctttaaacaaatccactgtgataacttcctagctaaaagctatgcctctagacttttctccacctagtgttctaaaagtaaactttt

SEQ ID NO: 984 - DNA, 661 bp, Homo sapiens
  misc_feature [331]..[331]: Chromosome 2, SNP identification no. = rs12713143
  misc_feature [331]..[331]: allele = a, in linkage disequilibrium with rs9309219, respectively
  misc_feature [331]..[331]: n is a, t, c or g
ttgacttaagcaggatttccagtttattttttgcttttatggaggaatagattttggaatattttaatacatacatacatgaaattatcaaaagatggctatcttgctggaagctaaatttcagtatactcccaccatttttcaatctcaaatctgtttcccatttctgtttctgacacctggctgaaaacattggcatcagttttgcaggcattgtctttctttataccttacagttaataaattgtcagtaaattgtcagcaccccatttctgtacaccatctccttacaagaaattctcaggatctttaaacaaatccactgtgatancttcctagctaaaagctatgcctctagacttttctccacctagtgttctaaaagtaaacttttctcttttttattccgatgtcacccaaattcttttaggcaacaaaatagaactacttgttgattctcaaatattgtgtatgtgtccatgtcaatttcagatgtctttttgttaccaataaaatctaagttattgctattatttatccaactacaaataccacatatttaggggaactcttcctcccacaatagaggttaaatctctaactgtttttactaatgttactttatcctgtcattattttattgtagtctttgtatgtatat

SEQ ID NO: 985 - DNA, 661 bp, Homo sapiens
  misc_feature [331]..[331]: Chromosome 2, SNP identification no. = rs1878135
  misc_feature [331]..[331]: allele = a, in linkage disequilibrium with rs9309219, respectively
  misc_feature [331]..[331]: n is a, t, c or g
gtgctgagaataaaatgattagcataacacctataaaagtttttgagaaaattcaaaatttgatgataaaagttaagataatgctgcacagtcaagacatgatggaaatgtcaacagaggctgagccttctttccattcaatgaagaggaccacagaaagatggtcataccgaggatgcacaacaggaaattttgatgaaaagcccttaaaaatacccattctccaagactactaatatattttgtatgggtaatgaaacctggccaacagaatcagaggtaattaatcattgtgtgtccttactgtaaatgaagaacagaatgagcaatnatagcactgtgtggagtaattactaagaatattaaagaggtaagaatggcttggccttacaaaaattcagtcaacaaatctgaagaaaaatattccctcaatgcccatttacaatcatttgactaaaagcaaggagataaatacctatttattgtgatttggaagacaaggaaaagtcacaaaacaactttgatcatacagtaaataaaattttaattataatataacttcttaatgatcttttataaaggagtcatctttaatcctcaaggtatgcaaatattttaaaagatttctatgaaagtatagccagctgatctataaatatag

SEQ ID NO: 986 - DNA, 661 bp, Homo sapiens
  misc_feature [331]..[331]: Chromosome 2, SNP identification no. = rs1516173
  misc_feature [331]..[331]: allele = t, in linkage disequilibrium with rs9309219, respectively
  misc_feature [331]..[331]: n is a, t, c or g
ctatacaagcttaaataacattattttcttctgcatttctcaaaattggtaaaataagttttgtttaccaaaatccctctgagatagcataaaaacaattacatggaaaacatttttgtccaggaagattataatcaatcaatgacagcagcataactttataaaaatagaaatgagctagttctcagcagaactggttttggccattaaacttaactcatgtaacctttctgggtttcagttttctcatatgtaaataggcacagttacattcactttcatttcccttcttgagtgtgctgagaataaaatgattagcataacacctatnaaagtttttgagaaaattcaaaatttgatgataaaagttaagataatgctgcacagtcaagacatgatggaaatgtcaacagaggctgagccttctttccattcaatgaagaggaccacagaaagatggtcataccgaggatgcacaacaggaaattttgatgaaaagcccttaaaaatacccattctccaagactactaatatattttgtatgggtaatgaaacctggccaacagaatcagaggtaattaatcattgtgtgtccttactgtaaatgaagaacagaatgagcaattatagcactgtgtggagtaattactaagaatatta

SEQ ID NO: 987 - DNA, 661 bp, Homo sapiens
  misc_feature [331]..[331]: Chromosome 2, SNP identification no. = rs13423880
  misc_feature [331]..[331]: allele = g, in linkage disequilibrium with rs9309219, respectively
  misc_feature [331]..[331]: n is a, t, c or g
cacttgtgtgcattgtctcagacctccagcagtaccatcttgctagaagtgagagagtgcttaccctcatcttgtccctgactgtagaggaaaatatttcaatttttcacagttgagtatgatcgtaactgtaaacttgtgatatgtggtctttattgtgttcagatacattctctctatatctaatttgttgggtttttattatgaaaggatgttgaattttttcaatactttctctgcatctattgacatgagcatatgacctgaaactgtgaaactcctagaagaaaatgtaaaaaaaaaaaaaaaatctccttgacactagtcttgncaatgattattttgaatatcacacaaaaagcataggtaataaaaaccaaaataaacaagtggaagtataccaaactaaaaagcttctgcacagcaagggatacaattcacaaaaagaaaatgcaaaacatgaaatgggagaaaatatttgcaaaacatatagctgataaggagttaatatccaaaatatattaagaactcactcacttaacaataagagacttacattgaatagacatttttccagagaagacatgacaattgctagtgaatgtatgaaaagattctcaacaatatgaatcatcagagaaatgcaaattaaagccacaag

SEQ ID NO: 988 - DNA, 661 bp, Homo sapiens
  misc_feature [331]..[331]: Chromosome 2, SNP identification no. = rs10206043
  misc_feature [331]..[331]: allele = a, in linkage disequilibrium with rs9309219, respectively
  misc_feature [331]..[331]: n is a, t, c or g
tgcagtgagccaagatcgcgccactgcactccagcttgggcaagagtgagactccatctcaaaaattaaataaataaataaataaataaatagaaaatctcacaattttctaattgggaggagtagacttttactttagggataatagtactgtcaaaatcattaacataagtaagatcagttattcactatctttctttcctcctaactcttccaatttagttgaattcccttgacttctattctatcttgctttaaaaatggtggcaaaattgcagactgtttctagtaacaataaggagtgaggtacttggttctggctttattgctncttgatttgtcatattggtcaaattaccaaaatatgattgatgggcaatttttattctctgttagatatgaaatagtattcatgttcccctctttcagggatataatggaaatgcaagtgttcatattatgcaaaaaaataagtcactatattttcagcattgtatattgagaaaatgacttttgaagagtcttatttcccaaatttatctacaagcaagcaactctctcagatctaattttaattaaaaagtttcctgaatagatcctgggattatgagacaataaatcactttattgttaatattactgtggactgaattctgtcccc

SEQ ID NO: 989 - DNA, 661 bp, Homo sapiens
  misc_feature [331]..[331]: Chromosome 2, SNP identification no. = rs1516197
  misc_feature [331]..[331]: allele = a, in linkage disequilibrium with rs9309219, respectively
  misc_feature [331]..[331]: n is a, t, c or g
cttctcttcttagagtcaatggattttaaagtagaaaaaaatgttttttcctcttgaaaacaacaacagcagctatattttggattatgcaaaataagtattcatcaaggattattcaattcgattcatacattcactatgcttggctctgatgtgaagcctatacacgtgcaaaatgtttgaaatgtgagcactgctcaatggctgtttcacaacacatgtgaagaagtagttaatttctatagacaaatgttaaagattagaagcttaagtaattattattctttattttactaatgctagtgaaaagtttatctttgtccactccccntatcaaatttgaataaatcatgttaaagcgccatggaaataaaaagtctttcagtatccattgttacttatttttaaaaaacattgggtcccacagaactgagcaatcaaaaattatttctaacttttctcatgttctgagccatgcattcttggtaaaaggaatgaaagcagtccctttacttatcatttaccatatcttaaaattaactctgaaactgagagaagaatgattcattctttttaaggttattcctacttacttcaaaccaaataaaatcttttagacaagtgattgatttgctaaagtcaatatttagtaaactaaaag

SEQ ID NO: 990 - DNA, 661 bp, Homo sapiens
  misc_feature [331]..[331]: Chromosome 2, SNP identification no. = rs11563020
  misc_feature [331]..[331]: allele = g, in linkage disequilibrium with rs9309219, respectively
  misc_feature [331]..[331]: n is a, t, c or g
aagaatgattcattctttttaaggttattcctacttacttcaaaccaaataaaatcttttagacaagtgattgatttgctaaagtcaatatttagtaaactaaaagagcagatctttcagaatttattgtgtcccaatacagtaataataagagctctttatctctgtggcatgatagttctatatcagctgaatttcagtttaaaaataaattatatattattttatgaatataaaatatataatcattacagaaatcttgaagaattgaaatacacacacacagacacacacacacacacacacacacacatacatatatagtatacantacaaaatataaaccacctgtagaataacctgttggaaaaaccaagtatctttcctaatcatcttaggtttatggctgaggcacctttagcaaaagacaaattaacaagagaaaactatacgtatctatttaatgtaagttttacatgacacatgaacgtttataagaaaatgaagacctgaagacatgggtagacatgtatgttttttatgctaggtttgatgatgaactatgtagtactggggaaatataattggataaaaaacaaaaaacatgttcaaggataataaatgataggaaaccaagcaaggcctgtttgttgaaattctt

SEQ ID NO: 991 - DNA, 661 bp, Homo sapiens
  misc_feature [331]..[331]: Chromosome 2, SNP identification no. = rs17864571
  misc_feature [331]..[331]: allele = a, in linkage disequilibrium with rs9309219, respectively
  misc_feature [331]..[331]: n is a, t, c or g
agctgaatttcagtttaaaaataaattatatattattttatgaatataaaatatataatcattacagaaatcttgaagaattgaaatacacacacacagacacacacacacacacacacacacacatacatatatagtatacagtacaaaatataaaccacctgtagaataacctgttggaaaaaccaagtatctttcctaatcatcttaggtttatggctgaggcacctttagcaaaagacaaattaacaagagaaaactatacgtatctatttaatgtaagttttacatgacacatgaacgtttataagaaaatgaagacctgaagacntgggtagacatgtatgttttttatgctaggtttgatgatgaactatgtagtactggggaaatataattggataaaaaacaaaaaacatgttcaaggataataaatgataggaaaccaagcaaggcctgtttgttgaaattcttctctgttcctttcctttgggtataggcagggcacttcccaaatgaaggtcttatgacttccttcaggagaatgtcagagaattcttcctgggttttatgacctgcttcagggaagaaaggcagggagaaagtcagagagaacttgctgcttctgtggttttctcaaatgtgaaggtgccatattttg

SEQ ID NO: 992 - DNA, 661 bp, Homo sapiens
  misc_feature [331]..[331]: Chromosome 2, SNP identification no. = rs1516198
  misc_feature [331]..[331]: allele = a, in linkage disequilibrium with rs9309219, respectively
  misc_feature [331]..[331]: n is a, t, c or g
atgtatgttttttatgctaggtttgatgatgaactatgtagtactggggaaatataattggataaaaaacaaaaaacatgttcaaggataataaatgataggaaaccaagcaaggcctgtttgttgaaattcttctctgttcctttcctttgggtataggcagggcacttcccaaatgaaggtcttatgacttccttcaggagaatgtcagagaattcttcctgggttttatgacctgcttcagggaagaaaggcagggagaaagtcagagagaacttgctgcttctgtggttttctcaaatgtgaaggtgccatattttggggtagcatntcttgaatccaatcaaatcaatatttaaagtcagctctgttaaatattgatgtgtttcctttctttttccctcctaaggtatattgacaagtaggtatataaataggtaaattttacttaatagatatcttagcatagatgtgcataaatattagcaaattatgcactgatataagccagaatagtcaactccaaaatatgcctctttagcatgtgaattattttgagctaaaggcccttagcaaccagcatactaggaaaagctctaaaaacagagtacaaattttcctcttgtatagaaaatgtacatttaaaaaggaaatgtccatc

SEQ ID NO: 993 - DNA, 661 bp, Homo sapiens
  misc_feature [331]..[331]: Chromosome 2, SNP identification no. = rs966733
  misc_feature [331]..[331]: allele = c, in linkage disequilibrium with rs9309219, respectively
  misc_feature [331]..[331]: n is a, t, c or g
ccaagtaataaacatagataacctttatttttatccttgctatgtgcatggctttgggggaatttacttcataagctctggggacagtcatggtaatatatcttcactggaagagtttctgtgggtatcatgtaagccacacatcttctatgaaaaaccgtgaacatctcgtgctgatacaatttatacttttatttataaattgagaatgcagcttaagtcacaactgctgaaatatgaagggtttatctctagattagtttaatgtgaatactaacttaaatctatactaatacttgcttatgtatatgcttataatagtcatactagncccttaagatgggtagggcagatactcaaatccttagtttttaaaggctgaattgagattttaattcgaaagtaaataaatttttaaatgaaatatttggaaaaagtaaacatgggttagccacatatatttacatcccctttctccctagatttcattcaaatgttagaaaataaacagaaaatataaataagagtatccaattttgatgaaaaaggataaaagaatcagagtaaaaaagaattccaaatgaagaaacataatgccaggcccagaagaaacttcacagataactgtatttaatagcctaaggaggataagaatatagtt

SEQ ID NO: 994 - DNA, 661 bp, Homo sapiens
  misc_feature [331]..[331]: Chromosome 2, SNP identification no. = rs966734
  misc_feature [331]..[331]: allele = t, in linkage disequilibrium with rs9309219, respectively
  misc_feature [331]..[331]: n is a, t, c or g
tctcgtgctgatacaatttatacttttatttataaattgagaatgcagcttaagtcacaactgctgaaatatgaagggtttatctctagattagtttaatgtgaatactaacttaaatctatactaatacttgcttatgtatatgcttataatagtcatactagccccttaagatgggtagggcagatactcaaatccttagtttttaaaggctgaattgagattttaattcgaaagtaaataaatttttaaatgaaatatttggaaaaagtaaacatgggttagccacatatatttacatcccctttctccctagatttcattcaaatgntagaaaataaacagaaaatataaataagagtatccaattttgatgaaaaaggataaaagaatcagagtaaaaaagaattccaaatgaagaaacataatgccaggcccagaagaaacttcacagataactgtatttaatagcctaaggaggataagaatatagtttgtactgaaaccaccattgcaaaattacaactgagacagtgaaacagatctgacctaagcaactccatgttgcttctaacctccaaattgtccttgttcattcctgggcgtaagctgaactaactctgggaattacttagtttatagtttagaacaaagactgtaa

SEQ ID NO: 995 - DNA, 661 bp, Homo sapiens
  misc_feature [331]..[331]: Chromosome 2, SNP identification no. = rs1516177
  misc_feature [331]..[331]: allele = c, in linkage disequilibrium with rs9309219, respectively
  misc_feature [331]..[331]: n is a, t, c or g
caactgtgcattgcagttatgcaaaaaggggaagggctgaaaaatgttcagataagcctgagtcaaacagaaacagtatagaaattataaaaagtacatgcatttatcaagagccagaatttatagccatatttaactattattattattattattattattgtagagagagaatctctctatgttgcccaggctggtctcaaactcttggactcaagggatcctcccaacttagcctcccaaagtgctgggattacaagcctgagtcactgagcctagccaggtttaattcaaaaattgtaaaaatttctaccctcatttcctggagttnctgaataaatagaaatttataaaatgataatcaatgtaatttggggaaagattggtcaaatgatttgagcctcatgtaatgatgaagatgataacagtagttgtagagcatcaacaacatcaataacattcagtaaattttaaatagaggttggattagattgtattttttttatcaagtatgtttcctttctttagtcatggtaacaatgacaatgaaatttccacaagaggtagcatttatttaggttttaaaatttggttcctggtagcattaggaccaaggttctgtgattttgaaatgaccacaagagtgtaattgggtactata

SEQ ID NO: 996 - DNA, 661 bp, Homo sapiens
  misc_feature [331]..[331]: Chromosome 2, SNP identification no. = rs1516178
  misc_feature [331]..[331]: allele = a, in linkage disequilibrium with rs9309219, respectively
  misc_feature [331]..[331]: n is a, t, c or g
aagtacatgcatttatcaagagccagaatttatagccatatttaactattattattattattattattattgtagagagagaatctctctatgttgcccaggctggtctcaaactcttggactcaagggatcctcccaacttagcctcccaaagtgctgggattacaagcctgagtcactgagcctagccaggtttaattcaaaaattgtaaaaatttctaccctcatttcctggagttcctgaataaatagaaatttataaaatgataatcaatgtaatttggggaaagattggtcaaatgatttgagcctcatgtaatgatgaagatgntaacagtagttgtagagcatcaacaacatcaataacattcagtaaattttaaatagaggttggattagattgtattttttttatcaagtatgtttcctttctttagtcatggtaacaatgacaatgaaatttccacaagaggtagcatttatttaggttttaaaatttggttcctggtagcattaggaccaaggttctgtgattttgaaatgaccacaagagtgtaattgggtactatagtagattagttgagtaagaatattgtcataaaaactaaatatgtattaaaacaaatacttatttcatatatattcccagaatctaatttca

SEQ ID NO: 997 - DNA, 661 bp, Homo sapiens
  misc_feature [331]..[331]: Chromosome 2, SNP identification no. = rs1516181
  misc_feature [331]..[331]: allele = c, in linkage disequilibrium with rs9309219, respectively
  misc_feature [331]..[331]: n is a, t, c or g
actctctcccgaatctttaatctgccaccctcccccatcaaattttgcagtcaaaagcttccacagtcatgagtcaagttcttaaaatctctctctctttctgtctctgcagaaccctgacatacatatatttatatatgtgtgtgtgtgtatataggcatacatacatacacacaaatcacgaaattggtgtggatttttttgttttgttattttatcagaaagatacagctattttgatagtggaacacatgtcactgaatttaatctaaaccatgctaaattatgacacacacaaacaaacattaatttggctacaacctaacgttcnatagtttcctgtttttatcaattctcatcaaattattttatatgcactttgtcatactagggagagatacagttagagataataagagactcagaactgcctgcactgtcaaaaagtagacagacatagggaacatatgtacttctaggctgtctgatatctaacatcaactgtactcaaagatggtgaatttgcttttagaaaagttagaatttggggaggatttaaataataaaaattaatcaattataatatgaataaaaactgagattaaaacttttatctatcctctttatactgctaacagaattggaaacatgagtagtcaat

SEQ ID NO: 998 - DNA, 661 bp, Homo sapiens
  misc_feature [331]..[331]: Chromosome 2, SNP identification no. = rs1400103
  misc_feature [331]..[331]: allele = t, in linkage disequilibrium with rs9309219, respectively
  misc_feature [331]..[331]: n is a, t, c or g
taaaaactgagattaaaacttttatctatcctctttatactgctaacagaattggaaacatgagtagtcaataaatattaatttcatttaaatgatgaataatagaagtaaaaatggaattagatattggaactgccttgtctatcttaccgttgaataaaaacaaaagccagcctaattggtttttttgtttatgattttcaaatcataaatgaccaaataggacatcaatgttggtcattttttttcatactgtgtaagtccattcttgacaatgcaatagccagttattttttaaaacttacaggattttaaatataggacatgcaanagccagttattttttaaaatttctgatttcccatcaataagaaaaaaaaaaggaattgaattgtttaccttgacattgagcacgcaaatttatttggtttgttttctcagtaaacttgcaaccaactgtataaaattagcttatattttgataaagaattgctgatacttatagcaatattaaaatcaagcagtttattctcaaatgggttgagattatcgtgatttttaccgtgcctacccttttgctgctacccccccctcggtctacgtacatattttagtactctaggcaaagatattgtattttaagtttgaaaaaagaaatgct

SEQ ID NO: 999 - DNA, 661 bp, Homo sapiens
  misc_feature [331]..[331]: Chromosome 2, SNP identification no. = rs4971756
  misc_feature [331]..[331]: allele = c, in linkage disequilibrium with rs9309219, respectively
  misc_feature [331]..[331]: n is a, t, c or g
agtccattcttgacaatgcaatagccagttattttttaaaacttacaggattttaaatataggacatgcaatagccagttattttttaaaatttctgatttcccatcaataagaaaaaaaaaaggaattgaattgtttaccttgacattgagcacgcaaatttatttggtttgttttctcagtaaacttgcaaccaactgtataaaattagcttatattttgataaagaattgctgatacttatagcaatattaaaatcaagcagtttattctcaaatgggttgagattatcgtgatttttaccgtgcctacccttttgctgctacccccncctcggtctacgtacatattttagtactctaggcaaagatattgtattttaagtttgaaaaaagaaatgcttgtaaagtaagaaaatgcaatttcttatctgtcaattcagcattctcccaaaagatttattaagttcttctatattagcatttactgagcacttgatatttgcaaaatatttcagttgttttaattgcttactacaaatataaatgcactgaattactatcttggtataatcacaaaaaactcacaggaataaacctgcttgatgtttttaaagtgctaacgtggtactcagattacattttataaattaaaaataaga

SEQ ID NO: 1000 - DNA, 661 bp, Homo sapiens
  misc_feature [331]..[331]: Chromosome 2, SNP identification no. = rs1516182
  misc_feature [331]..[331]: allele = c, in linkage disequilibrium with rs9309219, respectively
  misc_feature [331]..[331]: n is a, t, c or g
tttgttggttggtttgtttatttgattacatcgtactggtatgttaactcttaggaggcaagaaatactaagtttgcattacgtagtattgtgtacaatgataaattaatctttcagttaatcacactttttagccctgaaagaagctactaatattgtcctgggcatgaaggacaaaagaagatctacctcccaagattccttcaccctccaaaatagaggtcagtaactttctcaagcagaactgtgaagggagtaaaggctgctttacaagcagggataaagatggaatatgagcatctccattgaaattggaataaaatgagattgnctactcattttaaaagcccacccaagtaaacccaggctgacctgggaaagtatcctggtccccagagatccgaatgaaagagaccattgcaaagagagaagagtggttggaaagctccctccttaaaacctgtatcctaggaaatgactgcctctaccagctcagtaaaaaggaggccaggaaagtaacctgctgtgtaccctttgagaactaccttctgctgcctgcagtgaacttgcctacaggcaaagagaattctgtggctattttaactgtatctagtttactttcaggagtatttagtgcctggaacaaaaatgagtagaacaa

SEQ ID NO: 1001 - DNA, 661 bp, Homo sapiens
  misc_feature [331]..[331]: Chromosome 2, SNP identification no. = rs6758434
  misc_feature [331]..[331]: allele = c, in linkage disequilibrium with rs9309219, respectively
  misc_feature [331]..[331]: n is a, t, c or g
gtttgcattacgtagtattgtgtacaatgataaattaatctttcagttaatcacactttttagccctgaaagaagctactaatattgtcctgggcatgaaggacaaaagaagatctacctcccaagattccttcaccctccaaaatagaggtcagtaactttctcaagcagaactgtgaagggagtaaaggctgctttacaagcagggataaagatggaatatgagcatctccattgaaattggaataaaatgagattgcctactcattttaaaagcccacccaagtaaacccaggctgacctgggaaagtatcctggtccccagagatcngaatgaaagagaccattgcaaagagagaagagtggttggaaagctccctccttaaaacctgtatcctaggaaatgactgcctctaccagctcagtaaaaaggaggccaggaaagtaacctgctgtgtaccctttgagaactaccttctgctgcctgcagtgaacttgcctacaggcaaagagaattctgtggctattttaactgtatctagtttactttcaggagtatttagtgcctggaacaaaaatgagtagaacaaaggaataccctaggagtgtgatcacaacagcaagctgccggccacatcctgggccatacacttattagcct

SEQ ID NO: 1002 - DNA, 661 bp, Homo sapiens
  misc_feature [331]..[331]: Chromosome 2, SNP identification no. = rs1400104
  misc_feature [331]..[331]: allele = g, in linkage disequilibrium with rs9309219, respectively
  misc_feature [331]..[331]: n is a, t, c or g
aatgagattgcctactcattttaaaagcccacccaagtaaacccaggctgacctgggaaagtatcctggtccccagagatccgaatgaaagagaccattgcaaagagagaagagtggttggaaagctccctccttaaaacctgtatcctaggaaatgactgcctctaccagctcagtaaaaaggaggccaggaaagtaacctgctgtgtaccctttgagaactaccttctgctgcctgcagtgaacttgcctacaggcaaagagaattctgtggctattttaactgtatctagtttactttcaggagtatttagtgcctggaacaaaaatnagtagaacaaaggaataccctaggagtgtgatcacaacagcaagctgccggccacatcctgggccatacacttattagccttggcataataaatgatgtagtgtgacagagggggagttttagagtatcaaattgaaaggactgccattccagagctctaagcatttttcttctaccctttctgaatggatagaagtaggtctttacctgagtaaaatatgaatgtgaataatgtgccactacaaattaataaggatatatcaaggatatagtgaaaataaaagaaaagctattccatataggactgtaatataacatgtgcttcaaagc

SEQ ID NO: 1003 - DNA, 661 bp, Homo sapiens
  misc_feature [331]..[331]: Chromosome 2, SNP identification no. = rs10200986
  misc_feature [331]..[331]: allele = a, in linkage disequilibrium with rs9309219, respectively
  misc_feature [331]..[331]: n is a, t, c or g
aaaatcttcaccatcattatcaacgtgctttttagattgagagcctttggtacagtatacacatgcatataggtagtataatcccttccttccacattacctccctacatatgtgtgtaggtagtatctgtctccaactcttcacagaactttgaaaattgtatattagtattttagttttcaatttatttttttaatctcattttttaagtttccaattcgaatctcctcttgtattgacaaatgtctactctattcttaattcaagtaacatggttatataatggatttcaagactgaagcagacttatcctgcacatatcaagtatanattataaaacattctgtttaaatgtttttattaaaaatgcatactaatatttttgaaatgctgtttgcatgtatcatatgtatataattcttctgtgtctttatccatcaatgtatgaaaaacagaggaaaatgggaagtaaggtaataaataccaggataaacagataaggatgtaaaaatcactgtacaaattctgaagccacgaactaataagacagcttttagctttcttaacaaaacaaaacattgaaatctatctctatccctctctccccatcactgtctctttctttcacatgcatggctctgaatataaatctttccataa

SEQ ID NO: 1004 - DNA, 661 bp, Homo sapiens
  misc_feature [331]..[331]: Chromosome 2, SNP identification no. = rs9309217
  misc_feature [331]..[331]: allele = c, in linkage disequilibrium with rs9309219, respectively
  misc_feature [331]..[331]: n is a, t, c or g
ttccataataatttaaatcaatatagactttaatgaaatgtaggtgtgatttgtggctgctagttttatgtgtgctcatgacttctaagcggctgctgtgagacataaaagacagatcgaatagcatgagaaagacagatttttgagaacatcaggatagggtattagctatgaagcactagatgtctgataaaaatatgccctgagggaccagcccaattaaacacctttaaggaaatgaggtatttcagattagttttgcagagatgctgacaatttccttcaagtagttaaccaaattcagctgaattgcattgccatagacaaatantgaatctactgcttctggcctgatagactaaagagactgtgttgatgcattaaaagcttcttgaataaatttttatttatttgcccttttaattgctgacctctcaacaggcaaagtaaattttttaggatacaaaataaatcatacactataacagatgtcttcaaccctaggtatgcctactctcaaggaataaaaagatgttccaaagaatatgtagcactgatactttactgagaattgtgttccagatctttaacttcctaacgtatttctgtctaaaactgatgtgttgaaagttctgaagtttagatttaccaatggttccga

SEQ ID NO: 1005 - DNA, 661 bp, Homo sapiens
  misc_feature [331]..[331]: Chromosome 2, SNP identification no. = rs1400106
  misc_feature [331]..[331]: allele = a, in linkage disequilibrium with rs9309219, respectively
  misc_feature [331]..[331]: n is a, t, c or g
gaggtatttcagattagttttgcagagatgctgacaatttccttcaagtagttaaccaaattcagctgaattgcattgccatagacaaatactgaatctactgcttctggcctgatagactaaagagactgtgttgatgcattaaaagcttcttgaataaatttttatttatttgcccttttaattgctgacctctcaacaggcaaagtaaattttttaggatacaaaataaatcatacactataacagatgtcttcaaccctaggtatgcctactctcaaggaataaaaagatgttccaaagaatatgtagcactgatactttactgagnattgtgttccagatctttaacttcctaacgtatttctgtctaaaactgatgtgttgaaagttctgaagtttagatttaccaatggttccgaagtttcttttccattttgcacaattgcctttttttccccaagcttccaaagaaggacaaattgatcaacctcgcagagtcctatccacagtctcatcgatattcgtgggcacccatcaacaaaaggacaaaaaagaatgcatagctcctgaggaagggtatagtggcagcaaagcaacatgatctggttaaaaaataactgagaatcagtaacagtctcatcatagagctctgtgtacc

SEQ ID NO: 1006 - DNA, 661 bp, Homo sapiens
  misc_feature [331]..[331]: Chromosome 2, SNP identification no. = rs10166893
  misc_feature [331]..[331]: allele = g, in linkage disequilibrium with rs9309219, respectively
  misc_feature [331]..[331]: n is a, t, c or g
attgctatgaaatccaaatacatgacacactattttggactcatagtacattcgtttggaaaagaacttagaaatataatccaaccctcttctttagtggtcaagaaaactgaggctgatagagaagtcagctacccatagtcacaggtactgttggtcgcagagttgggacttcagctctggatttctgactaattttcttctttccactccaccaaacttcccctctttatacagaaagtttattatccactttaaaaattgcaggttaagaattcaataaatggatatgcaaaactagtggagagctgcacctcataattgtgcctanaagttattttgtcaatagaaatgaagaatagttagcactatggcagccatttgttcataattagtggaagcagtcatcattactttcttattgactagctttgttgcatcaggcttctaacacattaagttgctgtatttcaaaggggcacattgtaactagttgtgtcttgtagaatcttaagcgtttatatttggaaaccatctcattggaaataaaatctacctacagattcagtcctattgtgttctgttattattgttgtttacatttgttgtattcctactgaaacattttattgggataatatcagtaactttacatgaaatt

SEQ ID NO: 1007 - DNA, 661 bp, Homo sapiens
  misc_feature [331]..[331]: Chromosome 2, SNP identification no. = rs10190410
  misc_feature [331]..[331]: allele = a, in linkage disequilibrium with rs9309219, respectively
  misc_feature [331]..[331]: n is a, t, c or g
caaatacatgacacactattttggactcatagtacattcgtttggaaaagaacttagaaatataatccaaccctcttctttagtggtcaagaaaactgaggctgatagagaagtcagctacccatagtcacaggtactgttggtcgcagagttgggacttcagctctggatttctgactaattttcttctttccactccaccaaacttcccctctttatacagaaagtttattatccactttaaaaattgcaggttaagaattcaataaatggatatgcaaaactagtggagagctgcacctcataattgtgcctagaagttattttgtcnatagaaatgaagaatagttagcactatggcagccatttgttcataattagtggaagcagtcatcattactttcttattgactagctttgttgcatcaggcttctaacacattaagttgctgtatttcaaaggggcacattgtaactagttgtgtcttgtagaatcttaagcgtttatatttggaaaccatctcattggaaataaaatctacctacagattcagtcctattgtgttctgttattattgttgtttacatttgttgtattcctactgaaacattttattgggataatatcagtaactttacatgaaattttcatttcatgatt

SEQ ID NO: 1008 - DNA, 661 bp, Homo sapiens
  misc_feature [331]..[331]: Chromosome 2, SNP identification no. = rs12713144
  misc_feature [331]..[331]: allele = g, in linkage disequilibrium with rs9309219, respectively
  misc_feature [331]..[331]: n is a, t, c or g
ttgcaggttaagaattcaataaatggatatgcaaaactagtggagagctgcacctcataattgtgcctagaagttattttgtcaatagaaatgaagaatagttagcactatggcagccatttgttcataattagtggaagcagtcatcattactttcttattgactagctttgttgcatcaggcttctaacacattaagttgctgtatttcaaaggggcacattgtaactagttgtgtcttgtagaatcttaagcgtttatatttggaaaccatctcattggaaataaaatctacctacagattcagtcctattgtgttctgttattattnttgtttacatttgttgtattcctactgaaacattttattgggataatatcagtaactttacatgaaattttcatttcatgatttgctgattgcattaacaagaggtctaagttcttgcagcccatgactgctcatttctttgttgatttacttacattatgcttaaatctgtagattatcccctaatttcagtaaactaatttttattagaaatttaactgtcttctttaattaggatatgtcatagaccagtctacgtttccttgtcatgtcacaattaaaaattgtactcgactttctaaaacaagtcttgaaaatgcttacatatga

SEQ ID NO: 1009 - DNA, 661 bp, Homo sapiens
  misc_feature [331]..[331]: Chromosome 2, SNP identification no. = rs1400107
  misc_feature [331]..[331]: allele = g, in linkage disequilibrium with rs9309219, respectively
  misc_feature [331]..[331]: n is a, t, c or g
cattaacaagaggtctaagttcttgcagcccatgactgctcatttctttgttgatttacttacattatgcttaaatctgtagattatcccctaatttcagtaaactaatttttattagaaatttaactgtcttctttaattaggatatgtcatagaccagtctacgtttccttgtcatgtcacaattaaaaattgtactcgactttctaaaacaagtcttgaaaatgcttacatatgattcaaatacattgctaaatttgagctgtgtctatacaaatatcagtataacttactgtttaaggggacaggtttttaagtcagacttttttantttaattctagttcaactattgaaccactacccatcattaggcaagtcaaatacttctccaagccacagtttcctcatttttaaaagtggagaaaataattgtaactagccaacctatttgttttgaggattagatgagatagtctatgcaaagttttagtatatttcctagctatgagtaagcattctataagtgttccttatctttattattgatttattctttgatctagcaaaaaacaaatgtgttccatttcttaaaaatcagtacaaggtccacattttcttatgtcttctctaaatatttagcctatattgattttcgtcttt

SEQ ID NO: 1010 - DNA, 661 bp, Homo sapiens
  misc_feature [331]..[331]: Chromosome 2, SNP identification no. = rs1400108
  misc_feature [331]..[331]: allele = a, in linkage disequilibrium with rs9309219, respectively
  misc_feature [331]..[331]: n is a, t, c or g
caaatacattgctaaatttgagctgtgtctatacaaatatcagtataacttactgtttaaggggacaggtttttaagtcagacttttttagtttaattctagttcaactattgaaccactacccatcattaggcaagtcaaatacttctccaagccacagtttcctcatttttaaaagtggagaaaataattgtaactagccaacctatttgttttgaggattagatgagatagtctatgcaaagttttagtatatttcctagctatgagtaagcattctataagtgttccttatctttattattgatttattctttgatctagcaaaaancaaatgtgttccatttcttaaaaatcagtacaaggtccacattttcttatgtcttctctaaatatttagcctatattgattttcgtctttcctgaattgcatttagattttctaccccattaatatatcatgcagtgttatgtatttttaaaggcataagctgtgtcactcataatggaatataagttccttgaggccgggttccaaaatgctaaatacctagtagctaattaactcaaaatccctgttttacttattaaactgtagaatgagtatgaaagctcttgttttaatggcaaagcatataatttctttaaatataattttacc

SEQ ID NO: 1011 - DNA, 661 bp, Homo sapiens
  misc_feature [331]..[331]: Chromosome 2, SNP identification no. = rs7569104
  misc_feature [331]..[331]: allele = t, in linkage disequilibrium with rs9309219, respectively
  misc_feature [331]..[331]: n is a, t, c or g
aaactgtagaatgagtatgaaagctcttgttttaatggcaaagcatataatttctttaaatataattttaccacaactataaaaaggaaaaatattcaagggcagatataatgagaaaagagatgccagcaaaacaattttgaaatttgcaaatcaggtacctaaatagtagcagactgagaagtcagaggaaatggaaaattatgccagcagtggaggaagctcgtaagcaagactatatgcatcatggaatcccaaagaggctcaggcatttggagtatgaaatatacatggaaaaaaaggcagtagtctgagagtctccaaagaaaantgttggaagttgaaggagaagttagatcccaagatcccatggagaagactagagatttatttcctggaaagtttgaataaaaagggacgtagggaccctgggcatacttcaaggggattttcataataaaaacagtattgtcatcaaatatttctttttgccacttagttctaaaaatattacagaaactaaccagttcaaaggaaaactcataatgttccagccaccttcactctacggaaaaatcctaagttaacaatgcagagagtttatcctattttctagagcctattcatatgaagatatttcctaacatgaacaacacaaaat

SEQ ID NO: 1012 - DNA, 661 bp, Homo sapiens
  misc_feature [331]..[331]: Chromosome 2, SNP identification no. = rs4146702
  misc_feature [331]..[331]: allele = t, in linkage disequilibrium with rs9309219, respectively
  misc_feature [331]..[331]: n is a, t, c or g
ctcttcagagctatgatttctaaatctaaaatcagttgctagtactatcactgagcctgataacagaattgaaggatttgaaaaaacaatgtataaaatgaatagtttataagtaaatatgaagttgaataatcagaattatttggttctttattaaagctgcagagctagaaggacatgaatgatcatcattacactcagtttcttcatgttttctctacagtcattagcatagttatatatgtgacagatagatatattctaataaagaaaatatatttacctttttaataacaatttttgctttgtcagcatgaaaatgaaggtaganggaatactatgtaagacaatattttgtagttaggaatagagaaactgaaaattcaggacaagcacagaaacaggaactatatccttaagtcaaagaatcttgttaaaccaaagcgctcagggaaactagaattcagtttttgttcgtttgttttatttttatttttgtattgctgaaacttagtagaaaaaagatagcaggatcaccctgatggctcagaaatagctttgatggcctaatccttactctttttctggtcctcaaggatatttactgagcgataaaaataaaattaacagaggacccaagaagccacagctagttttatcc

SEQ ID NO: 1013 - DNA, 661 bp, Homo sapiens
  misc_feature [331]..[331]: Chromosome 2, SNP identification no. = rs4146703
  misc_feature [331]..[331]: allele = g, in linkage disequilibrium with rs9309219, respectively
  misc_feature [331]..[331]: n is a, t, c or g
gatggctcagaaatagctttgatggcctaatccttactctttttctggtcctcaaggatatttactgagcgataaaaataaaattaacagaggacccaagaagccacagctagttttatcctccaccaaaaagaactggagcctcttggaacttcttgtttgaccatagataagtttgctttattggtctaggaacatggaacaaatgaaaatgtaccggatttcagaaaactggtaaggcaacatgcgtgctgtaggttctgattcttgggtatcaagtccctcaagaatgattcctaaatttgcatgtggtgttggcagcttggccttnaacataactatatttgcaaatatcctagtgttgacttcattgcttctacacagaaagttagaaagggggtggataagaatttattgaatcattattaaaaaataattaagaatgtcctcagcggagcttgcagtgagccaggatcgcactactgcactccaggatgggtgatagagcgagactccatctcaaaaaaaaaaaaaaaaaaaaatgtcctcaggacactggggagtcctgggatgaaagaaataattgaaaattaaactactaatattggaagtaaattttgagaaatttattcagctctttttttttaatttgggaaatgat

SEQ ID NO: 1014 - DNA, 661 bp, Homo sapiens
  misc_feature [331]..[331]: Chromosome 2, SNP identification no. = rs17863669
  misc_feature [331]..[331]: allele = g, in linkage disequilibrium with rs9309219, respectively
  misc_feature [331]..[331]: n is a, t, c or g
ttaaactactaatattggaagtaaattttgagaaatttattcagctctttttttttaatttgggaaatgatactagagacattgtagtgatattaactttcttatgatgaatctcttttcttattttaaacaaataaaaatgttatacaaaaaatataaagaaaaaactaaacaatgatctttcaatgttggagcaaaagtccttgcaagagaaatcttcagatacgttaaacaaaaaagaaaaagttggagtggcccacaggagaagcgatgtgtaccttgaaggctgatgttctaacaggagtcaaggctttaggtctcattctcagangggacctgggacaataacccttgtggaaaactaagagtgtgaaaagcctcacacactagcttgatgatttggcataaaagcatcaggttgccctgatacatgagtggaatacactcttatctttggaaatcataatccatacacaattctgcgaatggatgctgggtgaaatatgtgcaataccaaagtaatgaagcaggctaagctgaaaatcaatcaaagagctgatctggatctattgagttctatgggactctggccaaggaacccaaaaacctgtcctatacagaaacctctaaaacctagggaatatgtagaacacagaaaaga

SEQ ID NO: 1015 - DNA, 661 bp, Homo sapiens
  misc_feature [331]..[331]: Chromosome 2, SNP identification no. = rs6720129
  misc_feature [331]..[331]: allele = c, in linkage disequilibrium with rs9309219, respectively
  misc_feature [331]..[331]: n is a, t, c or g
ggacaataacccttgtggaaaactaagagtgtgaaaagcctcacacactagcttgatgatttggcataaaagcatcaggttgccctgatacatgagtggaatacactcttatctttggaaatcataatccatacacaattctgcgaatggatgctgggtgaaatatgtgcaataccaaagtaatgaagcaggctaagctgaaaatcaatcaaagagctgatctggatctattgagttctatgggactctggccaaggaacccaaaaacctgtcctatacagaaacctctaaaacctagggaatatgtagaacacagaaaagataaaaaaanagatctaattccaaaactggtataaatactgttcctatattgattcattcaattcaagaaaggtatttcaagatatccaggattaagagtttgaaattcactgaatattgctgaaagaactgctaaaagatttagttagcaagaaggaaaataaagccagaagttaagactgatacaaaggtagtaatggtgagcaaggaaaattataaaacttatagaagaagataaataattaggtattaaatactgaataaaataacaaatatgagggattataatatgttaataataaaatgttgatactgtaataaaaacgttgaataggtaagg

SEQ ID NO: 1016 - DNA, 661 bp, Homo sapiens
  misc_feature [331]..[331]: Chromosome 2, SNP identification no. = rs1400111
  misc_feature [331]..[331]: allele = c, in linkage disequilibrium with rs9309219, respectively
  misc_feature [331]..[331]: n is a, t, c or g
tctaattccaaaactggtataaatactgttcctatattgattcattcaattcaagaaaggtatttcaagatatccaggattaagagtttgaaattcactgaatattgctgaaagaactgctaaaagatttagttagcaagaaggaaaataaagccagaagttaagactgatacaaaggtagtaatggtgagcaaggaaaattataaaacttatagaagaagataaataattaggtattaaatactgaataaaataacaaatatgagggattataatatgttaataataaaatgttgatactgtaataaaaacgttgaataggtaagggagnatttagggaagactccaagattctttaagtattagcaaaaggtgcaaagacaatgactgcatttaggctttgcttggcaaaatataaagttatttgttttaatcagaatcaattatattaagtgctgctacggacaaaactggcaatagcagtggcttaataataagaatttatttctaacttacacaaagtctcatgggagtcaagcagctttcttccatcttaaatctatcttctgtggcaaatgtgtcctgcaaggatactgcggcagtgaaaaagaggtacactgccttttaatcgtttcatcttgaaaacaaactaatcacttct

SEQ ID NO: 1017 - DNA, 661 bp, Homo sapiens
  misc_feature [331]..[331]: Chromosome 2, SNP identification no. = rs1400112
  misc_feature [331]..[331]: allele = c, in linkage disequilibrium with rs9309219, respectively
  misc_feature [331]..[331]: n is a, t, c or g
gaaaattataaaacttatagaagaagataaataattaggtattaaatactgaataaaataacaaatatgagggattataatatgttaataataaaatgttgatactgtaataaaaacgttgaataggtaagggagcatttagggaagactccaagattctttaagtattagcaaaaggtgcaaagacaatgactgcatttaggctttgcttggcaaaatataaagttatttgttttaatcagaatcaattatattaagtgctgctacggacaaaactggcaatagcagtggcttaataataagaatttatttctaacttacacaaagtctnatgggagtcaagcagctttcttccatcttaaatctatcttctgtggcaaatgtgtcctgcaaggatactgcggcagtgaaaaagaggtacactgccttttaatcgtttcatcttgaaaacaaactaatcacttcttctaattgtccaccacctcaaatgcctccactgtaatgacaagggaagctgggaatgtgtgcaaaggataatttgtgagtcaaaagtacatgtaaatatttaccaaagaatagaaatagaatatgcagcatttaaacaaagaaaggataaatgtaaataaagaaaatatagtaaaatcaatatggcaaagaaagg

SEQ ID NO: 1018 - DNA, 661 bp, Homo sapiens
  misc_feature [331]..[331]: Chromosome 2, SNP identification no. = rs6714353
  misc_feature [331]..[331]: allele = c, in linkage disequilibrium with rs9309219, respectively
  misc_feature [331]..[331]: n is a, t, c or g
tctatcaaaattctaatgacatttttcacagaaatggaaaaaaaatagaaaaatttgtgtggacccatgaagaaagttgctaagacaatcttgagaaagaataaagctaaagaaatcacagatttggaatcacagatttgaaatcctgatttcaaactatattacaaaactatagtattcaaaaccgtatggtactggcataaaacagtcacatcaaccaaatgaacaaacagagaacctagaaattcacccatgcatatatgactagctaatttttgacaaagacaccaagaacacacaatggggaaattactgaacctgaaatattttncagtcacccatgaggggaaaaagacagaaacttcaaagaagcaacaataagacaaaaatcttactacttagcagaaattgtagaagccagaagtcaatggaaagtgctaaaaaaactgtaaacatacaattttacaaccagccaaaccatctttaaaaatgaatgcaaatagacatatttctaatataaacgaaaattgcagaattcaaaggcaacaattctgtactaaaatttgaaaagaaaacttgaggacttccaggcaaaaaaaatcgcaaaatcatcattatgctaaacacacacactcacagaaagggcaaatatgagggtaaa

SEQ ID NO: 1019 - DNA, 661 bp, Homo sapiens
  misc_feature [331]..[331]: Chromosome 2, SNP identification no. = rs6729695
  misc_feature [331]..[331]: allele = t, in linkage disequilibrium with rs9309219, respectively
  misc_feature [331]..[331]: n is a, t, c or g
gctaaagaaatcacagatttggaatcacagatttgaaatcctgatttcaaactatattacaaaactatagtattcaaaaccgtatggtactggcataaaacagtcacatcaaccaaatgaacaaacagagaacctagaaattcacccatgcatatatgactagctaatttttgacaaagacaccaagaacacacaatggggaaattactgaacctgaaatattttccagtcacccatgaggggaaaaagacagaaacttcaaagaagcaacaataagacaaaaatcttactacttagcagaaattgtagaagccagaagtcaatggaaagngctaaaaaaactgtaaacatacaattttacaaccagccaaaccatctttaaaaatgaatgcaaatagacatatttctaatataaacgaaaattgcagaattcaaaggcaacaattctgtactaaaatttgaaaagaaaacttgaggacttccaggcaaaaaaaatcgcaaaatcatcattatgctaaacacacacactcacagaaagggcaaatatgagggtaaactaaagttgtatgagtttttaagcttctgtaatgccaacaacttgggaggccagatggtaggattgcttaaggccaggagtttaaaagcagcctgagcaacatag

SEQ ID NO: 1020 - DNA, 661 bp, Homo sapiens
  misc_feature [331]..[331]: Chromosome 2, SNP identification no. = rs6753905
  misc_feature [331]..[331]: allele = t, in linkage disequilibrium with rs9309219, respectively
  misc_feature [331]..[331]: n is a, t, c or g
aaaaagaaaatgtggtacatatatactatggaatactgtgcatccataaaatgaatgatatcatgtcctttacagcaacatggatggagctggagcccattatcctaagcaaactaacacaggaagagaaaaccaaataccacatgttctcactcataaggggaagctaaatgtcgagtatacataaacacaaagaagagaacaacagcaccagagcttcttgagggtggagggtgggaggagggtgaggatcaaaaaaactgcctatcaggtgctatgcttattaccttgatgatgaaataatatgtacaccaaaccccccatgacactnaatttacttaaataacaaacttgcacatgtattcctaaacctaaaataacagctttttaaaaaagaaaagagtaaaacttcaacagagttttctaaattgttattaccaagtttggactgagtgttacattatcttaaatataaatgaaaagcacgtagtgtttatggctggatgttcagctttcatatgtagactgctaaacatgattgattgttccacaaaattcttagttaataatgtctcaggacatagtttattcttatctgaaattctctgttaactttgcagagtagagattacatcatcttgttttacctcataatatggct

SEQ ID NO: 1021 - DNA, 661 bp, Homo sapiens
  misc_feature [331]..[331]: Chromosome 2, SNP identification no. = rs6739137
  misc_feature [331]..[331]: allele = g, in linkage disequilibrium with rs9309219, respectively
  misc_feature [331]..[331]: n is a, t, c or g
gagggtgaggatcaaaaaaactgcctatcaggtgctatgcttattaccttgatgatgaaataatatgtacaccaaaccccccatgacacttaatttacttaaataacaaacttgcacatgtattcctaaacctaaaataacagctttttaaaaaagaaaagagtaaaacttcaacagagttttctaaattgttattaccaagtttggactgagtgttacattatcttaaatataaatgaaaagcacgtagtgtttatggctggatgttcagctttcatatgtagactgctaaacatgattgattgttccacaaaattcttagttaataatntctcaggacatagtttattcttatctgaaattctctgttaactttgcagagtagagattacatcatcttgttttacctcataatatggctgccagggcttataattatggtagtagtgcaggctttaccaaccccttagtttttgcttttgtttttgttattattattgtaatcactctggtatttatttttaggtattttttaaagccactgtttcttatagtggaagttagataagttaaaactggatatattatatcctaaagtattttaattggatcaaactgttgttagtcaaaatatgttgaaagccagcaaagcagtggatga

SEQ ID NO: 1022 - DNA, 661 bp, Homo sapiens
  misc_feature [331]..[331]: Chromosome 2, SNP identification no. = rs12691185
  misc_feature [331]..[331]: allele = t, in linkage disequilibrium with rs9309219, respectively
  misc_feature [331]..[331]: n is a, t, c or g
gtagactgctaaacatgattgattgttccacaaaattcttagttaataatgtctcaggacatagtttattcttatctgaaattctctgttaactttgcagagtagagattacatcatcttgttttacctcataatatggctgccagggcttataattatggtagtagtgcaggctttaccaaccccttagtttttgcttttgtttttgttattattattgtaatcactctggtatttatttttaggtattttttaaagccactgtttcttatagtggaagttagataagttaaaactggatatattatatcctaaagtattttaattggancaaactgttgttagtcaaaatatgttgaaagccagcaaagcagtggatgacctcattttgcaaatttctgcgttgtgtaaatttcatgatgcactgccaatacttcatttaaaatttataatatatgatatgtagactgagttgggcactcctgggaaatccatgtattaaatattagttatgctattattgattctttaaaataataataaggccagactcacacctgtaatcccagcactttgggaggccaaagcaggtggatcatctgaggtcaggagtttgagaccagcctggccaaaatggtgaaaccctgtcgctactaaaaat

SEQ ID NO: 1023 - DNA, 661 bp, Homo sapiens
  misc_feature [331]..[331]: Chromosome 2, SNP identification no. = rs11694738
  misc_feature [331]..[331]: allele = c, in linkage disequilibrium with rs9309219, respectively
  misc_feature [331]..[331]: n is a, t, c or g
attataaacaatttgtactaatactatattttttctgttatacaacatagtgacatgaaaaacaaatataataatggcttaattgtaaagtatataataatagtttatctgatttgaccctccatatactgtatgagggccttaaacctctttcatgatactttccatctaattatggctattgtcagggtgtgtctgatgtatgcctcaggaaacatcctcagtcaccagctggtattaatagttttgtctctctgttctgattcttttcataatatttggaattttgtcttccactacctgtacaagggcaaggcaactcatctgttantaagagataacttggccgggcgcagtggctcacgcctgtaatcccagcactgtgggaggctgaggtggggggatcactaggtcaggagatcaagaccatcgtggccaacatggtgaaacccgtctctactaaaaatacaaaaattagccaggcatggttgtgggcacctgtaatcccacctactcgggaggctgaggcaggagaatagcttgaaccagggagttggaggttacagtgagccaagatcacaccactgcactccagcctgggcaacagagcaagactccatctcaaaaaaaagatagagttaacttgaatttacttaaatca

SEQ ID NO: 1024 - DNA, 661 bp, Homo sapiens
  misc_feature [331]..[331]: Chromosome 2, SNP identification no. = rs1878136
  misc_feature [331]..[331]: allele = c, in linkage disequilibrium with rs9309219, respectively
  misc_feature [331]..[331]: n is a, t, c or g
gaaataatttaaaaacattttaaagtgggtgtatctacttgcttggagctttgtcgaatcatgtttcttatttggagcctctggaggaatgttgacttaccatggtaaaaattaactggtgaaactctaaagaaaacacagactctacacgcagtcttgtccgaaacttactcaccctgaaaccaatgaatttcaaagacctagatacttccttctgtgatgtcccctgagatcagagaataaaagaaaaatccctcgtaaatatacatcacgtacagctgtttgatttatgcattatgcagaaactaagaaaacagagttatatgtaacnttgcaatgagaagtgcacccaccaaaaaaaaaaaaaaaaaaatcccaaaacattgtttcaaaaagaagtggtatgaagcatcttagtgtttcatgaatattgaagaatagtgcaattattgaaatttggcatttaaaaaatgtttttaaattattaggaagctaccgtgacctgtttactaaatcctcaattctttctctctcagtttttcttactataaaatttacttttcaagccagagaatttttctttctgacaagacgtagatctatattgcgctgtcaagatgcagcttttgcatctctgctgccatgtggatagaataacttt

SEQ ID NO: 1025 - DNA, 661 bp, Homo sapiens
  misc_feature [331]..[331]: Chromosome 2, SNP identification no. = rs1516185
  misc_feature [331]..[331]: allele = a, in linkage disequilibrium with rs9309219, respectively
  misc_feature [331]..[331]: n is a, t, c or g
ttttaaaagaaagagttttcaatatatttgttcatgttccattccactgagaatggtgctatttaaaactaaatacaataattttagatattgtacagcagatataattttaaacataatacatgggatttcgattttaggtactgtttataaggcatttctccttatattattctagacttaaatataacaaatttcatgcagaggtttctttcaaaagtaaattcagccacatttagactcaaatattccctaattttttagtgtagctgaagtcctaataatatacttgtgtttcttttaaattaagtcccacatgttaactttacancagaaagtccatgtatcgtattattagtctaaatcttcattttactgtttagttaacacagacattcatttaacacactatgtttaatttcccactcagttttggcttattgtagtctaataaacaatgattaaacaatgccccacttaatgcaggttgagaaataagtgaaactatgacatggaaaaatattacaataagcgaaaaatattacaataaaggaaaaaataatggaagaatatcagtatttgatgctattatacgtgaccatattgtttagcaaactacttcaaaaatgaaattaggaatttcagagaatcattttattct

SEQ ID NO: 1026 - DNA, 661 bp, Homo sapiens
  misc_feature [331]..[331]: Chromosome 2, SNP identification no. = rs9309218
  misc_feature [331]..[331]: allele = c, in linkage disequilibrium with rs9309219, respectively
  misc_feature [331]..[331]: n is a, t, c or g
atcattttaacgtaaatctatgatactttggtctcttccagtgtccaggtaacttatgccacaactttcttctatctttgttaataatacagtgtgttttatacctgtgggcactaacattttgttactatttgtagtaatgctactgcattactgatatgagaataaaatgattctctgaaattcctaatttcatttttgaagtaatttgctaaacaatatggtcacgtataatagcatcaaatattgatattcttccattattttttcctttattgtaatatttttcacttattgtaatatttttccatgtcatagtttcacttatttntcaacatactatgtatccatgaatgtcctgaagggaaaaaaaaatctcatatatacctaactgatgtgcttgacatatagtaagttgtccataagtatttgctggtagatttatttattttttaaaaaaacaacttggaaagttttctgtgtgcttttatattagaacttgacctttgaagtacctccaggaaattttgaagagtgctggcatatgacaatgcgtaagtttatatttcatgtccatgcatgccattaaaattctaataatgtagttgacagagcctttcttgtcccttaagcactaaatttgtggcttgctctagattgt

SEQ ID NO: 1027 - DNA, 661 bp, Homo sapiens
  misc_feature [331]..[331]: Chromosome 2, SNP identification no. = rs1028146
  misc_feature [331]..[331]: allele = g, in linkage disequilibrium with rs9309219, respectively
  misc_feature [331]..[331]: n is a, t, c or g
gtacctccaggaaattttgaagagtgctggcatatgacaatgcgtaagtttatatttcatgtccatgcatgccattaaaattctaataatgtagttgacagagcctttcttgtcccttaagcactaaatttgtggcttgctctagattgtcccacctggcacaagcgaggtgaaatttcaggtctagccaacttttttctttttttttttttaacaagtattaaaaacattttcatatatattccctgtattatttcacctatttttgtgtgtgtgtttctatcacactgccacatcaaaaacctcttcttgaacgactatagtatagtgnttaatagttcagtgtctagatcaagaccacctatggacgtatcttggctctgattttaccagccgtacaatcctggagaatctgttcaagagaaatgtgcctcaattacgtatctctaaagtagttgtagctatagaacctgttccatagatgtggatcagaacactgcatgacatttagaaaatgtttaataaatgatgttgctgtacttgttgctgttattgttgctctgtcatgttaggagaactctcatttaccctagtgttctctcaaagtgaaatacagatcattacctcttgaaatcatgtccaagtaacttcagaattattt

SEQ ID NO: 1028 - DNA, 661 bp, Homo sapiens
  misc_feature [331]..[331]: Chromosome 2, SNP identification no. = rs9973524
  misc_feature [331]..[331]: allele = t, in linkage disequilibrium with rs9309219, respectively
  misc_feature [331]..[331]: n is a, t, c or g
gtccttaggacactttggaaatctatcttgtagtacaggtgacccagcagcaatcaatctttctgccatccctagttttagttcaggacccagaaaagttgtaacttgtttcctttcctgtgatcaagcctttgttttctctttttttctccactttttgtagctttttaatttgtttctctgttgattactagcccaatgcctgagcatcttcgtcttaagacaaagcctctgtgtttcttcagctcctgaaatgactggcatgctgaaaatgagctcagggcattagtctttgctactaagccactacagattccattccctttcttcntgagtatgcacacaccgcttgttcacagactccagattagttattaagctacatctgtatgcagtttgcactctcctgccttcgacctgcttgtcccagaagttattcaccatattctaccttgatcatattttctacttgtcaatgcgcatgtcaattaagaacttttaacatttattgaccatttattatatactagccagtcttttaattgatttatgaacaattaacttaatcatcatataagcatagtagggtacaattagttccccaactttatatatgaacaaatggactttcagaaaggtaaggtaaaatatccacggtaag

SEQ ID NO: 1029 - DNA, 661 bp, Homo sapiens
  misc_feature [331]..[331]: Chromosome 2, SNP identification no. = rs1516186
  misc_feature [331]..[331]: allele = a, in linkage disequilibrium with rs9309219, respectively
  misc_feature [331]..[331]: n is a, t, c or g
tcttaagacaaagcctctgtgtttcttcagctcctgaaatgactggcatgctgaaaatgagctcagggcattagtctttgctactaagccactacagattccattccctttcttcttgagtatgcacacaccgcttgttcacagactccagattagttattaagctacatctgtatgcagtttgcactctcctgccttcgacctgcttgtcccagaagttattcaccatattctaccttgatcatattttctacttgtcaatgcgcatgtcaattaagaacttttaacatttattgaccatttattatatactagccagtcttttaattgntttatgaacaattaacttaatcatcatataagcatagtagggtacaattagttccccaactttatatatgaacaaatggactttcagaaaggtaaggtaaaatatccacggtaagaaagcctgcatatgtggaactgggaattgaacccctatgtctgacccgagggtccatacacttaagcattatgctatcaagttttccacagcctgcttttcggcttctctctctttctttctttcctgatctctgttgcaattcctacctttcaactcccttctgaccatggatagtttgcaaaatgccagaggtacgtctcaaagaagcttcaa

SEQ ID NO: 1030 - DNA, 661 bp, Homo sapiens
  misc_feature [331]..[331]: Chromosome 2, SNP identification no. = rs1516187
  misc_feature [331]..[331]: allele = t, in linkage disequilibrium with rs9309219, respectively
  misc_feature [331]..[331]: n is a, t, c or g
tttattgaccatttattatatactagccagtcttttaattgatttatgaacaattaacttaatcatcatataagcatagtagggtacaattagttccccaactttatatatgaacaaatggactttcagaaaggtaaggtaaaatatccacggtaagaaagcctgcatatgtggaactgggaattgaacccctatgtctgacccgagggtccatacacttaagcattatgctatcaagttttccacagcctgcttttcggcttctctctctttctttctttcctgatctctgttgcaattcctacctttcaactcccttctgaccatgganagtttgcaaaatgccagaggtacgtctcaaagaagcttcaaataggagcgtgtactaccattaagtcagctcctcagttgtcttctttggattgagaagcacttcatcactttttacacaggtttaattatcaaatatgacttttctagtactacagctaatatatgtcaatgtcaaagggttaacagaatactaggcctatattaaattatacatatgagctttctctttactcctttttatgttcattagcaaacagataaagccataatagattttttaaggaatattttgttttgttttgttttggacttatacatctattaacaa

SEQ ID NO: 1031 - DNA, 661 bp, Homo sapiens
  misc_feature [331]..[331]: Chromosome 2, SNP identification no. = rs1356213
  misc_feature [331]..[331]: allele = c, in linkage disequilibrium with rs9309219, respectively
  misc_feature [331]..[331]: n is a, t, c or g
cagctaatatatgtcaatgtcaaagggttaacagaatactaggcctatattaaattatacatatgagctttctctttactcctttttatgttcattagcaaacagataaagccataatagattttttaaggaatattttgttttgttttgttttggacttatacatctattaacaataaaccaaacattgcagattaaagcaaatctgccaatctgttttacaaacactatcttctgaagggttcctgggcacaagatactgttctagtaatatttcacagcttttttttttttttcattttagagaaaatattctaagactccaaagttngatagtatttggtcagtgtcttagtcagtttgagctaatataacaaattatcatagaataagtgtctcaagcaacagaaatgtattttttacaatctggaggctgcaaagtccagaatcaagatgctggcagatctggtgtctgatgaggacccaccttcttatttgcaaatgatcatttttgttgtgtcctcacatgacaaagagcagagagagcaagcactcttgtgtctcttcttttttttttttttttttttgagacggagtccggctctttagcccaggccggattgcagtggcacaatctcggctcactgcaagctccgcctcc

SEQ ID NO: 1032 - DNA, 661 bp, Homo sapiens
  misc_feature [331]..[331]: Chromosome 2, SNP identification no. = rs7609540
  misc_feature [331]..[331]: allele = c, in linkage disequilibrium with rs9309219, respectively
  misc_feature [331]..[331]: n is a, t, c or g
catcaagaaagttccaccttcatgtcctaattaactctcaaatgccccatctctaaataccgccacattcggggattaggatttcaacatatgcattttggtgggatacaaacatacagttcatagccaccaatacctttgttgtattttcacaaaaatgatgtctaaacaataaatgttcaattactcatgcaatcttaaacaaagggttactattaggaaaatgagttaattccttagaaatttttcttttggagattattggagatgtgaggtgatgaagtgtaagtgacttggtgttattaagaaggacacccctgcaggagataanatcccttagttctagtatctattctatcaaaaatcctttagttctattattctgtcattgacagaacaattgtctctaatatcatcaaagttctttaacaactatgaaatgtgacaatagaactaaataatttcagaatgcttttccaggaccaaattatattttcttgatagcataaatagcagagaacaattttaattataacacatagtcaatattgttttgttctttgttaggaaaaatgttgactattaacatgacttctctgtacttgccttaggaatgtttctaaatgaaatatgcctcatgttggtatttaaatatctttat

SEQ ID NO: 1033 - DNA, 661 bp, Homo sapiens
  misc_feature [331]..[331]: Chromosome 2, SNP identification no. = rs1516179
  misc_feature [331]..[331]: allele = a, in linkage disequilibrium with rs9309219, respectively
  misc_feature [331]..[331]: n is a, t, c or g
tgaaatgtgacaatagaactaaataatttcagaatgcttttccaggaccaaattatattttcttgatagcataaatagcagagaacaattttaattataacacatagtcaatattgttttgttctttgttaggaaaaatgttgactattaacatgacttctctgtacttgccttaggaatgtttctaaatgaaatatgcctcatgttggtatttaaatatctttatcaattattttatttcaaaagcaagaacttgtgtccttactcttcagaaagttttatgttttcaatttaatctcctactgcttaatattttcagataaaatgctcnctggctttagaaatcattcattaaatacaggggacaagaagtggcattagagggcagattgtgttgtgattgttttacttttgatttcttcttttagcctcctaagaaagactctgtagcccatggcttctgttaatactatatagcaggagtcagtttttgcattattggtgttagtgatgagtgatacatctgacaaaggttaggatgcttttagaaccatttgacagcaatgaccgctgaagatagaagtggttttccactaatttttctggaaatagagcagtgatatctttgttcaggagtttacatttgacttagaaggccttt

SEQ ID NO: 1034 - DNA, 661 bp, Homo sapiens
  misc_feature [331]..[331]: Chromosome 2, SNP identification no. = rs1516180
  misc_feature [331]..[331]: allele = t, in linkage disequilibrium with rs9309219, respectively
  misc_feature [331]..[331]: n is a, t, c or g
cttgccttaggaatgtttctaaatgaaatatgcctcatgttggtatttaaatatctttatcaattattttatttcaaaagcaagaacttgtgtccttactcttcagaaagttttatgttttcaatttaatctcctactgcttaatattttcagataaaatgctcactggctttagaaatcattcattaaatacaggggacaagaagtggcattagagggcagattgtgttgtgattgttttacttttgatttcttcttttagcctcctaagaaagactctgtagcccatggcttctgttaatactatatagcaggagtcagtttttgcatnattggtgttagtgatgagtgatacatctgacaaaggttaggatgcttttagaaccatttgacagcaatgaccgctgaagatagaagtggttttccactaatttttctggaaatagagcagtgatatctttgttcaggagtttacatttgacttagaaggcctttatcccatttgcgtctgtcaatagtttacttattttctgaaatgctgtataaatagtattctttccctttaaaatttctccagttggaattaaaatctttttttgtgtgtgggattaaagggaaaaaaaactataacagccattcaattgtagtcctatgagagtaa

SEQ ID NO: 1035 - DNA, 661 bp, Homo sapiens
  misc_feature [331]..[331]: Chromosome 2, SNP identification no. = rs10201408
  misc_feature [331]..[331]: allele = a, in linkage disequilibrium with rs9309219, respectively
  misc_feature [331]..[331]: n is a, t, c or g
tgacttatgcttgtataaattcttatcttgtctctgcttgtcagtaaaggagggctgacagcaggagtcatagattgatggattctatacccccaaaatgcctagagcagtgcaattagtatgatgttaacttgttcagtatgagttagattggattgaaatgattacgggaatggaacactgagtcaagagccatgttagttcaacatttgccacccaccctcttcctgcatatctgtgtttataatcttcattgattgtagttcaaatttgctgacagaggattttgttgctcttaactcccctaaatttctcatcctattttagttcntcttctacctctagaacttagaacaggagaaagtaattgatgtgctacataactcactgcttttgagtgaatggttgacagtcaaaaatgtactgatttttactaacaacaaatcactgctctgtatcttgtggaaaagcacagcttctttcaagaatttaccattaaatggtaggaatatggtggaagagaaagacttaatagacataaaagttaaaattgtttcagtgattattatgtgaaagttatcaaaataattatggagatcattacataaatgtgtaattcactgcactacaattagaaattatatatacaggaaatataatt

SEQ ID NO: 1036 - DNA, 661 bp, Homo sapiens
  misc_feature [331]..[331]: Chromosome 2, SNP identification no. = rs10865257
  misc_feature [331]..[331]: allele = g, in linkage disequilibrium with rs9309219, respectively
  misc_feature [331]..[331]: n is a, t, c or g
aaaagttaaaattgtttcagtgattattatgtgaaagttatcaaaataattatggagatcattacataaatgtgtaattcactgcactacaattagaaattatatatacaggaaatataatttttaatgcaggaaagatacaaagaccatttagaatttcaaaataaagtgaggtggctgtgggttaggttgaaagagaatgagaagtgatttgaggttggccttgaattacagataagaattaggtgattaggctgggggagtataggttgatatagacatttagataaagatgaactgcaattaaaggtgtttaaaaaaaacctgtggntaaacatcatttgaacatacaaaaatatgaagcagaccatgttacaaccatctctatgaaaaaagcataagtcaagcactgaagggaatttgaaaaaggagagtgatgtaagctagactggatgagaatgaaaagatcccatccatgaacagtacatgacttagatagaaacacattggtagtgctagagtcaaatgatactcagcagtttgcggctgactggacaccctgttcaatccatctccatagagacacagacgtgttgcactgattaactgagtagggtgtcatatttctatgatttagatcctccaaaagtatactctcaag

SEQ ID NO: 1037 - DNA, 661 bp, Homo sapiens
  misc_feature [331]..[331]: Chromosome 2, SNP identification no. = rs1516184
  misc_feature [331]..[331]: allele = a, in linkage disequilibrium with rs9309219, respectively
  misc_feature [331]..[331]: n is a, t, c or g
ttcaatccatctccatagagacacagacgtgttgcactgattaactgagtagggtgtcatatttctatgatttagatcctccaaaagtatactctcaagttcggggatttatgcagcatttaattctaaatggcccattcagaagcagaaaaaacaaatgagcatcaatttaactgagaaatttaacccgaataactgaaaaatcaccaagtggcagctctgaaattctgtaattctaatattcgatctaaggagaagaatatagaagtgtaccaataagatgaaagtaatctgggaacacagggttaggtaaaaaatgtagatatggacntttatattagagttaaaatatcaagcatcaatagagaattacagtttttgtagaaagtaaatttcaagattaatgtgaaaaaatctgattttgatatgtaacaggctttgtacaattgctgtaaggggcagatggttctacagtttttatttagcaatgatgctcacaaatcaaaatgcagataaaactccaacgccatttttgacaccctattcttctaaatcttaattagacataaaatcagtggttataacttgtggattaatttgtagatgttgtgatcatcctttgggaactttatgaaaggacatgtggaacatcatgtattaa

SEQ ID NO: 1038 - DNA, 661 bp, Homo sapiens
  misc_feature [331]..[331]: Chromosome 2, SNP identification no. = rs4971757
  misc_feature [331]..[331]: allele = g, in linkage disequilibrium with rs9309219, respectively
  misc_feature [331]..[331]: n is a, t, c or g
gaaaaaaaatgactcctaatgttcaatggtatttttattttacatccactaacagaaatacaatttacattgtttttgaagagcagagacacaatgttcatttgttcagcatgacagggttcaaaccagagattttatttggaaattccataatatatttactttacatctcattgcagaatttctctcttacaaatccattatttaaaatatgcatgtctactctgaaaatttccataatatcttaaaggttaatctttttcatccttaggatggaatgattagagttgatgccctgcctaaccttttatcattacttatggttgggganataagttagtctctgtgtgaacaccagtattttatttccgaaaacatgaagcagtcagcggaaagtataaggataagagttttctaggtaaagggagtggcttgggcaaagacccagtagaaagaaaggtcatcccaagttcatttacatagaattcaaagttccaactggggaatgaaaagagatgatattggaagaggaacaaagaaaatcaaatccctcccctccccctccctttccttccctcccctcccctcccctccccttccctccccttctctctttctctttttctttctttctttcgttctttctttcttttctttctct

SEQ ID NO: 1039 - DNA, 661 bp, Homo sapiens
  misc_feature [331]..[331]: Chromosome 2, SNP identification no. = rs4353689
  misc_feature [331]..[331]: allele = a, in linkage disequilibrium with rs9309219, respectively
  misc_feature [331]..[331]: n is a, t, c or g
ccctcccctcccctccccttccctccccttctctctttctctttttctttctttctttcgttctttctttcttttctttctctctttcctttctttctttctttcctttctttcttttctttctttctttttctttcttctttctttccttctttttctttttttctctctcttccctctttctcctattttctttccttccttctttttctccttttttccttcttccctcttcttatacttccctctccttctttcattcagtattgtttgttttgcagattaacaagcatccctaccaaaccctgtcttgaagcatccctaccaaacnctatcttgaagtcaaataattagctgtcatctttatctttgtgggatcatgggatcccctaagatccttattaatgaaattgcttctcattttattctttgcctgctctcttgctctttcacctaagtgtgatttatatacagaaaagtaattgaaaactatctggtcttggtcaatttgaaaagagtttttctgtattttatgagatatttgcagttgaccaagcttcttctattagcaagttctcaagtcagtttcctgtagatgggatttagttctgttctgtaacaatgcacactgaatttctcatttgcccttaagctccttggc

SEQ ID NO: 1040 - DNA, 661 bp, Homo sapiens
  misc_feature [331]..[331]: Chromosome 2, SNP identification no. = rs4316974
  misc_feature [331]..[331]: allele = c, in linkage disequilibrium with rs9309219, respectively
  misc_feature [331]..[331]: n is a, t, c or g
ccctctttctcctattttctttccttccttctttttctccttttttccttcttccctcttcttatacttccctctccttctttcattcagtattgtttgttttgcagattaacaagcatccctaccaaaccctgtcttgaagcatccctaccaaacactatcttgaagtcaaataattagctgtcatctttatctttgtgggatcatgggatcccctaagatccttattaatgaaattgcttctcattttattctttgcctgctctcttgctctttcacctaagtgtgatttatatacagaaaagtaattgaaaactatctggtcttggtnaatttgaaaagagtttttctgtattttatgagatatttgcagttgaccaagcttcttctattagcaagttctcaagtcagtttcctgtagatgggatttagttctgttctgtaacaatgcacactgaatttctcatttgcccttaagctccttggcccagtgacataccactttaagtttaatcagacaaaaaaatcacaaaagctcccagtctcgagtgaccactgaccttttgtcctgaaagcgtgaagagaagaaattttccttttttgtgaagtttgtgtgagactcactacatacctgtgtgccgtgtttatttcaaattcattg

SEQ ID NO: 1041 - DNA, 661 bp, Homo sapiens
  misc_feature [331]..[331]: Chromosome 2, SNP identification no. = rs10182761
  misc_feature [331]..[331]: allele = t, in linkage disequilibrium with rs9309219, respectively
  misc_feature [331]..[331]: n is a, t, c or g
tttttctgtattttatgagatatttgcagttgaccaagcttcttctattagcaagttctcaagtcagtttcctgtagatgggatttagttctgttctgtaacaatgcacactgaatttctcatttgcccttaagctccttggcccagtgacataccactttaagtttaatcagacaaaaaaatcacaaaagctcccagtctcgagtgaccactgaccttttgtcctgaaagcgtgaagagaagaaattttccttttttgtgaagtttgtgtgagactcactacatacctgtgtgccgtgtttatttcaaattcattgtgacccaagttaangctgtctctgtcagttggaaaaccagcactatgctttgttgccactataaacaatcctttctagtagctacctccctgagtgtacaattttcatcacaatttttttgaacagagtcaaagaagatatgataaagactcagataactgcttactagggcttgactaaataacttatttattaaagccatagttctttagcaacaagtgtttttaagacaaggtggcaaacttctcctctcattgggacatggaaacctctgtgtcctaccgctcacattatcccacctgcatgtgattgatcttttcagttcataatacaacacccctaaa

SEQ ID NO: 1042 - DNA, 661 bp, Homo sapiens
  misc_feature [331]..[331]: Chromosome 2, SNP identification no. = rs9309219
  misc_feature [331]..[331]: allele = c, g
  misc_feature [331]..[331]: n is a, t, c or g
atctgcccgcctcagcctccaaaagtgctgggattacaggtgtgagccactgcacccagcctaggatcacgtattatgaatatgtagcttctttttatctcttctgatgttgcaccctaaatacttttgattttcagaagttagtgagcagggaagctagtatctgtatgattacacagagcccaagtatagaacatatgatgggcagcgagacattatcaaagttttctgttttgagtagctgtaagaatattaaatgcctagaaagtcaccttttgcaatctagacctttttctgagcattgctgactttgtatatttaaatgtttaantgtgcttctatgacatttcaaatatatttttgttcaagaatattcactggttaaacactgagtatctttcagtttgttcttaaaaataagttcccctctaaaaataagaatttactaaagctgaatacacatgtttgggtcacacaaattagattagccttctgagagatgcagtacttgaaaacaaatggcagctgtggagaaagaaacaaacaaactaaaatttttgcacagagagataagagtttttactttttgtttaaagtgtaagtagggtttcagagattccaggaagaagatgtagtgtataatcttagccaatagaccgca

SEQ ID NO: 1043 - DNA, 661 bp, Homo sapiens
  misc_feature [331]..[331]: Chromosome 2, SNP identification no. = rs11125373
  misc_feature [331]..[331]: allele = a, in linkage disequilibrium with rs9309219, respectively
  misc_feature [331]..[331]: n is a, t, c or g
ttcctttactctctttttttttggtttcttttctattttctttttttttctttccaaattttattttaggttcaaggggtacatatacaggtgtgttacatgcgtaaacagcatgttgcaggtgtttcgtatacaaataatttcaagtactcagaatttgggagggagaggttaaatccagaagtcttccctttccctgtgccttttctatataatctccatgctctgagagaagtctcatgttatttttctgattttaggagaatgattaggcaacatttgttagtgtgcaggattccagtacaccaacagattctgtacataacaatantgcttttgctaggatcctcttccaaattggtaagagcagttagttaccccacttaaggcctgttcatactagttcttcttgcatcacacaagaagtttaaacaaaggttttcatatgactttgtacttcaggctggctggtcctcagagctgtgtttgagtttgaggttgaaatgttagagatacttgttactcactaagtgacatacttttaaccagagagacctgaatccagatttcaggtactagctcaaatcttagtaaacaggatttaatatttgtgtttgccattgcttgcttattgctctttgtgtataattctcccttcagt

SEQ ID NO: 1044 - DNA, 661 bp, Homo sapiens
  misc_feature [331]..[331]: Chromosome 2, SNP identification no. = rs11563094
  misc_feature [331]..[331]: allele = c, in linkage disequilibrium with rs9309219, respectively
  misc_feature [331]..[331]: n is a, t, c or g
tagtgtaaaatgataacattgaattaggaatgatgactacagggaggaagtagagtaaagattgtagatgccattttcatcagaggaaaggaaggacagggacttcattttggagcaatttgctaatgatgaggcaccgatggtactgctaagaaaactggttgaggacagtgaagatgttcagtccttaggctgtggatgtgtcagtggttaaagaggtaaaaacacccagtagaactggggttaagttacaatgataaaaatcagataatttaattatatggaagtgattaaaggaaattagaaaaataatttagaatagagggacganagaagagcaggggagggaatggaaagggaagaggcagaaagagaggaaagggaataaagaaggagggaaaagaaaggaaagaaagaaaagaaaggaaggagaagaggtatgagaaaacctatgaagtggtaagaagagattaatctcagtttgggggcatacaaagttgagagacatgaaaaaggaaaaagaaagcaggatttttttagttgctcttgataatctaaagagtatcaaggtcaagggtcacaaaaaacgtaaaaggagaaaaattttagaaaaatcaaacaaaaatctggtagtgtcaaattctgccaacaaattagggaa

SEQ ID NO: 1045 - DNA, 661 bp, Homo sapiens
  misc_feature [331]..[331]: Chromosome 2, SNP identification no. = rs2048848
  misc_feature [331]..[331]: allele = g, in linkage disequilibrium with rs9309219, respectively
  misc_feature [331]..[331]: n is a, t, c or g
tgaggcaccgatggtactgctaagaaaactggttgaggacagtgaagatgttcagtccttaggctgtggatgtgtcagtggttaaagaggtaaaaacacccagtagaactggggttaagttacaatgataaaaatcagataatttaattatatggaagtgattaaaggaaattagaaaaataatttagaatagagggacgacagaagagcaggggagggaatggaaagggaagaggcagaaagagaggaaagggaataaagaaggagggaaaagaaaggaaagaaagaaaagaaaggaaggagaagaggtatgagaaaacctatgaagtgntaagaagagattaatctcagtttgggggcatacaaagttgagagacatgaaaaaggaaaaagaaagcaggatttttttagttgctcttgataatctaaagagtatcaaggtcaagggtcacaaaaaacgtaaaaggagaaaaattttagaaaaatcaaacaaaaatctggtagtgtcaaattctgccaacaaattagggaagatgtagacagagaaaggcccataggatttgggaatttggcaatttgatctgtactgattgaatgagagaggttatgcagtagaatgatgaggaagacagattactgggcatgaggagataatcaatag

SEQ ID NO: 1046 - DNA, 661 bp, Homo sapiens
  LOC442016
  misc_feature [331]..[331]: Chromosome 2, SNP identification no. = rs13034739
  misc_feature [331]..[331]: allele = c, in linkage disequilibrium with rs10496032, respectively
  misc_feature [331]..[331]: n is a, t, c or g
tttatgtattcttctgactcacatatttagattaagattctattcccaaggtttatccatttcatggctgtatttcattcagtttcacctgctgtatagtattctaacgtgatttatttattcattgtactctagatggagatttggattgattccaggtttttttgctattgtgaaagggttgctgtgagtggtttttgtacacggctcttggtacatatgtggaggcacacacacccatttgctgtctctagggaatgaaattttctggctcacagggcatatgcatcatcagccttagtagagaatgtagaactgttttttacaaagngattatgttgatcgtgttcccactagccataagtgttacagttccaaagccttgccagtgcttcacataccaggcttgaaaatcttgtccagtgaaacattatctcactgtgatttttatttacaatttctctgattattgagtttgaatgtctgtttacattattaaccatttgggttcttcgttttgtgaagtacctgttcagtcttttacccatttatcttattaatttgtagttctgtatgtagattactactaatcctttgtggattacatgtcttgcgacaattacttctcagcttgtgttttttttcttaactcgaatttgtg

SEQ ID NO: 1047 - DNA, 661 bp, Homo sapiens
  LOC442016
  misc_feature [331]..[331]: Chromosome 2, SNP identification no. = rs7593062
  misc_feature [331]..[331]: allele = t, in linkage disequilibrium with rs10496032, respectively
  misc_feature [331]..[331]: n is a, t, c or g
cacaacccacccacctcgctcacacgctaagtgaccttgggcaaactgcctagacttctttgtgtccctcaacatcttcatctgtaaaatagtcgtaatgagagtatctaccacataggattattaaagccaaatgaggtaattcagcgcttatcacaataaattttaatgattataaaatgtggaatttttgcttagtttgacttaatattatgctttctttcaaataaacagtttgatttgtttagaaaaggtatattctagcaaataacaatcatttagataaataatgctaagttccatctgtattaaacctgttcctatacatcangtcaaaataataggaaaggaaaatctgatttatatatatgtattttttaaacaaacaataaaatgctaaagccttagtagctaaggaaatgatatgagcagatagtttataaaagaagaaatcaaggaggtcgataactgtaagttcaaactcaccagtgtatgaaatacagactaaattaattaatttttccacttaatggatagatattatgctctgggctgctgtgagatgggagctctgcatcacctgttgagagcatattttgattaatacaaacttaggggaaaacagttgggttatatatatgtaacagaagccttaaatgct

SEQ ID NO: 1048 - DNA, 661 bp, Homo sapiens
  LOC442016
  misc_feature [331]..[331]: Chromosome 2, SNP identification no. = rs6710809
  misc_feature [331]..[331]: allele = a, in linkage disequilibrium with rs10496032, respectively
  misc_feature [331]..[331]: n is a, t, c or g
gtttgagaccagcttgggcgacatggtgagacctggtctctacgaaaacaaacaaaaagaacagaatgtaggcagtggtggcatgagtaaggttctaaggtttaccatctttagttgatcttgctcatttcccttggtatcagttctccttccttacttggtgagtgcttaacctttctttgggcagtaaggcatgacatttctccccaggttgagcagttttctgatacatattttttggctgagtgtgacttgtatctttttggactaagctccattcactcagatggtggtctgatttttttttttttttcagtcaggcattgtgcanagtgacctgatgggaataaatggcaggttggttgtgtaatgcagcaacatcttacttggttgtctttagagataagtgggacgtgattccagcaaggctgtgcatcaaatgttggaatgtgttggagaactgccaagaggttgggagcaagctgtgtgacaagcactaatgcagccttggcctgccttaaaatagctgcaggttaacaaatatcttgaaacttggcatttcttttgagcaaaattgctcctctgaatgtgttaccaagaggtgctttcctcttttttatcgatttttttttttttttttttgctgttccaactgtcttaa

SEQ ID NO: 1049 - DNA, 661 bp, Homo sapiens
  LOC442016
  misc_feature [331]..[331]: Chromosome 2, SNP identification no. = rs4129261
  misc_feature [331]..[331]: allele = c, in linkage disequilibrium with rs10496032, respectively
  misc_feature [331]..[331]: n is a, t, c or g
ttgggggggaggcggttggtaagggtcatgttttctataactatactttatttgcctttaaatcattgctatacacaacacaagtcatctgcaggcagagaagactctgcagtcagccttcactgacatccctgggcctgaaaatgtttaaacatttcaacttaatcaaagtatctggtcaaatatttaaccagatctttttctattttaaaacaacctttactttccttcagcctggccaggcagccaggacactcagttgtttgttatttttattaaaacaaaggtggacatgcagtaggttctggcttttagttccatacacaatggnctttcctcctttccctagtaataaaacatatatatatatacacatatatatacacacacactcacatatacgtacatacatctttttttatctctggtattgtgtattttcagaacactttctattttcccagcaaatgtttaaccattcatgctattaacagtttgacaacatgaaaacagtaaacatgagcataaacttgtaggcttacttcatttatataattttaaaatgcatcccaagtggttccaattagcagaagtaagatgcctttcaaggttcagcacactggaaatagttgcaaggacaccaagtacttccacatatctg

SEQ ID NO: 1050 - DNA, 661 bp, Homo sapiens
  LOC442016
  misc_feature [331]..[331]: Chromosome 2, SNP identification no. = rs13390258
  misc_feature [331]..[331]: allele = g, in linkage disequilibrium with rs10496032, respectively
  misc_feature [331]..[331]: n is a, t, c or g
tgtttgttttccaaactctggatatgatgcctctgttaaaccaagtccctgaggaaaagcttcaccagattaatgatacacttggtgaaattagtaatggcaagtaaaggttgagatttgtgcctgctggacaagagtgagccagagcaaatggattttggaccaataccggctttttaattgctgccatttaaagagtttaatgtccccagtgaaaaagcacaggtttcagataatcttttgaagaaaaatgcatagtggtaagagcttactgttaggcgcagagagtgtgtggatgggttagccaagggaaggaatccaattaaagctntttgttcggagtactagatttggaggtgtgttttattgttaactggtaactttccagaaaatgaattatttgtatataaagattgatactagccaggctttatatactgacagttatttgtaaaacctctttgcttcctccttttaccttcttttctgagctgtctcttttcctccgcatggcttcctttataaagcagcccattttttggacatggttttgctattgatgagcctgaggtgtggcatagtaccacaggattgcatgatgagtgggatatttggcctcattatttacatggcttagtttttggtgtttgaagtgcctggt

SEQ ID NO: 1051 - DNA, 661 bp, Homo sapiens
  LOC442016
  misc_feature [331]..[331]: Chromosome 2, SNP identification no. = rs17343815
  misc_feature [331]..[331]: allele = g, in linkage disequilibrium with rs10496032, respectively
  misc_feature [331]..[331]: n is a, t, c or g
ccctccactattgtcctatgaccctgccaaatccccctctgcgagaaacacccaagaatgatcaattaaaaaaaaataataaattaaaaaaaaaaaaagaaaatctaagttctaaccatagaagaagctgcagaagaaatgaagaaagggatgataatttagattttgatgttgatttagaagacacaggaggaggccaggtgtggtggcaagagccttgccggggtcttctgatgcttgtattgaaaaaactgcttttgctttgtaacaagcaaacataagtgttggtacttttgctctgagtcatttacgtgagatcatttatcaaacngcgctgaggaccagtttttgaggctagcaatataataatgtcatcttatttttatatgagctagttcttacataaccatcaattctgaatctggtttactttggtattaggtaatatacacagtttatattgttcatgtataaaatttgtttttctatagctttttctgatttcctcattaggatttcttttttttttttttttttttgctgctttttaactttttcaaaaatcagcacaatttttccctttgaaattaaatagattacttggtttccaacatttaattttgtctattatcagaaaaagttttcacgtaatgaaattaag

SEQ ID NO: 1052 - DNA, 661 bp, Homo sapiens
  LOC442016
  misc_feature [331]..[331]: Chromosome 2, SNP identification no. = rs17415725
  misc_feature [331]..[331]: allele = t, in linkage disequilibrium with rs10496032, respectively
  misc_feature [331]..[331]: n is a, t, c or g
tgaaaaaactgcttttgctttgtaacaagcaaacataagtgttggtacttttgctctgagtcatttacgtgagatcatttatcaaacggcgctgaggaccagtttttgaggctagcaatataataatgtcatcttatttttatatgagctagttcttacataaccatcaattctgaatctggtttactttggtattaggtaatatacacagtttatattgttcatgtataaaatttgtttttctatagctttttctgatttcctcattaggatttcttttttttttttttttttttgctgctttttaactttttcaaaaatcagcacaatntttccctttgaaattaaatagattacttggtttccaacatttaattttgtctattatcagaaaaagttttcacgtaatgaaattaagcaatataatattaatggaaaacattattctcaggactaattactgcgcacctttgatgtgtacttgtttgcatttactatatgcatgacatactactactgtacaatgaatcgcagtgcagagtaatgatgattcaataaatgtagatctattttgcatatttgcacaacttaagaaataccaacatcattttctctgagaagccttccctgattttcagcctaggtacaattcctcagacat

SEQ ID NO: 1053 - DNA, 661 bp, Homo sapiens
  LOC442016
  misc_feature [331]..[331]: Chromosome 2, SNP identification no. = rs13021031
  misc_feature [331]..[331]: allele = g, in linkage disequilibrium with rs10496032, respectively
  misc_feature [331]..[331]: n is a, t, c or g
aagtaccttgaaaaaatatggcaatatgcagttgcaagttgctgatttttagaatcataattctaagccggatgtggtggctcacacctgtaatcccagcactttgggaggctgaagtgggtggatcacttaaggccaggagtttgagaccagcctggccaacatggtgaaaccccgtcttactaaaaatacaaaaattagccaggcgtggtggtgtgcatctgtaatctctgttcttggaaggctgaggcatgagaatcacttgaacctgggaggtggaggttgcagtgagctgagatcgtgccactgcactccagccaggctgacaganagagggcaccctgtctcaaaaaaaacccaaaaatcacaattctgatttgagagctgatgacagttgcagatgattaagagcttttacaaagagcgtgcatacatttagcaatctctaattgggaatgttttggaaaacactcctgagaatgtaggttatttatagaagatgtcctttactttgatataatcttcctaatgtggtttttatcagttggatttttctggatcaacgagaagacctatgagcctaaaatgtttgtaattctagctgtgtttctataagaacatgagagaacctcggcattaaccattcttgctggtctcacag

SEQ ID NO: 1054 - DNA, 661 bp, Homo sapiens
  LOC442016
  misc_feature [331]..[331]: Chromosome 2, SNP identification no. = rs12713259
  misc_feature [331]..[331]: allele = t, in linkage disequilibrium with rs10496032, respectively
  misc_feature [331]..[331]: n is a, t, c or g
cactttgaagtaattggctatcttattaatctgctgttcctgaatttccccttagtagcggacatgctttattgtattaagttggataaccaccttagtagcaaagatgggcttgggcttcagtctggtcaataggcatcttattcaggtagatgccagatgggagggatggggacagcttagtgaagaaggatgaggctggaggtgactcttgaaaaatgattagtgttagttggaaagattaaggtgtgggagagtcccacgcaggggaacagcaggcagaaagccagggagagagaaaacagtgtgttttgaggacctcttctgctgnggctggaataaagagggctgtgttgaagagtgaagggagctgaggccaggcaaaaactcttgcatgccttgagaggaggttttacccaaaagacaagtgaggagggtggtgaaacattttagtcaagcttgtgtgttcttcaaagctcgtttgagctctggcatggaagaggatggatttcagttgggcaaaattcagagcagggaaaccagtcaggaagttgtggcaataatttggttaagaaactctaagggaccttactaaggtcaaggttagactttgtaaattttggggtccagaaaaactgttaataaacttaaccgacaggaa

SEQ ID NO: 1055 - DNA, 661 bp, Homo sapiens
  LOC442016
  misc_feature [331]..[331]: Chromosome 2, SNP identification no. = rs7600596
  misc_feature [331]..[331]: allele = a, in linkage disequilibrium with rs10496032, respectively
  misc_feature [331]..[331]: n is a, t, c or g
aacacacttcactgcagtctcaacctccttggctcaagcagtccttctgcctcagcctcttggtgtggctgggaccacagatgcatgctgccatacctagctaacttttcttttctttttattttttggtagagacgaggtctcgccgtgttgcccaggctggtcttgaacttctaggctcaggcagtcctccaccttgcctcccaaagtgctgggattacagtcatgagccactgcacccagtttgtttctctcttttttaaatccaaatttttctattaggctttgcaaataggcccttaaagaaataggcagcatggctggtaaacanattttgttctttagatgtttccagagaaataatgtggtattttaagagcttttaacaagagacctcaagataattatttttaggatataccataatttaaaaaataacttctgaatatgagagtaatacattaaagaatattcctgtaatcctagagctaagccatgctataattctggtccagtttacggtttgcgctcacatatacactcacatttttataccctttgtttttatgggttgtattcatgctaaaaaattgttttgaaaacactttttatggctgtataaagtaggtgtaccctatttctaaagtaggtgtgccctatt

SEQ ID NO: 1056 - DNA, 661 bp, Homo sapiens
  LOC442016
  misc_feature [331]..[331]: Chromosome 2, SNP identification no. = rs10496032
  misc_feature [331]..[331]: allele = c, t
  misc_feature [331]..[331]: n is a, t, c or g
tggggatttttttggttgtataattttgtttaaaaattctgggaaaaccataattactttattaaaaagcaagtaaatcaaagaatatagttaatttttttattaacaggtgcagtttcttaattcatattaaagaaaaatagccttggtctagtagacattttaactaaatgaagggaggatggtccccttctagaagtacacatgggcttatacagtagttctttgttacccagtgataattatttcatctgtgctattcccaaaaagtaaccatctatgggaactctgttgttcccaaaggaagatttactccccatatcagaaatangttaaaaaaaagtataaataggccaggcacgatgactcacacctgtaatcctagaactttgggaggctgaggcagggtggattgcctaagctcaggagttcgagaccagcctgggcaacacagtgaaaccccgtctctactaaaatacaaaaaattagccaggcatgttggcgggcgcctgtaatcccagctactcgggaggctgaggctggagaattgctagaacccaggaggcggaggttgcagtgagccgagattgcgccactgcactccagcctgggcgacagagtgatactccgtgtcttaaaaaaaaaaaaaaaaaaaagtatg

SEQ ID NO: 1057 - DNA, 661 bp, Homo sapiens
  LOC442016
  misc_feature [331]..[331]: Chromosome 2, SNP identification no. = rs6740698
  misc_feature [331]..[331]: allele = c, in linkage disequilibrium with rs10496032, respectively
  misc_feature [331]..[331]: n is a, t, c or g
ctaaaatacaaaaaattagccaggcatgttggcgggcgcctgtaatcccagctactcgggaggctgaggctggagaattgctagaacccaggaggcggaggttgcagtgagccgagattgcgccactgcactccagcctgggcgacagagtgatactccgtgtcttaaaaaaaaaaaaaaaaaaaagtatgaataacagtaacagctaacattttttttggaatacttttatcttctacatattattagaagcatttcacatgtattaacttatttagtcatcaaaacagttctagatgtaagttcagttatttttctgtttaacagatangtagacagaagcacagaatgttagtaacttacccaaataaatgatcaacttatatgaaaacatatccatcatcactagtaagcagacttgcaaatgataataacaagctatcactttggagacctgcagtgatcttagaaacttaatacttgacgctgattaaggtagaaggaaacaggccctctgtacaaggttgatgggagggtccatttctgtagagcagttggtttccttctagaaaatttatcctatgaagataattggacaaggttataatgatattactgtgctcatggaagtattgagaatagtgaacaactatgtgtcctg

SEQ ID NO: 1058 - DNA, 661 bp, Homo sapiens
  LOC442016
  misc_feature [331]..[331]: Chromosome 2, SNP identification no. = rs12990732
  misc_feature [331]..[331]: allele = g, in linkage disequilibrium with rs10496032, respectively
  misc_feature [331]..[331]: n is a, t, c or g
cttcttaggtttttaaactttgaacaactgcctttcctcaaaggcaaaactaacttttttgggaattgcagaaatcgtaactccccagggacagctcaccctcagtcctccaagccatagaatttaaagactgccttgatgccaccaaaaacctcagtaccttttgttacagaaagaacattgtgtggtatacttcctatgttttgaaaaatatctgcaaatattttgggaactgaattttgggaagggctaccctctggctgaactctgcttacaaaatccataaaaacagggttccagctctgcacagcaggacaggtgcaagtgtgcnccagtaacctcacagccggagaccatctctacaaacatcctgccaggagaagagtagagaataacaaaggaaaaaaacaagccctccagttggcattcttgttgaggaagtccatcaagaatcaagttcctgtcaacttgtttctgtattcttttgcttaaagaatcacagtagagagtcccaatctgaaaaaaactttgttatatttcttaggttggggatacatacagcatggagttggaacttcagtctgtggagccaaacccagactgaaaggcagcaagagagtagcagctaagagcatagactaagtgcttccactgggtggag

SEQ ID NO: 1059 - DNA, 661 bp, Homo sapiens
  LOC442016
  misc_feature [331]..[331]: Chromosome 2, SNP identification no. = rs11883910
  misc_feature [331]..[331]: allele = g, in linkage disequilibrium with rs10496032, respectively
  misc_feature [331]..[331]: n is a, t, c or g
tacataactattcatccctcagtagctgagtgtggttacaatgaatggctttcccatattttcttgatgcttctaaatgtatgggttcacttttggggggaatattttggtgctgtcataatctatatatggaagatgttaaggatatttccaggaactgcattaaaacagccataacaaaccatattctgcagccttcaggtgtagtattttgattgcttggtttggtttatcaccaactactcttctgagtatcccccacactatattaggaatttgttacaatatgactaatgctgaatatgtgtgcattgatttttaagtgcactgngtgggactgacttgttcaaatctccgttaaagcaaatgtctgattaggagaaaagtaagggagtaatttgttaggaaaactactttctgaggtgcccccacctcccctccttccaacctgaagaggcagagaggtttgtgtaaacaaaggtcctgcaaggcacagctgttttacattctgatgttctatgactttcttaaataaaaaccttttggattttcatatctatttagctagtaggaatatttcctcctttttcggagaataaaatcctagacttaaggatattccttgggtgactgagaagtcataccagcctaagcagtacag

SEQ ID NO: 1060 - DNA, 661 bp, Homo sapiens
  LOC442016
  misc_feature [331]..[331]: Chromosome 2, SNP identification no. = rs17045939
  misc_feature [331]..[331]: allele = a, in linkage disequilibrium with rs10496032, respectively
  misc_feature [331]..[331]: n is a, t, c or g
taaagaaattcagagtggtctggatgccctgatcttttcttctaagttttttccccctactgggagaacgcagaaacttgctgattccttttgctcttatacctgattgaagacttcaccagctaagatcttattttcattttgcagtcatttgagcgatagtaggagccagataagtttgaattacaagcccatgcagctttggacaggctgtgcattatcctgtgactttctggaaagtgtggtgaggtatccccagcctgggtgttgggctgattggcttggttggattagggtctggccccacagtagacatacttaacatacttancttatggctgtcacctatgataaatgcactgtaaatcagagatctcctttgtggttctaaacttatggcaatattttaggcaccatcgctcatttttcttgtatactcatgtttagatattctggaagccaaagtgaatccacatttactttaactgacttttgttaccaagcttgatattgagttcctttgaaaataagcttttaagcagtcatgtgcaggcctctaatggattccagactgtgtagactgtattgttaaacaatattttgtttttaaaaatttttttcttcggattgatcaggtttaaacaaattttagtaatagaat

SEQ ID NO: 1061 - DNA, 661 bp, Homo sapiens
  DKFZp547I014
  misc_feature [331]..[331]: Chromosome 2, SNP identification no. = rs3796022
  misc_feature [331]..[331]: allele = a, in linkage disequilibrium with rs10496032, respectively
  misc_feature [331]..[331]: n is a, t, c or g
ctagaaaggttaagacaaatgatggatactaaggacagctggaggctctcctctcaaactgtaggaaagaccacatgcaaagaacaaggaactgttctgtagtttgcaaacaaaatggtcctttagaaaggagataatacatagcctggaatcagaaagtaagactcaagatcaaaggtaactggccatcactagcatactggcctaaagactcaaatgaaaatacaagaaaaagaggtgagagattaaaatacaaatcactttactagcacaagccagggtcatgatctccatagagttccatgttaatgaatgataatgaagccccaantctagagtgactgattaatcattcattcaggccagctcaagaaagatctttaaatcaacaccactcaagagacaaattatcctaaagcagctgaatagtttttctgtagtacattgttagctgtacccccaacatccattctcctcttcctcttttctgttatattccaatctttctagccaacttgtttggttgagactgaccaaactttcactctaaggggtgcatcctgtttagaagttaacagcacatgagattctccaacaccagcgggagaagcacatgatccaagtcatgatcaatcacgccagtgagactgatatatccggg

SEQ ID NO: 1062 - DNA, 661 bp, Homo sapiens
  DKFZp547I014
  misc_feature [331]..[331]: Chromosome 2, SNP identification no. = rs4319969
  misc_feature [331]..[331]: allele = a, in linkage disequilibrium with rs10496032, respectively
  misc_feature [331]..[331]: n is a, t, c or g
taacctttctaggatgtttacctaggtccctcagtaactgtagtcataataatagcaagcactcaatatagtacttatactgtgtgccaggcactgtgggaaatgccggcatatattaacagttaatcccataacaatcatatgagagagattattactgtctacattgtatagatgataaaacaggttccagagagattaagaagcttgcccaagggcttactgctgctaagtggctgaaggcatactaactctgcagtgtatactctttttcagtattcagtaaagtaaaaaaaaaaaaaaaagatgtaaagctcattggcagagagcnttgctagtgaggtaattcaaacatgttaaaaagatctttggaattctcaggaatgcatcctgtggtctagaagaaaccagggcaaaatattgaaaaggaaagatgctgcttccaggttaaatgatactggatgggggggcaggaattgcattcagtgaatttacaagataccaggaaacccatctgttggaggaaggtaatgaaggaaattatcttatcctacttattattttacttccttattctgtgggacagaagaatctcttgagtcctctaaaaaactatatgctgatagcaggagttacagaacaattcagtagtgtctggaat

SEQ ID NO: 1063 - DNA, 661 bp, Homo sapiens
  SPTBN1
  misc_feature [331]..[331]: Chromosome 2, SNP identification no. = rs11904679
  misc_feature [331]..[331]: allele = c, in linkage disequilibrium with rs10496032, respectively
  misc_feature [331]..[331]: n is a, t, c or g
gacatcattgactgatgggtacctgttattgggtgaggctgataagaattttgccattcaggtttaaatttctgcagacgccttagactttttgaacatgtatgtgaagtcgccttattagtcacaagattgtgtctttaggcatcctaagaaacagatggactgaagtcggagatgccgggccatttgcgggttctcagcccttccctgtgttacatgtttacctattggttcactctaagtttgcaggaaacccaagctctccccactgcctccactctgagctccagccctggccaggagccctcttgcctgtatggttcacagtaanctttcctcttcaagaaacttccttggcccttgctattctgtaccccatgttctctgtgtcttattagtgtcatgtgtgtacttaggtgggtgtatccatagtctccctccagctgatgactaaattccttgaagacagtgacagtggtaacatttgtttccacattccctacaagcacctcacctaagtctgaatgcacctctgctttttattgagtgcttgtcagactgaagaactcattcatggtcagagctattaattatcactttcatctggggaaaatttcctcctaatttttgtgatacctattaaagatttctttgtgtttaa

SEQ ID NO: 1064 - DNA, 661 bp, Homo sapiens
  SPTBN1
  misc_feature [331]..[331]: Chromosome 2, SNP identification no. = rs4261758
  misc_feature [331]..[331]: allele = c, in linkage disequilibrium with rs10496032, respectively
  misc_feature [331]..[331]: n is a, t, c or g
attaagtgaaaacaagtctgtggtcagcagaaaagattttcagttttcacagaggagagttgttgtcagtagatgaaagggatttcaggccaagcaagcagtgccatgaatggcctgaacatgcatggctatgtcgagatgccatgagaagagctgcagaaggagctcaaggcaggactataggagtgaacgaggagtgccgtggtgccaaagagtttagcctttatcctgtaggccagtggtttccagaatctatctcaggagaatttttattttcaaatagaaaactgttaattaatctcaatatgtaaaactaccaacttggagttangctagaagcagcagaggaccctcccctagatttccatccccagggggctcaaggccattgtgactgcccctgagaaccactgatgtggaatttgtctcagaaggatccctctggggacactgtgaaggaaggcacagggaggaacgccattttaggggactgttgtgttcttccagggaagaaacaaggccctgaagctgagattgtggctgagggcttgagaaagcagggccttttcaactgttgaattagacttcctaggacatgctctccaaggggatgggaaagggaagaggaaggaagaggaatttggtttgggttctgtgaagc

SEQ ID NO: 1065 - DNA, 661 bp, Homo sapiens
  SPTBN1
  misc_feature [331]..[331]: Chromosome 2, SNP identification no. = rs13021615
  misc_feature [331]..[331]: allele = g, in linkage disequilibrium with rs10496032, respectively
  misc_feature [331]..[331]: n is a, t, c or g
gagagagacatggtcagtgtagaacaatccaagtcagacaggctggctcttaccggaagagggttggtccttcatgggggttatttagctttagtgctctgttcctctttgttgagacagctgtagttaggtataaggggataataaagaagaaatattactaaattcccgggaggattatttataatacttaaaatgtgtgtatcactttcatcttggagaacattatagaacattactataatactaatagaagtctttggaaagcattatatcccgtgttacagatttcagtctgagattttctgaatcaggttgttgtttaccccancttgctctagtggtaatataaatcagaggcttctgggttccaggcagtaattgaaagcttctgatgcctatctttgacctgccttttccaaccttcttggaaattgccttccttcacataagtatttgtagggctctgaatactctttaattaatggggggaaaatcttctacctctccctacaattactccatattagcaaattatgagtaagactttgagatacctcaggtatctcatttgtgatgtcagagtggttattgaacttactaaacctttcccagaagagccagaccttgcctaaacttaacgaaaaggtttagagttgag

SEQ ID NO: 1066 - DNA, 661 bp, Homo sapiens
  SPTBN1
  misc_feature [331]..[331]: Chromosome 2, SNP identification no. = rs6545430
  misc_feature [331]..[331]: allele = t, in linkage disequilibrium with rs10496032, respectively
  misc_feature [331]..[331]: n is a, t, c or g
attaactttcaagtatggtggacctcaggagaattacacacatttgtcagcatccttcagaacaaatgaaccgattgcattttaaacaatcctaggagaattttgattaaacacacacacacaaaacctttctttaattcccatccctggttttgtgttttgtttggtatttgtagttctgattatcacatatttttgataacatataatttctatctgctgatttaattttgtacattcctgcaagggtgcctttttttactcttctgagtataatctttcctagcacataatctctgaatattggcaaaatgctcctctgaaactgtantgggttttttgttttcgttttaagagacagagtctcacgctgttgcccaggctctagtgcagtggcacaatcacgactcaacagcagccttgaagtcctggctcaagccatcctcccacctcagcctcccaagtagctgggactataccatgtctggctaatttttaaattttttgtagagacagagtctcaccatgttgctcaggctggtgttgaactcctggcctcaaatgatcctcccgccttcacttcccaaagtgttgggatcacagatgtgagctaccttgccagtcctgtactgggtttaatgcctctgatatgaacttattt

SEQ ID NO: 1067 - DNA, 661 bp, Homo sapiens
  SPTBN1
  misc_feature [331]..[331]: Chromosome 2, SNP identification no. = rs6734536
  misc_feature [331]..[331]: allele = g, in linkage disequilibrium with rs10496032, respectively
  misc_feature [331]..[331]: n is a, t, c or g
ctctcccccaaccccattttcaagaggcacaagacctttaagtagcaaatacagtaatcacagtagcatggagacacaggctggcctatatttggtttcacaaaggccttgtgaaagatctggccttaaagtccctttttaatgctgaaattatgcaagtggaaagttaatttgaggatcactgaggcacgctttattcatgaagaatgtgagcaaaacataaatacaaagtctggaggctctgttctacgctggtggcaaggaaattacataggtggtatctttatttggctgaatccccctccctccaccaagagtgcaactgtgatanaattttggagtgagagctattgttttaagcactgactggttgcaggtgtgtgtgtgcatgttgcctgaaactctctacaaaccatagacatgattttggtggaattggcgtgccaacagtggttacagctaagattgtagaagaccaaacattctgttggaatgtgaccttaacattttgaattatgtttcttaagtaagataaatttcgaaggtctattttatttttatctttattctttgaaggcctgctttaaagtttaccgtgtctttgaaagtctagtctgttgaactcttaaatcccagtgagttcctatagattgctagcttg

SEQ ID NO: 1068 - DNA, 661 bp, Homo sapiens
  SPTBN1
  misc_feature [331]..[331]: Chromosome 2, SNP identification no. = rs6734445
  misc_feature [331]..[331]: allele = c, in linkage disequilibrium with rs10496032, respectively
  misc_feature [331]..[331]: n is a, t, c or g
atttggtttcacaaaggccttgtgaaagatctggccttaaagtccctttttaatgctgaaattatgcaagtggaaagttaatttgaggatcactgaggcacgctttattcatgaagaatgtgagcaaaacataaatacaaagtctggaggctctgttctacgctggtggcaaggaaattacataggtggtatctttatttggctgaatccccctccctccaccaagagtgcaactgtgatagaattttggagtgagagctattgttttaagcactgactggttgcaggtgtgtgtgtgcatgttgcctgaaactctctacaaaccataganatgattttggtggaattggcgtgccaacagtggttacagctaagattgtagaagaccaaacattctgttggaatgtgaccttaacattttgaattatgtttcttaagtaagataaatttcgaaggtctattttatttttatctttattctttgaaggcctgctttaaagtttaccgtgtctttgaaagtctagtctgttgaactcttaaatcccagtgagttcctatagattgctagcttgagtgtatagtatttgagatgtgaataaagtctagtgcaaagtgtgtttcttgtgcttgaaaatggtgccctgatttctgttgagggaga

SEQ ID NO: 1069 - DNA, 661 bp, Homo sapiens
  SPTBN1
  misc_feature [331]..[331]: Chromosome 2, SNP identification no. = rs13391803
  misc_feature [331]..[331]: allele = t, in linkage disequilibrium with rs10496032, respectively
  misc_feature [331]..[331]: n is a, t, c or g
gtttttcctctacaaatatacatatatgatttcaatttggaggtgggatgttatttttttcacttgaaacacaaggaagcaatttttaaaagtcatactcgttcagcagtgggcttgactgtagccagtttgactaggagttcttggctacagaaccatacacttgcagtctttatcagggtagtaaattcagatgggtttttggaaagggagagggctggagttgagggaagggcactagagcagtgtgacccacggcccaggagcagtgtgagtgggaaggggctctagaagctgactgcctttgtgtttgccacagcgtgctgggaancagatgagaaggcgggcccagaccccaccagatactcatctcagccattgttgtcattaaatgactctgaaatgacctttcttacctcagtttcctgtgagctcatagttgtctgcagatgtgaattatgtcattgatctttgctccctctttgcttataaggagtagctgttctgctccatgtttctggaagaggaaagtgatgcacaggtcacttagtaaagcggtccccagcctttttggcaccagggactggttttgtagaagacaatttttccacagatagggtggaggaaatggggagttggtttcgtgatgaaactcttccac

SEQ ID NO: 1070 - DNA, 661 bp, Homo sapiens
  SPTBN1
  misc_feature [331]..[331]: Chromosome 2, SNP identification no. = rs4455200
  misc_feature [331]..[331]: allele = t, in linkage disequilibrium with rs10496032, respectively
  misc_feature [331]..[331]: n is a, t, c or g
acaatagccaacatttattggacacttatgtaccagactgtgctatttatgacatacattatctaatttcacaatcagaagaatgctagagatagggtcaggcgttatctctgtttacagatgaggaaagcaaggcttggagagaatgccatacagttattagtgtggcggagccggcctttgcacctggctgttgaccacgccctagcattaaaccattacctcacactgcttctccgagatagttatcttcttgggatcatttaggtgtggcaggatctggagggagcagttggacccaagtctcctagcagcagcctacacgtttctngagtctgttttgaaacaacttccttagccctagctgcgcagaaagcatcctcccctcagagtgatgatttttatcatgtggtttccttcctcctgcctttggaggtcaggtcttctcacccagggtcagaaagcccatcagttgctgataagctgcagcacttgagtcacagggtgcaggcctgtgtttagaatgggtcatgctcatgtcaggcacgtggggaatcagtgatcccatgagagctcgatcagtgcagtctggtttggaattgcaggtcacacccttccaccactttgctcatgtgtctactgatgcctgtgatgtagttag

SEQ ID NO: 1071 - DNA, 661 bp, Homo sapiens
  SPTBN1
  misc_feature [331]..[331]: Chromosome 2, SNP identification no. = rs7599241
  misc_feature [331]..[331]: allele = g, in linkage disequilibrium with rs10496032, respectively
  misc_feature [331]..[331]: n is a, t, c or g
aggtgtggcaggatctggagggagcagttggacccaagtctcctagcagcagcctacacgtttcttgagtctgttttgaaacaacttccttagccctagctgcgcagaaagcatcctcccctcagagtgatgatttttatcatgtggtttccttcctcctgcctttggaggtcaggtcttctcacccagggtcagaaagcccatcagttgctgataagctgcagcacttgagtcacagggtgcaggcctgtgtttagaatgggtcatgctcatgtcaggcacgtggggaatcagtgatcccatgagagctcgatcagtgcagtctggtttngaattgcaggtcacacccttccaccactttgctcatgtgtctactgatgcctgtgatgtagttagttaaaccactgacttctttctcctgcatcaaacatgactttttgaaaaagtgtgtgggggctttccagcatgaaccaggcataaaccaggtaccttcatgaacatattatttatcccttcagtcaccctgtgtgctaggtggtatcataactgctttgtggattgaggaacctgaggaccagaaagatgacttgaggtggcagcctcatttagccagcaagtaagaaaatgggtgatggtgaacttctgcagcaagagggggccg

SEQ ID NO: 1072 - DNA, 661 bp, Homo sapiens
  SPTBN1
  misc_feature [331]..[331]: Chromosome 2, SNP identification no. = rs4346422
  misc_feature [331]..[331]: allele = t, in linkage disequilibrium with rs10496032, respectively
  misc_feature [331]..[331]: n is a, t, c or g
tccaccactttgctcatgtgtctactgatgcctgtgatgtagttagttaaaccactgacttctttctcctgcatcaaacatgactttttgaaaaagtgtgtgggggctttccagcatgaaccaggcataaaccaggtaccttcatgaacatattatttatcccttcagtcaccctgtgtgctaggtggtatcataactgctttgtggattgaggaacctgaggaccagaaagatgacttgaggtggcagcctcatttagccagcaagtaagaaaatgggtgatggtgaacttctgcagcaagagggggccgttttcaacatttctgtgaantcaaggcgtgtgcttcgtctaaataggtggagacacgtaggaaggcatagtgtatacatccatcagcacatgggtagattttgaggttttttttgttttgttttaaatccagagcgttgtgtatttgatcattcttggagattcagccacattcacaggtgttaagtgtcacacctaacctagcaatacaatacacagctgaaagaaaccagtcaggttttcccaatatcaatttctttttattttcttttctgcaactccagaggattcaataatgtcaatttctgataaagcttttgctattgatgagtaaattcttccattaaaaag

SEQ ID NO: 1073 - DNA, 661 bp, Homo sapiens
  SPTBN1
  misc_feature [331]..[331]: Chromosome 2, SNP identification no. = rs13386146
  misc_feature [331]..[331]: allele = g, in linkage disequilibrium with rs10496032, respectively
  misc_feature [331]..[331]: n is a, t, c or g
ccgttttcaacatttctgtgaattcaaggcgtgtgcttcgtctaaataggtggagacacgtaggaaggcatagtgtatacatccatcagcacatgggtagattttgaggttttttttgttttgttttaaatccagagcgttgtgtatttgatcattcttggagattcagccacattcacaggtgttaagtgtcacacctaacctagcaatacaatacacagctgaaagaaaccagtcaggttttcccaatatcaatttctttttattttcttttctgcaactccagaggattcaataatgtcaatttctgataaagcttttgctattgatnagtaaattcttccattaaaaagataacagtctgctaatttgcttatcattgatgttgcaagagcgtaacattggagggatgagtaatgcatctgcatatctcgaaggacaaaactgacgtccacccacttgtggatacggtatttggtaaaagtaactaaggtaaaattgcctaagggcatttaacttgagccatagcttaaattcaggtgatattgagcgttgacatatcaggattcttttgtacacagagacgtggatgtagacccactggtagcaattgcaaaggctctggatttttagctgctggatgaaatacctgcagctgaac

SEQ ID NO: 1074 - DNA, 661 bp, Homo sapiens
  SPTBN1
  misc_feature [331]..[331]: Chromosome 2, SNP identification no. = rs13399656
  misc_feature [331]..[331]: allele = t, in linkage disequilibrium with rs10496032, respectively
  misc_feature [331]..[331]: n is a, t, c or g
tgttaagtgtcacacctaacctagcaatacaatacacagctgaaagaaaccagtcaggttttcccaatatcaatttctttttattttcttttctgcaactccagaggattcaataatgtcaatttctgataaagcttttgctattgatgagtaaattcttccattaaaaagataacagtctgctaatttgcttatcattgatgttgcaagagcgtaacattggagggatgagtaatgcatctgcatatctcgaaggacaaaactgacgtccacccacttgtggatacggtatttggtaaaagtaactaaggtaaaattgcctaagggcatntaacttgagccatagcttaaattcaggtgatattgagcgttgacatatcaggattcttttgtacacagagacgtggatgtagacccactggtagcaattgcaaaggctctggatttttagctgctggatgaaatacctgcagctgaacatctgttatgatgcaattaagcagtgactcagtggcgtgaaggctcagtttcgatgtatcgggaactcctttgaatctgtccacaaacttctcaaccaaaaggagaggagaaatgtgtacagacatttgagaggctgggtctcaacatgcctctgcctaggcagtcatgggaacctggtctt

SEQ ID NO: 1075 - DNA, 661 bp, Homo sapiens
  SPTBN1
  misc_feature [331]..[331]: Chromosome 2, SNP identification no. = rs7340302
  misc_feature [331]..[331]: allele = a, in linkage disequilibrium with rs10496032, respectively
  misc_feature [331]..[331]: n is a, t, c or g
gccaccactcccggctaatgtttgtattttagtagagacagggttttaccatgttggccaggctagtcttaaactcctaacctcaggtgatccacccacctcggcctcccaaagtgttgggattacaggtgtgagccaccgcgcccggccttcagctcttctttctgctattgctttggcctaattaataacttaaagctggaacgttgatgtcaggtatgtgtaggtccaggaaaacagctgttggctctgttacttcaattttttttttactctatactttgaagaagtagtactttctagaacttgtactcaaaactcaactgacaantcctggaaggccgttgcttatacgctctagttgatgcgccacagctgcctggctgtgagaatggagtagcatgtacctcttaattagccaagaataagtgccgtggaagaaggcaggatgactttttagaacccatttttagcttgaagatcactgagggagccatcaaatccatccacctgttcaatcaatattcagccagcaagtgggtgtcaaggtgagcagcttacagtgctgagcacactggaaacacaggtgtgtaagggacagccacggtctcaaattacattctgaaagggaatactaggtaagtgatcccaaacatgcaaa

SEQ ID NO: 1076 - DNA, 661 bp, Homo sapiens
  SPTBN1
  misc_feature [331]..[331]: Chromosome 2, SNP identification no. = rs10184128
  misc_feature [331]..[331]: allele = t, in linkage disequilibrium with rs10496032, respectively
  misc_feature [331]..[331]: n is a, t, c or g
cggccttcagctcttctttctgctattgctttggcctaattaataacttaaagctggaacgttgatgtcaggtatgtgtaggtccaggaaaacagctgttggctctgttacttcaattttttttttactctatactttgaagaagtagtactttctagaacttgtactcaaaactcaactgacaaatcctggaaggccgttgcttatacgctctagttgatgcgccacagctgcctggctgtgagaatggagtagcatgtacctcttaattagccaagaataagtgccgtggaagaaggcaggatgactttttagaacccatttttagctngaagatcactgagggagccatcaaatccatccacctgttcaatcaatattcagccagcaagtgggtgtcaaggtgagcagcttacagtgctgagcacactggaaacacaggtgtgtaagggacagccacggtctcaaattacattctgaaagggaatactaggtaagtgatcccaaacatgcaaatatcattccttggtcctgggatgtgggggaagcattttggaggaattgacattgattgcaagtttttaaatatgacctggattagattatgagatgatgggtgcttgggggtaggggtgtacagagggagtcatgaaaccatgga

SEQ ID NO: 1077 - DNA, 661 bp, Homo sapiens
  SPTBN1
  misc_feature [331]..[331]: Chromosome 2, SNP identification no. = rs12713264
  misc_feature [331]..[331]: allele = c, in linkage disequilibrium with rs10496032, respectively
  misc_feature [331]..[331]: n is a, t, c or g
gctttgggactcaatttttaaccatcttgctgtgctgcctgttgagcatttttcacctggtgcttttgtagatcccacattaggattttgttaggaccctgggcaaccttgatttagtgaaagcagttgttgagaggtagaaattcctgatccttttttcaatcttaaaggatttgctgagactctcactcttcattggtgatggtaacaaggagcagcatggtgaatgccatgtaaaattcaagccttgccttatcttggaggactttattcccttttctttgatggtactttggagattccagactataaaggactcagctgacagtanagactctcttgatctgtattttcccagtatatgaaattatttgtaatgtacccgtgagaacctggaataaactgtactggcactgaagtagaatcttggatttaaaagtacagtgttcactgctgcatcgttgagcatttgctacacagagaataaccttggagcaatgttcaaaggtgatggcattacccagaaacatggagttaggccaggaaaccacatctgaagttcagattattggagattgctgatttttcttgactttaaatattttcgactggttgagtgtttgttggtgtttttgggctaagtgttagccttttgttctgt

SEQ ID NO: 1078 - DNA, 661 bp, Homo sapiens
  SPTBN1
  misc_feature [331]..[331]: Chromosome 2, SNP identification no. = rs12713265
  misc_feature [331]..[331]: allele = c, in linkage disequilibrium with rs10496032, respectively
  misc_feature [331]..[331]: n is a, t, c or g
ttcattggtgatggtaacaaggagcagcatggtgaatgccatgtaaaattcaagccttgccttatcttggaggactttattcccttttctttgatggtactttggagattccagactataaaggactcagctgacagtacagactctcttgatctgtattttcccagtatatgaaattatttgtaatgtacccgtgagaacctggaataaactgtactggcactgaagtagaatcttggatttaaaagtacagtgttcactgctgcatcgttgagcatttgctacacagagaataaccttggagcaatgttcaaaggtgatggcattaccnagaaacatggagttaggccaggaaaccacatctgaagttcagattattggagattgctgatttttcttgactttaaatattttcgactggttgagtgtttgttggtgtttttgggctaagtgttagccttttgttctgtgatgtccctgtgtgaataaaatggataatccctgtttccggttagctgctgctgctgctgctgctgccaagtataagtgaagacttccagctgcgatttgcattgtgttttcaggccaccttttgagtttccccatagcagatataaaaactgtttctaagagttcatccttacgtgttcagccttacttg

SEQ ID NO: 1079 - DNA, 661 bp, Homo sapiens
  SPTBN1
  misc_feature [331]..[331]: Chromosome 2, SNP identification no. = rs11902987
  misc_feature [331]..[331]: allele = c, in linkage disequilibrium with rs10496032, respectively
  misc_feature [331]..[331]: n is a, t, c or g
atttgtaatgtacccgtgagaacctggaataaactgtactggcactgaagtagaatcttggatttaaaagtacagtgttcactgctgcatcgttgagcatttgctacacagagaataaccttggagcaatgttcaaaggtgatggcattacccagaaacatggagttaggccaggaaaccacatctgaagttcagattattggagattgctgatttttcttgactttaaatattttcgactggttgagtgtttgttggtgtttttgggctaagtgttagccttttgttctgtgatgtccctgtgtgaataaaatggataatccctgtttcnggttagctgctgctgctgctgctgctgccaagtataagtgaagacttccagctgcgatttgcattgtgttttcaggccaccttttgagtttccccatagcagatataaaaactgtttctaagagttcatccttacgtgttcagccttacttgtatcctaaaaccacaaacttgattttgttcccattcattatgatctatatttggcatcagtgaggcaagttatttatatttattatttataccctgcccacttccagaaatgatttaatttggcctaggcaagtgtcttctgatggggtgtgtgtgtgtgtgtgtgtgtgtgtgtgat

SEQ ID NO: 1080 - DNA, 661 bp, Homo sapiens
  SPTBN1
  misc_feature [331]..[331]: Chromosome 2, SNP identification no. = rs13403284
  misc_feature [331]..[331]: allele = a, in linkage disequilibrium with rs10496032, respectively
  misc_feature [331]..[331]: n is a, t, c or g
gagttaggccaggaaaccacatctgaagttcagattattggagattgctgatttttcttgactttaaatattttcgactggttgagtgtttgttggtgtttttgggctaagtgttagccttttgttctgtgatgtccctgtgtgaataaaatggataatccctgtttccggttagctgctgctgctgctgctgctgccaagtataagtgaagacttccagctgcgatttgcattgtgttttcaggccaccttttgagtttccccatagcagatataaaaactgtttctaagagttcatccttacgtgttcagccttacttgtatcctaaanccacaaacttgattttgttcccattcattatgatctatatttggcatcagtgaggcaagttatttatatttattatttataccctgcccacttccagaaatgatttaatttggcctaggcaagtgtcttctgatggggtgtgtgtgtgtgtgtgtgtgtgtgtgtgatgataattctgatgtgtgtgtgtatgatgctacttctgccacttcaagagtccagaatcataagattcctaataggattgttgggttggtgaatgctgggtttgttctcttctatgccctctctgtccaggagaaatctgagtatctttcttaggaatgccta

SEQ ID NO: 1081 - DNA, 661 bp, Homo sapiens
  SPTBN1
  misc_feature [331]..[331]: Chromosome 2, SNP identification no. = rs11892443
  misc_feature [331]..[331]: allele = a, in linkage disequilibrium with rs10496032, respectively
  misc_feature [331]..[331]: n is a, t, c or g
gttcagattattggagattgctgatttttcttgactttaaatattttcgactggttgagtgtttgttggtgtttttgggctaagtgttagccttttgttctgtgatgtccctgtgtgaataaaatggataatccctgtttccggttagctgctgctgctgctgctgctgccaagtataagtgaagacttccagctgcgatttgcattgtgttttcaggccaccttttgagtttccccatagcagatataaaaactgtttctaagagttcatccttacgtgttcagccttacttgtatcctaaaaccacaaacttgattttgttcccattcnttatgatctatatttggcatcagtgaggcaagttatttatatttattatttataccctgcccacttccagaaatgatttaatttggcctaggcaagtgtcttctgatggggtgtgtgtgtgtgtgtgtgtgtgtgtgtgatgataattctgatgtgtgtgtgtatgatgctacttctgccacttcaagagtccagaatcataagattcctaataggattgttgggttggtgaatgctgggtttgttctcttctatgccctctctgtccaggagaaatctgagtatctttcttaggaatgcctaacactgctagactgaaaggtgccatgt

SEQ ID NO: 1082 - DNA, 661 bp, Homo sapiens
  SPTBN1
  misc_feature [331]..[331]: Chromosome 2, SNP identification no. = rs13391522
  misc_feature [331]..[331]: allele = t, in linkage disequilibrium with rs10496032, respectively
  misc_feature [331]..[331]: n is a, t, c or g
gctaagtgttagccttttgttctgtgatgtccctgtgtgaataaaatggataatccctgtttccggttagctgctgctgctgctgctgctgccaagtataagtgaagacttccagctgcgatttgcattgtgttttcaggccaccttttgagtttccccatagcagatataaaaactgtttctaagagttcatccttacgtgttcagccttacttgtatcctaaaaccacaaacttgattttgttcccattcattatgatctatatttggcatcagtgaggcaagttatttatatttattatttataccctgcccacttccagaaatgatntaatttggcctaggcaagtgtcttctgatggggtgtgtgtgtgtgtgtgtgtgtgtgtgtgatgataattctgatgtgtgtgtgtatgatgctacttctgccacttcaagagtccagaatcataagattcctaataggattgttgggttggtgaatgctgggtttgttctcttctatgccctctctgtccaggagaaatctgagtatctttcttaggaatgcctaacactgctagactgaaaggtgccatgtcaccatttttcccaagaaattttcttttgagggtgctatagagaagccctctggtatgaatgtattaggctggtgcaa

SEQ ID NO: 1083 - DNA, 661 bp, Homo sapiens
  SPTBN1
  misc_feature [331]..[331]: Chromosome 2, SNP identification no. = rs3796019
  misc_feature [331]..[331]: allele = g, in linkage disequilibrium with rs10496032, respectively
  misc_feature [331]..[331]: n is a, t, c or g
tgataatgtggagaaatgtgctctttatgtattctcaagaaacaggatgtgaaaagctggtatgggtatacaagataaaaatgcctacccagagtgggcagaagcctctaaatattactggtttgctaaaagtttcagatgctttttagttctacatatgttagttctacctttaacctctctaccactcaacgaaccatcaagaaacaaaatctactccctatgtaacagtaaagtcaccccagactaaccttcaaaaggggttttactttaaagaaacagcttcacagccactgctgtcatagagaatattctcaggttccgtgtggcnggaagcttgaattttttcagtgctggcttccttctccagtggggccagaggctgtcagagccagcccggaaatctctctcatatatggctttaacgtaaatgaaaatattcccctgttaattatttacataaagaaggtcatacaggtctgtcctagcaacaccagagagccgttctcaccagcagcttttaccctcagaaaggagagaagaaacacccattcaagttcagcacagaggtttgggtttataacctgtttccaaagtcaatacagttaactgctgtgggctatttgctttcagagttttaggatctctctctctcactata

SEQ ID NO: 1084 - DNA, 661 bp, Homo sapiens
  SPTBN1
  misc_feature [331]..[331]: Chromosome 2, SNP identification no. = rs1137645
  misc_feature [331]..[331]: allele = c, in linkage disequilibrium with rs10496032, respectively
  misc_feature [331]..[331]: n is a, t, c or g
aaaaaattcaagcttccggccacacggaacctgagaatattctctatgacagcagtggctgtgaagctgtttctttaaagtaaaaccccttttgaaggttagtctggggtgactttactgttacatagggagtagattttgtttcttgatggttcgttgagtggtagagaggttaaaggtagaactaacatatgtagaactaaaaagcatctgaaacttttagcaaaccagtaatatttagaggcttctgcccactctgggtaggcatttttatcttgtatacccataccagcttttcacatcctgtttcttgagaatacataaagagcanatttctccacattatcaggaaaacaatttgaagcacaggtcttgtgaattgggaagaccactagtattgccattagctgcttatttgtgtgtgtgttggaggatggattataatccaagtgtattcatattctcacactttaaccaaaaaaaaaaaaaaatctccaaaatcttctctcttgcattgtttattgatagaatgggaaacttactgctggtaactagttaattctgaaagggttagggtttctactgtatacttccaaaagtacaggcctgggggagccaatatgagagacacacataaccaaaaatttgtaaaaactttatt

SEQ ID NO: 1085 - DNA, 661 bp, Homo sapiens
  SPTBN1
  misc_feature [331]..[331]: Chromosome 2, SNP identification no. = rs3287
  misc_feature [331]..[331]: allele = t, in linkage disequilibrium with rs10496032, respectively
  misc_feature [331]..[331]: n is a, t, c or g
gctggaattacagggatgagctagtgcacccggcctataatttttatttataatttttattaaaaaataaagtttttacaaatttttggttatgtgtgtctctcatattggctcccccaggcctgtacttttggaagtatacagtagaaaccctaaccctttcagaattaactagttaccagcagtaagtttcccattctatcaataaacaatgcaagagagaagattttggagatttttttttttttttggttaaagtgtgagaatatgaatacacttggattataatccatcctccaacacacacacaaataagcagctaatggcaatnctagtggtcttcccaattcacaagacctgtgcttcaaattgttttcctgataatgtggagaaatgtgctctttatgtattctcaagaaacaggatgtgaaaagctggtatgggtatacaagataaaaatgcctacccagagtgggcagaagcctctaaatattactggtttgctaaaagtttcagatgctttttagttctacatatgttagttctacctttaacctctctaccactcaacgaaccatcaagaaacaaaatctactccctatgtaacagtaaagtcaccccagactaaccttcaaaaggggttttactttaaagaaacagc

SEQ ID NO: 1086 - DNA, 661 bp, Homo sapiens
  SPTBN1
  misc_feature [331]..[331]: Chromosome 2, SNP identification no. = rs10170355
  misc_feature [331]..[331]: allele = g, in linkage disequilibrium with rs10496032, respectively
  misc_feature [331]..[331]: n is a, t, c or g
tgggaggctgaggcggactgatcacttgaggtcaggagtttgaaaccagcctgggcaacatgttgaaaccctgtctctactaaaaatacaaaaattagccatgcatagtggcacacacgtgtaatcccagctacttgggtggctgaggcacgagagtcgcttgagtccgggtggtggaggttgcagtgagccacgatcacgccactgcactccagcctgggcaaaagagcaagacttagtcttaaaaaaaaagaaaaaatatataaatatatacacacacactttatatatttttatatataatctcatacaacatgttttgaaatacacntgcattgtggaatggctatattgaaagctaatacataacaaatttaatgataatacaagtgtagaatggacaacaaaggggttgtgcataatcatcaagtacttctcattagtaaaaacccttttcatttgcttagaattgaggaggaggggatgctctaaattgaggattctccatagggtcgtccgtgagacacaagatgttgactgtcccacttacccaggacatgggtatccttttgatgctgacagcatttgctgctgctttccagggaatcatggctgacattgaacttccactgcctctgggctgctttgctcactcctccta

SEQ ID NO: 1087 - DNA, 661 bp, Homo sapiens
  SPTBN1
  misc_feature [331]..[331]: Chromosome 2, SNP identification no. = rs10193692
  misc_feature [331]..[331]: allele = a, in linkage disequilibrium with rs10496032, respectively
  misc_feature [331]..[331]: n is a, t, c or g
tgatcacttgaggtcaggagtttgaaaccagcctgggcaacatgttgaaaccctgtctctactaaaaatacaaaaattagccatgcatagtggcacacacgtgtaatcccagctacttgggtggctgaggcacgagagtcgcttgagtccgggtggtggaggttgcagtgagccacgatcacgccactgcactccagcctgggcaaaagagcaagacttagtcttaaaaaaaaagaaaaaatatataaatatatacacacacactttatatatttttatatataatctcatacaacatgttttgaaatacacgtgcattgtggaatggctntattgaaagctaatacataacaaatttaatgataatacaagtgtagaatggacaacaaaggggttgtgcataatcatcaagtacttctcattagtaaaaacccttttcatttgcttagaattgaggaggaggggatgctctaaattgaggattctccatagggtcgtccgtgagacacaagatgttgactgtcccacttacccaggacatgggtatccttttgatgctgacagcatttgctgctgctttccagggaatcatggctgacattgaacttccactgcctctgggctgctttgctcactcctcctaggcaggcaagccgaccct

SEQ ID NO: 1088 - DNA, 661 bp, Homo sapiens
  SPTBN1
  misc_feature [331]..[331]: Chromosome 2, SNP identification no. = rs10182836
  misc_feature [331]..[331]: allele = t, in linkage disequilibrium with rs10496032, respectively
  misc_feature [331]..[331]: n is a, t, c or g
gcagtgagccacgatcacgccactgcactccagcctgggcaaaagagcaagacttagtcttaaaaaaaaagaaaaaatatataaatatatacacacacactttatatatttttatatataatctcatacaacatgttttgaaatacacgtgcattgtggaatggctatattgaaagctaatacataacaaatttaatgataatacaagtgtagaatggacaacaaaggggttgtgcataatcatcaagtacttctcattagtaaaaacccttttcatttgcttagaattgaggaggaggggatgctctaaattgaggattctccatagggncgtccgtgagacacaagatgttgactgtcccacttacccaggacatgggtatccttttgatgctgacagcatttgctgctgctttccagggaatcatggctgacattgaacttccactgcctctgggctgctttgctcactcctcctaggcaggcaagccgacccttgggaagctcagcatttagccttcatgctttggtttctttgccctttttttttttttttttttttttgaaacttttatttgctctgggaccactttgaggttgaaggtacagcccacagtttaagaaaactgtcccaaacctgagctaataaacaagagtaaaa

SEQ ID NO: 1089 - DNA, 661 bp, Homo sapiens
  SPTBN1
  misc_feature [331]..[331]: Chromosome 2, SNP identification no. = rs12713268
  misc_feature [331]..[331]: allele = c, in linkage disequilibrium with rs10496032, respectively
  misc_feature [331]..[331]: n is a, t, c or g
acacaagatgttgactgtcccacttacccaggacatgggtatccttttgatgctgacagcatttgctgctgctttccagggaatcatggctgacattgaacttccactgcctctgggctgctttgctcactcctcctaggcaggcaagccgacccttgggaagctcagcatttagccttcatgctttggtttctttgccctttttttttttttttttttttttgaaacttttatttgctctgggaccactttgaggttgaaggtacagcccacagtttaagaaaactgtcccaaacctgagctaataaacaagagtaaaagcctttttctnttgtcattactacttcctcctcactgactaattagccagctgctgcaggtctcattaaacttcattaatcctaagcatctgtctgtaggaactgcctcaagataaaaagaggaagctccgctaaacatttttgttgctgctgctaattaccacaagctatgctttttattaattaatggctctacttgcctccaaatcctactgaagaactttgcgagacaacaggcacttcattcttctgtagctgcagacatgctgctctgtggtttggtgcatggggtacctgtaaattatcagcaccgagaatacgctagctctggaaaccaaggt

SEQ ID NO: 1090 - DNA, 661 bp, Homo sapiens
  SPTBN1
  misc_feature [331]..[331]: Chromosome 2, SNP identification no. = rs12713269
  misc_feature [331]..[331]: allele = c, in linkage disequilibrium with rs10496032, respectively
  misc_feature [331]..[331]: n is a, t, c or g
caagagtaaaagcctttttctcttgtcattactacttcctcctcactgactaattagccagctgctgcaggtctcattaaacttcattaatcctaagcatctgtctgtaggaactgcctcaagataaaaagaggaagctccgctaaacatttttgttgctgctgctaattaccacaagctatgctttttattaattaatggctctacttgcctccaaatcctactgaagaactttgcgagacaacaggcacttcattcttctgtagctgcagacatgctgctctgtggtttggtgcatggggtacctgtaaattatcagcaccgagaatangctagctctggaaaccaaggtagagaaaaaaatacatctggaagtctggttatgtgtaacttgaacttgctcaaagccttcagctgacactgatgctttttaaaaacatggcagtgataaattatttcatcactttgctcaaatacattaatgcaaaacattacaaaactagttttcttgactcagcttccagggtctaagaaagcattttattggggggttgtgatgccagagcataagggatgttaaaggtgacacttaaaaaggaaggtgtcgatcttggttctggtctggtggtgcctgagagcagggactccttgaaggtgcaag

SEQ ID NO: 1091 - DNA, 661 bp, Homo sapiens
  SPTBN1
  misc_feature [331]..[331]: Chromosome 2, SNP identification no. = rs7586066
  misc_feature [331]..[331]: allele = a, in linkage disequilibrium with rs10496032, respectively
  misc_feature [331]..[331]: n is a, t, c or g
gaagaagataatttaattcctccgtcatctaggaccatgctggagcccttcccacttgcgtagctgaagcactggtggatgaacccccatttgcctctgatcttattcctgccgctgcttggtgatgtcccctggactcagttgtcagctctgaagctttgaccccttgactcacctctggtcagttggtcccacagtgctttgcttgatcctctctgttgccatctgttcccatgcggtataattacctgttaataaggctggtgtcagtaaactgtaaactctttctgcttctgcgtctatccttatttcctactgcttagtagagcantttaaaacctttttaagaatggatttgcatttcctgtagatgaaacctgaggtggaaccccagtaaatcaagggtatgaaatgggagcttttctgaccaaagtgtaggtgagaagatacctggaggctgaccctgggctttgctctttctgcatcccttgctaggaacatggtttgaaaactactcccctggcatcctgtagaccccagtgtttcttcagtgaatgtcactttttaaaaattaatatccttagtgtctccatctattacaaggaagtattaatgtttgtttgccgtattatgcttacaaatgttatataaagttaactac

SEQ ID NO: 1092 - DNA, 661 bp, Homo sapiens
  SPTBN1
  misc_feature [331]..[331]: Chromosome 2, SNP identification no. = rs7586311
  misc_feature [331]..[331]: allele = a, in linkage disequilibrium with rs10496032, respectively
  misc_feature [331]..[331]: n is a, t, c or g
taaactgtaaactctttctgcttctgcgtctatccttatttcctactgcttagtagagcaatttaaaacctttttaagaatggatttgcatttcctgtagatgaaacctgaggtggaaccccagtaaatcaagggtatgaaatgggagcttttctgaccaaagtgtaggtgagaagatacctggaggctgaccctgggctttgctctttctgcatcccttgctaggaacatggtttgaaaactactcccctggcatcctgtagaccccagtgtttcttcagtgaatgtcactttttaaaaattaatatccttagtgtctccatctattacnaggaagtattaatgtttgtttgccgtattatgcttacaaatgttatataaagttaactaccaatttagtatgccccagaagaaagacatgaaaattcagggtggcattttattttagcatattcattgaaggcagcagtacacataggaccttttgtgatgccccagaagagtatgttttcctccagtgagtgctctttttattcctactcatcagtcccagacccatcgggtgaacctcaattctcttatcaaataaaaaatcatttcatattttcccctttaatgggaacgctctttaaatttttcaaaattaatatgtgctcctaaa

SEQ ID NO: 1093 - DNA, 661 bp, Homo sapiens
  SPTBN1
  misc_feature [331]..[331]: Chromosome 2, SNP identification no. = rs4641979
  misc_feature [331]..[331]: allele = g, in linkage disequilibrium with rs10496032, respectively
  misc_feature [331]..[331]: n is a, t, c or g
attttgatatcactacttaccttctcaccaaccacatgtgagtgtcctagtttctccacaccttcagtaggtgaaaggatttgtctttcaaatgttgtatagaatagggttatagtttattttcccctacttccacctagtcctgaaagtggatcctctgctatctgccaccccagcagaacatctataagtttccagcccttcccacccagatccaagattattatctttatggaggctgttgagaagcagccaaggtcattattaaacaataaaatgcccctgaagaacaaatcagcaagagcaagaagcttcctaggctatgtcaagntagctgaacaataagactacacctaagacaatattggcttactgtctccctccttacacccaaactgacaaaactacaaacagccaggtccccacacctgttggaagcacctgactttttggagtgggagataaaggcttgcgtgtagggacaagggagaggtggggtgggaggcttgcaagtggatgcattcatggatgttataaagatctgtattccgttttatgggaagagatttacatttaagtttagcaacactgcaagaggtttacatttccaaaattaatagaacaacagaaaaatcagatctccccatttatgccctcttgt

SEQ ID NO: 1094 - DNA, 661 bp, Homo sapiens
  SPTBN1
  misc_feature [331]..[331]: Chromosome 2, SNP identification no. = rs10183867
  misc_feature [331]..[331]: allele = c, in linkage disequilibrium with rs10496032, respectively
  misc_feature [331]..[331]: n is a, t, c or g
aataggttttgatttaaagtaacaacacagaatactcttgtgttctatgaactgtcaactgccctgccctcttctgatgagtgtgagggatcttatggtgctaccctgcctgttggctagtcatcttggggttgaatctgaggtcattttttcctccagtttttctgtcctcctctattaaaacaaggcaatgtacattgggtacttacaggatttgtccaccaaaactctgtagtatttggctttgaaagaaatcttgtataaccattttatgtgtgaggttgaggaaagccacaaaggaaattagcagaagtgtttttcagtgtttgancctatgtgtaataactttctcttttacatgttaagatatctttaaaataattgaatggtagctgagtatcaattgtctaatgctgtgagctctcatggagtcagaaattactccttacatttttaaagagagaactcttaatgcttttagatgtccttcccagtgtccttatattagttactcgataaatggttgctgtggactaatccaagatgaaaaaatgacaggcgacctttatggctgaatgttgggtattagtgttctgcctggaataatttttcaggcagtggaatagttggctgagttgaaaatataaccgtggattgggtc

SEQ ID NO: 1095 - DNA, 661 bp, Homo sapiens
  SPTBN1
  misc_feature [331]..[331]: Chromosome 2, SNP identification no. = rs13432302
  misc_feature [331]..[331]: allele = a, in linkage disequilibrium with rs10496032, respectively
  misc_feature [331]..[331]: n is a, t, c or g
ttgctgtggctttctttattccaaaatgctaatcctttgcagataaatttatacattctgtatagtctgatttggaggacttctgtatcttagcttatcttagatgggagcttccataattcattcagggattagtcagtgctatactgtgcatgcatagtagacagctctgtgtggtggctttaagtcttttgactccccctctttctggtctttgtgtctttctggtttaaaagaaaaaatatccctcagaccttagctttttggattcaatgaattactgttaactttgacatcctcattaaataggagagctgtcggaaactgtcangaacggctggaattggtactgttatcttgttggcgacgtcagcttctgtgggcatctgtgcaaaaacattgaggtagagcagaatcctcttctatcttgaatgtctgaaaataatgtgactggtgtgtttgaaagagttctatttttccctctttgcccttaattattttggccttaaggattccggaaacctggagtagattgaaaaccataataagcaagggccggggagcatgttatttgattttttaataaactacctctgactagcttacacgccccgtagaacattaaggctactttttgtgtatattgcatgaaataagaaac

SEQ ID NO: 1096 - DNA, 661 bp, Homo sapiens
  SPTBN1
  misc_feature [331]..[331]: Chromosome 2, SNP identification no. = rs6706263
  misc_feature [331]..[331]: allele = c, in linkage disequilibrium with rs10496032, respectively
  misc_feature [331]..[331]: n is a, t, c or g
tcctgccaaatggggtggcacactccatcccgtaagtgaaggtaaccagataaatacccactccgctggggagtggaaggggccccgagttcaccctgtgactgacctgacatgtggatatcacttaccagaaaatgcttgtggctactgagcattaacctggcaacatattcaatagcaaaatttaaaatagtacccagtgtggtgccttgctcatagcaagcacttagtacctatttgctaagctgattttaatttgaagtggagtctaacaaatgggatgtgggatcaacagtattattatattgaaatgttttaaaccaggacatgncaaactttttctataaaggaccagataataactgttaggctttgtgggccacatggagtctctatggggtatcatcagcctcctccccttcctcttcctcctccttttaaccaccctcttaaaatgtaaaacctgtgtgtctcccaggctacataaaaagaggctactggctgaagtttgctgactcctattttatattaatcttttaactcagtctgaaggaactgaccagacatggatggttatgagttttttcttcttgttttggggaggtgatgtcttgttttcctcaggcagtgtgggatggtggttggaactaaatagatacca

SEQ ID NO: 1097 - DNA, 661 bp, Homo sapiens
  SPTBN1
  misc_feature [331]..[331]: Chromosome 2, SNP identification no. = rs10206143
  misc_feature [331]..[331]: allele = a, in linkage disequilibrium with rs10496032, respectively
  misc_feature [331]..[331]: n is a, t, c or g
gacaattgacctgattgggtcatgtttaaataatgttgtaatatgttacaatgatgtcctaatcacaccgttgtgtattttgcaacttcactttaccgtacaggtatgtggtggcaattgcccaaagataaaacaagcaaacaaaaaacagaatttgtcaaacattttagtttggctctggacccattttagtctgaatgacagcaccacaaaattgcatttttatccgtatttcagacattgaggaattgcaagaagcagttcacctgtcatatatttttagtgctatacaatgacaacatttaactgcctagggcctgtctttgtgatntgaaatttccctcctcaacaatttcagtgagaccaccaccaacaataagatttatcgagaacctagttgttggacactggaggtttgctgactcattgaacaaatgtttattgtgcacctcctttatgtcatgtatatgctaaagctctaaacatgaataggattgagcctttgcctctgagccaactgcaagttaattgaagagataggacacaagacgtataataaaagatgagagaccacatcccatcaaatgatgattgctgacatctgataggagagggcctcttggtagaactaatcttggctggatcttaaaggaagggtaag

SEQ ID NO: 1098 - DNA, 661 bp, Homo sapiens
  SPTBN1
  misc_feature [331]..[331]: Chromosome 2, SNP identification no. = rs7584223
  misc_feature [331]..[331]: allele = t, in linkage disequilibrium with rs10496032, respectively
  misc_feature [331]..[331]: n is a, t, c or g
tcttacttagggggtaggccattatcttagcacaattgaagagcctgatagaaaatattactgggttatacgtgcaggttcagactacttgaaaagtaaaagaaagattccttctcttaagccaggtataaattcagtctttaggggaacaatgaatagggtcttttgacagttcctgattctatgtttccttttttttccatccggagatgttccatgccttcaggctttccttcattcctggctcccatccctttccataaccagaactgtggcatatggtgaatatagttgtgtttagcactctgtgctgagggtattgcagaaagangccgtacaatcatttccatcatgcagtgcccttctgctcatcaaagctatttctgtatcctaacttgactcacgctaacacagtgttcattttttcagttatagcaaattctctagagtaaataaatatggggctgggtgcagtggcccacacctgtaattcactttgggaggctaaggtgggaggatcactggagaccaggagtttgaggtcagcctgggcaatctaatgagaccctatttctacaaaaaaaaatgaaaaagccaggtgtgatggtgcatgcctgtaatcctagttactctggaggttgaggtgggaagattgcttcag

SEQ ID NO: 1099 - DNA, 661 bp, Homo sapiens
  SPTBN1
  misc_feature [331]..[331]: Chromosome 2, SNP identification no. = rs6749802
  misc_feature [331]..[331]: allele = a, in linkage disequilibrium with rs10496032, respectively
  misc_feature [331]..[331]: n is a, t, c or g
ttttatttttgacatctcttcctcctcttctttcctcccacctactttgagtttctaagaaccatgatagccctggggagccctcccggcacagatctcagtctgtttcagctctgttctctgcacccacccatgacctctccatttgcctctctgtagggaggagggttgggattgggctgtaactctttaggacagggcactaaggaagtatattgactgttgtttctggcaaatcctcagagtttccttgtgaaagaacctgttaattcaaaacctgaaagaagtctgggtgctcctttagtgagagattcacccaaaagagtgacanttggctgaggaacacattttgtgcttgtttatttagaaatattttaatccaagcaggttttcattttgatcttgctcccttgcttcattaaagacattttctgactccagtataacgcataaaggattttataattcacaaaaaaaattgttaaccctaaatacatataaactatgagttacttgcctccttgataagaggccatctgtgaaatgcaccttacatattctgctctagacctgctctttcagaatggccaagcttagccccagaattacagctcctgagtcactgtagtaaagttgccatccatcacaatgattacgtgat

SEQ ID NO: 1100 - DNA, 661 bp, Homo sapiens
  SPTBN1
  misc_feature [331]..[331]: Chromosome 2, SNP identification no. = rs6721612
  misc_feature [331]..[331]: allele = c, in linkage disequilibrium with rs10496032, respectively
  misc_feature [331]..[331]: n is a, t, c or g
taaggaagtatattgactgttgtttctggcaaatcctcagagtttccttgtgaaagaacctgttaattcaaaacctgaaagaagtctgggtgctcctttagtgagagattcacccaaaagagtgacaattggctgaggaacacattttgtgcttgtttatttagaaatattttaatccaagcaggttttcattttgatcttgctcccttgcttcattaaagacattttctgactccagtataacgcataaaggattttataattcacaaaaaaaattgttaaccctaaatacatataaactatgagttacttgcctccttgataagaggcnatctgtgaaatgcaccttacatattctgctctagacctgctctttcagaatggccaagcttagccccagaattacagctcctgagtcactgtagtaaagttgccatccatcacaatgattacgtgatcaataatgcatgtggtcttttctgtgggacctgtcatgatgttattggtgcagctgcttctccactgcagcctgccccttactgtctttttctgcttcctctaatcctgtcctttttgatcctgtgtttctggttggcctttgtccctggggaagggccctccttctgtctggatgggtaggtcctttttgggaaaggcagga

SEQ ID NO: 1101 - DNA, 661 bp, Homo sapiens
  SPTBN1
  misc_feature [331]..[331]: Chromosome 2, SNP identification no. = rs4577321
  misc_feature [331]..[331]: allele = a, in linkage disequilibrium with rs10496032, respectively
  misc_feature [331]..[331]: n is a, t, c or g
ttgtgaaagaacctgttaattcaaaacctgaaagaagtctgggtgctcctttagtgagagattcacccaaaagagtgacaattggctgaggaacacattttgtgcttgtttatttagaaatattttaatccaagcaggttttcattttgatcttgctcccttgcttcattaaagacattttctgactccagtataacgcataaaggattttataattcacaaaaaaaattgttaaccctaaatacatataaactatgagttacttgcctccttgataagaggccatctgtgaaatgcaccttacatattctgctctagacctgctctttcngaatggccaagcttagccccagaattacagctcctgagtcactgtagtaaagttgccatccatcacaatgattacgtgatcaataatgcatgtggtcttttctgtgggacctgtcatgatgttattggtgcagctgcttctccactgcagcctgccccttactgtctttttctgcttcctctaatcctgtcctttttgatcctgtgtttctggttggcctttgtccctggggaagggccctccttctgtctggatgggtaggtcctttttgggaaaggcaggacctcaaggagccgctgactgtagcaggtggccggggatcttggcagg

SEQ ID NO: 1102 - DNA, 661 bp, Homo sapiens
  SPTBN1
  misc_feature [331]..[331]: Chromosome 2, SNP identification no. = rs4519566
  misc_feature [331]..[331]: allele = g, in linkage disequilibrium with rs10496032, respectively
  misc_feature [331]..[331]: n is a, t, c or g
catgtggtcttttctgtgggacctgtcatgatgttattggtgcagctgcttctccactgcagcctgccccttactgtctttttctgcttcctctaatcctgtcctttttgatcctgtgtttctggttggcctttgtccctggggaagggccctccttctgtctggatgggtaggtcctttttgggaaaggcaggacctcaaggagccgctgactgtagcaggtggccggggatcttggcaggtgccccagctgattctcctgccaggtcggcagctgtaaaacctcaaccaatgtcatctctgcctcattccctccctgtggtgggtggtngagtgagtttagcaaagccttcagacagaccttcccagggtgttgggctgtttgctgtccttctggccaacctgagaacccagtactctcaggcgactgggcacatgccttattagcaagggtggctttttagttgttacccccacccagtggttttgaaatacatgccaaattgttgagctatctgctttttttttttttttttttttttgtagattcgtgtgtaattatttttgtcatttgggtttgcactaggagtaggtcttagatttttggcataaattcatgctggtggaactagatatagtgtatgtaacatagagaacagag

SEQ ID NO: 1103 - DNA, 661 bp, Homo sapiens
  SPTBN1
  misc_feature [331]..[331]: Chromosome 2, SNP identification no. = rs6730876
  misc_feature [331]..[331]: allele = g, in linkage disequilibrium with rs10496032, respectively
  misc_feature [331]..[331]: n is a, t, c or g
atttgaagggccaggcttgggcgctggcttctagatgaacctgtgtcccacatgcgatgatggaatgttttctaaatttgtgtctttctggttgtctagaaaatctgagctgccatcttaaggtggcaagcattgaattcagtggccactgatgttttcttccctgcacgctttttattttgggagtggagggagaagctggtgttttgtcatctccttgggaaaggagcttctgatgaattcaccctgccttttcaggcaggaaagttgtcagcctgcaatgaaaattgtatccccaatctgtttcccagagctgctgcggccctctctnatgtgactcttgtttatgcaccttataccaaagaagcttaaagcagtcactgtgactgatccaacaggttttgtctcaccttggtttgaaaatggttgctgtatcctcccagagcacatgtagtgccataggtggaagtggtgccgagccagaagccaacgcccagaatggagaccacatctgtactgacatcaccaggaaaatatgatgctggcagttggcagggctgccagaaagccttatttttaacttgatctccaccctgtagcttgccagccgcagtaggcctgtgtgcagacctgccccacacctctgaccgcaggcaagggt

SEQ ID NO: 1104 - DNA, 661 bp, Homo sapiens
  SPTBN1
  misc_feature [331]..[331]: Chromosome 2, SNP identification no. = rs7591231
  misc_feature [331]..[331]: allele = c, in linkage disequilibrium with rs10496032, respectively
  misc_feature [331]..[331]: n is a, t, c or g
aataaaactattcttttctcatttcttattctgagttcactatagtctataactctccataaaggtctcacttgaaaaatgccttagaaatacagacccaccctttactttaacattggattggcagataaaagtgtgagcacagaacctgtgctggccacttagtaattagacctagatctcaggaccagagtagaatgaggcttgaggggtgatggtttgccctgcagcagcgttgacatgtggagagagaggagcccctggcatacgataggcctgcacttcaatggtaatgttctgcccacagctcataatccactttagatgctcnccattgcctgccatctcccttcatgggcgtctgcagtgaagattgattctcactatggtggccagttttttgccttgctcctggccagactaagccctcgcctctgaccgagatagagtgaggttttccaaacaactctgccctcccccaaaccccaccaagtcagttatcactggtttttgcttccctgttgtttcctgatctgtattctgtcttcttactccatcagtcattctctgagaaagcaacagaaaagagtgtgtgtgtgcgtgcatgtgtgtgtgtttgtgtatgttgccaccattaatttcaaagcaggctgagctaggt

SEQ ID NO: 1105 - DNA, 661 bp, Homo sapiens
  SPTBN1
  misc_feature [331]..[331]: Chromosome 2, SNP identification no. = rs4358162
  misc_feature [331]..[331]: allele = c, in linkage disequilibrium with rs10496032, respectively
  misc_feature [331]..[331]: n is a, t, c or g
agagcttcacaggccgggcagccagagtgtgaaagctcatagtttggactaagtgaagagagcatttggaggtagcaggcatcaggaactggcgcagggcaagtttcccagccaaactggaggggttttttttgaaaggagtggtgatggtaacttccctatcacttgtgtttacagagtactctcctactcttttctcattcagttcttacagtctaatgaagtgggcaacctctgctttacagaaaacagttaccagtgacttgccaaggccagtgctgctagtaggcgatatggtgtggactgcagcccaccctgctgactcttcagngcctcctttcccatggagcccttaggagtgggtcccagctgggaacaagacaggcaggaagtcatgggacacagtgtggtattccccgattaattgtaattgggccaaaataactaatactcctctgaaagctcaaagtttcatgtgttgggaggagtttggggactagtgtgaagtgagtttggctttgtagcatattagaagaaattttggaattagtgcttcccatcctaccctatgtattccgtagaggcctttgtttgtgaatgtgtatagcaaaaatctatgtttaattaaaagaaaaaaacataagcaagtgcctgtcacact

SEQ ID NO: 1106 - DNA, 661 bp, Homo sapiens
  SPTBN1
  misc_feature [331]..[331]: Chromosome 2, SNP identification no. = rs10188545
  misc_feature [331]..[331]: allele = a, in linkage disequilibrium with rs10496032, respectively
  misc_feature [331]..[331]: n is a, t, c or g
gttgtaattactccatagttctgcaaatcctgatgccttgcagagtgtaaatgacccaaactcaaggctgggcaggcaggtgggacagagccagtgccccaggagggatcacccagccccctccttcctctctaagggtttttggtccatgcgaaggaattgcccaaggccatactgcttcttaggcagggcctggactggactctaataagcaattagaattatgttgtcagatcctagagatgtttatgtagccccttaagtttcctctcctgttttagagcgagaaagaagatgggcctgggatggagatatggctggtaaaggtttnggactagacgggaccttgggagggggaaacagaaaaagtgcctgtgaaaaaaacacaggaatccacggactgtagtgtgaggggaagggaagcttcttaaaatgatttaaaggaggatcagtaaaaataggcatttcctcagaggaactgctctctgcctgcagagccccgatagtcacaggagtctggtatcgacccttggccccacgttaagggcgtttcagactttcctgtcagaagtgacacagaagtgcacatgttgctgtggggacggaagcatgccgcactagggaatccgatggccaataatggaggcaagacagaggacgc

SEQ ID NO: 1107 - DNA, 661 bp, Homo sapiens
  SPTBN1
  misc_feature [331]..[331]: Chromosome 2, SNP identification no. = rs12713270
  misc_feature [331]..[331]: allele = c, in linkage disequilibrium with rs10496032, respectively
  misc_feature [331]..[331]: n is a, t, c or g
ggaagcatgtacccctcttccctgtattctgggtttttcctgtactgtaaagaggacgagctttaagtcctggttcaccacatcctaactagctggtagattgcttcatctctctgagccactgtgtcttcatgtataaaatgacaggaatagtaattattataatgcagggttactgtgaggattagatgtgatcacagttgtcaaccacctagcagggagaggtgaacacacagtagttgctcagtaagtggcagctatgaatttttagatcttgggaactttgaagtttgtatgaccaacatgtttctatggatagctctgtgagatnatgatcacctcttgaaattaatttcttgtaattactgcttcctaaacttgcccaggtattgtgctttaaaacatgtgagaagcctactctgaagcagatagaacacacgttgtgggagtgtgtggtgtacttgagttttagtctcaattcccactcctctcgtatagtaccaccaggaggtcatctcaccttgctgtatcttgtttattcttgttattctgtggcttgctggtttttgagttgcatccaggtctggaatgaaccatcccttagttcatctggcacagccagtcgccatcagcatggggtccctgtgatgtggcattgaac

SEQ ID NO: 1108 - DNA, 661 bp, Homo sapiens
  SPTBN1
  misc_feature [331]..[331]: Chromosome 2, SNP identification no. = rs12713271
  misc_feature [331]..[331]: allele = a, in linkage disequilibrium with rs10496032, respectively
  misc_feature [331]..[331]: n is a, t, c or g
tcatgatcacctcttgaaattaatttcttgtaattactgcttcctaaacttgcccaggtattgtgctttaaaacatgtgagaagcctactctgaagcagatagaacacacgttgtgggagtgtgtggtgtacttgagttttagtctcaattcccactcctctcgtatagtaccaccaggaggtcatctcaccttgctgtatcttgtttattcttgttattctgtggcttgctggtttttgagttgcatccaggtctggaatgaaccatcccttagttcatctggcacagccagtcgccatcagcatggggtccctgtgatgtggcattgancttcttcaacctgcgtgaatgtgtttgggccccatcaccaccctccccctcccacaccctggaccccatgttcatgtggaagcacacacacattccattgagatttgtagagagagaatagagttgtggaatgtctcatacatgtttcctgtttgtggggaggagattctgagaggaccactttttctaccgcattcatttgaatgtaagtcagacaagtgattatttgagatcaagctttcaggataaagtctgaaagaacattggttatgtcctgctggttggagcctgggaaggtaccgacagtccccatctattcattattctctt

SEQ ID NO: 1109 - DNA, 661 bp, Homo sapiens
  SPTBN1
  misc_feature [331]..[331]: Chromosome 2, SNP identification no. = rs6724136
  misc_feature [331]..[331]: allele = a, in linkage disequilibrium with rs10496032, respectively
  misc_feature [331]..[331]: n is a, t, c or g
ataagggcagtcctgattataaacccagctgcatttgcacagaacagtagagttagcctatccctttatgccttaagtcctggtgctcacctctctttctcttactgggcttttgtgaacagggcactttcgtctgcattaaaaacttgttgaggcaagatacacttttccttcattgattttcttaatggtgcctgggaactcatctgctgcctcttggtcagcaaaagctgcttctcccaattccttgacattttttaagccaaacctctttccgaaattatcagactgggagctctgtgaacctttcctggttctgagggctacccanttaaaaattaatagtcatgccatcctttgctggtgttacattctccagccttagatccttcaccttcctatgcctttaaattgtcatatgatgacttcattttttctcaaatcatattagtccttaggtatgcctctcttatggcaatcctgcactcacataaaagatgcatttttaattaattcattatttatttatttattttgtagagacgggtttttgccatgttgtccaggctggtctcaaactcctgggcacaagcagtctgcccgcctcagcctcccaaagtgctgggattacaggcatgagctgctgcacccagccaaacgc

SEQ ID NO: 1110 - DNA, 661 bp, Homo sapiens
  SPTBN1
  misc_feature [331]..[331]: Chromosome 2, SNP identification no. = rs10183043
  misc_feature [331]..[331]: allele = t, in linkage disequilibrium with rs10496032, respectively
  misc_feature [331]..[331]: n is a, t, c or g
tacaggagacgtatatatacttctataatagtatattttatagtagatgtatatatacacatatgcattatctactctctctctatatatatattttttgtttgtttgttttatttaaaatgttcaccttccaagggcctcttttacgttttgataaaactgggtagagggaagaaacatttggggtatttaaattgcactacactcatttttttcccttttccccttcttttcagtaagttatacttctttacttaaccttcaccccatccctccacacacaaccaccacttggaaattcttctgatttgatggttgtgttccctgtttncattttgagccaagcttaagggttgccagcaggtggcaaacctaattttacattccaagtaatcagaaaatcctcacaggtgttttgtcatgcacctgcaaaaaaaaaaaattgtatggatggcagcagtagcgctgaaattctccatgaaaattggattctctcttccctgaacttaaacaaatgctcatttgtaaactatatagctccacaactattctctaaagaggaatcagttatcatccccttaagtaaactttttttctgtggccgttaggtaaataccgtccttggacttaatgagtacatgtgtttgttaatgttctgctc

SEQ ID NO: 1111 - DNA, 661 bp, Homo sapiens
  SPTBN1
  misc_feature [331]..[331]: Chromosome 2, SNP identification no. = rs6741053
  misc_feature [331]..[331]: allele = a, in linkage disequilibrium with rs10496032, respectively
  misc_feature [331]..[331]: n is a, t, c or g
gttcgggaccaacctggccaacatgacgataccctgcctctactaaaaatacaaaaattagccaggtgtggtggcagacacctatgatcccagttacttgagaagctgaggcaggagaatcgcttgaatatgggaggcggagattgcagtgagccgagatcacaccaccgcactccagcctgggcgacagagactgtctcaaaaaaaaaaaaaagtaaaagatggtgagaaactggagtggaagtctctaagtttgcctagtttaaatagggagctgtcttcatttcagaagggtaggctttgtttccatatgggcaaatctggaaacagntacccttcacacagaagtataagaaagccaatgggttaatgtgtgtaaagttgcagcctgactttcctggtgagcctgtctctcaccccttgagtgagggttgttcttccacattccctttctgcacttgagctaatgatcctaatattagagactggggtttatacagactcaggcttcaccttcttaacacaattaaaaatagagaatttttttttaatgtagttgtttcaattcccaggtgtttttcctagttgaaagtttctaactttttaatcctgtatttatatattttgtcttcattttctctgtttttcaaaaagaattctg

SEQ ID NO: 1112 - DNA, 661 bp, Homo sapiens
  SPTBN1
  misc_feature [331]..[331]: Chromosome 2, SNP identification no. = rs12713272
  misc_feature [331]..[331]: allele = c, in linkage disequilibrium with rs10496032, respectively
  misc_feature [331]..[331]: n is a, t, c or g
tggaagtctctaagtttgcctagtttaaatagggagctgtcttcatttcagaagggtaggctttgtttccatatgggcaaatctggaaacagatacccttcacacagaagtataagaaagccaatgggttaatgtgtgtaaagttgcagcctgactttcctggtgagcctgtctctcaccccttgagtgagggttgttcttccacattccctttctgcacttgagctaatgatcctaatattagagactggggtttatacagactcaggcttcaccttcttaacacaattaaaaatagagaatttttttttaatgtagttgtttcaattcncaggtgtttttcctagttgaaagtttctaactttttaatcctgtatttatatattttgtcttcattttctctgtttttcaaaaagaattctgggaagtgtttgtagattgaatggagtgaaggtagtggggagcatgacagagcagcgaagcttaaaatggctacagctggaggcaatggatggactcctggccagcaccatccactcctgactccattccacattttactctacaagaggaaactttcatataatagacaaaagtgtatttggagcatttgtctaaaattacgtagctggcagttggcgcctaatctaaaaactaacat

SEQ ID NO: 1113 - DNA, 661 bp, Homo sapiens
  SPTBN1
  misc_feature [331]..[331]: Chromosome 2, SNP identification no. = rs11902659
  misc_feature [331]..[331]: allele = a, in linkage disequilibrium with rs10496032, respectively
  misc_feature [331]..[331]: n is a, t, c or g
ttgcctagtttaaatagggagctgtcttcatttcagaagggtaggctttgtttccatatgggcaaatctggaaacagatacccttcacacagaagtataagaaagccaatgggttaatgtgtgtaaagttgcagcctgactttcctggtgagcctgtctctcaccccttgagtgagggttgttcttccacattccctttctgcacttgagctaatgatcctaatattagagactggggtttatacagactcaggcttcaccttcttaacacaattaaaaatagagaatttttttttaatgtagttgtttcaattcccaggtgtttttcctngttgaaagtttctaactttttaatcctgtatttatatattttgtcttcattttctctgtttttcaaaaagaattctgggaagtgtttgtagattgaatggagtgaaggtagtggggagcatgacagagcagcgaagcttaaaatggctacagctggaggcaatggatggactcctggccagcaccatccactcctgactccattccacattttactctacaagaggaaactttcatataatagacaaaagtgtatttggagcatttgtctaaaattacgtagctggcagttggcgcctaatctaaaaactaacattcacagacccttatt

SEQ ID NO: 1114 - DNA, 661 bp, Homo sapiens
  SPTBN1
  misc_feature [331]..[331]: Chromosome 2, SNP identification no. = rs7569127
  misc_feature [331]..[331]: allele = t, in linkage disequilibrium with rs10496032, respectively
  misc_feature [331]..[331]: n is a, t, c or g
tatttgttctgacttgattgtccttagtgatattcactgctttaggttttacaatgcttacagactttttattaacaaagcacttggcaaaagtataaacctccatgtggtaattgtgttgcttttcccttctgctttgtccttggcaggtaccccaatgtcaacattcacaatttcaccactagctggagggacggcatggccttcaatgcactgatacacaaacaccggtaagtccatacaaatcatcctagcaatcgtggggtaaaaggttgctgtccttccatagcagatttgggtgacttttccatatccgttggcttaactgtcncaccgtggtggaaatttctgcattccatgtgaggaaaatatgggagaatatataaattcttccaaacagaataaacaggttctcccttaatcttttttttcttaattaactttgaagtgtttattcaaaaatcaggtttcattgtttgatgattccatgatagtatattttagagttttactccactaattggtgattttaacctttttggagtaacagtcatgtttcattagtcatatttcttttcaagccatgatttttgttgtgtcccactgttgttctgcacaggcctgacctgatagattttgacaaactaaagaaatctaacgc

SEQ ID NO: 1115 - DNA, 661 bp, Homo sapiens
  SPTBN1
  misc_feature [331]..[331]: Chromosome 2, SNP identification no. = rs12713273
  misc_feature [331]..[331]: allele = t, in linkage disequilibrium with rs10496032, respectively
  misc_feature [331]..[331]: n is a, t, c or g
ggacggcatggccttcaatgcactgatacacaaacaccggtaagtccatacaaatcatcctagcaatcgtggggtaaaaggttgctgtccttccatagcagatttgggtgacttttccatatccgttggcttaactgtctcaccgtggtggaaatttctgcattccatgtgaggaaaatatgggagaatatataaattcttccaaacagaataaacaggttctcccttaatcttttttttcttaattaactttgaagtgtttattcaaaaatcaggtttcattgtttgatgattccatgatagtatattttagagttttactccactaatnggtgattttaacctttttggagtaacagtcatgtttcattagtcatatttcttttcaagccatgatttttgttgtgtcccactgttgttctgcacaggcctgacctgatagattttgacaaactaaagaaatctaacgcacactacaacctgcagaatgcatttaatctggcagaacagcacctcggcctcactaaactgttggaccccgaaggtagggactcaagggattacaggtgggatttttagcatctgtaccatccaggtgttaatgtaaaatctgttttgtgtcagtctgtttcatttgggagttatcaaaggaagagcttaa

SEQ ID NO: 1116 - DNA, 661 bp, Homo sapiens
  SPTBN1
  misc_feature [331]..[331]: Chromosome 2, SNP identification no. = rs10176359
  misc_feature [331]..[331]: allele = g, in linkage disequilibrium with rs10496032, respectively
  misc_feature [331]..[331]: n is a, t, c or g
tctgtaccatccaggtgttaatgtaaaatctgttttgtgtcagtctgtttcatttgggagttatcaaaggaagagcttaattttggttatgggaattttttgaggatttatggaaaggatgacactcaaaaaggccttgaaagatgaatacgatttaaacagagtctgaaggagagcgtgtgcgggcagagctactagcatgtgcaaaggtgcagaaccaggaaagaagaaggtatgcttgagggctaacaattcaatgggaatggtgtttagggtaatagcagggaataccactattcccttctgttagtggatgggatccccatagggncaacaggcaacagggagtcattgaaggttcttagcagctgtgctcgaagtagaaaagtagaaaacctggcataggctgttaatgaatacttgttggctgacatttatctgaaggtggcaagcaggttggatggggatgggtggagattgcaggcaggggccttgttaggaggctgtgctttgcttatgagcaagtaagagtttaaatgaggaaggcacctttgggaaaggggagtgtaggggtggaaggagcagcagtcatagtcctttcttacagctgcatcccattatctgcacggaactaatccctctttactctgtgagtccctgt

SEQ ID NO: 1117 - DNA, 661 bp, Homo sapiens
  SPTBN1
  misc_feature [331]..[331]: Chromosome 2, SNP identification no. = rs12713274
  misc_feature [331]..[331]: allele = a, in linkage disequilibrium with rs10496032, respectively
  misc_feature [331]..[331]: n is a, t, c or g
ggatggcagaacactcaggtacaaacatgaagacgctgaactgttccatgttgaccagcagtcgttgcatttgttcctgctacctgggtggggcacagtagcatgcaacacactgaacagagtcttctctgggttacagacatcagcgtggaccatcctgatgagaagtccataatcacttatgtggtgacttattaccactacttctctaagatgaaggccttagctgttgaaggaaaacgaattggaaaggtgagctggtgccaattttgtgagttgtgagacataattaaggttaattgagccctcattctcccatgcactcataaantttgccaatagcaatttgtagtggactctccggatggtagggaaatcggcagaagcctcttcatcctgaagggtaacaagaggtgggagagatggccaccatatttaggaaaggatctgggggctatctcaaacccagcaacatctttctcctcaactgctccaggaaattgggtattggaaatctgatcgagttgcctaatgtcatgggtgtgacatcctacttaccacagttgaaaaggccccagcatcgtgctttttacttctcatttggctgatgttcacctgccatgttttcaaaacacctcagaccagatgacattgtcctctc

SEQ ID NO: 1118 - DNA, 661 bp, Homo sapiens
  SPTBN1
  misc_feature [331]..[331]: Chromosome 2, SNP identification no. = rs13408295
  misc_feature [331]..[331]: allele = c, in linkage disequilibrium with rs10496032, respectively
  misc_feature [331]..[331]: n is a, t, c or g
aaacttaaactctagaagttgcttggggtctactaagcaagacagccacctgaccctgctctccttattggtttaaagatgtggcttgtaagcttttcaagtagattgttttcccattgattgtgtaagtacagtagaggcataccaataagctcctaacagaggaaaaacattcacttacaggctcagcaacttctaaaagatttctttcaactttgaagtgaccaagtctatcacctttatttatttatttttgagtagttgttgcagcggtttcttcttgaagctccagtttatattttggaatctttcatacagcacccccgcccangctccccactgccccctcccccccaccctggccccgctggccctcaccatctttttcttctattctgcactttttagtgtagatttgacttacttattccaagtttggtgatccttagtttgtgatagctctcctgactcaggccttcaggtatgatttgttttgttctggtttgttggccatcatcttcccctgaaggtgtggggtccatggcagactagagggaaggcatagcttcattgctggctctctgcttgtcgaaagatgatgtgatgctgaagtcaaggctatagtcacagatgtccttttggttgcttcttgtgcacaggt

SEQ ID NO: 1119 - DNA, 661 bp, Homo sapiens
  SPTBN1
  misc_feature [331]..[331]: Chromosome 2, SNP identification no. = rs17046036
  misc_feature [331]..[331]: allele = g, in linkage disequilibrium with rs10496032, respectively
  misc_feature [331]..[331]: n is a, t, c or g
tagagggaaggcatagcttcattgctggctctctgcttgtcgaaagatgatgtgatgctgaagtcaaggctatagtcacagatgtccttttggttgcttcttgtgcacaggtgctagtattgtctcaagactatggcaaacacttacttggtgtggaagacctgttacagaagcacaccctggttgaagcagacattggcatccaggcagagcgggtgagaggtgtcaatgcctccgcccagaagttcgcaacagacggggaaggtaaggatggcccattccaagcattacctccgggtcaccagagattcatatttatagaaacacagtngggcttttgaagttactgtgccactatacattcctggtgggtttgtcatgggagcatgaaatacggtggagtggccttctgaacactaactccatcttgtttttctggaattgatacatcctttccttaaatacgcaaatgctgcctttgctttgagtggcttggtgtttggcagtgagactttgtcatacctcagtctctctggccatgcaccgacaccctggtgtggctgttccagcagctcctggctttcacagctggttgcatatacctctctttggaggatgtttagaatgatttggttatgcttcgtgtatttctagaaacaat

SEQ ID NO: 1120 - DNA, 661 bp, Homo sapiens
  SPTBN1
  misc_feature [331]..[331]: Chromosome 2, SNP identification no. = rs2229503
  misc_feature [331]..[331]: allele = c, in linkage disequilibrium with rs10496032, respectively
  misc_feature [331]..[331]: n is a, t, c or g
cctgaaaaaccgagaggcctccctgggagaggccagcaagctgcagcagttcctacgggacttggacgacttccagtcctggctctctaggacccagacagcgatcgcctcggaggacatgccaaacaccctgaccgaggctgagaagctgctcacgcagcacgagaacatcaagaacgagatcgacaactacgaggaggactaccagaagatgagggacatgggcgagatggtcacccaggggcagaccgatgcccagtacatgtttctgcggcagcggctgcaggccctggacactggatggaacgagctccacaagatgtgggagaanagacaaaatctcctatcccagtcacatgcctaccagcagttcctcagagacacgaagcaagccgaagcctttcttaacaaccaggtaaggtttgttcctgcctttgcttcctttcggtgaaagcagccctggctgccttttgaaatgttttggctggggcagctggtttaaaccacacctgtatggaattatatggataatttagagactgatttttttttccccatactcttaaggcattgaaatccatcacgttgtaggggacaggaattgaaagttgccataagagctgctttgccttacaaagtactgtttgatttcaactgccat

SEQ ID NO: 1121 - DNA, 661 bp, Homo sapiens
  SPTBN1
  misc_feature [331]..[331]: Chromosome 2, SNP identification no. = rs6545435
  misc_feature [331]..[331]: allele = c, in linkage disequilibrium with rs10496032, respectively
  misc_feature [331]..[331]: n is a, t, c or g
gcatgatgactcactcctgtaatcccagctcttggggaggctgggacaggagaatcacttgagcccagcaggtcaagggtgaagttagccgtgatcgtgccactgcactccagcctggtggcagggtgagaccctgtctcttaaaaaaaaaaaaaaaaaaaaagtacggtgaggatttttttttttcttgagaccagtctgtcttcttgctctagaagggtcagggacttcacctgaggacacaaagtagagattagagaaataaaaacagctgaggatagtcaccaacttcagggctgttactgtctcaaagagagagtatgaagggtanattgctgttgccttgataggcacgtgagaggacccttgaggctgatacacaaagctttggttcctttcctcactctctttggaaaaaaaaatttagagcattaacccctgagggaaattcggtcagttacagtgtcccactgggtttttttcctcctaacttttaatttgatgtgatttaattatttcatgtaagtgtaatgaagaaagtgttgtgaactatgttgcacggaaatgtagaacacaggaaaatgagatccttcattgatctgctatgatttgttcctctttttaaataaggagtatgttctggctcacactgaaatgccta

SEQ ID NO: 1122 - DNA, 661 bp, Homo sapiens
  SPTBN1
  misc_feature [331]..[331]: Chromosome 2, SNP identification no. = rs17046061
  misc_feature [331]..[331]: allele = c, in linkage disequilibrium with rs10496032, respectively
  misc_feature [331]..[331]: n is a, t, c or g
ggaagtttcttcagacaccggtcagcagcacgtgttcaccaagctgctcttactcagcgtgttggagaatccaaggctatgtgttcttcctcatccctgcctcagggtttggtggatagaggagagaccttgtgcaggcacaggcagagagaaattgctctaagaatcgaatgaaaacccagctctcctcagttgcactctgcctttatccatcttaataccctgaatatagactggctttcttgtttaggcaactcaggagtatcaaggaagtgtatgtgtggcagtgcttttgaatcctcagtgggtcctcccctattggaaatgaagntctccgctattgtagtggagccactggaaggcaatcctttgctaggcattcacgctgctatttctcagtttccagtctctaagccactgggtgcatgaaggaagtttgccaaagagtgctggcaccttcacagcagatggggaaggagccaagtagggagcgagcaccccctttaccttagcgtttaccaaattcagcagctctttccagttcttacaagttatttatttaaggttttgtgttttaacttctttgagctttagttacccttatcaattgattaaaagtgggattgagttagtatatagtcttacaggtctaaaaattttc

SEQ ID NO: 1123 - DNA, 661 bp, Homo sapiens
  SPTBN1
  misc_feature [331]..[331]: Chromosome 2, SNP identification no. = rs11892236
  misc_feature [331]..[331]: allele = a, in linkage disequilibrium with rs10496032, respectively
  misc_feature [331]..[331]: n is a, t, c or g
taaattaactataattacataaaactaagagcgtggttcttccatcactagctgtattttaagtgctcagtagccaactttgactagtggctaccatgttggacaacacagatatagaacatttctgtcgtcaaaggaagttgtattggatattgatgtcctagaatattgtgcaacctagaagtatttagtgtcatgctttcactctttaaagcaatgtacatttcaatgatatggaaggaaagaactaaagggaactgaaactggctaccaagtaagaagcagagattttcaaaagacaaattagtttcttattcgcttaagaccttcntctatccatctttcaggctgttcccatgtgtatctaacatgcaaagagcagtaatgctgattccaagcaccaagttttaatgtggcattaatctgatgatcattgtactatttcatgctcttctgatacatgcacaaactttgaaaactaaagttggccagaaaaaagtagtttctctgcacgctagttggagaatagtatctagctgatttcacgtgtgagttcgtgagcacaccatatttctctgtctgccggagaataacagactcagccctctctggtttattaaaataaaaatcctcaggcaaaaatggggtgaggaatatccac

SEQ ID NO: 1124 - DNA, 661 bp, Homo sapiens
  SPTBN1
  misc_feature [331]..[331]: Chromosome 2, SNP identification no. = rs17046067
  misc_feature [331]..[331]: allele = c, in linkage disequilibrium with rs10496032, respectively
  misc_feature [331]..[331]: n is a, t, c or g
tctctgcatggttggtggaatttaggtcaagcttgggggctctaaaacacttggtatagtactataatcaaaagggtgatacagtcattggctataaacttttccatcattcagccttattaaaatacaccccttttaagccagaatcttttgagaatggcgtttgtgtgtggaccagccctacatttgataatctacctgtcattctggtagatatttacagagcactcagaggtcaaatttaatactattacaggatgttggtattgttcaaggtatggggaatccaggggtttgtctctttgttcagcttccttccttgttgggtgcnttggttagagaaggtgtggattgtaagatccgcccctgttaccacccccataaacaccacctagatgaggacagctattgtaccagcaatacagtatgctggcatatacagtatgctggaatgagcagggaccctcctattcccagttacagtggaaagatagagaccatcatcatctttgtagtggttttgttttgttttgttttgtttgagacagagtctcactctgttgcccaggctggaatacagtggtgggatctcagctcactacagcccccacctcccgggttcaagcaagtctcctacctcagccttccaagtagctgggat

SEQ ID NO: 1125 - DNA, 661 bp, Homo sapiens
  SPTBN1
  misc_feature [331]..[331]: Chromosome 2, SNP identification no. = rs13004944
  misc_feature [331]..[331]: allele = c, in linkage disequilibrium with rs10496032, respectively
  misc_feature [331]..[331]: n is a, t, c or g
ggagcctttcctggcagcagcccacagtgggagtggaagggccttggaagtgttaattctgtaagtacttctactggttttatgtgtcacttctagatctttgttggtagaaccatgaaggatttaaggtgccaatttgttgtgacaataactggtgtaaaagtgggcttctcacggtcactcaggagaagggacatggtcccttcagttggttacttctgattccaggctggctctgcattcttttgtgtatcttcagcctgggcaaacaaaaagctcttcctaggttagcaaagcaaatggggcgggaatcaggactctggcatggccnttacaggcaggcagtaatgagccagggccgattcgggatggaagccagcaaaagtgggtctgggcctggcgtttggctgaccccggtaagagagctcctttctcaggtctgtcagcggccagcagcctttgtgcggctctctagagttcagatccaagcagacatgttgggtctcaaaatcaagtcctgtgaagtgttcttggtgtgaatgaaaggttctttagagaactagaggctatagaaaaagaggtgaaggtgactcaaacttgaaggaaacattgaaagggcatgattgttgccttagccctacagtgagcaagttatttatgc

SEQ ID NO: 1126 - DNA, 661 bp, Homo sapiens
  SPTBN1
  misc_feature [331]..[331]: Chromosome 2, SNP identification no. = rs3739109
  misc_feature [331]..[331]: allele = a, in linkage disequilibrium with rs10496032, respectively
  misc_feature [331]..[331]: n is a, t, c or g
acacggtcaatcacctggcagatgagctcatcaactctggacattcagatgccgccaccatcgctgaatggaaggatggcctcaatgaagcctgggccgacctcctggagctcattgacacaagaacacagattcttgccgcttcctatgaactgcacaagttttaccacgatgccaaggagatctttgggcgtatacaggacaaacacaagaaactccctgaggagcttgggagagatcagaacacagtggagaccttacagagaatgcacactacatttgagcatgacatccaggctctgggcacacaggtgggtatggcagccacccnggggtgctggggaggctttttctccatagaacatctttgggcatctgtaagtatctccctgttccttggctcttcaaaagaattgccccaattaagcacatacatgtacccactttgtaatagtgctccatttgggagaacttatcagtccataaaggtctacgtttgccacatttgtgaacattagatgagtgcccccatgattaaaataaataaaccagatgcatacacagatgtttgcaagttataggcctcagcaagtgtttttattatgttagcatatccatccagaacaatttccaaaataatattttactatttttcatcaac

SEQ ID NO: 1127 - DNA, 661 bp, Homo sapiens
  SPTBN1
  misc_feature [331]..[331]: Chromosome 2, SNP identification no. = rs17046077
  misc_feature [331]..[331]: allele = a, in linkage disequilibrium with rs10496032, respectively
  misc_feature [331]..[331]: n is a, t, c or g
ttgcctcgtgcacttggctcgtgcacaccatcaccagggaatgtgggagcctggggttatcaaagcctgtcccattctccctactcctggctcccttgacccacagtcactcaggccctcttgcccacatatgtgcttgaagtaggaccttgggcttcaagtagccacgtaccttggacatgactaactgccccgtctttgcaatgagatgacttttctgagttatttttctgtgcctgctttttggattaaagaccactctatccctttccatgcacattactaaaggtgtcaccctcaacatctgctttaatatggtgtccttgggttnttatttaatatttgtcctatatctttggctttgtttcatgcaaattagtgaagagaagttaatagaggaacacacaggtacatatttaacctccagttcacccctctgccagctccagcccccactgtaattgagaaactatgctgcaataaaagggattttttatgatatatatttttttgaagcagttgtatttcctggatcaggatcagtaggttttgatccatgctggtcactgctgtctaggctagttcccatcctgtgtatctttttgtgtctgaataaggagaccgtattagctgctctttgatatggccatcctgaatcttt

SEQ ID NO: 1128 - DNA, 661 bp, Homo sapiens
  SPTBN1
  misc_feature [331]..[331]: Chromosome 2, SNP identification no. = rs2271329
  misc_feature [331]..[331]: allele = g, in linkage disequilibrium with rs10496032, respectively
  misc_feature [331]..[331]: n is a, t, c or g
tggcccagcctaagctcagggagtgattcagacctgaaagaccatcagtttctttcaaggccatcagtttctttcaaattaattgtgtgttttaaaacctacacattttttgaaaagcttgatctcctaacggaggcatcgtttgtctaattttagggatgtatcatctgttgaactcttaatgaataatcatcaaggcatcaaagctgaaattgatgcacgtaatgacagtttcacaacctgcattgaacttgggaaatccctgttggcgagaaaacactatgcatctgaggaggtaggttgctactttgctttggagctgcagctggcntcaagatgtaaaatgactttgttttatatgtttgtgtgtgtcagagatactgtgtttacattcttatacacacacacatatgttttaaaactcctttcctgtgcgtctagaataatgcaattatgcaagactctaggcccaggctggtaaatctctggcacagaagacaatttttgagggctacaaaatggactccgcatcctccccaatcagtactctttctaggtgacgccaatgtccattgactatgccctagatcagtttgctgttgagtgcatggttggtgattctggttaggatggtggtaataaagaggtaaattattaggtg

SEQ ID NO: 1129 - DNA, 661 bp, Homo sapiens
  SPTBN1
  misc_feature [331]..[331]: Chromosome 2, SNP identification no. = rs2048370
  misc_feature [331]..[331]: allele = t, in linkage disequilibrium with rs10496032, respectively
  misc_feature [331]..[331]: n is a, t, c or g
ctctattttctcttagttggagttactggaagtgcgcagacagcaagaggaagaggagaggaagaggcggccgccttctcccgagccgagcacgaaggtttcagaggaagccgagtcccagcagcagtggtgagtcccagcagctccagaggctggacccttagcctcggtggccaatgaggtttatggggcatctttctgaagccttgcattgctaggcctaaccacatgccctgcctactgattgcttccatagactgtttaaaggctgtacagttatccctaaataaccttggagggcactgatttgtccacagtcacataggtatgnaggtggcagaagtagaatgtagacagtgccctttctcatcctgtgtgcacacacacaggatgctcagaacttccatatgattaaatgcatggagtgaactgcccagattttaggccagtgattttgtggtgatgcgttttttgagagttctaagtaacttcacacagagggcagcaattattctctacttccaaagggctaattattttgctatggtaagagttccatggcaacctctaatgctgcctttatgtggtggagcggggcatagggcattcctgtagtcgtatttttctgtctagagtctatttaaaacacttggaagtttca

SEQ ID NO: 1130 - DNA, 661 bp, Homo sapiens
  SPTBN1
  misc_feature [331]..[331]: Chromosome 2, SNP identification no. = rs10528
  misc_feature [331]..[331]: allele = t, in linkage disequilibrium with rs10496032, respectively
  misc_feature [331]..[331]: n is a, t, c or g
gcaaatgaatcactaaccaagaaaacaaggaaaataaaaggaacaaaatgaattttaatggacatgtgctttaagcatgccaacagacagcacaccactagagacacacatcaaaagcaatcacagtgctatgatcaaatgatgggtacatgtgaacacatccctcgcaaccccaccccccacgttgcttctctttagcgattagtccagagtgctttagtggctgggcacacccgagatacttaaatcaggaggtgaacatgaatgcaacgtgacaactagtagcacagaaaacacctgattggtattcaaagtgcacgaagcaatgctnttttcaagttcactgagtctctgcgtcatcactcaaaacaataaaaatactttttcttctcatacaagccaattgtaattaaaattttgttatgacaagctacatttaaaaatctagataaaaataggcatgatagcaaatgctaagaacatcatagcactcttttcttgtgtgcttatgtggttccttttttggagggtcttctagatacaaaaagtgtcaaattgggtgtcagtcctgatgatacaaaatttaaacacacacacatatatatatgaaaacatcacatatatacatatagatcaatgaaacacaaaatgtaacttggag

SEQ ID NO: 1131 - DNA, 661 bp, Homo sapiens
  SPTBN1
  misc_feature [331]..[331]: Chromosome 2, SNP identification no. = rs17046108
  misc_feature [331]..[331]: allele = g, in linkage disequilibrium with rs10496032, respectively
  misc_feature [331]..[331]: n is a, t, c or g
gctcccgaagacgtctccagcctgaagggtcagagccgctggaagcctggctgtctctgggctttctcgtctcagtgcagcaaggcaccgtgatcaaccaacccgtgatggggaaggccctggttctgtctttgtttgggggtaaatagctgtgtggtgttgagtgactgtgattggcttttccagctcctttaacacaaactacaacccactcacgatacaacttcggcagatgtggtcaaattgatgtttgttgacttgcctcatttccttccagctcttaagttccaaagtctaactgggatggtagatgtgaaatgcatgattgtcntcctaatttctgcatgtgtttatgacaatgtgttgaggggagggggaggagagccagagagcattttcaggaaccgaggtctttccttgtcttactctgggggaatgccatgtagctctgatagagttgtctatcggtctgtttgtgaatgccctttcgcttaaacttccagcccttctggtggcatccttggttgtaaggtggctgctgtataacgtccactctctttcatatttaatatgtgtgattgttactgttgtctttttgttttaaagtaaccataagaggagatgatctgagttatatttattgatcagaggaatagagtgc

SEQ ID NO: 1132 - DNA, 661 bp, Homo sapiens
  misc_feature [331]..[331]: Chromosome 2, SNP identification no. = rs3850350
  misc_feature [331]..[331]: allele = t, in linkage disequilibrium with rs10496032, respectively
  misc_feature [331]..[331]: n is a, t, c or g
cctacttgagcatctcaagttgggatgcatcttctgatggcacttccggaactggctgtggtttttttgggtgtaccgagagtgccagtgactgtgcttcttacaattcctggcatcttgagtaggtgaaacactgtatcagactgggtgatgggcacattgtcatttcaccaagttcctggaactgttagaattgcttgtgtatggggatcctatgttagttcccctggatacattgttttatcagtcggaattcttaaataaagacatacttcccttcatgtagtggtgcagtccatgtagaaaaggcaggatcaatgctggagtcttncccattatttgcattactttcctataatcagcgttatttatgagttggttcctatcctctaaagatgaacaattttttaaatattatgaatttatgggcttaaatatatttgagttttctggtgaaatcctcgttttttggtgaatatgttttataattttgaattgacctttctaaacatggtccataacacaaaaacatattttaacaaagaagaaaaaagacttctttccatcaaagctcaatagagatttctgtctattgaagatcatggtgaaatatttcattttccactagaatagtttaaaattattcatttgctttattcca

SEQ ID NO: 1133 - DNA, 661 bp, Homo sapiens
  misc_feature [331]..[331]: Chromosome 2, SNP identification no. = rs17046149
  misc_feature [331]..[331]: allele = t, in linkage disequilibrium with rs10496032, respectively
  misc_feature [331]..[331]: n is a, t, c or g
gcaagtagatataatctttaaactttcatttctccctgagtatttgtaacagaatagggtttgtattcacacctggagcctttttataatgttttcattttatttttggagcattgtattgttatcatttgctctcatgttctgaaccaactgagaaataagaggtatgtggatgaaggccaaaatatcaactttattactggtgaagtttaggttgtgggaggtacctttgtgcttatatctgaagctgagcatacaatagacatacctgcccagttatggaaggtactggaccatctcaggtctcctctgatgagggcaggacatttgntattaagcctatagcttggccaagggcagagaacatgagctccatgcaggcaagctgagtttccatgagcaaaatgggaaggggctgagctgggcttgccctttcccatcagataaaccactctattgcctcagggtggagtgaataagtggcgacaggaagtggaaaccataatttagctccaagtggggttacattttttcttatcattacccaactttttcttctgttgacctatcacgtataaccacttaagttatgtgttctataatttacatgtactttaaattcttcagcctaggtactgtgatataaatacgtgagtttgct

SEQ ID NO: 1134 - DNA, 661 bp, Homo sapiens
  misc_feature [331]..[331]: Chromosome 2, SNP identification no. = rs10188185
  misc_feature [331]..[331]: allele = g, in linkage disequilibrium with rs10496032, respectively
  misc_feature [331]..[331]: n is a, t, c or g
tatgtttttaaatggctcagaggccaagcacattgcaaggtgtcaggcatccctctgacatttcagttgaatataaatttggagctgaatctttatcaaaggtaaatatgtacacacagtaatgctttcataagagaaaatctcaggtaagcaccctatgtaatgaagacagtaacttattaacacatagctcagctatcgattgctgtgttgtaagccatctcaaagcacagtagctatgtgatttattacttgtcatggttctgcggttgatggagctccactgggaggagcttctgctccacgttgggtggctgagatcactcatgcnactgcattcagccggcaatttggctggagctgggatgtccaaatggcctctcatcctccaggatctccttgcacttggcttttcacccttcagcggttcctatggtttggatgtcccacccaagtctcatggtaaactctaatccccaatgctagagatgaggtctggtgagaagtgtttagatcatgggggcagattccttgtgaatgtcttgggccatcccatccccttggtgataagcaaactctcactctaagttcttgtgagatctggtcatttaaaagtgtatggcacaccaccccctgaccatgctcctgcttttggcttttg

SEQ ID NO: 1135 - DNA, 661 bp, Homo sapiens
  misc_feature [331]..[331]: Chromosome 2, SNP identification no. = rs9309258
  misc_feature [331]..[331]: allele = c, in linkage disequilibrium with rs10496032, respectively
  misc_feature [331]..[331]: n is a, t, c or g
ctcaacctcccaagtagctgggactacaggcgcccaccaccatgtctggctaatttttgtatatttaatagagatggggtttcaccatgttgaccacacaccacataaaattttttattttaaaaataaaataatatttttaaggtctatgttgtagcttgtattagttcacttcttttcattggaaaataattttccattatgtaaacacattttatgtattcattcacaaattgatggatatttggattatttccactttttggctattataagtaatgctgctatgaacattcattaacaagtttttgtgtggatgtatgttattctntgtcttgggtatgtacctagaagtggaactgttgggtcatatggtaactctatatttaactttttgaggaactgccagattgctttccaaagcagctccatcttactgagatataatttatcctcataagcagtgtatgagggttcaaatttctctacttcctctccaacacttgttactgtctttttgattatacttattctagtgggtgtgaagtggtatcttgtggttttgatttgcatttctgtgttgggtaattatgtttagcatcttctcgtgctatttttatttttaagtcttttacttaaaaatgtggactctaaccccatt

SEQ ID NO: 1136 - DNA, 661 bp, Homo sapiens
  misc_feature [331]..[331]: Chromosome 2, SNP identification no. = rs17046257
  misc_feature [331]..[331]: allele = g, in linkage disequilibrium with rs10496032, respectively
  misc_feature [331]..[331]: n is a, t, c or g
tagcctgggcaacggcctgttttgtctcaaaacaaaacaaaacaaaaagaacaacaaaaacttactgtctttatataattcatttggcactgttttatggcacgacatcattgatcaactatatttttgcttctatctcaaacctttctcaggccgtgtttttgtttttggcagtgttcttgttgcctagcacagtgccatctcacttatttgttgattctgtttccttaaaaacaaagatgagaccaattcaaatcctcattactgcgggcagcaacaaatcatccaaactctggcacttccagttctttcgagctttcctaccaggtcngagggttgtcttaaaacttgagggagatgaactgagtaagcgattacactgaaagcatgggagggaaaggacgttccaaacgtccaatccatcatccttttgcagcctcttagtcactgggattttgaaatctctttccaaagactagctatggccctaaattggaaataggctacttgagaacacagtggattcatagttcatctcgggcagttttaggagaaatgccaccagcttctgcgtttgaaggccaaggttagctgttcatggcgtgagcaccttcctgcttccaacctccggttatctgtaaatacccaagtcctctaattt

SEQ ID NO: 1137 - DNA, 661 bp, Homo sapiens
  LOC400954
  misc_feature [331]..[331]: Chromosome 2, SNP identification no. = rs6732751
  misc_feature [331]..[331]: allele = g, in linkage disequilibrium with rs10496032, respectively
  misc_feature [331]..[331]: n is a, t, c or g
ggcatggcaaaaccccatctctacagaaaatacaagggctggctgggcatggtggcaggtgcctgtggtccctgatattccgggacctagggccagagaatctctttggcccaggaggcagaggttgcagtaagcccagtttgtgctgttgcactccagcctgggcgacaagagtgaggccctgtctcaagaaaaaaaaaagaaaagaaaaaatttaaaaaagagaaatatccacagctttggaacaatgacctgaaacaatgatctattagagattttaattaaaaaaaattattttagtcaaaattgtgacatggctcaaataatctantgctgcaaatacaattgaacttgttggatttgaagagacaggtctaacagccatgattgggcctggagtgtcaggtaagcaagttcacatgaaggcctagagatgtgactttatattctttagtcccttgaccagtttgaataagagaaatatggaggtaactacaaagaatcaaatccatattaagttgagtgcttgctctgtaccagacacttcatgtatatgtcatcctattgaattctcccaccctcaacactgagaaataggtcttctcattttacactgagaaatggctctgcgaggggaagagatttaatcagagttactcaa

SEQ ID NO: 1138 - DNA, 661 bp, Homo sapiens
  LOC400954
  misc_feature [331]..[331]: Chromosome 2, SNP identification no. = rs7582640
  misc_feature [331]..[331]: allele = c, in linkage disequilibrium with rs10496032, respectively
  misc_feature [331]..[331]: n is a, t, c or g
gatttgaagagacaggtctaacagccatgattgggcctggagtgtcaggtaagcaagttcacatgaaggcctagagatgtgactttatattctttagtcccttgaccagtttgaataagagaaatatggaggtaactacaaagaatcaaatccatattaagttgagtgcttgctctgtaccagacacttcatgtatatgtcatcctattgaattctcccaccctcaacactgagaaataggtcttctcattttacactgagaaatggctctgcgaggggaagagatttaatcagagttactcaatggtaccatcctactgctcattggatnccacttactctgtgcattggaaagagcgcaaagtgaaagcttttgacggaagcttataatgatcttcataaatgattgcattattgctcttcttattaataaattatagtcttgtgatttttattaagatttgtttattctctaagttgggtgtaatttattctttcatatttgttaattcatcaaaaactcattttacatctataatgtgccagatgcagggggtatagcagtgaacatgacaaagtttctgccgcctcgaagcttactttctgatgggggacgccaacagtgaatggacaagaaaataagatgactatagattgtgat

SEQ ID NO: 1139 - DNA, 661 bp, Homo sapiens
  LOC400954
  misc_feature [331]..[331]: Chromosome 2, SNP identification no. = rs6708082
  misc_feature [331]..[331]: allele = a, in linkage disequilibrium with rs10496032, respectively
  misc_feature [331]..[331]: n is a, t, c or g
tgagtccaggctcactcctgtcatcccagcactttgggaggctgaggtgggaggatcgtttgagcctgggagttaaggaccagcctgggcagcatagggagaccccattgctacaaaaaattaaaaaatttagccaggcatggtggcgtgtgcctatggtctcagctacttgggagcctggaaggtcaagactgcaatgtgctgtgatcacaccattgcactccagcctgggtgacagggcaagaccctgtcaaaaaaaatatatatatatatgactgtgttttgttttggaaaatgtggttgccacataatgggtcactgcttgaaaacnttgcgctgaactatactatcttataaagaattgtatcagtcccaccaaccccatcaatcagtcatttggatgacactgtgataggtgaaaaactgttcacatggcagcagccctaattaggcaacactatcctgcagcctctcctatcctcaaggtgtggatctgaacacctttttgaagcactgtgaaattgttttccacaacagccacaccattttagcatcccaccagcaatgtatgagagatccaattcctccacatcgtcaagatttactactgtctgtcttttttttactattgccaggctgctgggtgtgaaatgatatctca

SEQ ID NO: 1140 - DNA, 661 bp, Homo sapiens
  LOC400954
  misc_feature [331]..[331]: Chromosome 2, SNP identification no. = rs6740110
  misc_feature [331]..[331]: allele = c, in linkage disequilibrium with rs10496032, respectively
  misc_feature [331]..[331]: n is a, t, c or g
tatatatatatgactgtgttttgttttggaaaatgtggttgccacataatgggtcactgcttgaaaacattgcgctgaactatactatcttataaagaattgtatcagtcccaccaaccccatcaatcagtcatttggatgacactgtgataggtgaaaaactgttcacatggcagcagccctaattaggcaacactatcctgcagcctctcctatcctcaaggtgtggatctgaacacctttttgaagcactgtgaaattgttttccacaacagccacaccattttagcatcccaccagcaatgtatgagagatccaattcctccacatngtcaagatttactactgtctgtcttttttttactattgccaggctgctgggtgtgaaatgatatctcattgtggttttaattttcatttccttcatgactaatgatattgatgatcttttcataaacttactagccatttgtatatcttctttggataaatgtctattcaaatctattacccatttttaatcagtttgtctttttattgttgagttctaagagtttttttacatattctgggtatgagtcccttatatattatttgcagacttttttcccattcagtgagttgtcctattcactgtcttggtggtacccttggaagtaca

SEQ ID NO: 1141 - DNA, 661 bp, Homo sapiens
  LOC400954
  misc_feature [331]..[331]: Chromosome 2, SNP identification no. = rs10169439
  misc_feature [331]..[331]: allele = t, in linkage disequilibrium with rs10496032, respectively
  misc_feature [331]..[331]: n is a, t, c or g
agacttttttcccattcagtgagttgtcctattcactgtcttggtggtacccttggaagtacaaaagtttttcattttgatgatgtccaatttattaattttttcttttttatgcttttgatgtcatatctaggcaaccatcacctaatccaaggtcatcaagatttactcctatgttttcttctaagagttttatagttttagctcttacatttaggtagatgatctgttttgagttaatttttatatatggtgtgaggtaggggtccaactttattctcttgcatgtggatatctggttgtcccaacatcgtttgttgaaaagactacnttttctccatgaaattatcttagatgcccacagcctttgaattcagccagtaggggactaacttctcccatgtagaagatgctgaatgtttggggatccagaaatggaaataatcattaaagaggttaacctagaagaaatagaaaccataggctttggttgctattctgtatttgtaaagatgctgtttgagctaatgagtgacatatagatttttatatatttataaagtaaactataacttaaatagtgagtgcagtgtttagtaactgctggtttagtgaccaacaacagtctatacattggatttgtttactcccaaaggttttt

SEQ ID NO: 1142 - DNA, 661 bp, Homo sapiens
  LOC400954
  misc_feature [331]..[331]: Chromosome 2, SNP identification no. = rs6545440
  misc_feature [331]..[331]: allele = a, in linkage disequilibrium with rs10496032, respectively
  misc_feature [331]..[331]: n is a, t, c or g
tatgttttcttctaagagttttatagttttagctcttacatttaggtagatgatctgttttgagttaatttttatatatggtgtgaggtaggggtccaactttattctcttgcatgtggatatctggttgtcccaacatcgtttgttgaaaagactactttttctccatgaaattatcttagatgcccacagcctttgaattcagccagtaggggactaacttctcccatgtagaagatgctgaatgtttggggatccagaaatggaaataatcattaaagaggttaacctagaagaaatagaaaccataggctttggttgctattctgtntttgtaaagatgctgtttgagctaatgagtgacatatagatttttatatatttataaagtaaactataacttaaatagtgagtgcagtgtttagtaactgctggtttagtgaccaacaacagtctatacattggatttgtttactcccaaaggtttttgctttttaaaaatgattttataagcatcagccttgctgctggacacaggtctgttgagccagctgaggaggtgagtggtatggaaagcagggggagttgtaacagagggtgctctttgacctctactcttttatcagttcattcctttcttcccctaaagggaggtaggcat

SEQ ID NO: 1143 - DNA, 661 bp, Homo sapiens
  LOC400954
  misc_feature [331]..[331]: Chromosome 2, SNP identification no. = rs13428703
  misc_feature [331]..[331]: allele = g, in linkage disequilibrium with rs10496032, respectively
  misc_feature [331]..[331]: n is a, t, c or g
gctggtcagagaatttttctaaggctatggagaattattttaaggcatgagccttcatttttagtttaactgctgtttaataatgccaggaaaacatttttctgtgttacgagttgattttatggataggaataaaacaagactcacaaatgacaagatgtcttctaagtaagggatcatcagttgcaagaaactttttcaaagaagtacagttgagaagattacaaggtgacaagaaaaccttttggaactcaattacagggagtgtggctggtctcttaggcactgcacagtatcacgcagctattctttctctaattatttctcttgnaagtgtccctgtgcatcacagggattcacgtctctgcttctctctggacaatacaggcttttattttctctggctgcttaactcaaggattcattttgcacatggccaccctcccaaaaatccacctcagtcccctgagtacaatccgtcttggtcctacagtaccaactgaatcaatcttttgagtcttaattccaaattcccaggaaagagaatcgaattgctctatcatgggtcagaatgtctaccaggtccaaacagctgtagcctggagggtgggacaatgtttcaaagggctgcccctttaaagaagattccccacccctaata

SEQ ID NO: 1144 - DNA, 661 bp, Homo sapiens
  LOC400954
  misc_feature [331]..[331]: Chromosome 2, SNP identification no. = rs6752720
  misc_feature [331]..[331]: allele = g, in linkage disequilibrium with rs10496032, respectively
  misc_feature [331]..[331]: n is a, t, c or g
catgatgagagtcaaactcccacaagatgttctccacggtctattatgatcttctccctggcttctcttccagcctgatgtccctccctgtcttaacatcctccagccacatcacacaccttgcagttccctgaatctggcatcctattttgtgtttcctcatccctgtgtgtatcattttggttgcctgaaatgacccctcctttctccacttatgcagtccttcacttccttcaatatcaatgcaagtgccacctctccctgaagccttatctgacagctcaagactatcttgtcctcctttctctatgcatctgggctaccatgcacnttcctcccttctggagtcattgcatcgtgttgcatttgttgacttacccatgtttccatctggtttgaatttcatgtgtgtgtccctgtgcctagcaccttgtcatgggcatagtaagtgctttggatattattctttatatttcaaattatttggaaggagcaaggtgtggaataggggtgagatttctatagaactcattttatacatacttcgtgaagataaaaacccaaaaatattattctcagctggcattgagaggcaggattcagaatcttcttttttaagagaatatttgaatggcaataatgactgattattgctgtgttc

SEQ ID NO: 1145 - DNA, 661 bp, Homo sapiens
  LOC400954
  misc_feature [331]..[331]: Chromosome 2, SNP identification no. = rs6753004
  misc_feature [331]..[331]: allele = c, in linkage disequilibrium with rs10496032, respectively
  misc_feature [331]..[331]: n is a, t, c or g
gacttacccatgtttccatctggtttgaatttcatgtgtgtgtccctgtgcctagcaccttgtcatgggcatagtaagtgctttggatattattctttatatttcaaattatttggaaggagcaaggtgtggaataggggtgagatttctatagaactcattttatacatacttcgtgaagataaaaacccaaaaatattattctcagctggcattgagaggcaggattcagaatcttcttttttaagagaatatttgaatggcaataatgactgattattgctgtgttcttagacaccaaatttgatttgacttcttccttatacttctntactggcctagatggaaaatacagccattgaggacataatgtttcctactggaatatggccatggcccttacaatgaatgagacattccttttgaatgtttgtgcttaaggtattttgactgtattataagaaaaatcatgatttgcatccctttcaatgtaagaaatgtggtcttttaagcaacttttgaaaatctgttgaagtgtttataagagggaagtgaagtccagatgtctgcagagattgtaaggcagcatctgccagctctaactaaatttgtctttcctggcctagaagagttttacccaaacatacagaagtagggcttc

SEQ ID NO: 1146 - DNA, 661 bp, Homo sapiens
  LOC400954
  misc_feature [331]..[331]: Chromosome 2, SNP identification no. = rs10194108
  misc_feature [331]..[331]: allele = a, in linkage disequilibrium with rs10496032, respectively
  misc_feature [331]..[331]: n is a, t, c or g
tatctctcattcacttttcaacatagtgaactggtttctacttccgccagccactggagttctctggagcgacttcagtgacctccattgctaggtggagccacatcgtgcttaacctcttcacagcactgggtcagctgatcaccttctcctcagtgcctatccttttctttcctcatcattgtggtcccctggttttctcttacctcccctgccctttgcctcctctccctaggcctacctgatacatacaggggccggtcagtgtcactgatgacattttcttgccaaaaatgcatggcgtcaatctaataatgaggaaacagaccantgcaaattgagggacattctacaatacaactggtctggacttggcaaaaaatgttattcttgtaaaagactaaaacagattgagggaatgtccaggttaaaggagactagaattatagaactaaatgcaatgtgtgactttggattgggtggagaggggttgctatatataacagtattgggacaattggtgaaatttgaatgtgggactatatatgaggtaacagctttgtgtcactgttaaatattctgaatttgattgtagcaatgcaggtatataagagaatgtacttatcttagaagatgtgtgctgaaatacttaggagtgaag

SEQ ID NO: 1147 - DNA, 661 bp, Homo sapiens
  misc_feature [331]..[331]: Chromosome 2, SNP identification no. = rs12614711
  misc_feature [331]..[331]: allele = t, in linkage disequilibrium with rs13014264, respectively
  misc_feature [331]..[331]: n is a, t, c or g
cttctcttctattttctgaaatatataagattggcattttctttttaaaaatattctttttaggggtagcttcctatttctgctgacatctttcccatccagttgcttagctgttcatctccaagttcatgtacaggtttctaataggtatttagaatcatcgttcaataattaaaacatctagttcaattgtggcttggcttctataagctcttttatttcttgaaaatgggcaatgctttcctacctttttgcttgtctagtactttctgttattgtatgctggacattatggatgatatattatagactgtggattatgctatctttntgctttggaggcatttgattacaggtggattgttttattttcttcagccttgttttttgtctttttaaggatgagtttatttcagttttgcccttagttctagagtaaagaacttgccaaagatagcataaagtagtcagcattagatctttactttaaatgcatgcctgtttgagggtttcaactgaatgcctggcttagctactgaggagtctggactctagttgagtcaaaactttgtcatctacacaacttttcgggcatgatctttgtggaaatgtctgctgagaaatctctgctgagctgtcggcccttcatcctgctattatg

SEQ ID NO: 1148 - DNA, 661 bp, Homo sapiens
  misc_feature [331]..[331]: Chromosome 2, SNP identification no. = rs17809625
  misc_feature [331]..[331]: allele = g, in linkage disequilibrium with rs13014264, respectively
  misc_feature [331]..[331]: n is a, t, c or g
gagtcttcattttgcacagtagaaaagaaacagatattccataaaattcactaaatgtaaaatttgcccacaagcatcctacatagaaataagaaagtatgtaatctagaaaagttttaaaaatgataaaaattacctcctctgaggaatgggagtttgtatgactcgcaaagtacagtaaaaggactacttattttggctatgagccttgcagaactatttgatcagtgatactccatgcaagtatttctttgataaaaacaaaaccaaatttaaagaactcgccaattctttcgacatgaatcctaaaaatggcatttattaaatatanctccgttgcctaaattcatcatctttttgtactagccaaccttttatataaggttgaaatgcttcaatggccttacggaagtcttagagacacctgaacaagacacagctacaagacagcctttttaatacacaattttcagcaaaatgacaaatacacaacaacctgtttaatatggtcccacatgtgagagaaaaaaactgatatattacacacacaaacacgtgcttgcttgcatgcacacacacgtttgtatattcatagaaacattttagaagtatcagcaagaacttctaagcctgataaatttctgcacgttagatttagatc

SEQ ID NO: 1149 - DNA, 661 bp, Homo sapiens
  misc_feature [331]..[331]: Chromosome 2, SNP identification no. = rs17048907
  misc_feature [331]..[331]: allele = t, in linkage disequilibrium with rs13014264, respectively
  misc_feature [331]..[331]: n is a, t, c or g
catttcagtacaattgtcctctattacagattatttttgaagaatacgcttgtgactaatgtacaaaatagcaaatttgaaagaaaaaaattaaattcatcaatatgggtgtattttttctttctctcccttcttaattccatgaaaacatgtttggcatatttgtttataatattgtaatctaacttaatattcactatttcaaactccatgtttctgtggattctatcttatagggtctatgtgttgttctattatgttgatgcacagtgtctcttgtaaccatttccctactgcaatttgactttttcatactaatgtgctcaatttnttttagccttgcatagtttgagttctgttttctgtcagcttaccagtaggtggtgctgagtagtagctataaataatccggttttagaatacgtgctccactaaaatccttcctctagagtgacagcactgagccaaatcaggaagtggtttaaactggttttccagtagtgggatgggtttcctctatttcattcatattatctcgtattcttcctcttcggagtaattccgaacatggtttcaagatgactgcctgcaaacagggttactgtctgtggttctgacaaagagaagatgcaatgctccagaaggtgtcttacttcctgac

SEQ ID NO: 1150 - DNA, 661 bp, Homo sapiens
  misc_feature [331]..[331]: Chromosome 2, SNP identification no. = rs17048911
  misc_feature [331]..[331]: allele = c, in linkage disequilibrium with rs13014264, respectively
  misc_feature [331]..[331]: n is a, t, c or g
gctatgagaagaaccttgtgctttaagaaaaaaatttagtacatcaaatttgaaaattgtggactggctattggtactttggcttgttcatctatgactattcacagctaaaacatggaccacttgtcatcaagatactaaatagttgaaagtgggaaatattaatgctatataaaaatggctaatgtttttacaaaattaacaatcttccttttagaattggtacaatctttccagagtgaaaaactacaggttttggcaggcaaaatgtttagagtcacacatgacttctgctatgtttgacaacctcaccaactaggatgctgcaaanctctaattttgaggcctccagggttaccggttagttctaataagataacgtggaacaagctagattagattgattcagcagaatagatttaactcagagggcaatcttggaagccactgagtgatgaagtagctctcatagttaagtgaattattctctaagaaatatttggtttatgtgagtttgaagacatctactggtggctcctgggctgtgcaatgcaataaatctgacctggtcatgctgttgccactttggcaaatgcattgtccaacataatgcatgttggacatgcatgttggacataccactagggtggtatggtagaat

SEQ ID NO: 1151 - DNA, 661 bp, Homo sapiens
  misc_feature [331]..[331]: Chromosome 2, SNP identification no. = rs6747684
  misc_feature [331]..[331]: allele = a, in linkage disequilibrium with rs13014264, respectively
  misc_feature [331]..[331]: n is a, t, c or g
ataatttacaatagcatcgaaatatcaaatacctaggtataaatctactgaaaaacatgcaaaagctatataaacattactgagagaaacgttaaaagatctaagtaaatggacatgttcatggattggaggactaactattattaagatgctaattccttctgtattggtgtataggagtcagattatatctgtccatgtagtaattccctatgacttgtcacttgggcatatttgatttttctagcctgcagctgagttctttcaccattgccctgataccaacatacagcaagggctcattaaattcccttccatcttcccagcaaangaccagagctctttaaatagaacatctctttatacactcacaatgacctgtgaaagagctaatacatggaaattcaaagggattgttaactttctgttaatacttaacctcatgactcaaatatacaaaacctagattttcatgaagctgaattattgatctgttaacagccctgcccatattgagaagacgataaatgaaatccagaagtgaaaccactgaattccaaagggaatctaggggaatcctaggtcagaatctgaacaagaatgtaagatttattcattttccaaccacgcttcagccagtctttaaaagcaggcaacaaat

SEQ ID NO: 1152 - DNA, 661 bp, Homo sapiens
  misc_feature [331]..[331]: Chromosome 2, SNP identification no. = rs17048930
  misc_feature [331]..[331]: allele = g, in linkage disequilibrium with rs13014264, respectively
  misc_feature [331]..[331]: n is a, t, c or g
gcatctatcactttacaaattagataaatatcaacatgattactacacatgaagtagagaaaaagtaaataatccttgcactaccttccagtttcaccaagctcactggaggaaactatgaacgtactcaagaatagaaagaatgccaaatgtcactagatgatactgtttatgactttcaatattcaggatactcaaaatttaaggaacactgtacagggggaccatcaaaagggggatatggacaaagatggactgcctcaactgtaaaattagtaaagcctaactgttacctactttttgaacattaagacagacaattttgtaaatntacgtcactgtcttcaacaaatagcacatggcttaagagggtcacagtttcaaacaacatctgatactttctactatatgtgggtgttagcccaggtcctctgagaagcagataaccagatggcgttaaatgtgcaaggattttatgagaacagatgcctatatgagagaaaaattgggcaggagtcagaaaggctgggtaagcagtcagaccacagtgcaggtctgtcctgcagtgaaggacagataggggacagaatggaaggaagcacctcagaatctataggctaagggaattcagcaggcctcttagggagacctggagttcagc

SEQ ID NO: 1153 - DNA, 661 bp, Homo sapiens
  misc_feature [331]..[331]: Chromosome 2, SNP identification no. = rs1918454
  misc_feature [331]..[331]: allele = g, in linkage disequilibrium with rs13014264, respectively
  misc_feature [331]..[331]: n is a, t, c or g
tgacacagagattctagaaaaggccagtaggaagctgggaccttcatctccaccagtaagtaataaagtcctactccctttggtgtcagtggaaaaaatgtgggaagcttggattttcactctcacctggcagtcatgaggtgcttctctccatctgtccggggagctatccaaaaaggccgagcggagaagaggaacttttgccattccgcagtggtaatgaggccaccaccactgtagtgttggtagagatcatatgggtagccagaacttccaccctggtccagtgataacagagactatatgtgaggtttcagtggaggtcagacgncaagtagaaaacctggacttctatctctacctggttagtaaggcagcatcacctgcctcctccgcttacatcccccgacaactttccttgccgtggtggtgtcagagaaagccagctaaaatagaaggttaaaataaggtctagagttttataatataaaaatgtccagtttcaataaagtatcactcaacataccaggaaagaaccaggaaaaactcaagaacaaaaaccttcaaaacaattaaaaagatacaatgaatagatgtcaaactcaagatgacagagatgttaaaattatttggaaaaaatttaaagcagccatagtaaaat

SEQ ID NO: 1154 - DNA, 661 bp, Homo sapiens
  misc_feature [331]..[331]: Chromosome 2, SNP identification no. = rs13014264
  misc_feature [331]..[331]: allele = c, g
  misc_feature [331]..[331]: n is a, t, c or g
caaaaatataccaaaagtgtagacgtgtaattattatttaacaaattgtactaacagataattaaactatttaaaattgttctttttacatataatgtattatatcacatataatgacaccattgaaataaatgcatataaacctttgtcttcctgtcaaattctccctttaggacaaattacctttaaataaaagtgctggcttcttagagaactagtaaatgtcttcagggatagataaggcaattatagaaatctgatttgtatgtgaccacagcctaaactcagttatataatttctgattcccagtcttttatgagcaaagagtanagtcacaatctctcaatattctgtcccatctattgaagccaccacaaagttctctgaatcagaatcacatgtggctgtgtctcacagggaaaaacaaaagcaatcatgacaaacaatatagtttatttctcatgctgtcacatgcaaaataattttatgcctggtattatggttctatggaatgaagttttcagacccaggctttttcaaactcactatttcttcattcctaagatacgatccttgcccttacaattcaacatgactgttagagagtttgacatctgcttcatgatccaggaatcaaatggagaataggatgaagaaggg

SEQ ID NO: 1155 - DNA, 661 bp, Homo sapiens
  misc_feature [331]..[331]: Chromosome 2, SNP identification no. = rs13008711
  misc_feature [331]..[331]: allele = c, in linkage disequilibrium with rs13014264, respectively
  misc_feature [331]..[331]: n is a, t, c or g
cacccagttgaatgtattttctttatgattttggaggaaagtttttttttgtcatttttaaaaggggtcagttcaagaatactggtttaaatcagatgtctaacaatttggcctcacatatatgtattcatatatttcaggacaccaaacaaacaggcaaaagcttttcattgacacaatgtctgcccatgtaacaaaaatctgcggagaaaggaagttttaattcaaatatccagatgtctagcttgccaatgggcatttggcatcactacaacaaaacatgtgcatggctaaaattgttctcttctccactgcatcgtatggcaggacnttcccaaaagcttggtggaattattttaccaagttccaagaaagaattcaaaccatattccctatatgctgttgaaatgacttgtggaacaaagttataggaatacataaatagataagtgactggttaacaataaacaaatggctaattcatgcacatgaaagatttaggcagtgatattcacacatatggcactgctaaatgaaaaagacatttctgtatctaaaaatagtatcagtaccagaactagtgaataatgttttatttttccaaaggtcaacaggatattacttagtctgccaaattataatagctagagcccagtcatta

SEQ ID NO: 1156 - DNA, 661 bp, Homo sapiens
  misc_feature [331]..[331]: Chromosome 2, SNP identification no. = rs7569160
  misc_feature [331]..[331]: allele = g, in linkage disequilibrium with rs13014264, respectively
  misc_feature [331]..[331]: n is a, t, c or g
tagtgaaattatttactacattgttccctgtttaattattattttcttacaccaaaaattacatatgtataagtaccttatagcagagctatttaacttgtgcacatagtaaggatatactggttgttggcagctaccatttgtttcgatggttctgaacccatgttgaatcaatgattaaggattttaaaaactcattcccattttaaagtgtattgcaggagttccaaataaatataaggcataatttcctatctttgaaaactttaaagttttttttaaatgaaaacacatttacacacacacacacatgaaatgggcttgaaaaaantaatagatataattcaggacatcacctggaggtggagcagatatcctgaaactaatggatttgagttaggtcttgaaagataaggaggttttcttaaataaagttcagtgacgggaatgtttcaagcagtgggaactgctagcttaatgtgtagtggtcataaagaacaaatgtcatttgttttttccttttggctttgtgaatggagaataactgatagaaattaatattggataatcaaagagaaacttttcagttgttaatagcattcctctagttatcaacctgatggccaaaatgcctatagaaaaatttagacaaatcttttta

SEQ ID NO: 1157 - DNA, 661 bp, Homo sapiens
  misc_feature [331]..[331]: Chromosome 2, SNP identification no. = rs11899467
  misc_feature [331]..[331]: allele = c, in linkage disequilibrium with rs13014264, respectively
  misc_feature [331]..[331]: n is a, t, c or g
gttagtgaattattattcaaaaatacattatacataaaatgaatttgttttcaatttataattaattgcctttggaattaccagacaagcagggaactaattaatgatttcttaatggacttcgtctaaggcaagctagttccaaattgcaaagtccttttacaaaagagcataattaatgtttgcataactatttagagattcatttgttcattcaacaaatgtttatttgcactttactctgttcccaaccttattttaggaaatatgaatagagcagtaaattaacatgcctgaccttatggtgcttacattcctgtggaaaaaaaancaactgattaaaacaaaaaatctaaacaaataatgtacaagataaattcaggtggaaattagtggaaaaaaaacaagtgagaagatacaaaataagggtatggtattttagataatgcagttagaaaaggcctctctgaagagatgctttttagtagaatcttgaataaaaagagaaagcatgccctacagatctctggagaaaaagcatttagggaagaaggaatggcaagtgcgaagggcctgaggtaggaagttgtctgatgtgttcaaggaagaggaaagaagcttatttagctaaggtaagtgggtagccagaaaccaaataata

SEQ ID NO: 1158 - DNA, 661 bp, Homo sapiens
  misc_feature [331]..[331]: Chromosome 2, SNP identification no. = rs1460256
  misc_feature [331]..[331]: allele = g, in linkage disequilibrium with rs13014264, respectively
  misc_feature [331]..[331]: n is a, t, c or g
acaataattatatatccttaggggaatcaatgaaaataatctctaggtgaaatgttaatgtattataaaattatttaccttctggttcaatgttgacatggataacggcttccactaacttttccttgaacctgtaaaaacaaaataagtattaccttcttttaacaaaagcttatttttagttagctttgttattgaactattttattcttttcttcagtgtactatcagaattttatttcaaaagccaaggaataaattgaatgcttggagaaaatgttattatcaatttactttcctgtcatcattttaaactgacatgttttacatnactcttttgggcagtggttgattttttattttaactagggttgcatatggttggggaattcccatctcaccttgcaacatacacaataaatatatctgattcatttctatgtaattaaaaaaagtaaacatgaagtcattacttcagcctacagactaggcaaatttcaaaattgagcagtaggagtcttattacaaacatttataggtttgaagaaagaaaaccagaatcagaagataaccacagagtatcttccgagtactaaaaaaaacttatgccaagataataattgcagtattatattattgaatattaaaatagctggataat

SEQ ID NO: 1159 - DNA, 661 bp, Homo sapiens
  misc_feature [331]..[331]: Chromosome 2, SNP identification no. = rs10469877
  misc_feature [331]..[331]: allele = t, in linkage disequilibrium with rs13014264, respectively
  misc_feature [331]..[331]: n is a, t, c or g
atgttcaaaatatatagtatgctaaactccaaatctaggaaccacaccgtacatatgatattattatgtctattttatacatgaggcaaccgagaaccaggaaggaaggtaatttgccctaggtcacctagagaggctttgagccaagatttaaactaaggtccttgtgattccaaagctcatagttttcctgggtaatccccatgtttgaggaaatggcttcatctacaatgagctaaactttgagacacattaggatctcagaaatcagccctcaagtgaagaagtcaactttcaaattgctgtctgaagttggccgggcatcaaaatnaccttgttgaaaaagaatataggaaagagtgtgatctcattaatgagactatgggactcttcaggcagtggcaatatgaaaagaaaaaataagtagtttgcactttttggggaaaaatgagcaaaaaaatgctcacttttaacccatttcaatttaaataaagtagtgtgcaaactaggttattcttaccttactgatgtctcaaacttctccaattagagataatattttctctttagaagtaataagggtctttctaattatcagttgtcatcaaagaggaaacatttagcgtaatctatgctggccataatttgtaaacacgaaaat

SEQ ID NO: 1160 - DNA, 661 bp, Homo sapiens
  misc_feature [331]..[331]: Chromosome 2, SNP identification no. = rs1471256
  misc_feature [331]..[331]: allele = g, in linkage disequilibrium with rs13014264, respectively
  misc_feature [331]..[331]: n is a, t, c or g
aaaactacagaatgtcaaatggaagctgtctctacttaacaaatacactaggctcaaaaatcaaaagaaaagacacgtaaggcgatgtttattcatctatgctctcagtaacaagtttttaaggtattcacgcatctcattgtttgtctatttttacaaatatgtggtgtcattcaaaaatgacacataggacatcctgtctgtatatatttaatgcaaagagtaaaaaagtaaatgaaatactcatatggttccttttaagttttcaacatgaacaaaaacatttctcataaatttgttgtgagagcttttgaaaaggaatcgtacctcnttgatttttgaaatgtaatgagtttaaaagtaaaaataattctgtgctctacatttttcatttctattatttttaaaatatcaactagagtgtatcgattggggaacaccgttgcatgcaagcttgtgtgttttttatctgtgtactagaaaaaaattctagtaaatgttatgctaaaaacaactataattataaaagatagaagtggtaataagagtatatgcaagaaattatttatatgctttcaattacatattattaacagtagtattagtattgttattttgatactgttgtgtgtgtagaatgaaacattctatcatcccctat

SEQ ID NO: 1161 - DNA, 661 bp, Homo sapiens
  misc_feature [331]..[331]: Chromosome 2, SNP identification no. = rs11125778
  misc_feature [331]..[331]: allele = g, in linkage disequilibrium with rs17643867, respectively
  misc_feature [331]..[331]: n is a, t, c or g
ctttcaatgttgtctgcatccgtaccttccactcacttccactagctagaagggtagaaaaggaggaaggcactaagtgagaaaaatggtcctatttgtacaaaaaagtctgtcctttgaccagcatggcctaaatctatccagaatttcatgatgtgaccacatcaattggaggcaataaagaacattaatgggaaggcccccttactgtgtggagcagtggtcttggaagcctcaggggagatagttgcagccacctggtagattgtctaaatatggtacagagcctgcagaaggaataggatgactgttctggatgccaacagtaacngtcccatgagtaagtgatgtctggggttacctccactccctcaggtgctgtagcctgaagccagcactgtgattggtcagaacatgggtggataagcatggatcacacatagttcaagctcaaggctggcagtggactataggtagtccagagtcctaaactccttctgtgtctgatttgaaagtcatacaaaatcagcatgtcagcaccattatgacatgatactcctaaagaaatactgtaccggctagcaggaaaaatacattcaccaggtcactttcctggaaccagatgtccatgtggcttcaggacaaccccacaatgatccca

SEQ ID NO: 1162 - DNA, 661 bp, Homo sapiens
  misc_feature [331]..[331]: Chromosome 2, SNP identification no. = rs17050031
  misc_feature [331]..[331]: allele = c, in linkage disequilibrium with rs17643867, respectively
  misc_feature [331]..[331]: n is a, t, c or g
tcattcattttacatgttgcttttaacatttttattaccatcacctctaatccacttgacttttcacaatagtcctgtattggtatttccagttgacagatgaaaaacatacttggttgtttattttaaaagactaaggcagacattttcactatttcagcataggatatttctgtgagttcataaaaatccaactgttcttagttaaatctccttctagtatacatcttgtagccaaataaaacgactatatttggtcacatcatacccctacctgatcaacatacgcctagctgaaaattaggtcaaagatggactaataatagtttgnttggttaacaggaagttttgcccaaagaaaataatattttttattaatgaatgatgaatcctagatgataaaggtaaggaaactgaatcaaacacataaaatcagaaactcaacaaatatccattaggaaccttttatggacaaggcattatgctagacactgaaagatatatattaaataatatagtgcattcatcttcaagatgttttacaaatccattgaaagaaatgtattaatttattgaagctcaaagagaaccttgtcactgagtcttcattctaatcaaagcattatcaggggaaaaaagtcaaaacgattgctacattgaa

SEQ ID NO: 1163 - DNA, 661 bp, Homo sapiens
  misc_feature [331]..[331]: Chromosome 2, SNP identification no. = rs13017760
  misc_feature [331]..[331]: allele = g, in linkage disequilibrium with rs17643867, respectively
  misc_feature [331]..[331]: n is a, t, c or g
cacataaaatcagaaactcaacaaatatccattaggaaccttttatggacaaggcattatgctagacactgaaagatatatattaaataatatagtgcattcatcttcaagatgttttacaaatccattgaaagaaatgtattaatttattgaagctcaaagagaaccttgtcactgagtcttcattctaatcaaagcattatcaggggaaaaaagtcaaaacgattgctacattgaaagataaacagagactatataataactatgataaatatgtagttataatcttctctaaattaagcttaactgaaaagttatgtacttacaaagnccccaagtcttgatcataaaagactcatggaaccctataaagagtgctaaagatcatttgggtaaaacattttattcaaggctatatagtggaataagaactagtcaccaccaggcctgccctaaaagagctcctgaaggaagcactaaacatggaaaggaacaaccagtaccagccactgcaaaaacatgccaaattgtaagaccgtcaaggctaggaagaaactgcatcaactaacgagcaaaataaccagctaacatcataatgacaggatcaaattcacacataacaatactaaccttaaatgtaaatgggctaaatgctccaatt

SEQ ID NO: 1164 - DNA, 661 bp, Homo sapiens
  misc_feature [331]..[331]: Chromosome 2, SNP identification no. = rs2110529
  misc_feature [331]..[331]: allele = t, in linkage disequilibrium with rs17643867, respectively
  misc_feature [331]..[331]: n is a, t, c or g
acgtttgattatatattcatctgagtgaggtggtggcagttggtagtaggagaaagagaatgcttctttctatatatattcagaaatagtttattaattaattttattgcacaagcatttgctaagtacccactacagacatgacaatgaaacagtaattaaaaattctgatcccacatccccaactattgaacttattccagacattcttaaccagtcctaaactcaacaacatagtgtttctaatttgtaatccaaaacttctgctatttgcaggctcagttaatcttagcgccattcaccaatgtcactcaattaaaaaccaaatgtntaattattttgatatcttgtcttttatctaatatatgaagtccctaaacttattgatgttacttcttatacatttttcaaacttgcaccctgtctttctctattatcccttgataaccatggaatctcctttatagggctgtcttaggtgatgcttggcacataataatattgcctaaatgccaggtattatttggaggaggaggaggaggagaagtggtgtactagttcggataaaggaaaattttgtgctatggaaagaataagaattaagtcagccaaacagcaatgtaataaaaagcccagattctttctttctgctctcccacat

SEQ ID NO: 1165 - DNA, 661 bp, Homo sapiens
  misc_feature [331]..[331]: Chromosome 2, SNP identification no. = rs4325734
  misc_feature [331]..[331]: allele = a, in linkage disequilibrium with rs17643867, respectively
  misc_feature [331]..[331]: n is a, t, c or g
ataccaaacccataaggaaagttatattatgatctccattatacaggtcaggaaaacaaggtatggggaggtgatatggcctgccaggacacatgtctggccaggatcacagccaggatgtaaacacaggcagtctgtatcctgagtccttgctcttcacagtgacaccattggccactcatggtgctattctgagtaaatgaatgaatggatgctactgttcactacccttttcctattcaggaagagttagcttctctgccttagtacttactatattgtattataattcccctctacctctaggcagtgagccctttgagagtaaagnatgagttcaggaactggcccaacagaggacacccatgaacatttgctgtcccgagtggagctgaaggaaaaagagtcatgaattgtttgcagtgtgaactttaaagaatataaaatgcaaaatgctccaaaaattgggataggctatttggaaaggcaaaacagcaaaacagagttttgctgttactcaaggagagacatttccttgcctgtctaacaaattttttagacagattgtattatcctaaacatgagtttgttaaaacttgaatatacctaaataatgagattgtcaatgattaaaaagacaggcctggtgcagtggctcatg

SEQ ID NO: 1166 - DNA, 661 bp, Homo sapiens
  misc_feature [331]..[331]: Chromosome 2, SNP identification no. = rs7586283
  misc_feature [331]..[331]: allele = t, in linkage disequilibrium with rs17643867, respectively
  misc_feature [331]..[331]: n is a, t, c or g
gtggccttctccttgggaaggtgaaaataacaggcattaaaagggatagacgaactccaagtagttatatcaacaataacaataatattggcagtcactctactaatagctaacactttaaaactcttttgacttatcaggtattgtgctaaaatctctagattcacttctctatttaatttttatagtaatccagtaaaaatcctattaatgtccccattttatagatgaaaagactgagattgtatagaacttaagtaatatacctagtgacatagtgtctgagctgggaaatggccctagatctaatggacacaagagtttatgctcnaagattaaatgtatgaatggaaaacccaggagcaggaagagggagggttgctaggtcatgcagtatgtctcaaaccgaggcaaaaaaacaaaacaaaacaaaacaaaaaacagtttttaaaggaattaatagaaatagtctgaaactattatgattaattattacttttttcactatgatgataatgttgaaatagtgaaccagaactttttatcttcttacctatgtaaagaaaaggtatttggagtcttagagattattcttttggattcttttttgtccattttcctctagctttcttctctttcccttttgctgtctaatattgat

SEQ ID NO: 1167 - DNA, 661 bp, Homo sapiens
  misc_feature [331]..[331]: Chromosome 2, SNP identification no. = rs1558596
  misc_feature [331]..[331]: allele = a, in linkage disequilibrium with rs17643867, respectively
  misc_feature [331]..[331]: n is a, t, c or g
caccatcctacttgttatgttcagtactcaattttttaatgtttcttggacactagccagtaagtctgagtccctagttagttcatctattactttctcgccacaatagatttgggtctccgccaagaaatggactaatattgcatacaaaaattgtgtaatgcatttcctgatcttctgatatgtcctttcccagtaaggggggagtatacacacacacacacacagacacacacacacacattcgtgcatgcgcacacacatcctatctatacacaaaatctatccaagttaggtaaacatttttattgtcattattaatatcaagtgncttctataatccaagtgtttgtttgaccatttacatgattctctcaccctgtggactggaagggaacaatgagttgtaaaatctgatgatgatcaaagatgatgcctctctgtgaaaaaaaaaaaaaaaaaaaaaaaaaggagtcagtattgtaggagccctcatttccacaggaaaagcacactttctgcatttgatttggcacattctctgtgtcttaatttcaatgattccaaaatgagatgctcttaaagaaggaaaatgttcagtattggagagggggcattttcctcccctaccttcatttcccttaaaacataagcacagaac

SEQ ID NO: 1168 - DNA, 661 bp, Homo sapiens
  misc_feature [331]..[331]: Chromosome 2, SNP identification no. = rs7588177
  misc_feature [331]..[331]: allele = t, in linkage disequilibrium with rs17643867, respectively
  misc_feature [331]..[331]: n is a, t, c or g
ataattctacttgcatggcaaaaaaaaggaaccaggtatattcttcaagacgtttatgcaatattatattacataaaaatgttatgaagaatgtaattccacaatatggtattaattaaattattgagcacatctaattacttgaatattatgcagatcttcaatataataaattgaaacaatatgtcaacaaaagtgaaggacttgatatatataaaaatgctgttctgtactatgattaaaattatgccaaatttattaattcacgtggacagaaatttgagagaaaacggtaaatagtagttcactttttggaatggtttaggaccantggtaaagttatttcttttatttttaacattttattactttagtttttcatgttattttaaaagaaataacttcacatacgacaccttattccttgagcatattggtttatttagagctatgcctcatccctccacacaatggccaacattaatgtgagttttctgcagatatctagcgcagcataaatccatactctttgcttaaataaatcgctttatttttaaatagaaggaatctttttcttcttttcttttgggctccagcaggtgggatcacctacataagatatatctgccctaatgtattccctatgactttagtcaagctt

SEQ ID NO: 1169 - DNA, 661 bp, Homo sapiens
  misc_feature [331]..[331]: Chromosome 2, SNP identification no. = rs6713914
  misc_feature [331]..[331]: allele = t, in linkage disequilibrium with rs17643867, respectively
  misc_feature [331]..[331]: n is a, t, c or g
tcctactgggcattctagcctaagttaaaaaaataataataatatgaaaagataagtaaaagaaaaagagagaaagaaaagccaattggccaggttccttccacaatcattaaccatttgttcctgccacccaatgtccttggttaaggtgatctgacttaaaggcaaacaaatgtggctgagtatatttcaaaggacacccttgtcttgttatttcaaatactcccataatttggggcccctttcatctttgttcctgctctaggaagtgcttggaagttattttaattcaagttgggggtaaattcttattcttacccattgctcccantgagatgacctcaagcaattctgaataaaaagttatcacggcatgaactgggcagcattaaggcctgtgatttgttcaacagtgacatcttggcagagaaacagaaagacatataatctactgagaatgaagtgcaagaaagttcactggaggaaggaaaataatactaatcctttattcaataagcagtaagtcgaatgaggtgcttctttttttaaggtttagtaagtgaaaagtaaatttaaaaagcagtgccagctcagatggggcaggagtagttatctgatggggtcctgccaggaaatttgtttttatgacaaagtgtcagtg

SEQ ID NO: 1170 - DNA, 661 bp, Homo sapiens
  misc_feature [331]..[331]: Chromosome 2, SNP identification no. = rs17643867
  misc_feature [331]..[331]: allele = g, t
  misc_feature [331]..[331]: n is a, t, c or g
ttaatccaggaggtcaagtctgcagaaagctgagatcttgccactgcactccagcctgggtgacagagcaagaccctgtctcaaaaaaaaaaaaaaagaaaaagaaaaagaaaaaaagacaacaatttatggaatatttaggttgaagggaaatatatcaatttaaatttgataaataatctttgcatgctaaaataattaagggagcctttaagctaatacaaataggtcataacatttattaataaataggtaggggaaaatggaaataaaaatatgatcaaccattccaaacagaagcaataagagagaggaaatgtgaaacaaaatntggggcaagtaagcagaaattaaaatggagtatgtacattcatataaattacagtaaatgtaaatggtctttatgatctagttaaaagatcaagattgcccaactgagagcaagagagagagagacagggagagagagagagagagaacagagacagaaggagagggagagagaaagagggaaaacaagaagaataaggaggaggggaggaggctgggaagaagagcaggagaataagaagaagaaaaaatacaggaagggaaaggtaaaaaacaagaagaaaaacaagaggaaaaaatttaaaagatttaaaaaaagagagaaaagata

SEQ ID NO: 1171 - DNA, 661 bp, Homo sapiens
  misc_feature [331]..[331]: Chromosome 2, SNP identification no. = rs13420083
  misc_feature [331]..[331]: allele = t, in linkage disequilibrium with rs17643867, respectively
  misc_feature [331]..[331]: n is a, t, c or g
cttatagttttctttttaataacctgaaactggacacaactttaatgtccttcatcagttgaatagttaaactaacttggtatgtccctaccatggaatattagttagcaataaaaagaaacaaaccattgacatatataacaacttggatgaatctccagataattacgctaggtgaaaaaacccaatcccaagatttcacgtatataaattattgaactgacaaagttataaaaatggaaaaagattagcttttttcaagggctaagaagaggtggtgatggaaggtaagtggatgtggctataaaagggcaatatgaggcacccttgnatcgatgaaaacatctgtatcttaactaaatcaacttcaaaatactggctgttatattttactacagtttaagacattacttgccaggcctggtggctcacgcttgtaatcccagccctttgggaagccaaggcaggtggatctcaaggtcaggtgttccagaccagcctgaccaacatgatgaaaccctgtctgtacaaaaaatacaaaaattagccgggtatggtggtgtgcgcctgtaatcccaggtactcgggaggctgaggcaggagaattacttgaaccagggaggcagaggttgagctgagattgcaccattgcactctagcc

SEQ ID NO: 1172 - DNA, 661 bp, Homo sapiens
  LOC440867
  misc_feature [331]..[331]: Chromosome 2, SNP identification no. = rs13429325
  misc_feature [331]..[331]: allele = c, in linkage disequilibrium with rs13409331, respectively
  misc_feature [331]..[331]: n is a, t, c or g
gagtaaattggacagaggctgcctactagtcataaaaatcaggctccaagaaatgttctagggaatcagacccccagccaaattatctaggccaatcccagacctgtagtgtcagcatcaccacaggacttgttaggaatgcattctcaggcccacccagaactactgagtcagaatctctggggatgaggcccagccatctgtgttttcacagattctttagttgatcctgatgcatgctcaagtttgagaagcactgatctaggctagtccctggaagatctaaactgacactaattctttcagatgattataaaaattattccaaganctcatcaggacttaagtgcccttatgagacatcaaccctaatacacttcacttccctctgctgtttactgctaactataggtgtgaccatacatctttagcttaatgtttcagggtctaaacttttcatgggggaaacaagggaggaaactttgcctacaaggaggcagagttttggactgattaacttgcaactctgttacaagttaaaagtccttgatttgtcattttgagtatggctgggaagattacaacacagcaagaatacatatcaagagacactttcattacagtttttttgaactctctaaaaattgtcactctgacttat

SEQ ID NO: 1173 - DNA, 661 bp, Homo sapiens
  LOC440867
  misc_feature [331]..[331]: Chromosome 2, SNP identification no. = rs13429266
  misc_feature [331]..[331]: allele = a, in linkage disequilibrium with rs13409331, respectively
  misc_feature [331]..[331]: n is a, t, c or g
atgcattctcaggcccacccagaactactgagtcagaatctctggggatgaggcccagccatctgtgttttcacagattctttagttgatcctgatgcatgctcaagtttgagaagcactgatctaggctagtccctggaagatctaaactgacactaattctttcagatgattataaaaattattccaagagctcatcaggacttaagtgcccttatgagacatcaaccctaatacacttcacttccctctgctgtttactgctaactataggtgtgaccatacatctttagcttaatgtttcagggtctaaacttttcatgggggaaanaagggaggaaactttgcctacaaggaggcagagttttggactgattaacttgcaactctgttacaagttaaaagtccttgatttgtcattttgagtatggctgggaagattacaacacagcaagaatacatatcaagagacactttcattacagtttttttgaactctctaaaaattgtcactctgacttatttcccccttgtgaattttctgtagagagaccttaacttcaggctctgatctttgcttggtaaacatctacacttcaagtttaaagagtttactttcaaggaggacacacttatatcagctttttgagagctcttagcc

SEQ ID NO: 1174 - DNA, 661 bp, Homo sapiens
  LOC440867
  misc_feature [331]..[331]: Chromosome 2, SNP identification no. = rs13409331
  misc_feature [331]..[331]: allele = a, g
  misc_feature [331]..[331]: n is a, t, c or g
aaaatgatgattcaaagaatggtccccattaatgagtatctgatttagaataaaacaaaatccatgctgggaagttgatgagcttgattttgctgaattgctttgagcttgcagcttatatttattggttctttcctttcgacaattgtcaccagttgtctgctgttctttcgggagagggcttgaaggttgattttagttccctgtaactggaggtgacatgtgaaagctcaaagctattgaaaaggtaggtgattattaaaatgtaatgtgtttctgttttcctgattatgacctcccagtcttgcaatttgctgccaagcacgtgccnaagctggagcacaggtggcgaggtgtctttcaggctttgggagagttttagatcatattaactattgacttattcctttttcctaatccttttcaatagtagacatgctgaaaaattaatatacagggagaaagagatgcatggttatctacgaggctgtctgtgaagagagagaaggaaacggagtgagagaaggagaaaaaaaagagaaagggagagagaaaaacatggagcgggggtcggggggagagagagacgacagcacataattaagcagaaataacacttaaaaacaattggtgcagaagggtattttccagaaaagcaata

SEQ ID NO: 1175 - DNA, 661 bp, Homo sapiens
  misc_feature [331]..[331]: Chromosome 2, SNP identification no. = rs12988562
  misc_feature [331]..[331]: allele = t, in linkage disequilibrium with rs17012735, respectively
  misc_feature [331]..[331]: n is a, t, c or g
gaaagatgagatcatcagtgggagctcccctgaaggtgggagctggcctggaacttaccactaggttgtagtgtccttctgttgagcataaacaatttcacagagaaccaacatcaaacaaggtcactctgtaaccataagcgaagctagacagaaacaagaccatccataattctgtgtgatcaaatatcataaaaagaatactgtccagtttacaaaaaaatggcccacatccctatttcctggacaatatgctgcttctctgctcatcacagctttgccctgcctcgttgctcctgcctcgttgataagattcattcagctactctantgtagaaccaaccctgacttgctaatagcatctgacctagaacaatgccatgcttccttaaaaaactcttcaaaatcctgatgtaagacaatatcctataataagtcctttctaataccttattgagacgcttcatagcttctcatggtatattttcctatttcaaagaatccataaaactaactttgttcaaatacaggcggtttttggctagacagcatcaacaggatcctgattgaaataggagagagattgaaaagaagtgaaaggcaaccgcaatcttcttatgaaagtgatgagtatgctttgctattgtttagatagcaaaaa

SEQ ID NO: 1176 - DNA, 661 bp, Homo sapiens
  misc_feature [331]..[331]: Chromosome 2, SNP identification no. = rs13019286
  misc_feature [331]..[331]: allele = t, in linkage disequilibrium with rs17012735, respectively
  misc_feature [331]..[331]: n is a, t, c or g
gttacagtcacacaaacatctttatgcaaatattagtagtggctttgtttgtaatgtcaaaaagtaaaaacaaattccaaatatatttcaacttaggaaaagataagaaaactgtgatacatccatataatagaataccattcagcaatgaaatagagtatactgatgaaagctacagcactgatgaatactaaatgcattattatactaagcgaaagaagtcagactcaaaacactacatatttctaattttatttacatgacattccaccgagacacaaacaaatgagtagttaacagatattgaaatgatgggaggggttaactacanagagtcaaaactagggaattggggaaaatgatgggacttttctttatattaattgtggtaatagttacctgattacacacatttgtctaaattcagaacactacaataaaaagagtgcatttctccttatggaaattttaaaagtacataaaatacaataaagaaaaaataaaaaagacttgggacaaaccaataagacttagttgtgagcaatctaagtatgattatatcagtgcactagcctttaaaagtttttggaaaatatatcaacaaaaatataccttcttgttttcaaatgaatttggcaggccatatacaaactactgtggt

SEQ ID NO: 1177 - DNA, 661 bp, Homo sapiens
  misc_feature [331]..[331]: Chromosome 2, SNP identification no. = rs17012714
  misc_feature [331]..[331]: allele = a, in linkage disequilibrium with rs17012735, respectively
  misc_feature [331]..[331]: n is a, t, c or g
actaagcttcaaagttaggggaaggggagagtggtagattgttaagagaatataggaaagaggaatagaagctggttttgttcagcatggaagagggcacagaaagagagaaatgatgaattggaaaactaaattatcatatgttttaactccagagagattttgctcaaaattatcatttgcttttctacacttatttcctgaattcagatgttgtgcaaaattactctgccattgtttccaatcacctacatatcaataagaatgctaacaagtaagaaacgaatcagagtggaatgatattgacagctatctctgtagcctgttattntttgacaatgttctacaacttcattagttcaattgaatagatactttgaaataaagtgactaaatggttcagctgaatttatagcaattcgcatacattgtacaaaattcatttatgtaacagtgtactggaaatagaatagtatagtccttaatgtatatttattagtgccaacaaaatatatttctatatcacaaatgcatgaaggaatcagtttgcttgaaatagtgaattttattcttattttctctctgggatacatttcattcctaaatgtcctctcccacatccagaagattactagacaaattctgaattggcttcaaaggg

SEQ ID NO: 1178 - DNA, 661 bp, Homo sapiens
  misc_feature [331]..[331]: Chromosome 2, SNP identification no. = rs1882237
  misc_feature [331]..[331]: allele = c, in linkage disequilibrium with rs17012735, respectively
  misc_feature [331]..[331]: n is a, t, c or g
gatactttgaaataaagtgactaaatggttcagctgaatttatagcaattcgcatacattgtacaaaattcatttatgtaacagtgtactggaaatagaatagtatagtccttaatgtatatttattagtgccaacaaaatatatttctatatcacaaatgcatgaaggaatcagtttgcttgaaatagtgaattttattcttattttctctctgggatacatttcattcctaaatgtcctctcccacatccagaagattactagacaaattctgaattggcttcaaagggagaatctgttgcacagcatcacttgaggggatggtttttntgctttgcaaaagggacagctatgttacatgtacaagtgtatcaatgtccatccctgtttcctcaaatatattcatggaaagtaacaggaagtcaataaacataagagcaaaattatgggaaatgctgtctctcttagataaaaatattggaatgatgtcctataatttggctaatgtatttacattatacatttatatatgcacatacacctatatagcatatgtacaaattacctatctatttatctatctgataaatcattgtcactctgactttggttagtatatttctacatcaagtggaatgcattagtttttattatgtattt

SEQ ID NO: 1179 - DNA, 661 bp, Homo sapiens
  misc_feature [331]..[331]: Chromosome 2, SNP identification no. = rs17012735
  misc_feature [331]..[331]: allele = c, t
  misc_feature [331]..[331]: n is a, t, c or g
tagcacattgcctagcaatagtatgctcttggtaaattattattgttattatacaacccaaatgggagtcttatctttgtcacttactgttaactaactgtaacgctatttcatttttctaaattcaactgttttggttcatcaagcaaaagtgacaatttttgccatatctactccacagaattgtcatcaaatgagaaaatgtgagtcattcagaagccgttatgaaactgaggtagaagtaaggtgatgtgagtagctctaaacttttagatattccaaaacagttagtgacactaaaatatattcctgaaactcctaatgtaatctntcccattctattgaatcagagagtcttccaaggttaaaggccaggtatttaaaatttgaaaaatctccacaggtatttctgaagctcatgaaagcttgatgactaatgcttttatacagattttcaaccttggtcgcttattagaatcacctggggagctttacgaactacagacgcctaggatctagctcagaggaatttaatcagaagtttgggcaggagggctaagagaatccatatttacaaaagttcactaggtgattctaatgtgtctccatgattgataagcgttgtgctggggaaaagggaacgaaaatacatttgttgaga

SEQ ID NO: 1180 - DNA, 661 bp, Homo sapiens
  misc_feature [331]..[331]: Chromosome 2, SNP identification no. = rs10519331
  misc_feature [331]..[331]: allele = t, in linkage disequilibrium with rs17012735, respectively
  misc_feature [331]..[331]: n is a, t, c or g
cacctaagcttttgaatacatgcatggaatatctgaatgtctatccttaggcatgtgtttagccactgtattcagtttccacctagtatttttgtttcattttttccaggtattctgaccctctgatcttacgtgtcaactcaatacacagctcaggccttcattgaattgaaaactcatctagacctgattctgcttttcacccttaactcttagcactctctttctctcttaggtatgatcccatcctaaaaggctggttccataaattcacagattgctcagaaatatttacaaagaattacacagagttccctttcatgaatactcncttggacataggcaatagtccagaacatacttaatttggatacaacacgtgagcttgttgagtgatttcctactattccatgagatgatgacccaactgtgaatactaacccattctcacttggcctcttgtttattctttggcaagtactttaaagacaacctcatgtgatttttctgttttgaatagtgctaccaagtagcagtagtaactgaagtttgaaactttttgtctctcctgagattcacagaataatgagatcattttctttatatactcctaaatcccatacctcttcaacatcctgaacaattttctcataggtcacac

SEQ ID NO: 1181 - DNA, 661 bp, Homo sapiens
  misc_feature [331]..[331]: Chromosome 2, SNP identification no. = rs17012771
  misc_feature [331]..[331]: allele = g, in linkage disequilibrium with rs17012735, respectively
  misc_feature [331]..[331]: n is a, t, c or g
ttgtagattgaaaggtatttttctcttagattgtttcaaaaggttatatatcacattttccctcaaatgtatacactttcccgtctctctagtccagggcatacttgagagtgaaaagtctgttttctctgtgctgtaaagaaatgagcctgctgagggggaaaaaatcaaagatgtatggtgaagtgttaagcagactttcttccaccttgttaagagcaatggaaggttactgtggccatggcttcactagagagcaagctcaccttgttggttgtgtattatcttttgatttcctcctgcagatctttttctttttaattttcttccntgtgacatctgctgttgagtctgagcaagatccaaaaaagatgaggtttcagcggcttgggtttatctacctgcagttcagtgatgcgatactacaatcaatgcctagcccaataggcaatgggctgatactcctacgagccaattcaaacacatattgcaataaaagcagtaacagtaaaatgtgaattaaaaataccttctacaggattctcttgtcatataaataaaatcgtctgtggaagttcttataagtaggaacattttcaaatatttgttgttttcaccacaaaatgattaaaaaatagcaatattttatctttaatttttt

SEQ ID NO: 1182 - DNA, 661 bp, Homo sapiens
  misc_feature [331]..[331]: Chromosome 2, SNP identification no. = rs17012786
  misc_feature [331]..[331]: allele = c, in linkage disequilibrium with rs17012735, respectively
  misc_feature [331]..[331]: n is a, t, c or g
ctacaagaaaggcttataaatgttgcctttacctgggaagccatatgcccagctaaaattggggattttgttaccaaaaggaagtagggtgagtggttattagggatcatttagtggtctctgccacaacagtattgcctgcaacttagatacaactctataaacattagtcttctgatttcagatacctctgtttaacaatacttgaagagactcatttattcaaaggctttataaaggccagaaaattatgaattgaaaaggaagtaacaccacataatcaactatatacaatttataaaaacaattaaccctagggaaagtttgcaangatttactgataacatatgggtctaattattgcgtagtccagatgttaactatcaatttttccacacaaacttatcatggagacaggaaagggtaagagaaatctgtctgtccttgcttctcgttcattcttcaggttttgttagttcagtgcatccctaagttgtagaaatgcagccactcccttatttcatggaggtttctatgttattaactaaaatcagactttttacttccttaaattaaggttggtatatgattaaaactaatttcacttactctgttttaattgctgaaagtccatgttttggaatgtggaatatttatcaat

SEQ ID NO: 1183 - DNA, 661 bp, Homo sapiens
  misc_feature [331]..[331]: Chromosome 2, SNP identification no. = rs17012795
  misc_feature [331]..[331]: allele = c, in linkage disequilibrium with rs17012735, respectively
  misc_feature [331]..[331]: n is a, t, c or g
gcaataaacaaaatgggggtagtctcagtaaacaatattacagaagaatcacttggatttaaggggtaggaggaagaagaagcaagaagaaagtgagaagttttgtccttaaaattttcatatactaaacagagtaaagatgagtaatctaaaattttgatgggcagccaaaagaggactttgacaacactaactcctttcctttcagtgtgcagcacataattcctagcaacaagcatctaaatgtgttactgtatttggttcttttatagagatactgatagagaatatacattaaaatgttctttcgtatctgatattgtatttaganaaagagttgtttgggggaaaatgactcacaatatattgatttgggaataaaataatacaattatacatctggactttgtgtcaattttaataacttaatctgctctacaaaaccccattagaggtattaaaaattacataactctgaatatatttgcaaatatctcagtaattaaatcatctataaatgctaactgaaaatattccattatactttaagttttaatgatccaatatacttccaatagaatactgtccatttttttttcttctgctactctgataaagctatcacattcttagagctattggatagaaacacatttttagt

SEQ ID NO: 1184 - DNA, 661 bp, Homo sapiens
  misc_feature [331]..[331]: Chromosome 2, SNP identification no. = rs17012813
  misc_feature [331]..[331]: allele = a, in linkage disequilibrium with rs17012735, respectively
  misc_feature [331]..[331]: n is a, t, c or g
tttacctcacatcatataccaaaatgcgttgtgtaaattaactatactgatataaaacaaacagaaattaaattttataggaaatacaaattatattttatataatttttcaattgtgaagttttcctaaacatgaggctaaagtcaaaattgatagacataaatggggtacaagtcaaaagatacgttaaaaataaatcttaaacactgaaaatgttaaagtggaaaaattatttgcaatacacaagacaatgaattgaagattttaatttatatttgataagctctctcatacctaaaagaaaaagtcaaacatttcattagaaaatgnaatagcacataaataaatgacaaaatattcaatattcatgatcatttaaaaattacttagcttcactctaaaaagtgaaaattgatgcaacaatgatatatcttcatatcttatcaaaacaacagagatttatcacaaaaaggaaaacaaaaacattaattattgcataggaatcagagatatcaaaacatacacatcaataattgagaaatatctagcaataactgagaagcttacattccctttttctaaatgattcctttattggtttatatacaggagtacataatgagcaagatgaagccaatttttggtatcagtgacttaaga

SEQ ID NO: 1185 - DNA, 661 bp, Homo sapiens
  misc_feature [331]..[331]: Chromosome 2, SNP identification no. = rs17040477
  misc_feature [331]..[331]: allele = g, in linkage disequilibrium with rs17012735, respectively
  misc_feature [331]..[331]: n is a, t, c or g
gaggtcagtcttgtggggactgttccctcagactttgcactttagccaaactcattgcagttggtggcagaagtcgggccaacttggcagtctggatgactgtgctgttaacttcatgtttggctaattcagggaaatttctaagtctgttggccagctatagtactacatcgttccttaactagcatcctaagtattttctttaattcttttctgtgtgaatcttctctgttgtggatgccatgtttttgttttctaatttatgaccttagtagattccagagaaaagctcaatatgggatgaaatctcgtatgttgaagagtcacttgnttctacgtatatgtcattactatttgagtttgtacagacatctgggtaggaaaatgtttttcctcaaaatctgaaggggttcttctattgaaatcttgctaaatccatcccatgatattattgcttttctttctttggaaacctttagtttctatttctgctgttatgaaatttttatagtatatttactgtgtgtattgtgtagagtcttttttttttttttttttttcattcgacataagtcacagtagggccttgcaatctagaaggattcatgctcttcaattctggcaaaatttctggcaaagttttgttttataattttttccc

SEQ ID NO: 1186 - DNA, 661 bp, Homo sapiens
  misc_feature [331]..[331]: Chromosome 2, SNP identification no. = rs1921231
  misc_feature [331]..[331]: allele = a, in linkage disequilibrium with rs17012735, respectively
  misc_feature [331]..[331]: n is a, t, c or g
ttttattctaataaagtcatggttgaaaattccacataaaaaagtgaattgaccttatatttctgaaattattaattgcttacaaaatagtattcattgacctatttatatttaagataaagaaatgcactcaatttaatttttccacatcttttattttcaaacttacagattttgttggtctaattttttataatattcagattttatttttctgtttctatgtgattcaatatcttatgtatttaacatttcaaataattatgcagattgatttgtaaaaatattttaaatcatttttagcctcagttttaatttctatatgaaattnaaacagatggaatctaaaatatatttgcttcctgcaataatttgttttcaaaattgtgctctttgtctacctcctgagagttatgtttatttatctttgccataaatcttgtgtatgtgcatgttttctatctttgagtcattaattatctttttcacactctttgtctccaaaactttagacattacatctcttaggtgatgctacactttctactctgatgttattagaactgttggatcttaaactgtgtgtttgatgcaggctcagtgacccagaaatctaaagcaaattgatgagaaaagcatccagtaagacttaaaacaatct

SEQ ID NO: 1187 - DNA, 661 bp, Homo sapiens
  misc_feature [331]..[331]: Chromosome 2, SNP identification no. = rs4296451
  misc_feature [331]..[331]: allele = t, in linkage disequilibrium with rs7595284, respectively
  misc_feature [331]..[331]: n is a, t, c or g
tacaaagataatctgacactccctctcataatccctgtgaaagtccacattctctacacagagagaaaggattaggctctctggttttgtttgctataatcttagaataattctaaccctgcactgagcaaggacaaattactcaactttcaaaattgaaagatcactcagaaattatgtaacacaaaggcagagaagaaacttgaagcccaaagaagtgaagtttcctgccccaaaccacagagtggatgaatgatagaactaggaacaaaccctaaagcttttgaaatcccagccaaaactcctgagtgaatatttgcaggttgccctncttcattttctttagagtctggatgttagcaatagaaaatcattggaaaaatactttctgagtgctttctctgcctctagctctatgctagggcatgtgggctacgaagaaaaggaaataaaaataaaatgaacctatctttgcactcaggactcctgaactccctgtattattttttaaagcaatgatcttaacttttttttttttctgaggcatagaacccactgagaatataattaaaattaaggcttagggaagtgcatgtatgcacaaaccaacaaaacactgtgcttcattttagagttttgctgagctctcatacctccaggt

SEQ ID NO: 1188 - DNA, 661 bp, Homo sapiens
  misc_feature [331]..[331]: Chromosome 2, SNP identification no. = rs1159180
  misc_feature [331]..[331]: allele = c, in linkage disequilibrium with rs7595284, respectively
  misc_feature [331]..[331]: n is a, t, c or g
acctcaggttcaccccggagaacctgatgtaattgtccaggcaagggcccaggtatccatggttttcaaagcttcccatgggattcaaaaggtggagaatggctgttttagagttttcagaagccatcaactctttctgcttttcttccttttttattctttcttcttccagatcatcttgacaagttataccggggattaaatgtacagtgcttataagtgtccccagtggagcaacctccctattccctagcaccaggatcaccaggagtcctgggtagtgctgcagatttccgggtttcattgaaaactaaaggatcagaatcattangggtgtcatagagtgaccagttgacctactttgcccaggactgataggaaattattctagaacttttagccataaaactgggatagttccaggcaatctgggactgtagttcactctaggaagacctagaatttttaaccatgttcctcctgcaaagtagggtagggaattcctaccctaacctttctcaggccaactcattttcttgggtgcagaaataagtctttagcagtgacggagtttcttttgtctgccagagaaggagcctggttcatctcttggttctacatgttgtgagaatgagtctcttgctgttgggtcctgtcttct

SEQ ID NO: 1189 - DNA, 661 bp, Homo sapiens
  misc_feature [331]..[331]: Chromosome 2, SNP identification no. = rs6547232
  misc_feature [331]..[331]: allele = g, in linkage disequilibrium with rs7595284, respectively
  misc_feature [331]..[331]: n is a, t, c or g
ctacagtcccagattgcctggaactatcccagttttatggctaaaagttctagaataatttcctatcagtcctgggcaaagtaggtcaactggtcactctatgacacccttaatgattctgatcctttagttttcaatgaaacccggaaatctgcagcactacccaggactcctggtgatcctggtgctagggaatagggaggttgctccactggggacacttataagcactgtacatttaatccccggtataacttgtcaagatgatctggaagaagaaagaataaaaaaggaagaaaagcagaaagagttgatggcttctgaaaactcnaaaacagccattctccaccttttgaatcccatgggaagctttgaaaaccatggatacctgggcccttgcctggacaattacatcaggttctccggggtgaacctgaggtgaggcctcagcagtggcacaagtgagaatcattgttctgggattcctgatttcctgactgatggcatctggtggcaggcagggagctatactgagtgcctacacctgtacaaaatagcactgcaccctagctgacaggaggaacgaagtccctctttctaaagtattatttttcctccttgatgtcactgcccagcaaagaagcagtcccaggtcatgtta

SEQ ID NO: 1190 - DNA, 661 bp, Homo sapiens
  misc_feature [331]..[331]: Chromosome 2, SNP identification no. = rs4852145
  misc_feature [331]..[331]: allele = c, in linkage disequilibrium with rs7595284, respectively
  misc_feature [331]..[331]: n is a, t, c or g
aagattcctgtgcaggagagaagaatcaaaactggtgatagaatatgacaaagaagagaaaagaaaagggggacaggggagaagcaacacaaagggctgtttttcaggacagatcccttgaatcaatacctccccagaatacaaagacattcaacggttaaaaaccagagatcgacaagaacagttattctgcaccaaatgaaaggatatacggtatggcattgattatacccaaaggctataaggcaattgaacgttaattggcagaggcctaccaaaggtatacaatcttgaaggacctatcaggaaaaaagagaagttgctaaaactntttaaacctggacttcctttccaattccatggtttcttcagaagacaaacaactccccaggttttacaactgggaaatatagctccctacaaatggacagcagcatagtataggaacctaataaaagataataaggtgaataaaaagggtggtataatccttggcaaaatgtatagcaatatgaaaatttttgtaataaattgttataatggtttgcgttgtgaattagaatagcaaatactttgttacagagtacttacattttattttttagctatcacagctcaaaactaaatgtagacgtgtgactctatgataccttctggctaa

SEQ ID NO: 1191 - DNA, 661 bp, Homo sapiens
  misc_feature [331]..[331]: Chromosome 2, SNP identification no. = rs9309549
  misc_feature [331]..[331]: allele = t, in linkage disequilibrium with rs7595284, respectively
  misc_feature [331]..[331]: n is a, t, c or g
cacaaagggctgtttttcaggacagatcccttgaatcaatacctccccagaatacaaagacattcaacggttaaaaaccagagatcgacaagaacagttattctgcaccaaatgaaaggatatacggtatggcattgattatacccaaaggctataaggcaattgaacgttaattggcagaggcctaccaaaggtatacaatcttgaaggacctatcaggaaaaaagagaagttgctaaaactttttaaacctggacttcctttccaattccatggtttcttcagaagacaaacaactccccaggttttacaactgggaaatatagctccntacaaatggacagcagcatagtataggaacctaataaaagataataaggtgaataaaaagggtggtataatccttggcaaaatgtatagcaatatgaaaatttttgtaataaattgttataatggtttgcgttgtgaattagaatagcaaatactttgttacagagtacttacattttattttttagctatcacagctcaaaactaaatgtagacgtgtgactctatgataccttctggctaaagattgcatctttatcatcagagcaatatatatcaggttgatttattaacactctatctccaattggctctatgcaatgtgcagaca

SEQ ID NO: 1192 - DNA, 661 bp, Homo sapiens
  misc_feature [331]..[331]: Chromosome 2, SNP identification no. = rs2861785
  misc_feature [331]..[331]: allele = g, in linkage disequilibrium with rs7595284, respectively
  misc_feature [331]..[331]: n is a, t, c or g
accgtttttttgtgtatgtttccctcctctccctccatccaggctgtgggctcatttagggcagagcctgctttttatccctgtttgtagtcccttctgcagttctttgccctgcactgactgagtgcttgaaaaatgcaagctgataatgatggcatcaatttcagtgctatcattattcaggcattctcctgttacagaaaagggcatatttttcttctgcaggtatgaatcactacgtttaatagtattctgtatgtttcagtaagaataattatcagggagtataaggttctagagggcaggaatactttaaaaatattttacttantcatttacgtgtttatttgtctgcacattgcatagagccaattggagatagagtgttaataaatcaacctgatatatattgctctgatgataaagatgcaatctttagccagaaggtatcatagagtcacacgtctacatttagttttgagctgtgatagctaaaaaataaaatgtaagtactctgtaacaaagtatttgctattctaattcacaacgcaaaccattataacaatttattacaaaaattttcatattgctatacattttgccaaggattataccaccctttttattcaccttattatcttttattaggttcctatactat

SEQ ID NO: 1193 - DNA, 661 bp, Homo sapiens
  misc_feature [331]..[331]: Chromosome 2, SNP identification no. = rs1901339
  misc_feature [331]..[331]: allele = t, in linkage disequilibrium with rs7595284, respectively
  misc_feature [331]..[331]: n is a, t, c or g
tgggaaaaatggcaaatcctatcatgagcatgaaatattcttaattggaattagtgaaagagtacgaagaataagcttgaatgagataagttaaaaaggtcttgcctttaggttcagccagatgacattcatggacagtctcctgctgtggctgggttgcttctgacgttcattctggactccaaggacaggcttccattggcactcatcctgagtgctggctctgagacttaaatctctgtgactccaggctggctgcttaaatgctctgagtctcaattttcttatctgtaagatggagatttaacactcatatcaacaggttattgtnagaattaaatatgataatgaatgtgattagacaccataaagcacatgtaaaagcttgtgattgcactgccatccaacaccatttaaggtctgtgtaactcactgggtatttaaaaaaatgcttccagggagttaccgtttttttgtgtatgtttccctcctctccctccatccaggctgtgggctcatttagggcagagcctgctttttatccctgtttgtagtcccttctgcagttctttgccctgcactgactgagtgcttgaaaaatgcaagctgataatgatggcatcaatttcagtgctatcattattcaggcattctcctgtta

SEQ ID NO: 1194 - DNA, 661 bp, Homo sapiens
  misc_feature [331]..[331]: Chromosome 2, SNP identification no. = rs1901338
  misc_feature [331]..[331]: allele = c, in linkage disequilibrium with rs7595284, respectively
  misc_feature [331]..[331]: n is a, t, c or g
ggtgatgatgatgaataatcagggacttggcaagtgggaaaaatggcaaatcctatcatgagcatgaaatattcttaattggaattagtgaaagagtacgaagaataagcttgaatgagataagttaaaaaggtcttgcctttaggttcagccagatgacattcatggacagtctcctgctgtggctgggttgcttctgacgttcattctggactccaaggacaggcttccattggcactcatcctgagtgctggctctgagacttaaatctctgtgactccaggctggctgcttaaatgctctgagtctcaattttcttatctgtaaganggagatttaacactcatatcaacaggttattgtgagaattaaatatgataatgaatgtgattagacaccataaagcacatgtaaaagcttgtgattgcactgccatccaacaccatttaaggtctgtgtaactcactgggtatttaaaaaaatgcttccagggagttaccgtttttttgtgtatgtttccctcctctccctccatccaggctgtgggctcatttagggcagagcctgctttttatccctgtttgtagtcccttctgcagttctttgccctgcactgactgagtgcttgaaaaatgcaagctgataatgatggcatcaatt

SEQ ID NO: 1195 - DNA, 661 bp, Homo sapiens
  misc_feature [331]..[331]: Chromosome 2, SNP identification no. = rs1901337
  misc_feature [331]..[331]: allele = c, in linkage disequilibrium with rs7595284, respectively
  misc_feature [331]..[331]: n is a, t, c or g
cttgaacaagtaattctctatttctgctgctgctgctgctgctgttgttgctggtgatgatgatgaataatcagggacttggcaagtgggaaaaatggcaaatcctatcatgagcatgaaatattcttaattggaattagtgaaagagtacgaagaataagcttgaatgagataagttaaaaaggtcttgcctttaggttcagccagatgacattcatggacagtctcctgctgtggctgggttgcttctgacgttcattctggactccaaggacaggcttccattggcactcatcctgagtgctggctctgagacttaaatctctgtgantccaggctggctgcttaaatgctctgagtctcaattttcttatctgtaagatggagatttaacactcatatcaacaggttattgtgagaattaaatatgataatgaatgtgattagacaccataaagcacatgtaaaagcttgtgattgcactgccatccaacaccatttaaggtctgtgtaactcactgggtatttaaaaaaatgcttccagggagttaccgtttttttgtgtatgtttccctcctctccctccatccaggctgtgggctcatttagggcagagcctgctttttatccctgtttgtagtcccttctgcagttctttgcc

SEQ ID NO: 1196 - DNA, 661 bp, Homo sapiens
  misc_feature [331]..[331]: Chromosome 2, SNP identification no. = rs4852480
  misc_feature [331]..[331]: allele = t, in linkage disequilibrium with rs7595284, respectively
  misc_feature [331]..[331]: n is a, t, c or g
tctccatcttacagataagaaaattgagactcagagcatttaagcagccagcctggagtcacagagatttaagtctcagagccagcactcaggatgagtgccaatggaagcctgtccttggagtccagaatgaacgtcagaagcaacccagccacagcaggagactgtccatgaatgtcatctggctgaacctaaaggcaagacctttttaacttatctcattcaagcttattcttcgtactctttcactaattccaattaagaatatttcatgctcatgataggatttgccatttttcccacttgccaagtccctgattattcatcatcntcaccagcaacaacagcagcagcagcagcagcagaaatagagaattacttgttcaagtagtaaaaccttctgtggaagtctagtgcataacaatgcataccttcccctgtctctaaccctcttgttttctaaaattaacatctctgagatatagaaagacatgcaaaggggcatggatctggtattttagctgctacaaaataagcacaaatacaataatggggcgacttcatacttaacttttgtcattataaaatctaagactgattcatggactgacatgcaggaagaaataaaattctttatctccttccaggggagaagggtttc

SEQ ID NO: 1197 - DNA, 661 bp, Homo sapiens
  misc_feature [331]..[331]: Chromosome 2, SNP identification no. = rs4852481
  misc_feature [331]..[331]: allele = g, in linkage disequilibrium with rs7595284, respectively
  misc_feature [331]..[331]: n is a, t, c or g
gcctggagtcacagagatttaagtctcagagccagcactcaggatgagtgccaatggaagcctgtccttggagtccagaatgaacgtcagaagcaacccagccacagcaggagactgtccatgaatgtcatctggctgaacctaaaggcaagacctttttaacttatctcattcaagcttattcttcgtactctttcactaattccaattaagaatatttcatgctcatgataggatttgccatttttcccacttgccaagtccctgattattcatcatcatcaccagcaacaacagcagcagcagcagcagcagaaatagagaattactngttcaagtagtaaaaccttctgtggaagtctagtgcataacaatgcataccttcccctgtctctaaccctcttgttttctaaaattaacatctctgagatatagaaagacatgcaaaggggcatggatctggtattttagctgctacaaaataagcacaaatacaataatggggcgacttcatacttaacttttgtcattataaaatctaagactgattcatggactgacatgcaggaagaaataaaattctttatctccttccaggggagaagggtttctcagtttcctgggaataagcatcattagagtaatatatatatatttttct

SEQ ID NO: 1198 - DNA, 661 bp, Homo sapiens
  misc_feature [331]..[331]: Chromosome 2, SNP identification no. = rs4852482
  misc_feature [331]..[331]: allele = g, in linkage disequilibrium with rs7595284, respectively
  misc_feature [331]..[331]: n is a, t, c or g
gatttaagtctcagagccagcactcaggatgagtgccaatggaagcctgtccttggagtccagaatgaacgtcagaagcaacccagccacagcaggagactgtccatgaatgtcatctggctgaacctaaaggcaagacctttttaacttatctcattcaagcttattcttcgtactctttcactaattccaattaagaatatttcatgctcatgataggatttgccatttttcccacttgccaagtccctgattattcatcatcatcaccagcaacaacagcagcagcagcagcagcagaaatagagaattacttgttcaagtagtaaanccttctgtggaagtctagtgcataacaatgcataccttcccctgtctctaaccctcttgttttctaaaattaacatctctgagatatagaaagacatgcaaaggggcatggatctggtattttagctgctacaaaataagcacaaatacaataatggggcgacttcatacttaacttttgtcattataaaatctaagactgattcatggactgacatgcaggaagaaataaaattctttatctccttccaggggagaagggtttctcagtttcctgggaataagcatcattagagtaatatatatatatttttctattgtgcttcttcgg

SEQ ID NO: 1199 - DNA, 661 bp, Homo sapiens
  misc_feature [331]..[331]: Chromosome 2, SNP identification no. = rs4852483
  misc_feature [331]..[331]: allele = a, in linkage disequilibrium with rs7595284, respectively
  misc_feature [331]..[331]: n is a, t, c or g
cagccacagcaggagactgtccatgaatgtcatctggctgaacctaaaggcaagacctttttaacttatctcattcaagcttattcttcgtactctttcactaattccaattaagaatatttcatgctcatgataggatttgccatttttcccacttgccaagtccctgattattcatcatcatcaccagcaacaacagcagcagcagcagcagcagaaatagagaattacttgttcaagtagtaaaaccttctgtggaagtctagtgcataacaatgcataccttcccctgtctctaaccctcttgttttctaaaattaacatctctganatatagaaagacatgcaaaggggcatggatctggtattttagctgctacaaaataagcacaaatacaataatggggcgacttcatacttaacttttgtcattataaaatctaagactgattcatggactgacatgcaggaagaaataaaattctttatctccttccaggggagaagggtttctcagtttcctgggaataagcatcattagagtaatatatatatatttttctattgtgcttcttcggttttacatttagtcaacattctctattattctgagcaatagactcttctgaaattttcatttctgtagatgatgtatattttt

SEQ ID NO: 1200 - DNA, 661 bp, Homo sapiens
  misc_feature [331]..[331]: Chromosome 2, SNP identification no. = rs4852484
  misc_feature [331]..[331]: allele = a, in linkage disequilibrium with rs7595284, respectively
  misc_feature [331]..[331]: n is a, t, c or g
gcttattcttcgtactctttcactaattccaattaagaatatttcatgctcatgataggatttgccatttttcccacttgccaagtccctgattattcatcatcatcaccagcaacaacagcagcagcagcagcagcagaaatagagaattacttgttcaagtagtaaaaccttctgtggaagtctagtgcataacaatgcataccttcccctgtctctaaccctcttgttttctaaaattaacatctctgagatatagaaagacatgcaaaggggcatggatctggtattttagctgctacaaaataagcacaaatacaataatggggcnacttcatacttaacttttgtcattataaaatctaagactgattcatggactgacatgcaggaagaaataaaattctttatctccttccaggggagaagggtttctcagtttcctgggaataagcatcattagagtaatatatatatatttttctattgtgcttcttcggttttacatttagtcaacattctctattattctgagcaatagactcttctgaaattttcatttctgtagatgatgtatattttttatcttttttctgtgtcttcattgatattttagtggaaatttgggagatgatgtatcagcagcaactagccaagcacc

SEQ ID NO: 1201 - DNA, 661 bp, Homo sapiens
  misc_feature [331]..[331]: Chromosome 2, SNP identification no. = rs2167390
  misc_feature [331]..[331]: allele = c, in linkage disequilibrium with rs7595284, respectively
  misc_feature [331]..[331]: n is a, t, c or g
gcatttaaatttttattagattgtaaattggcacacaggtcatgagcctgacttcacaactgtcatattcaaaattggaatggaatgaatctctttctgcttccagtcaagtcacccatttgcactatccaaatatgcctaatgggaaggagagacacacttgatgggaggaaaaaaaatctcatggagttaacatttgtagtgcaatcaaattaaatttccatcggattttagtttaaaatggtgcttggctagttgctgctgatacatcatctcccaaatttccactaaaatatcaatgaagacacagaaaaaagataaaaaatatacntcatctacagaaatgaaaatttcagaagagtctattgctcagaataatagagaatgttgactaaatgtaaaaccgaagaagcacaatagaaaaatatatatatattactctaatgatgcttattcccaggaaactgagaaacccttctcccctggaaggagataaagaattttatttcttcctgcatgtcagtccatgaatcagtcttagattttataatgacaaaagttaagtatgaagtcgccccattattgtatttgtgcttattttgtagcagctaaaataccagatccatgcccctttgcatgtctttctatatctcagagatgt

SEQ ID NO: 1202 - DNA, 661 bp, Homo sapiens
  misc_feature [331]..[331]: Chromosome 2, SNP identification no. = rs960601
  misc_feature [331]..[331]: allele = c, in linkage disequilibrium with rs7595284, respectively
  misc_feature [331]..[331]: n is a, t, c or g
gtataaatgtcacatgaatgaatgaatgctttattgaatcaattaatgcatgatctttgaggactctttcttctaaattacatggcagaataaagaaggaacgatggcgaaaagctcttatactcattaatgaacaactactacatgccaggcacggtcagaaatattttcacttatttactgcaattcttacaaaaagcttacaaggtagttgttgcaggctaacttggtcaacaagatgaaacacgctatcagatctcacaatgcaagtaaaaatcagaatcagaatttgaatccaggtatgtctgaccgtaaagcgtatggttttttnaaaaattaaactgtgttagtatccacagctgccctgattgctgatgcagaacagaatgaaatagtaaagagaattcaaaatgagacccaacaacaaacaatttacgggctatgaaaccacaaggaatatgcatataggatgttccaaaaatgagcaactctattatgctgaaaatcgtcacttcattataaatgtttccattctaagctccatccctcactctctgttaataattcaagcatttaaatttttattagattgtaaattggcacacaggtcatgagcctgacttcacaactgtcatattcaaaattggaatggaatgaatct

SEQ ID NO: 1203 - DNA, 661 bp, Homo sapiens
  misc_feature [331]..[331]: Chromosome 2, SNP identification no. = rs987318
  misc_feature [331]..[331]: allele = g, in linkage disequilibrium with rs7595284, respectively
  misc_feature [331]..[331]: n is a, t, c or g
catctaccatcttctgcttaactcaagcgtccttctacatgcagctttctcctgaaccaaaagagccttgactatcccttatgacttctgctctctgggcatgctttcattttcggttcctgatgctaattgtctgattcttgtggtttctcttggtaggatgcagattggctcagctcatctcttcatacaagtctttgtcatgagttacaggccagactcgttttaagcatttcttgattatgcttgttccaaggatgcactttttaaaatgaatgaatgtatgagtttgggtaaaatggcctgtagttcagcctctttgaaagaaatngtaggctttgcaccggcatgtttgaagtggctcatatgtttttgttaatctaattttaaaaaattagaagctcaaaggatttaactgacatactcaaaagcaccaagaaaatattttcttagtgtcactgtagtaccttaaacatctttctttaatatcattcatttttccctagtatagagtatttttaacaggcctattttcttcattagtctataacatttttgaaggtctcagtatttcttatattcttagctctgagaattcccaggcctagagtcgacactgtataaatgtcacatgaatgaatgaatgctttattgaatcaat

SEQ ID NO: 1204 - DNA, 661 bp, Homo sapiens
  misc_feature [331]..[331]: Chromosome 2, SNP identification no. = rs12622864
  misc_feature [331]..[331]: allele = t, in linkage disequilibrium with rs7595284, respectively
  misc_feature [331]..[331]: n is a, t, c or g
gaagaaaataggcctgttaaaaatactctatactagggaaaaatgaatgatattaaagaaagatgtttaaggtactacagtgacactaagaaaatattttcttggtgcttttgagtatgtcagttaaatcctttgagcttctaattttttaaaattagattaacaaaaacatatgagccacttcaaacatgccggtgcaaagcctacaatttctttcaaagaggctgaactacaggccattttacccaaactcatacattcattcattttaaaaagtgcatccttggaacaagcataatcaagaaatgcttaaaacgagtctggcctgtanctcatgacaaagacttgtatgaagagatgagctgagccaatctgcatcctaccaagagaaaccacaagaatcagacaattagcatcaggaaccgaaaatgaaagcatgcccagagagcagaagtcataagggatagtcaaggctcttttggttcaggagaaagctgcatgtagaaggacgcttgagttaagcagaagatggtagatgaggttagaagtaagacgaaataaggatgaagagtagaggatggggaaggcagccagagttaaggtgcagcagacacccagagagggatggggaggccaaggaaaaaagagcattacaaagaga

SEQ ID NO: 1205 - DNA, 661 bp, Homo sapiens
  misc_feature [331]..[331]: Chromosome 2, SNP identification no. = rs7595284
  misc_feature [331]..[331]: allele = a, c
  misc_feature [331]..[331]: n is a, t, c or g
tgccggtgcaaagcctacaatttctttcaaagaggctgaactacaggccattttacccaaactcatacattcattcattttaaaaagtgcatccttggaacaagcataatcaagaaatgcttaaaacgagtctggcctgtaactcatgacaaagacttgtatgaagagatgagctgagccaatctgcatcctaccaagagaaaccacaagaatcagacaattagcatcaggaaccgaaaatgaaagcatgcccagagagcagaagtcataagggatagtcaaggctcttttggttcaggagaaagctgcatgtagaaggacgcttgagttnagcagaagatggtagatgaggttagaagtaagacgaaataaggatgaagagtagaggatggggaaggcagccagagttaaggtgcagcagacacccagagagggatggggaggccaaggaaaaaagagcattacaaagagagagtgcttgcagaaatgagtaggaaacagcaacggtgggctgtccccaaactgcttgtgttccaactgatttccagttctaagccccatgtggtttctgatcctgtgtgtttttgcttaaaaacctcctacctgtattactgaataactgaatttatctatgttgagtatagccaaaatagccccttgt

SEQ ID NO: 1206 - DNA, 661 bp, Homo sapiens
  misc_feature [331]..[331]: Chromosome 2, SNP identification no. = rs4491745
  misc_feature [331]..[331]: allele = t, in linkage disequilibrium with rs7595284, respectively
  misc_feature [331]..[331]: n is a, t, c or g
ttggttcaggagaaagctgcatgtagaaggacgcttgagttaagcagaagatggtagatgaggttagaagtaagacgaaataaggatgaagagtagaggatggggaaggcagccagagttaaggtgcagcagacacccagagagggatggggaggccaaggaaaaaagagcattacaaagagagagtgcttgcagaaatgagtaggaaacagcaacggtgggctgtccccaaactgcttgtgttccaactgatttccagttctaagccccatgtggtttctgatcctgtgtgtttttgcttaaaaacctcctacctgtattactgaataantgaatttatctatgttgagtatagccaaaatagccccttgttggttggttttgtttttgtttttgtttttttgaaatttttctaatttttttttattatactttaagttttagggtacatgtgcacaacgtgcaggtttgttacgtatgtatacatgtgccatgttggtgtgctgcacccattaactcctcatttaacattaggtatatctcctaatgctatccctctcccctcccccaaccccacaacaggccctggtgtgtgatgttccccttgctgtgtccatgtgttctcattgttcaattcccacctatgagtgagaacatgcgg

SEQ ID NO: 1207 - DNA, 661 bp, Homo sapiens
  misc_feature [331]..[331]: Chromosome 2, SNP identification no. = rs6720349
  misc_feature [331]..[331]: allele = c, in linkage disequilibrium with rs7595284, respectively
  misc_feature [331]..[331]: n is a, t, c or g
cagtgttctaatcatcctaatcaattaagtcaaatggtatatgtaggacacagtattgaccacaagtattggcaatttttttcatcatggtctttctattcctacacactatgatgactattgtatacatgcttaagtataaggtataattttaccaaaatagacataaaaagttcccattttgtactttatttgggaacaataatcaaaaccaaatgtacatgtctttgacatgggcaatggtgtctctaggaattgaggagagaaaagatcaaatgtaggtattattctctaaaacagagtcccctaagtagcaacaagagcttcagangtaatatatgtaaatattgtgtaaataaatatacatgtattgtagggtatgctctagttttgtttatttgttttttaatagggatatatagttaaaaaattgtggggcctattgtcatgtggatagccactattacatgcatccaaagacatagtttcctgtggtcttgttcatagtacctaacaacatggaaaataccaaattatccttcaaatgtcatttgtcgaggagatgttacatgtcactctaaatatgtagtttgagagtttccattctacataatatttgctcctgagtattgaatgtccaaaagctgaacttttacttaga

SEQ ID NO: 1208 - DNA, 661 bp, Homo sapiens
  misc_feature [331]..[331]: Chromosome 2, SNP identification no. = rs11126720
  misc_feature [331]..[331]: allele = g, in linkage disequilibrium with rs7595284, respectively
  misc_feature [331]..[331]: n is a, t, c or g
tattattctctaaaacagagtcccctaagtagcaacaagagcttcagatgtaatatatgtaaatattgtgtaaataaatatacatgtattgtagggtatgctctagttttgtttatttgttttttaatagggatatatagttaaaaaattgtggggcctattgtcatgtggatagccactattacatgcatccaaagacatagtttcctgtggtcttgttcatagtacctaacaacatggaaaataccaaattatccttcaaatgtcatttgtcgaggagatgttacatgtcactctaaatatgtagtttgagagtttccattctacatantatttgctcctgagtattgaatgtccaaaagctgaacttttacttagaggtgcttgggttctcagaaatacatttacatgaggtgcttacatgaagcagaatgcccaaataaccatttataatggaaaaaaaatccttttgggagctcattcgctcatattctctatcaggacccttttttcttggtattaagtataaatgatttagttacaatgcttcttgtctcaatcaaaactctgagagtggcactgacctgaaggatacttctttgggtcatggggaggtctgataaagcatccttgcctaaggcagcaggatcgctcaggtgga

SEQ ID NO: 1209 - DNA, 661 bp, Homo sapiens
  misc_feature [331]..[331]: Chromosome 2, SNP identification no. = rs11691007
  misc_feature [331]..[331]: allele = g, in linkage disequilibrium with rs7595284, respectively
  misc_feature [331]..[331]: n is a, t, c or g
aaataaccatttataatggaaaaaaaatccttttgggagctcattcgctcatattctctatcaggacccttttttcttggtattaagtataaatgatttagttacaatgcttcttgtctcaatcaaaactctgagagtggcactgacctgaaggatacttctttgggtcatggggaggtctgataaagcatccttgcctaaggcagcaggatcgctcaggtggactagatagcacatctctcaccttcccagcctcagtaccacttgttttcctatgccagttgcctcactctgtaagcattcctttctttgtttttaattactgaaatcntatgcattaattttagatatatttaaatagatagggataaagggagaaatcactaccaagaatggttaacctcagaaattttctacatatacctgtaactgcacatgaatatattccgtattacaaaatcatagatcctactgcacataacttaggttggcctgtctggttttcactaaacaatatatgatgaacattttctcattagaataagtaaataatgacatgcgttatgaatgtataatattccattataaaaatatacaatcatttgtttgttttttgagctgaaatacatgtagaaatctccaagaagcctttgctgcccac

SEQ ID NO: 1210 - DNA, 661 bp, Homo sapiens
  misc_feature [331]..[331]: Chromosome 2, SNP identification no. = rs11126721
  misc_feature [331]..[331]: allele = c, in linkage disequilibrium with rs7595284, respectively
  misc_feature [331]..[331]: n is a, t, c or g
caggatcgctcaggtggactagatagcacatctctcaccttcccagcctcagtaccacttgttttcctatgccagttgcctcactctgtaagcattcctttctttgtttttaattactgaaatcatatgcattaattttagatatatttaaatagatagggataaagggagaaatcactaccaagaatggttaacctcagaaattttctacatatacctgtaactgcacatgaatatattccgtattacaaaatcatagatcctactgcacataacttaggttggcctgtctggttttcactaaacaatatatgatgaacattttctcatnagaataagtaaataatgacatgcgttatgaatgtataatattccattataaaaatatacaatcatttgtttgttttttgagctgaaatacatgtagaaatctccaagaagcctttgctgcccactcactccttggtctgtgttatgtggccatccttcaaccccaccatagggcctttatcatagcacttatcatactgcatacctttccctttctcacctgtatacacttatgtctacttagctcactttttaaaatcttcagtagctaactagttactaactcatagggggttctctaacatatctgttgaactgaattgaataatac

SEQ ID NO: 1211 - DNA, 661 bp, Homo sapiens
  misc_feature [331]..[331]: Chromosome 2, SNP identification no. = rs6741335
  misc_feature [331]..[331]: allele = g, in linkage disequilibrium with rs7595284, respectively
  misc_feature [331]..[331]: n is a, t, c or g
attttgccttttgccctagttaactttctggaaatgagaaaaggaagagagggtggaagaaagatctgagagaggaagaagtaaatatagacaaattcaatctcataatgtacacaatgttatgtaaaatagtcttcaaaatatccagttttacaggtccccagaacccccatagtctcttatgtccacattcaagacagttctgttaatgttgtttataaggatgtgctgctgcaatttattgtaccactttcttctgtccagagggacattacaaaacaactttttataatctccaaactggacggaaattttcttgcaaaatgatacntagtgaaaatattataaagagcctcccaggcacttgtgcctcagagtcttgtttagagaaaaaggtatcacagggaataaaattgcagtagggttgaagattttctgttcttttctttctttttttttttccgtgactaagaatgaacaagacccaggttgttcagggatgagaggtttcaccattataaccctgaaggcagcagcattactctccgtctgtgccatgcctcttccattttatgaaaatggaagattttatgaatttggcaaacattagtctgtcaagccaactgggccctaaagagatacaatcatatgtggcagcccc

SEQ ID NO: 1212 - DNA, 661 bp, Homo sapiens
  misc_feature [331]..[331]: Chromosome 2, SNP identification no. = rs6713159
  misc_feature [331]..[331]: allele = a, in linkage disequilibrium with rs7595284, respectively
  misc_feature [331]..[331]: n is a, t, c or g
atctcataatgtacacaatgttatgtaaaatagtcttcaaaatatccagttttacaggtccccagaacccccatagtctcttatgtccacattcaagacagttctgttaatgttgtttataaggatgtgctgctgcaatttattgtaccactttcttctgtccagagggacattacaaaacaactttttataatctccaaactggacggaaattttcttgcaaaatgatacatagtgaaaatattataaagagcctcccaggcacttgtgcctcagagtcttgtttagagaaaaaggtatcacagggaataaaattgcagtagggttgaanattttctgttcttttctttctttttttttttccgtgactaagaatgaacaagacccaggttgttcagggatgagaggtttcaccattataaccctgaaggcagcagcattactctccgtctgtgccatgcctcttccattttatgaaaatggaagattttatgaatttggcaaacattagtctgtcaagccaactgggccctaaagagatacaatcatatgtggcagcccctcccaatcctgaatcacacagcacagaacatatgataagccaataattagtctgtgaattcagttactctaagcagtccaaatgcatatttcaagcttt

SEQ ID NO: 1213 - DNA, 661 bp, Homo sapiens
  misc_feature [331]..[331]: Chromosome 2, SNP identification no. = rs6728857
  misc_feature [331]..[331]: allele = g, in linkage disequilibrium with rs7595284, respectively
  misc_feature [331]..[331]: n is a, t, c or g
cttccattttatgaaaatggaagattttatgaatttggcaaacattagtctgtcaagccaactgggccctaaagagatacaatcatatgtggcagcccctcccaatcctgaatcacacagcacagaacatatgataagccaataattagtctgtgaattcagttactctaagcagtccaaatgcatatttcaagctttgattacccttccatcggagattttatttttccttttcttcaattaaacaagcaactacagaaaaagcaggattttagagacctgcaacacctggatgattgcaattagatgtggcttcagaggtggggaggtngttctccacaggaatatttaccaagtatataaaacaggtaaattagaaggtggcttttaacattacaaaaatatttcctagttttagttttcctgaaaattacattgcaaaattttcttctgctataacattgctgtaaagaaaccctgcactgcagtccagtatgcctgaactgtaagataagagggttgtactctccaaagctgctttgaattcaaataatatgtgaactacactatacagagtctggtacagggatcaggcaaaattttgaagaaaagttagaaaacaggtaagcactgaagttcgttgatccctacaggatgattt

SEQ ID NO: 1214 - DNA, 661 bp, Homo sapiens
  misc_feature [331]..[331]: Chromosome 2, SNP identification no. = rs6547234
  misc_feature [331]..[331]: allele = t, in linkage disequilibrium with rs7595284, respectively
  misc_feature [331]..[331]: n is a, t, c or g
tatttgcatcttcatagttttgattcaattgatcaaaaactatcaagtcaactttaaatacacttgagttgcatctaacctcttaatgacatgtcttctttgcagtacttgcttgttcatcaaggatgttgctgctcatgcattggtatagatttctaagccagacggaagaggctactttgcagacatcttgtaaaagaagttcatacctcaattgaggaactgactaaggtttccagaggtttctctttgttcagaggctccagcagcatatgacttctctctgtctatccagtgatcattcaaagctctctgaggcataatagattgntcaacaagcatctctccatttgatctgaagtttctgtgtgttgtgggtgatgaactggagttgtctcattatgaaagtcttttgctgttgggttccatcctgaccaaatgtttagcaatgcaagcatgtttgccttcagatagctaaatgactgcgtgattgctaatttaatgtgtcaacttggctgggctaagggatacttagatagctgataaaacattatttcagagtatttctgtaaaggtgtttctggaagagattatcatttgaatgagtagactgagtaaagaacattaccctcactagtgggggtaggcatcatccaatcta

SEQ ID NO: 1215 - DNA, 661 bp, Homo sapiens
  misc_feature [331]..[331]: Chromosome 2, SNP identification no. = rs6547235
  misc_feature [331]..[331]: allele = a, in linkage disequilibrium with rs7595284, respectively
  misc_feature [331]..[331]: n is a, t, c or g
cttgttcatcaaggatgttgctgctcatgcattggtatagatttctaagccagacggaagaggctactttgcagacatcttgtaaaagaagttcatacctcaattgaggaactgactaaggtttccagaggtttctctttgttcagaggctccagcagcatatgacttctctctgtctatccagtgatcattcaaagctctctgaggcataatagattgctcaacaagcatctctccatttgatctgaagtttctgtgtgttgtgggtgatgaactggagttgtctcattatgaaagtcttttgctgttgggttccatcctgaccaaatgnttagcaatgcaagcatgtttgccttcagatagctaaatgactgcgtgattgctaatttaatgtgtcaacttggctgggctaagggatacttagatagctgataaaacattatttcagagtatttctgtaaaggtgtttctggaagagattatcatttgaatgagtagactgagtaaagaacattaccctcactagtgggggtaggcatcatccaatctattgagggcccaagtagaacaaaaaggtggaagaagggtaaattctgtctatctgcttggtgggacatcctctcctgtccttgggcatcagtactcctagtactcaggcctt

SEQ ID NO: 1216 - DNA, 661 bp, Homo sapiens
  misc_feature [331]..[331]: Chromosome 2, SNP identification no. = rs6547236
  misc_feature [331]..[331]: allele = c, in linkage disequilibrium with rs7595284, respectively
  misc_feature [331]..[331]: n is a, t, c or g
gtcaacttggctgggctaagggatacttagatagctgataaaacattatttcagagtatttctgtaaaggtgtttctggaagagattatcatttgaatgagtagactgagtaaagaacattaccctcactagtgggggtaggcatcatccaatctattgagggcccaagtagaacaaaaaggtggaagaagggtaaattctgtctatctgcttggtgggacatcctctcctgtccttgggcatcagtactcctagtactcaggccttcagactcagactgagacttataccactggcttttctgggtctcagggtttgaggcttggactgnaactacccccactggctttcctgagcttttagcttgtagacattagatcatgggacttctcagcctccgtagtcacatgagccaatctctcataataattttctcttttattcctctctctctgtctgggtatgtgtgtgtatacatcttgtttgttctgtttctctggagaatcccaacaaatacatgctattaccaaaaaagaagaaggtttccaattatcttatgccatttctgaaagtagaattaggacaatgaatggaagttactgaagagcaccttaggctatcattaggaggaattttatagcatttaaaaacatcccaaaat

SEQ ID NO: 1217 - DNA, 661 bp, Homo sapiens
  misc_feature [331]..[331]: Chromosome 2, SNP identification no. = rs1376618
  misc_feature [331]..[331]: allele = c, in linkage disequilibrium with rs7595284, respectively
  misc_feature [331]..[331]: n is a, t, c or g
catattagaatgattccaaaaaataaaacaacaaactcttgactggttaaaccagaattcctgcatgtatacttcacatattagaaaacaggaaacacataatgctgtgtcagaccgtaaatgtgaaatataataactcccagttacattaatggctatggttaagtgagtgtgtactatgtgctagtctttgtgttaagattgttatttgtcacacggaggcctgccaagaggcctgttataatttccatttcacagacagcactccagcctgggtgacagagcgagacactgtctgaaaaaaatcaaaattaaaaaagtaaaacatatnaagctcttgattccatcttatcagagatcctgtgagaacacatttctaagtcctcagataggaatgctttaaaccttccagagctgatgaaactttctctcttgatacttttataattattaatcacatagctaaagataggaaatggacttctctctggatgtaccaagagtcttattcctggggtacatttggaatgttaatggaaaagtaagaaattacagattaaatttccatagggtgctaaggcaacattcaaaaattttctcttctgcacattatttctggcattttacatgaaaatattctcactcataggtgggaattgaa

SEQ ID NO: 1218 - DNA, 661 bp, Homo sapiens
  misc_feature [331]..[331]: Chromosome 2, SNP identification no. = rs6547237
  misc_feature [331]..[331]: allele = t, in linkage disequilibrium with rs7595284, respectively
  misc_feature [331]..[331]: n is a, t, c or g
tgttctcacaggatctctgataagatggaatcaagagcttgatatgttttacttttttaattttgatttttttcagacagtgtctcgctctgtcacccaggctggagtgctgtctgtgaaatggaaattataacaggcctcttggcaggcctccgtgtgacaaataacaatcttaacacaaagactagcacatagtacacactcacttaaccatagccattaatgtaactgggagttattatatttcacatttacggtctgacacagcattatgtgtttcctgttttctaatatgtgaagtatacatgcaggaattctggtttaaccagtnaagagtttgttgttttattttttggaatcattctaatatgtccaaagtatttttatcccttagtgagttcaatatataattgaatttttctttttctttttttttgagacagagtttcttgtctcctaggctggagtacaatggtgcaatcttggctcactgcaacttcccctgggttcaagtgattctcctgtctcagcctcctgagtagctgggattacaggtgcctgccaacatgccaggctaatttttatatttttagtagagacgggatttcactatgttggccaagctggtctcgaactcctgacctcaggcgatctgcccgcc

SEQ ID NO: 1219 - DNA, 661 bp, Homo sapiens
  misc_feature [331]..[331]: Chromosome 2, SNP identification no. = rs1901336
  misc_feature [331]..[331]: allele = g, in linkage disequilibrium with rs7595284, respectively
  misc_feature [331]..[331]: n is a, t, c or g
aggagaaaagtatcaacctaaactccgggttttgccaggcagaaagttggtataatatttattattattagaaatcatagcatcaggaaagccttaaaacatatgaagagcttcttaaataagtcctgaattatttcaaatgagatcaatccatgttgagctttcaattagaaaagtgaaattttatagttatggattgggttggaagacagtcgaacctaatcttctgtgtccaaaatctccttcttcagtgagcaacaaaaagaaatgaagctcaaatgaatgtccctaaagtcttgtgggaaactcaataataaaagaaaaattcaangcttgtaatcccagcactttgggaggccgaggcgggcagatcgcctgaggtcaggagttcgagaccagcttggccaacatagtgaaatcccgtctctactaaaaatataaaaattagcctggcatgttggcaggcacctgtaatcccagctactcaggaggctgagacaggagaatcacttgaacccaggggaagttgcagtgagccaagattgcaccattgtactccagcctaggagacaagaaactctgtctcaaaaaaaaagaaaaagaaaaattcaattatatattgaactcactaagggataaaaatactttggacatattagaa

SEQ ID NO: 1220 - DNA, 661 bp, Homo sapiens
  misc_feature [331]..[331]: Chromosome 2, SNP identification no. = rs1901335
  misc_feature [331]..[331]: allele = c, in linkage disequilibrium with rs7595284, respectively
  misc_feature [331]..[331]: n is a, t, c or g
acatgctgattaggaaagagattgttattttttgcccaattttaatggcttgttttgaatattctctccatttattaattgaggagaaaagtatcaacctaaactccgggttttgccaggcagaaagttggtataatatttattattattagaaatcatagcatcaggaaagccttaaaacatatgaagagcttcttaaataagtcctgaattatttcaaatgagatcaatccatgttgagctttcaattagaaaagtgaaattttatagttatggattgggttggaagacagtcgaacctaatcttctgtgtccaaaatctccttcttcngtgagcaacaaaaagaaatgaagctcaaatgaatgtccctaaagtcttgtgggaaactcaataataaaagaaaaattcaatgcttgtaatcccagcactttgggaggccgaggcgggcagatcgcctgaggtcaggagttcgagaccagcttggccaacatagtgaaatcccgtctctactaaaaatataaaaattagcctggcatgttggcaggcacctgtaatcccagctactcaggaggctgagacaggagaatcacttgaacccaggggaagttgcagtgagccaagattgcaccattgtactccagcctaggagacaagaaactc

SEQ ID NO: 1221 - DNA, 661 bp, Homo sapiens
  misc_feature [331]..[331]: Chromosome 2, SNP identification no. = rs1451540
  misc_feature [331]..[331]: allele = g, in linkage disequilibrium with rs7595284, respectively
  misc_feature [331]..[331]: n is a, t, c or g
gaaatgaaggtattaggaagatacatgaagtctgggaaacgtaatgagacactgtctctacaagaaattataaaaaaaataaacagacttggtggcacttgttgtcctagctactcaggaggctgaggtggaaggagcttgagcccaggagtttgaggttagagtgagctatgatcatgccactgcactccagactggacaacaaagtgagaccttgtctctaaaaaaataaaaaataaaaatgaaaaaatttaacaaacagacttgagagccagttgcatagagatgaacacgaaagactgaagacttctctgcaaaagagaaggaaaanaaaaacgtataaagaatgaatcttgaggaatgctcagatttgaaaggatgagggaaaaagctgttatttaaaaacaaagcccacttggttagtaatgggatctttcttgtgaaagatataccctgcagaggtgagaaaatttgacttcctcaaagaatactgattttctcaaaatgttgtccttggctggaaaaggaagggtgggtatatgaagagaaggtgattaaggggtaccaaaatacagttagatagaagaaatatagtctagtatttgacagtatagtagggaaattatagttaatgataattttttgtatattccaaaataat

SEQ ID NO: 1222 - DNA, 661 bp, Homo sapiens
  misc_feature [331]..[331]: Chromosome 2, SNP identification no. = rs7606450
  misc_feature [331]..[331]: allele = a, in linkage disequilibrium with rs7595284, respectively
  misc_feature [331]..[331]: n is a, t, c or g
aactaaaaactagtcacaatgggatacggacgagctgtagtaaactatgatttgtctgtatgccttttcctagcaataacctttgactcccaacatcagctattcttcatgtgaaccacctaccatataaagcatgatttttcaaatttatgctacttccaaatcctttccaagttcagacaaactttaaaagtaactcatgcctatagtctacagtgtcaaaccacctgagttttttattcagtaggtctgggttgggtcccaagagtttccatttaaacaaatttttagctacttttgatgctgccagtatgaggacaataaacagggnatcacagctcctggagactggatggtagctgtactacattactacaataataatgctaattacaagaattgagaagtagcctagccacatctgaatgacactagaaaattttctaaagaaaaagataagaatcaggttcaactattggaatggaagaacaaagatctctgaaaacctacccttccataacaataacagggatattggccccaaaaaaacctcaaaaaaaaacctgtcaaaatcaactttttaaaaattctggaaagtatgcaaaagtctgccacaatctgagaagtgtttagttaaaaaaaaaaaaagaaaaaaagttga

SEQ ID NO: 1223 - DNA, 661 bp, Homo sapiens
  misc_feature [331]..[331]: Chromosome 2, SNP identification no. = rs1584667
  misc_feature [331]..[331]: allele = a, in linkage disequilibrium with rs7595284, respectively
  misc_feature [331]..[331]: n is a, t, c or g
taagtctgacatctaggctttctcagggaccatttctattgacttttctcatatgtataggcctattttcttgtttctttgagtgtctcatctttattattgaaaactggacatttaaaatgatgtaatttttaaattatagaaagaagatgatcacccccacacacctgggcttgttgttactgctgtttgttcgtttattgacttatctggactattatgtaaagtctgtattctttgttgtgtgtggtctatgatatttctatttggttaccttcttggtcagttaatgattggttagagaacatcttaaatgctttgaaccaatatntgttgggtacatttcagtgctttggtaggcagtttaaaaccctgccttagacttctctttttgctgtctacagccttaaggtctgatagcaatgagagcttagtgtctactcaaatcttacctgatataggccatgagcacagccctgcatacatgaatgacttctaattcccaggaatatgtgaaagctttgcaaagtttcctatggatatttcacttttcagtgctttaaaaaaaaatcagcctcttatcctcaactggcaatgctgcatcaggcagctataatgttaatcagttgtcattatttattttttctataaatgcccttct

SEQ ID NO: 1224 - DNA, 661 bp, Homo sapiens
  misc_feature [331]..[331]: Chromosome 2, SNP identification no. = rs1584666
  misc_feature [331]..[331]: allele = g, in linkage disequilibrium with rs7595284, respectively
  misc_feature [331]..[331]: n is a, t, c or g
tatttgaatatatttctaatagtgaatgtcagttctttatctagtaagtctgacatctaggctttctcagggaccatttctattgacttttctcatatgtataggcctattttcttgtttctttgagtgtctcatctttattattgaaaactggacatttaaaatgatgtaatttttaaattatagaaagaagatgatcacccccacacacctgggcttgttgttactgctgtttgttcgtttattgacttatctggactattatgtaaagtctgtattctttgttgtgtgtggtctatgatatttctatttggttaccttcttggtcagntaatgattggttagagaacatcttaaatgctttgaaccaatatgtgttgggtacatttcagtgctttggtaggcagtttaaaaccctgccttagacttctctttttgctgtctacagccttaaggtctgatagcaatgagagcttagtgtctactcaaatcttacctgatataggccatgagcacagccctgcatacatgaatgacttctaattcccaggaatatgtgaaagctttgcaaagtttcctatggatatttcacttttcagtgctttaaaaaaaaatcagcctcttatcctcaactggcaatgctgcatcaggcagctataat

SEQ ID NO: 1225 - DNA, 661 bp, Homo sapiens
  misc_feature [331]..[331]: Chromosome 2, SNP identification no. = rs7573401
  misc_feature [331]..[331]: allele = g, in linkage disequilibrium with rs7595284, respectively
  misc_feature [331]..[331]: n is a, t, c or g
atgggaggcaggttgtccctaagcagctcccagcttgacttttccctttggcttagtgattttggggttccaagatgtattttcctctcatagctgctatatagagaatatcaataaagagttagaaattatttaaaataatcaaatggaaagttaaaaagtacaataactgaaattaaaaaattccctagagcagttcagctgcagatgcgaactgtcgaaaagaaaaaatcggttaacttgaagaaaaatcaattgagagtatccagtctgaaggtcaaaaagaaaatataagaaaaataaataagtagagcttcagaaatctgtagancctcatcaggcacactattttacacatattcagagtgccagaatgaggggcaagagaaaaaggggtataaaaatatttgaggacataatggtcaaaaacttaccaaattttatgacaaacattaatctacatatccaattagttcaatgaacaccgtgtagaataaactaaggagatccacactgagacacattacagtcaaactgttgaaaaataaagacccttgaaagcagcatgagaaaagcaagtcatcatgtgtaatcagtactcagtgagattaacaaaagacttctcagcagaaaccatgaaaagaaaaacactatcaactaa

SEQ ID NO: 1226 - DNA, 661 bp, Homo sapiens
  misc_feature [331]..[331]: Chromosome 2, SNP identification no. = rs7369541
  misc_feature [331]..[331]: allele = g, in linkage disequilibrium with rs7595284, respectively
  misc_feature [331]..[331]: n is a, t, c or g
ttagtgattttggggttccaagatgtattttcctctcatagctgctatatagagaatatcaataaagagttagaaattatttaaaataatcaaatggaaagttaaaaagtacaataactgaaattaaaaaattccctagagcagttcagctgcagatgcgaactgtcgaaaagaaaaaatcggttaacttgaagaaaaatcaattgagagtatccagtctgaaggtcaaaaagaaaatataagaaaaataaataagtagagcttcagaaatctgtagaacctcatcaggcacactattttacacatattcagagtgccagaatgaggggcnagagaaaaaggggtataaaaatatttgaggacataatggtcaaaaacttaccaaattttatgacaaacattaatctacatatccaattagttcaatgaacaccgtgtagaataaactaaggagatccacactgagacacattacagtcaaactgttgaaaaataaagacccttgaaagcagcatgagaaaagcaagtcatcatgtgtaatcagtactcagtgagattaacaaaagacttctcagcagaaaccatgaaaagaaaaacactatcaactaagacttctgtgtctagcaaaactatttttcaaaaataatagagaaattaagac

SEQ ID NO: 1227 - DNA, 661 bp, Homo sapiens
  misc_feature [331]..[331]: Chromosome 2, SNP identification no. = rs2198159
  misc_feature [331]..[331]: allele = t, in linkage disequilibrium with rs7595284, respectively
  misc_feature [331]..[331]: n is a, t, c or g
cctttaatattttttatactgctagtggtaaattctctcagttttctctgtgtcttaatttctctattatttttgaaaaatagttttgctagacacagaagtcttagttgatagtgtttttcttttcatggtttctgctgagaagtcttttgttaatctcactgagtactgattacacatgatgacttgcttttctcatgctgctttcaagggtctttatttttcaacagtttgactgtaatgtgtctcagtgtggatctccttagtttattctacacggtgttcattgaactaattggatatgtagattaatgtttgtcataaaatttgntaagtttttgaccattatgtcctcaaatatttttatacccctttttctcttgcccctcattctggcactctgaatatgtgtaaaatagtgtgcctgatgaggttctacagatttctgaagctctacttatttatttttcttatattttctttttgaccttcagactggatactctcaattgatttttcttcaagttaaccgattttttcttttcgacagttcgcatctgcagctgaactgctctagggaattttttaatttcagttattgtactttttaactttccatttgattattttaaataatttctaactctttattgatattctc

SEQ ID NO: 1228 - DNA, 661 bp, Homo sapiens
  misc_feature [331]..[331]: Chromosome 2, SNP identification no. = rs1584665
  misc_feature [331]..[331]: allele = a, in linkage disequilibrium with rs7595284, respectively
  misc_feature [331]..[331]: n is a, t, c or g
tataaggattcaagttactgtttagtgacctttcatattagccctagggatctcctttaatattttttatactgctagtggtaaattctctcagttttctctgtgtcttaatttctctattatttttgaaaaatagttttgctagacacagaagtcttagttgatagtgtttttcttttcatggtttctgctgagaagtcttttgttaatctcactgagtactgattacacatgatgacttgcttttctcatgctgctttcaagggtctttatttttcaacagtttgactgtaatgtgtctcagtgtggatctccttagtttattctacanggtgttcattgaactaattggatatgtagattaatgtttgtcataaaatttggtaagtttttgaccattatgtcctcaaatatttttatacccctttttctcttgcccctcattctggcactctgaatatgtgtaaaatagtgtgcctgatgaggttctacagatttctgaagctctacttatttatttttcttatattttctttttgaccttcagactggatactctcaattgatttttcttcaagttaaccgattttttcttttcgacagttcgcatctgcagctgaactgctctagggaattttttaatttcagttattgtactttt

SEQ ID NO: 1229 - DNA, 661 bp, Homo sapiens
  misc_feature [331]..[331]: Chromosome 2, SNP identification no. = rs1451539
  misc_feature [331]..[331]: allele = t, in linkage disequilibrium with rs7595284, respectively
  misc_feature [331]..[331]: n is a, t, c or g
tattgaataggagaagaaaagtgttttaaaaaaatatatatttatattatttttatttttgcatttaatggtgttcagtttttctttttaaaattaaaaacaaatttgtgggtatactgtaagtgtatatatttatggggtacatgagatgttttgatatgggcatatgtacggtatgaaataagcacattatggggaatggcatatctatccccggagtattcatttttctttataaggattcaagttactgtttagtgacctttcatattagccctagggatctcctttaatattttttatactgctagtggtaaattctctcagtttnctctgtgtcttaatttctctattatttttgaaaaatagttttgctagacacagaagtcttagttgatagtgtttttcttttcatggtttctgctgagaagtcttttgttaatctcactgagtactgattacacatgatgacttgcttttctcatgctgctttcaagggtctttatttttcaacagtttgactgtaatgtgtctcagtgtggatctccttagtttattctacacggtgttcattgaactaattggatatgtagattaatgtttgtcataaaatttggtaagtttttgaccattatgtcctcaaatatttttataccccttt

SEQ ID NO: 1230 - DNA, 661 bp, Homo sapiens
  misc_feature [331]..[331]: Chromosome 2, SNP identification no. = rs1947309
  misc_feature [331]..[331]: allele = g, in linkage disequilibrium with rs7595284, respectively
  misc_feature [331]..[331]: n is a, t, c or g
tatgctttagtttttattatatctttacttctgatttctttgggttgaattttcctgtttttctttttttgttaaagtgaaatgttaggttattaattttagatttttcttctttttaaatataggcatttatagctataaattatcttctaagtactgctttggctgcatcccataactttcagtatgctgtattttcatttttactcatctccaagtatttaatcatttaagcaatttcttttactatccattatttaacactgtgctgtgtaatttccatatgtttgtgaattttgtgattgatttctaattttatttttgatgaganagcatactttttggaaggtttaatcattataaagttttattgaggcctgttctatggcctatatatggtttaagttgaataatgttccaaatgcattgagaagaatgtatagtagtttgcctacccacagtttcactctctgaagtttcagttacctatgatgcagtatgatatttagagagacagagagagagagacagagagagagaccatatttatataacttttactacaatatattgttataattgttctattttattagtcattattgataatcttttactgtgcctaatttataaattaaacttcatcataggcatgtacata

SEQ ID NO: 1231 - DNA, 661 bp, Homo sapiens
  misc_feature [331]..[331]: Chromosome 2, SNP identification no. = rs4852148
  misc_feature [331]..[331]: allele = g, in linkage disequilibrium with rs7595284, respectively
  misc_feature [331]..[331]: n is a, t, c or g
tacaaacagtcacagtcctggatgcttaatctattatttttgagctagttcagtaggtctgttattttgagctagttccgtagaatttactagaattcttgctctttccttctgtttctaacaaattttactcacatacagttgctttcaggatatactgaaagcaaaagtcttgccctgatttctgaataaatgtaaaaaaaaaaaagggcaatagtgtacattggtaacaccaaaagcagaactcaagtgtttaagaacagtcaccaagtacatggttgtcataaactttgggtccataggcaggatatgaatatggggatggtaaaantatattctacctttctttgtgacagcagatctactgtttttcttgtcccctccctccccaatcaagtgaatattagtatttttatttgccgattcaccaagccaactctagcagccttgtacttggaggtaattcttctattcctgttattctttgcttttggatttgttattgtaagctttttaaaatatatatacaaatttcatgcatggacacttcattgaaaactgagaaatactataacaagagctgccaggtaggcactatttgaaacctatttcaaactatttgaaacaacacaacatgcagggcaactcggtttgacttaaa

SEQ ID NO: 1232 - DNA, 661 bp, Homo sapiens
  misc_feature [331]..[331]: Chromosome 2, SNP identification no. = rs9679249
  misc_feature [331]..[331]: allele = t, in linkage disequilibrium with rs7595284, respectively
  misc_feature [331]..[331]: n is a, t, c or g
aggatatgaatatggggatggtaaaattatattctacctttctttgtgacagcagatctactgtttttcttgtcccctccctccccaatcaagtgaatattagtatttttatttgccgattcaccaagccaactctagcagccttgtacttggaggtaattcttctattcctgttattctttgcttttggatttgttattgtaagctttttaaaatatatatacaaatttcatgcatggacacttcattgaaaactgagaaatactataacaagagctgccaggtaggcactatttgaaacctatttcaaactatttgaaacaacacaacntgcagggcaactcggtttgacttaaaagcacaacttctaaagtccaaaaattcctccacattcaggccccacaatgggcatgagagaaaaggctgagcagctgtggaacacctcactctgggaagatttaatctagtgtttggaatctgataatctagtggaaatatggtccttgggctcagtggaaatgtcaagcatagagatggtacttttagtattgtggcagatagaattctaatataacctcataattcctgccccctagtatcccctacccttgaatgtggatatgatttgtaacttgattatatttctttccctgtctcagaa

SEQ ID NO: 1233 - DNA, 661 bp, Homo sapiens
  misc_feature [331]..[331]: Chromosome 2, SNP identification no. = rs4467296
  misc_feature [331]..[331]: allele = c, in linkage disequilibrium with rs7595284, respectively
  misc_feature [331]..[331]: n is a, t, c or g
aaactatttgaaacaacacaacatgcagggcaactcggtttgacttaaaagcacaacttctaaagtccaaaaattcctccacattcaggccccacaatgggcatgagagaaaaggctgagcagctgtggaacacctcactctgggaagatttaatctagtgtttggaatctgataatctagtggaaatatggtccttgggctcagtggaaatgtcaagcatagagatggtacttttagtattgtggcagatagaattctaatataacctcataattcctgccccctagtatcccctacccttgaatgtggatatgatttgtaacttgattntatttctttccctgtctcagaactttatttttttaaagaactctattgagatatcattcatgaaccatgtagtttatacacttaaggtatacaggtcaaaggttttaagtatatttatgaattataatttgcttctaaccaatagaatatggcaaagatgaaggaatttttcagatttaattaagatgcctaatcacttgactttaatcaaaagggaaattatcctatgtgggcctgacttaatcagttgagccctttaaaaaagaatctagaggtgaaagactcagctgcagagactccctctttcctcctggctctgaagttccatgc

SEQ ID NO: 1234 - DNA, 661 bp, Homo sapiens
  misc_feature [331]..[331]: Chromosome 2, SNP identification no. = rs1201512
  misc_feature [331]..[331]: allele = g, in linkage disequilibrium with rs3923053, respectively
  misc_feature [331]..[331]: n is a, t, c or g
tcccagcaagaaaaatgcttatgtctacaaaaaagagctttacttgaatattcatagctcctctattcattagagccccacattgaaaattatctaaatacctgtcagtaataacatgggtagagaaattcttgtagactcactcacacaatggactactgaatctgttgtgccacaaactgggtggctttaaaaaaaaatgtactctcccacacttctagaggctagaagtttgaaattaaggtgtagtcagtgtcgtgctctaggcctctagggcaagaaccttccttgccttttccagcttcttgtaacccaggtgttccctggcttntggcagcatcacttcagtctcagcctccaacatcatgtggagtgtgtaacttttggatatgagctgtctgtttagttgcttcctcctcctccttctttctttccttccttccttttttctttctttctttggcttaagcaagagaaatgtattgtctcacagttctggaggctgggagtccaagatcaaggtgttggtagggttggtttctcctgaggcctctctccttggcttgcagatggctgccttctcactgtgtcctcacatggtcttccttctgtgcatgcatgaccctgatgtctctctgtctgttctaatctgctcttctta

SEQ ID NO: 1235 - DNA, 661 bp, Homo sapiens
  C2orf29
  misc_feature [331]..[331]: Chromosome 2, SNP identification no. = rs1660694
  misc_feature [331]..[331]: allele = a, in linkage disequilibrium with rs3923053, respectively
  misc_feature [331]..[331]: n is a, t, c or g
cacctgggtggggtggggcaggactgtttcttgggagaactagttggtcattaagattatttttagttacaacagatgacagaaaaaaaaaacctgcaaaggacttgacattgttacaaccagacagtattttatctgaccagacagtgtggagtctggtttgatgcccaggaataggaatcactagcatatttataaactgtcttagatgtgtttgcattttagtttgttcaaaattaaaatgtaaatttagaaatgtcaagacatcatgggtttgaaggaagaaatttatgaagttggttcaatgcagatagttttgtagctttttgtntaaaatgcttatttcatatacatgggaaaaaaaattgactcaacaccctttctctctccctctctctctctttaaaaatctggtgtatttagctacttggtgagttggaaaaagaccccaaacttgtctaccatattggcctcaccccagccaaacttcctgaccttgtggaaaacaaccctttagtcgctatagaaatgttgctgaaattaatgcagtcaagccagatcactgagtatttctctgtcctggtcaatatggacatgtctttacattcaatggaagttgtaaatcggtaagtttctagatttgatcaaatgtgtggggata

SEQ ID NO: 1236 - DNA, 661 bp, Homo sapiens
  misc_feature [331]..[331]: Chromosome 2, SNP identification no. = rs1660711
  misc_feature [331]..[331]: allele = a, in linkage disequilibrium with rs3923053, respectively
  misc_feature [331]..[331]: n is a, t, c or g
ttgggaaaaggacagcttattactgaagtactttaggagtggcagtttcaacaacccagctttaggttctaggacctacaggacctactgattctctggcataataaaacactgaactcagagccaacaccatcactcatgcctgagtgaagctgatctaacagacacttagtccatgaggcacatcacagccttgcccttagagcagcaggcaatattttgccacacctgaggaccattttaaatagtgaaattgccaacaaaaattgcagaaatgcaaaaaacatggtactgtgaagagactatgaaaggacacttgcttgtagtaggngaggaaacggcagggcatcccgtccagcctccgtcaggaacgtgcgggtcaggcagcttggctcattcgctgctctgtgcatgtctgaaagtgaccgcatgggatgattttggagtaacaaatacattttagtagggaggttctcaaatagggacttcgtaagtgaggatcaaaatcacaatattggtgtttacttgaaagactttaaaatttattttaaatagcttacaaggaatagtggttatatttatagaacattttataaaacagatttacacttgcaacaccaacaaaagcttgaaaataaaagtttacctaaagtaaaattgg

SEQ ID NO: 1237 - DNA, 661 bp, Homo sapiens
  RNF149
  misc_feature [331]..[331]: Chromosome 2, SNP identification no. = rs12617343
  misc_feature [331]..[331]: allele = t, in linkage disequilibrium with rs3923053, respectively
  misc_feature [331]..[331]: n is a, t, c or g
gaggccaaagcaggtggatcgcttgaccctagggagtttgacaccagcctgggcaatatggcaaaaccctgtctctattaaagcaaaccaaaaaaacctgcctagcatgagggctaaacattttgctatattataatcatagcagcaagattgcttctgggaattattttaaattaacaaaacccagaacgacggctctttataccctgagatttgcttttccagaacatttcaggggatgaactggaggcagggcagttgggtaaaaacatgctagttcaggggtcagtatgtgcacaactgcaaggggtgccaggcacgggcaccttgngggccctactcttgcctccgatgcatcgccgcctctctggccaatgctaatgagctaagctgctcaagttattgtgcaccacccttccttaattggcacatgagaccaaatcacagcttatttccaaactaaatgactggatttcgtcacagaaactcaaaagacttgggatgacagagaaaaagcccttagaggttatctcttccttccttaggccttaacgttgttaccaatattgcttgactaaaaaatgtcaccttgcacaatccctcttccccaaaagaacctatacaccttggcattaagacaggaaaatttcctgaaggcaat

SEQ ID NO: 1238 - DNA, 661 bp, Homo sapiens
  CREG2
  misc_feature [331]..[331]: Chromosome 2, SNP identification no. = rs11677690
  misc_feature [331]..[331]: allele = c, in linkage disequilibrium with rs3923053, respectively
  misc_feature [331]..[331]: n is a, t, c or g
aattccctcagaagtaccttattcttatatattagaaatcactactgttaggaactcttttgaggactggcttatgacaaataaagaattctctgcatcttactatgtttttagcaatagataattaaaatatattttgacaactcaagctctcgtcgtatgttattttgttaagcaaaagttcataatcattaataacactcttatttacttgaaaaatgtatatttcctacatatagtgatgtgttttttatgttatacaacctccctaacctaccaaagaaagtttgtagccattacagaaagacagaaaacttgggacagctcaacnctttataggttttaatgatcagaggtcttagatatatatacataggtccatgtagaccttagaagtgtacacaggtacagtctaatttctcaaaaacactaggagctcctacatataatatgtagaaagttttaaatctgtagtaagaatcaaatttcagagactttttttttttttccaaaagcaagaaacatcatctccaggcaagctagtccttcttttttacaatcactttactgattttcctggttcaatttctacccatgcatttcaataactcttttgttgttaaaactggatgtcttgtaggaaccactccacctgtgtctg

SEQ ID NO: 1239 - DNA, 661 bp, Homo sapiens
  CREG2
  misc_feature [331]..[331]: Chromosome 2, SNP identification no. = rs6754354
  misc_feature [331]..[331]: allele = a, in linkage disequilibrium with rs3923053, respectively
  misc_feature [331]..[331]: n is a, t, c or g
ctcaggccttgcaataggtgtgcttatgtaggttagatatcagtctgcattctggggcagtgagataacatctgaagcgccctaggcaaaagtgcacatttgagggtggaggaaattgagacgggaaagttccctgaccccctcgagggacttgcgacagtggggtagggtggggttcgggggggtgggagtgcttgttttgcttgcaggagggggagtacacaggtgagcaggttcaggagctggggtgagtgcctttttaggcaggaatgaaccctgtaccaagttgcccacaaactctggagtcccagagggcatgtattacaaacantgctcttttagtggttgccgtcagtgatggctaagtgttaatcagctcagtggcgagtcagggtgacgtacaccctgccctcttggtacccaggttcttgtctggcatccaggaagaatcaggtcatacagacttaaaggctggtgagtgcagaggttttatgaagcagtggaagtggctctcagcagaagagctgaaaaggggctggtgcaggaaggtgatctttccctgaggcctggccatcttcagccaggctcctctccaaagtcatgccgtctgaagttaagctgcatctatccatcctctccgactctcagttgcttcttcgcc

SEQ ID NO: 1240 - DNA, 661 bp, Homo sapiens
  CREG2
  misc_feature [331]..[331]: Chromosome 2, SNP identification no. = rs3923053
  misc_feature [331]..[331]: allele = g, a
  misc_feature [331]..[331]: n is a, t, c or g
atacatgaagagttatagaaataactcacctgattcttataagagtcccaagacagaggtacacttgttagcacctttttaaagatgaggaaactgaggcacagagggtgtgaaggacttgcttaaggatccacaggccaaatcctcatagggctgggattcactcctaggcaacctggctcccgagccggactgttacccactgtattccctgcctctgtggaatcagctgcatcccagaggcagtgagaacccccaccacgtttcagaaagcactgatgcagaaccaacaaaaacacagaagtattttttaagttgatttgaattgttngaatatcatgtccatcataggcttgcactgcaacagaggcaagacatgaaacttgctctaaatacgtgcacgcaggtccatgcaggccacctattccaataaagcattcgcgtggacaaatactcactgagcatctgctgggtaacgagccatgctaaacaccgtcacggataaatatgaaaaaaagagagcatctgcctttgaggggagggagaaggtataagacgcacatggaaatacgcatctttcaagctgcttgtgttaaatcccctacaagttatcggcctgtagaagattggtgggagagagaagctcttttgagccagtggt

SEQ ID NO: 1241 - DNA, 661 bp, Homo sapiens
  CREG2
  misc_feature [331]..[331]: Chromosome 2, SNP identification no. = rs4405786
  misc_feature [331]..[331]: allele = g, in linkage disequilibrium with rs3923053, respectively
  misc_feature [331]..[331]: n is a, t, c or g
ctcgggaccaccctaccccaggacggggtggggtgcggcacattcacctgacaccgagccaccattctggctccaaggctgtgtctctcccctgaactagtgaaagggctgacagtgttttactcctggacctgctcccagctgcttatctgaaccattgctctgcaagggcctatgctgcggctgcaccccttcctctccacagtcactggggccttggacaagtcgttactgactgtgttcaagggggtggatctcagaaggctgtcaaggcaggcctgtcggcagtttcagctttcagctttgctgggctgtgctgtttcaactgtcncgacatgggcatctgcaaagctgctgtcatgctgtggaagctctgatctttttgatggaatactttaaacccatgcatacatttatgtagtcgggagacacctgtccatgcttatgttattgaaggaaagggaaactggtgtctgcctcttcgcctctgctttcttgtgccattcaacttacaacagggaggaaataacagagaagtccgttgaacagacatcttctcttaatcacgtggttattttccgaatttaatttttttctttttcttttttttttttaacacagagtgtcactctgttgcccaagccggagtgcagtggcctga

SEQ ID NO: 1242 - DNA, 661 bp, Homo sapiens
  FLJ42986
  misc_feature [331]..[331]: Chromosome 2, SNP identification no. = rs908123
  misc_feature [331]..[331]: allele = c, in linkage disequilibrium with rs3923053, respectively
  misc_feature [331]..[331]: n is a, t, c or g
tcagcacccccaagttggggtcagtgtttcgctgctgcatccttcatcgaccatgtctgcttttttcacatggacactcgtggaggaggtgagtttctcatttacagacaaacgttggaatctacctcacagagagcaccgaatgcagctggatacgtgacttactatctcaaagtgagaaacaaagaccaaatacagatagagaactggtaaacctgagagatgcatttccccggctcctgttttgttttgttttgttttgtttttttggtctagggaggtgtcttgtccaagcattgctcagtaacaggtgtgcaggatctctgcaatnggagaactcgcaatgagagtctgctcaagaaggaaagggccctggaaggttcctgttattctgcggactctaaggcatgaagagttttaggctgtgactcactgccacaacttgcttcaggttgaatgatcgcacctgcctcaatttcctactaagcacaactcatctgtgcgagagggggaacttgtgggcacaaaaagaagaaggcggatagcggctaaacatcaaatatgtgcagagaaattagccctaagacaatcgctgtcagttttttttaaccagcccactccccactcctcaatggaggcatttcagttgttcctccatcag

SEQ ID NO: 1243 - DNA, 661 bp, Homo sapiens
  FLJ42986
  misc_feature [331]..[331]: Chromosome 2, SNP identification no. = rs11123876
  misc_feature [331]..[331]: allele = g, in linkage disequilibrium with rs3923053, respectively
  misc_feature [331]..[331]: n is a, t, c or g
tgaacactaggggaattttcagtgcatgccactcagacgttagtggtgtgctactgctgagttagtctaaccaggccaggcacactctgggaaggcaagaaatacccaggccatcagatggtcacacttctaatcatgccaggcatctatcaatgtcccacaaacctgagctgaccagtaatcaacagatagtgaattaaactcacccctggcaaaatcacctagggtaaagatgactgtagaatcgtttatcattgtttggacaaagtgatcttgagggttttactaatcacctgtggctcttattccccttgaaacagctgtgtggaanggggtcctggtgtccctaccttattgcccatggcagtgtccaccaggaagcccaggatcctgaggaccatgttgctcacacccacgggatatcggccctggcccatgtgtgtgggcatcacccccagtggctccatgctggggctggcacacgcctgcgacagtgaggaattcagagaatggaaaagtgcctggtctggctggccgagagtcgggtcatctggtagcatttccttgacagtccccatgtcctcctcctcctcttcctcctctaggcatgactgaagtatatgaatcatatattccaaaagcaacaagtgaaacagatgcc

SEQ ID NO: 1244 - DNA, 661 bp, Homo sapiens
  FLJ42986
  misc_feature [331]..[331]: Chromosome 2, SNP identification no. = rs10865041
  misc_feature [331]..[331]: allele = t, in linkage disequilibrium with rs3923053, respectively
  misc_feature [331]..[331]: n is a, t, c or g
gtgagatgggagaaaagcaaaccctacagggaactgggtgctgctcccagagctggagagggtacccctcaacctcatcgtgccccatgtatgatccacaggaatgtccagaaggggtgggaggaaacgggggcagtgtgcagagggaaccctgctgctgttttgtggtgtttgaaacgtagcgccttgcccctcttgcagaccctgtggctgcagctctttgtgtgggaagtgggtaaggaggccagctggcattccacctgtgagaggcgtcttctcaggtgggcctgcaagtgctgtcatcagagacaggagggtatgtgacttagcngaatgctccaaatcccaaggcctttgtgctcccagaaaggaaaacaatcattaatgtttgcttgagaaacagagggggaaatctggcctattgcaattgttaaaagataagttttaaataaaggtaaaaccatgactcttatacagatataaaatggacacatcaggctgggcacagcggctcacgcctgtaatcccagcacttttggaggccgaggcgggcagatcacgaagtcaggagatcgagaccatcccagctaacaaggcgaaaccttgtcttcactaaaaaatacaaaaaattagccgggcagggtggcacgtgcctgtagtc

SEQ ID NO: 1245 - DNA, 661 bp, Homo sapiens
  FLJ42986
  misc_feature [331]..[331]: Chromosome 2, SNP identification no. = rs11686870
  misc_feature [331]..[331]: allele = a, in linkage disequilibrium with rs3923053, respectively
  misc_feature [331]..[331]: n is a, t, c or g
tgtttggaaaggacacacacaggggagcctggcaccctccctgtagccatcataggagggcctagagatgcccataattcataatcggtaaccatcctgcagcttcctgcctcccaggtcctccctgagtctggagagctcctgctgccactatgttcgctccccaaggacgcaacaacacacaccagccagcaacgcaagctctttatggaagggggatttttttcttgaaaaacaatgacaatgatcaatagcaaatggcaagaatatccacctgcttcctgtcacttgtttggaaagtaatgaaatatggtaaaagcaccattgttanacttcacattgcaagtaacaagagtgatgggagaatgtgtcgacgcagacatctagctcaaggcagtttagcatgattgaggagacacaggagtctgtgtgtgtacaacacagatgcagaaactaagcttttcccccacaggagatattctggagataaatactgtcaagcagcaagcacactcatctgatcgtttatggactcaactaacaggtatcagcactgctgccctgtctggccctggggtaggtcctgggagcacagggacagggcgtcccctggggtgttcatcaccccactacaggaagagaagtgtgagcagacaactta

SEQ ID NO: 1246 - DNA, 661 bp, Homo sapiens
  FLJ42986
  misc_feature [331]..[331]: Chromosome 2, SNP identification no. = rs11689348
  misc_feature [331]..[331]: allele = t, in linkage disequilibrium with rs3923053, respectively
  misc_feature [331]..[331]: n is a, t, c or g
gtaacaagagtgatgggagaatgtgtcgacgcagacatctagctcaaggcagtttagcatgattgaggagacacaggagtctgtgtgtgtacaacacagatgcagaaactaagcttttcccccacaggagatattctggagataaatactgtcaagcagcaagcacactcatctgatcgtttatggactcaactaacaggtatcagcactgctgccctgtctggccctggggtaggtcctgggagcacagggacagggcgtcccctggggtgttcatcaccccactacaggaagagaagtgtgagcagacaacttagaacatcggagttanaaagttctacccctattaagaaattcatgagttaacgatggccatgctagccccaaatctatgcccaacacgccaataaagcaagctgcagaaggaagattacatttcatctctgggttgttctccagttcatctgcgccactccggtcacttgccagggctttcttagaagtagccaaagtgccttgattgatgatggcctgtagatctgacttcaaaacgctgacacgcctcttacttttcaataccattcgcatagtctaaagataacagggaggcataatacttaattcaatctggtcattttatttttgcctaactctcccccaa

SEQ ID NO: 1247 - DNA, 661 bp, Homo sapiens
  FLJ42986
  misc_feature [331]..[331]: Chromosome 2, SNP identification no. = rs1554070
  misc_feature [331]..[331]: allele = g, in linkage disequilibrium with rs3923053, respectively
  misc_feature [331]..[331]: n is a, t, c or g
caggctctacctacaccttccttgcagaggctcaatccccgggatccctcgctagagtcatttgggcgtggggcgattgtggtgcagagaagcagcagcagcagtgccagacagccctgaacgcatcttcctagagatgcgttctttctccttccagaagggcagttccagaatgtgtgcaattttaaccttttcattcttgtttaagattcatttttaatgggtaatatccacatcaatgtttctttctcccccacaacaaaaatcttggcaatttgggggagagttaggcaaaaataaaatgaccagattgaattaagtattatgcctncctgttatctttagactatgcgaatggtattgaaaagtaagaggcgtgtcagcgttttgaagtcagatctacaggccatcatcaatcaaggcactttggctacttctaagaaagccctggcaagtgaccggagtggcgcagatgaactggagaacaacccagagatgaaatgtaatcttccttctgcagcttgctttattggcgtgttgggcatagatttggggctagcatggccatcgttaactcatgaatttcttaataggggtagaactttataactccgatgttctaagttgtctgctcacacttctcttcctgtagtggggtgat

SEQ ID NO: 1248 - DNA, 661 bp, Homo sapiens
  FLJ42986
  misc_feature [331]..[331]: Chromosome 2, SNP identification no. = rs7565429
  misc_feature [331]..[331]: allele = c, in linkage disequilibrium with rs3923053, respectively
  misc_feature [331]..[331]: n is a, t, c or g
ctggtcctggtgctaggacctgccagtgacaccagacaaggcgctggccccatgcctaggtcatcatggaagttagggtcaactcccgaattacatggccacaggcgctgatttaaaatcccgttatcagggcattcattctagagaggacttctccaaagagactctgaaaaatacaacacagggtgtagcaatcccttttctctcaggctgggaacctcggagcaaggagctttggggaaggggggtctgggtggagccaccaccacagacccgtctctgctcacccctcaccacccgcgtccaagtcaccaaaccctgttgcgcttgnctctgaaatatttctctaacctgccctgtttatctctgatatcactgtcactgccccagaacccacccttgtcgcttctcacctcaactgtgacaaaacctcctcgctgcctctctgttccacgacggccaagccctattgtcactgctcccccactgtcttctcaacaagtcagagttcttctggggcatccgaggccccttctggcatcagcctactttcccacctcccctctggcttctcttctttagtaataataaaatctaggctgggcgcggtggttcacggctgtaatcccagcactttgggaggccgaggtgggcagatcac

SEQ ID NO: 1249 - DNA, 661 bp, Homo sapiens
  FLJ42986
  misc_feature [331]..[331]: Chromosome 2, SNP identification no. = rs2280124
  misc_feature [331]..[331]: allele = t, in linkage disequilibrium with rs3923053, respectively
  misc_feature [331]..[331]: n is a, t, c or g
tcttggtctctccctcactacaatgctttacgccgagtaggtagtaaatgcgctcgtgctgaatgagcgttatcacccaaagttgaagtgcttagaatatactaaagcatcaggaaaaaaatctcatttgaatgtgcacttgtttccttggattttcatctcacactgcagaagatgaaactcagaatagctgaaagatttattcatgttttccacagccaattctaggattaaatccaatcgtgacaatacccatgccagatcactcagctgcgaagtcctgctccatcttcagttagcgcgtatcaatcaaatggctcttcggcaccantgaaaattccagggtgaattttattaccaacactttattcaaaatgagcagaattaggatctaaaaaatagctgaatttgtatttagagcctaaagttatctgtattagcaccttggagaatttccaactgattacactgaatatcgatctcaccttccagaactcaatgactacaacataggtacatagcatgtaagcacttcagtgcagtgggttaccattggacatctgttgacggggtctcttcaaataaaaatgattaataaggagtcataaatgcttgtattttatagataaaaccctaccctctcaagttctcagttcctcac

SEQ ID NO: 1250 - DNA, 661 bp, Homo sapiens
  MAP4K4
  misc_feature [331]..[331]: Chromosome 2, SNP identification no. = rs6543094
  misc_feature [331]..[331]: allele = c, in linkage disequilibrium with rs2214890, respectively
  misc_feature [331]..[331]: n is a, t, c or g
taactgcttaaatacagcaaaggaaaaggctggctggtcttcttgctcctttcatacttgtttatttcccaccccgagttcctgaccccaagagaaactcttgtggaagaaaaaagctttactgaaattggtgggcggcctgagacaactgttgaaggaacagaaactccagaaagtgatactctgagtatcatcttacatctttatgtctgacagatgaaaagtttttggtctctttatgtctgtctgtctgtccctctctcctccctgctagctgcacactcttttcttcttctttctttatttttgcattaatccgctctccctctgntcctcatctgcctcttaagtttctccatttaacagagtagattgttgtgaactcgaaatcaatagctgatttaggcctaccccttgccttgttacatggacttgtcttggacagagtactttgtgcaaacaggtacttgtatttactgcctgtcttttctttcactaggtgacgttagtaggtgcacatctgtctatagtagctgttactgtgttttgatgcatgcggggaaactttatttatagtatgagttctttttctttttttttttttttttttttttttttttgagacagcgtcttgccctgtcgcccaggctggagtgcagtg

SEQ ID NO: 1251 - DNA, 661 bp, Homo sapiens
  MAP4K4
  misc_feature [331]..[331]: Chromosome 2, SNP identification no. = rs13003883
  misc_feature [331]..[331]: allele = t, in linkage disequilibrium with rs2214890, respectively
  misc_feature [331]..[331]: n is a, t, c or g
gtggtcacctgggcttagtgggaaggatgtcactgctttagaagttatgtcaatcaaataagttgattggatttctgctttatgataagcgttatcataaatgtcttataggtggtctgtgggaggactctggagacctggagcagtccctggctcccagtctttgggggtgtgtcttggatcttttaaaagtgacttcatgcaatataaatacagttcatgtgatttgtattggttgggtaattttggaggaagtaaaccctaagccaccaatttccagctttattcagatttagagccttttgtcttgatttttttttttttcatttcnaagttttctttaacaaaagttaaacactggatgttttttcctaacttgtttccggctttggcatctctaagctcatttccctttatgtttcctgttctaggaaataattatttcaaactttgtcttttgcataggttgaggtaccttctttatgttactggtggacggtgtccaggttcttggcactttgaacaaagatttggacaaaatgcacaaacaaagcaaggaaagaatgaaacaacaaaagcagagacttactgaaaatgaaagcacactccacagggtgggagcgggctctagcaagcagctcaaaggcctggttacagaatt

SEQ ID NO: 1252 - DNA, 661 bp, Homo sapiens
  MAP4K4
  misc_feature [331]..[331]: Chromosome 2, SNP identification no. = rs2236935
  misc_feature [331]..[331]: allele = t, in linkage disequilibrium with rs2214890, respectively
  misc_feature [331]..[331]: n is a, t, c or g
acctatcctcgagcaaatgcatcagtgtttctgaactaggaaacatttttcccttaactctgtatcatgcatggtcacagaataaaagagcaggcaaaggttgtcatacagtattggttatagaaagctctcagttcccatgttcaatatgaagatactgccatgtggaatgtgaacatggaagtgggctgaaaagaacacgctggcctgctgctaagccttgtggtccacagggtaacagtgtgcaggctccaaaaagcacttctctattggctgaggcctacctgctcaggaccctccccattcgaagggtctgatcataatgatcaanatgtctaaatccaacatctagtgagaaatgaggaaaggttttgccaccacagaaattgtttaaccccaactgtctttgagaacacagcttatctgtctgggggtggctgcattcctttctcatgagaccttacctccagtttatcatgctgctttctctttaccaaagccgactcttagtaacccctataatgaacacacactacttactgcatgacacaggaactctccctgaggcatttgcttgtttttagttaatttaaacttttgtcacaaggaaaaactcccattctagatgacatgtaggcaaaggaagcttgtgtttcagatg

SEQ ID NO: 1253 - DNA, 661 bp, Homo sapiens
  MAP4K4
  misc_feature [331]..[331]: Chromosome 2, SNP identification no. = rs2066942
  misc_feature [331]..[331]: allele = g, in linkage disequilibrium with rs2214890, respectively
  misc_feature [331]..[331]: n is a, t, c or g
ccaagtttcacctctgcattctcagtcagcaacacattctggcccttgatatcccggtgaatcacatgatgaatgtgaagatgtgccagtccctgaataggaaagacagacctgaattttagttttctgtgactataagtaaacagccaggaacacaccttttataagaaagtgcacatgtggaccaaaggtgtttgtgagctcatgaacattaacttcgtcttagtgcattcccaggaagacagcaccaatactaccacacacacagaaagaagtcctccccaccctccacattcccagtgggttaggttccccgtgtgagcaacgtgancacttctagctgtgcctttaagatacactgcagattaccatctgcagtttctgtgctataatttgtgctatttgtgtacagggtggttcctttcccacgctaaatgtctagagggtgaccccgtgggcatatttgaactagacacatctcaggggaaaagcaaagggcaagagagggctttgaaatctggctctttaacactggctagccttcccactgcacagtgacaaactgctaagtgctgatcaatcccacctccatcccaagcataaaacgattgtgctgtcaaaagagccttgtgttcaaataaagtatctttctttcccaagg

SEQ ID NO: 1254 - DNA, 661 bp, Homo sapiens
  misc_feature [331]..[331]: Chromosome 2, SNP identification no. = rs7603475
  misc_feature [331]..[331]: allele = c, in linkage disequilibrium with rs2214890, respectively
  misc_feature [331]..[331]: n is a, t, c or g
tccagcagtgagtaacatgataagagaatactaagaaaaactctacacttagtaattcagcattttggaataaaatagaccaattacttgaattgcacaaattactaaaacctcatggaataggaaatagattatttaaataggcttataactaataaataaattggattaattgttaaaaataaatgagatcatcaaggtcacaggatataagatcaacacagaaaagtcaaatgtgattctttatgctagcaaagaacacatgaaaaccaaaataaaaacacaataccatctacaatctcaaaaaagacaagtacttaggtataaatcnggcaattcatgtagagaactcctatgctgaaaactataaagtgctaaggaaagaaatcaaagatgatgtaagtcactggagaggtgtaccatgttcatgagctagagggcatcaacatagtaaagatgcccatttcccctgaatttgcacataagtttaatgcaactgtatcaaaatgccaggaagatgtttttgtagatatagacaagcttattataaaatgaacatggaaaggcaaaggagctggaactgctaaaataattatagaaaaaagtataaagtaccaatttatctgattttaagactttccatatagctatagtcatcaag

SEQ ID NO: 1255 - DNA, 661 bp, Homo sapiens
  misc_feature [331]..[331]: Chromosome 2, SNP identification no. = rs7568226
  misc_feature [331]..[331]: allele = a, in linkage disequilibrium with rs2214890, respectively
  misc_feature [331]..[331]: n is a, t, c or g
tgctgaaaactataaagtgctaaggaaagaaatcaaagatgatgtaagtcactggagaggtgtaccatgttcatgagctagagggcatcaacatagtaaagatgcccatttcccctgaatttgcacataagtttaatgcaactgtatcaaaatgccaggaagatgtttttgtagatatagacaagcttattataaaatgaacatggaaaggcaaaggagctggaactgctaaaataattatagaaaaaagtataaagtaccaatttatctgattttaagactttccatatagctatagtcatcaagacagtgtgttgttgacatagaaatngacacagatcaatgggacaggatagacaacctagaaatcaagtcacacaattataactgcccaacctatttttgacaaatgtactaaaaactgtgcaataatggaaacataccctttttcaacaaatggtgctagaaaaactggacatccataggccaagaaaaaaaaattctcaaacaaccacactgcttatacaaagttaactcaaaatgtattgtgaatgtgtacataaaacataatataacaatacttttagaagaaaatataggagaaaacctttgagatctggggctagatgaagtgttcttaaacatgacaccaaagcaggat

SEQ ID NO: 1256 - DNA, 661 bp, Homo sapiens
  misc_feature [331]..[331]: Chromosome 2, SNP identification no. = rs6543104
  misc_feature [331]..[331]: allele = g, in linkage disequilibrium with rs2214890, respectively
  misc_feature [331]..[331]: n is a, t, c or g
gtagaaaaaaaaggccattttaggggaggaattcaagcaggctgcagacatttgaataagtaaagaggagccaaatgctgatagccaagacaatgggaaaaaggcctccaaggcatttcagagaccttcacagtagcccctttcatcataggcccagaggcctaggagggaagaatgatttcctgagccaagcccagggccctgctgccctgcagagccttggggcactgctccctgcatcccagacacttcagctccagcagtggctcaaaggggcccaggtacttggactgcagcttcagagggtgcaagctttggtggctccacatgntgttaagcctgcaggtgcccagagtgcaagagttgaggcttgggagcctcctccttgatttcagaggatgtatgaaaatgcctggatatccaggcagaagcctgctatggggcgaagccttcatggagaacctctactagggcagtccagagggtaaatgtggggttggagcttccacacagtctccactgggacactgcctagtggagctgtgagaagagagggccactgtcctccagaaccccagaatagtagatacactgccagcaccatactcctggaaaagccacaggcactcagtgccagcccttgagagcagccatgggggct

SEQ ID NO: 1257 - DNA, 661 bp, Homo sapiens
  misc_feature [331]..[331]: Chromosome 2, SNP identification no. = rs2214890
  misc_feature [331]..[331]: allele = g, a
  misc_feature [331]..[331]: n is a, t, c or g
gttccgcatggctcaggaaacttacaataatggcagaaggtgaaggaaagcaagcactttcttcacaaggtggcaggagagagaaagagctaaggggaaagtgccacttttaaaccatcagatttcatgagaactcatcatcacaagaacagcatgggggaaactgccctccatgatccaatcacctcctaccaggtcccttccttgacacatgggtattacaattcaagatgagattggggggtgggggtcacagagacaaaccatatcatctttctacagctgttgctcaaaaattaggacatttttctcataagtttcataaacttgnctgaagttccattgcccagagttgttcctgtgcccatttctgatcacccacctgcagaaacgggacaacctcacccatccaaaccaagccagaggtgactgggagcagcttcttctgtagccatgggctgcctggggtcacatacctgaatcaaatcagttcagtttggaaggagaaaaggcaggcaaccagaaatgtcctacattagtccattctcacactgctataaagaagtgcctggaactgggtaattaataaagaaaagaggtttaattggctccagttctgcaggctgtatgggaagcatggctggggaggcctcaggaaact

SEQ ID NO: 1258 - DNA, 661 bp, Homo sapiens
  misc_feature [331]..[331]: Chromosome 2, SNP identification no. = rs2190364
  misc_feature [331]..[331]: allele = g, in linkage disequilibrium with rs2214890, respectively
  misc_feature [331]..[331]: n is a, t, c or g
ctccgtggctcctgccctccaccccgtggcagaaggcagtccaagagacacttcccaccctagcagtacctggagaggagagtgggaagcccaccagcaccaggtggctttaggccaaggaaaatgtgctccatcccgcaggtccagcatcccccatcccacacctaataacaccagaaggaccagggaagcaccttttttcctcttgagcaggacattaggaagttaacaggagctcaaatggagccagaaaatgaaacagaccagaataatattgcagggtctccataaactaagttgtcattggaattatagcccgcaaaagtacacnacaatctaaacgctaaaccaaaatatggcaattgcctgctaaaatagaaaatttaagtaagattaagactctcaaaaaatcattcatcactccaaaaaccaggtaagccgtaactcaagtgaataaagaaaatcaactgatagcaatactgagataaatcaggcagtggacttacctggcaaagatgtaaagctgccaccataactggaattgcttcaagtaactacaaactcatttgaaacaaacttaaaaatataaaatatcagcaaaataaaatagaaataattttaaaaatgaaaatgtttgatatgatttcgttgtgtccccacc

SEQ ID NO: 1259 - DNA, 661 bp, Homo sapiens
  misc_feature [331]..[331]: Chromosome 2, SNP identification no. = rs1388405
  misc_feature [331]..[331]: allele = c, in linkage disequilibrium with rs10496519, respectively
  misc_feature [331]..[331]: n is a, t, c or g
acatatattcagcagagattttcaaacttgtattgacatttaggccagtcgaacatatattaaaaactaaaatttccatgccacctgactctgaaacctttttcctcaccacagcaacagaatgcaagttacatctccttatatgttaatcaatgagcatgcatccaggactctgctagatactatgaagggctcaagaaaaataaactgaattatccttaacttttactttgcattttacagtgacaaaggctacagatcaatataagaaggatgaaatcaaatgtgaaattttatgatacagagagtaaaagctgtcagactgaagaanagacattactctaagttaaaaacaactaaaaatgggccaggcatggtggctcactcctgtaatcccagcacttcgggaggctgaggaggcggatcacgaggtcaggagatccagaccatcttggctaacacggtgaaaccctgtctctactaaaaatacaaaaattagcctggtgtggtggcaggtgcctgtagtcccagctactcgggaggctgaggcaggagaatggcgtgaacccgggaggcagaggttgcagtgagccgagatcgcgccattgactccagcctggacgacagagcgagactctgcctcaaaacaatcaaacaaaca

SEQ ID NO: 1260 - DNA, 661 bp, Homo sapiens
  misc_feature [331]..[331]: Chromosome 2, SNP identification no. = rs4848420
  misc_feature [331]..[331]: allele = c, in linkage disequilibrium with rs10496519, respectively
  misc_feature [331]..[331]: n is a, t, c or g
ggctgaggcaggagaatggcgtgaacccgggaggcagaggttgcagtgagccgagatcgcgccattgactccagcctggacgacagagcgagactctgcctcaaaacaatcaaacaaacaaacaaaactaaaaatgtttatagacaagatttccataagacctgtgttgtatgataaaagtgcttataacctattgagatcaagcagagaaaaacgatcctgatttaaaatcacgaaaatgttcagaaaacatccagaaaaaccacattctgttaataacacatcactaaaagcaattacattcattttgcaaatacgctaacttgaaatntggaacaatttttgggagagagatcactgttttctgtttatctgggagaaatcactgggacttgtaataagcagattagtttcccttaaggatcttgtactgtaaaaagaaaataaacaacagaaaaatcaggtgttatgtacagttctcttggttcgaaaaatttacaaatggcacactcatgcagattacagagactccatggagtaaaacgaagtaaaatgtatcactgagacaccatttcatcactctctgttgagtggcagaaatccagttctctttcaaccttactaaaggaaaatatgtatgaggttaagagaattttaagaa

SEQ ID NO: 1261 - DNA, 661 bp, Homo sapiens
  misc_feature [331]..[331]: Chromosome 2, SNP identification no. = rs4848421
  misc_feature [331]..[331]: allele = t, in linkage disequilibrium with rs10496519, respectively
  misc_feature [331]..[331]: n is a, t, c or g
atagacaagatttccataagacctgtgttgtatgataaaagtgcttataacctattgagatcaagcagagaaaaacgatcctgatttaaaatcacgaaaatgttcagaaaacatccagaaaaaccacattctgttaataacacatcactaaaagcaattacattcattttgcaaatacgctaacttgaaatctggaacaatttttgggagagagatcactgttttctgtttatctgggagaaatcactgggacttgtaataagcagattagtttcccttaaggatcttgtactgtaaaaagaaaataaacaacagaaaaatcaggtgttangtacagttctcttggttcgaaaaatttacaaatggcacactcatgcagattacagagactccatggagtaaaacgaagtaaaatgtatcactgagacaccatttcatcactctctgttgagtggcagaaatccagttctctttcaaccttactaaaggaaaatatgtatgaggttaagagaattttaagaagaaaattactcactgctgccaagctggaccgaatcctgcaccccaaactgattatgtgaaggaaaaacagggctagtaaataatccagatggatctctttgtcagtattttgttagtcagtcaagaatttaagcaccta

SEQ ID NO: 1262 - DNA, 661 bp, Homo sapiens
  misc_feature [331]..[331]: Chromosome 2, SNP identification no. = rs12711852
  misc_feature [331]..[331]: allele = g, in linkage disequilibrium with rs10496519, respectively
  misc_feature [331]..[331]: n is a, t, c or g
ttactaaatatagtctctacattaaaatgcacccattttatgcacacatttggacaaattttgaccaattgtacatccatgtaaccaccaccacaatcaagttagtcaacaattctaccactctctaaaagctttctcattacgttctatcaatccatgcctacaccaccaggctacagacttttctgtaatttttgaacatgtattacaattttggttgaaaatggtacattgtggataataaatgatacaggctagttattctgcattcagttgggttcttatgaggatttttttcttccagcagtattttaactagcctacattcacncagcaaatttgttcttttctgccttgttcaggagctaataaccttgctcagttgtttcggtttccagctactgcgtttttttctcgcctgctcccctcatgtcccctatcccctcatctcccctgaacatgtgtagtttactggttagctaaagatttgagaagttgatattcacccttgggaactcatcctttctgtggtttcattgttttcaagcattgccctgtacatttccagctactctggcagctccaagctctattctttgacatctcaacccagtaatgtgttttctttttctttctttttttttttttttaaacagggtct

SEQ ID NO: 1263 - DNA, 661 bp, Homo sapiens
  misc_feature [331]..[331]: Chromosome 2, SNP identification no. = rs6742479
  misc_feature [331]..[331]: allele = g, in linkage disequilibrium with rs10496519, respectively
  misc_feature [331]..[331]: n is a, t, c or g
cacaaaggccaacatcccttgttataaactcctgttgtactgtctttttgataagtaggaggagataacttaagggtcacatagtatttttgcagaaggaacgaatgcctttaagaacattgcagccagctactgatgctggtggctcaaggtgttatctgaattggaaaagtggctcaaggtgttatctggtggctcaaggtgttatctgaattggaaaaggtggctcagggtgttatctggtggctcaaggtgttatctgagttggaaaaggacagacttttcccccagggatccctaaaactcccctttttactggctagcttctttncgttaagatggatttaagggatcttgctctcctgctttggcaaaattgaataaacctttatcttcaggtattggtgtgtcagtgtttagtattagctgtgtgtttgatacacgagcctatattttgggttcttcaacagttctggtgaccatggtaggatattgtcctcataggtgaatagcaccagcaggatctgagcacacagggcatccctgctgctgttctggagttttgcccgggaaacacttctcatcacttcccttcttgctggtgccaacaaccttcaggacaacaatcacttggagtggagatacgtgccagacttcagtc

SEQ ID NO: 1264 - DNA, 661 bp, Homo sapiens
  misc_feature [331]..[331]: Chromosome 2, SNP identification no. = rs4849482
  misc_feature [331]..[331]: allele = g, in linkage disequilibrium with rs10496519, respectively
  misc_feature [331]..[331]: n is a, t, c or g
gcaaaagaaaattcagaactcaaatggtcaacttgcaactgtagtgttaaactgtagagtcttctaaatctccctgtttctctcttttatttttctgcctgcttcgaatctgctgttactggctactggtattgagataaaactcactattttctgatactgctaactgctaattcaagactacttggagattctgtttctcttatacagttctccccaaaatgaaagattgaaactcatttgaaactgaagggaaaaaaaagggtaaaataggtttctaaaatcaacctgtcatggaaacggttttgcctaaatttttgtctcacagccntcatttgattatctgtgagggcaaataaagtttagccatatgaacaggttctaatttcatcagaaattatttggatctagcgaatttttgtaaactggggatactgtgctgctatctcatggctagagtcctgaggaaaaagctattggatccttgtttatatgtgtgtgaatatatgtttacatgttttcatgtgtatgtacatatattgtcctatatattgtgtctatatggtaccacattggtttattattaaaggagtgttcataaattaaataagccacattgctttccaattaaatgttggataaataggctaatttttaagtt

SEQ ID NO: 1265 - DNA, 661 bp, Homo sapiens
  misc_feature [331]..[331]: Chromosome 2, SNP identification no. = rs7425551
  misc_feature [331]..[331]: allele = g, in linkage disequilibrium with rs10496519, respectively
  misc_feature [331]..[331]: n is a, t, c or g
cagacactcccagagcgaccgtttatagacctccccccaggaatgcaattcttttcctagggtcttaatattatattccttgctaggaaaagaatttagcaatatctctcctacttgcatgtctgtttataggctctctacaagaagaaaaatatggctctttttgcccgactccacaggcagtcagaccttttgttgtcttcccttgttccctaaaatcactgttattctgttcattttcaaggtgcattgatttcatattgttcaaacacacatgttttacaatcaatctgtacaattaatgcaatcatcacagggtcctgaggtcctnagcttacgaagacaacaggattaagaggtaaaagtaagacaggcataagaaattataagagtattattagagaagtgataaatgtccatgaaaacttcacaatttatgttcagacattgcagtaaagacaggcataagaaattataaaagtattaattttgggaacagataaatgtccatgaaatcttcacaatttatgttcctctgccacagctccagctggtccgtccgttcggggtccctgacttcccacaacacatactggcttaagcattatattaattgtattctggaaagattaaggaaaggactcctacaattgaaaagcct

SEQ ID NO: 1266 - DNA, 661 bp, Homo sapiens
  misc_feature [331]..[331]: Chromosome 2, SNP identification no. = rs7560629
  misc_feature [331]..[331]: allele = g, in linkage disequilibrium with rs10496519, respectively
  misc_feature [331]..[331]: n is a, t, c or g
ttgaacccaggaggcggaagttgcagtgaaccgagatcgcgctgttgcactccagcctgggagacttgagtgagactttgtcttaaaaaaaacaattcattagccctagtttacaacagactgtctgaaagatgattcaacagtgtgtaatttgtgctgaaaagagccctcaggcatggccattccctctaaaagggttccaataaaagaaattagccccttccagggatttttaggtggacttcactgtgatgctctgagcatgtggaaacatcaggtcccttttggtatttgttgatggcttcactgggtggtttgaagccattccctncagaacagagaaggccacagaagtggctaaagccctacttaaagaaataatccttatgtatggactttctgtaacaattcagagtgataatatgtccacatttacttccaagttaacttaggaagtgtcaaatgttttgataataaattgaaaactgccctatggtgagcagagtccactggaaagatggaaaagattaaatcacaccttgaagaaaatgattgcaaaaatctgtcaagaaaccagtttaaccttgaataaggtgttatgcccttccctgatgtgtatctgggtagtggcccaaagtaagctccaactgagctgctttaa

SEQ ID NO: 1267 - DNA, 661 bp, Homo sapiens
  misc_feature [331]..[331]: Chromosome 2, SNP identification no. = rs10496519
  misc_feature [331]..[331]: allele = c, t
  misc_feature [331]..[331]: n is a, t, c or g
tatggacacatacaaagggcatgctattgatagtagaatagtaagcattaggttgttaatcttgattttttaagagtaatgcctatacaatatagccaatttatattaagaaaacagtcaggccttatatacttgtgcaaagtacttaagaaataactggaatcatcatcaaacattttgagtatttcaaatattttacattaaaataataaattgagtagagaggtgaagagtatgactttggaatcaaatatacctgatttaaatcccatcttcatttactatttaggtaatttgtctatttatttaattgcataatatgtcaattacntcacatgtaaaatttgcttcatggagttgttagaattctgtaatgcatttatcaaaatccttggcacataccaaataatattattataaagtgactatcattaactaatcttctatattaatcatttcacatacatcatctttaattaacagtactctatgtggcagttgtgataagctttattttcgatacaggaagattgatgtttggggcctcttccatgcagactgaatatctatactaattcataaatatgtattttagaaaaaagcctctcttgtacctataaagtaaaaatcaagaaatagataacaatttttattcactaga

SEQ ID NO: 1268 - DNA, 661 bp, Homo sapiens
  misc_feature [331]..[331]: Chromosome 2, SNP identification no. = rs17552702
  misc_feature [331]..[331]: allele = t, in linkage disequilibrium with rs10496519, respectively
  misc_feature [331]..[331]: n is a, t, c or g
aaatcccatcttcatttactatttaggtaatttgtctatttatttaattgcataatatgtcaattacctcacatgtaaaatttgcttcatggagttgttagaattctgtaatgcatttatcaaaatccttggcacataccaaataatattattataaagtgactatcattaactaatcttctatattaatcatttcacatacatcatctttaattaacagtactctatgtggcagttgtgataagctttattttcgatacaggaagattgatgtttggggcctcttccatgcagactgaatatctatactaattcataaatatgtattttngaaaaaagcctctcttgtacctataaagtaaaaatcaagaaatagataacaatttttattcactagactaatcaaggagtgtagagaaatgaataaaccaaagagggcggtgatccaaaattatatctacctgatgttcaagcatgaatcacctgcagcttccttcagcagatttgcttcctgattcaaaacaatgaaattgttttataccttatcagtcaacataactagtgcacaaccctcagttacttctgaaaaatgttagaaaacagaaggaagttgagctcaaattcaaaactgtacaacaataatcctcaaaactgtacaaca

SEQ ID NO: 1269 - DNA, 661 bp, Homo sapiens
  misc_feature [331]..[331]: Chromosome 2, SNP identification no. = rs12467737
  misc_feature [331]..[331]: allele = t, in linkage disequilibrium with rs10496519, respectively
  misc_feature [331]..[331]: n is a, t, c or g
attttagatgatttcacaataaagtacaagctatctgggccaattgatcaccctttggagaggagccattaacaatagctctcattaatgactgtcagatgatcaaaaaatcaaagtttacagtgttaaggctttgagatgtagaggttgattgttactgcagcagactctagactaggcagacatgtcagtaaaatgagatattacttctctgcttctttctatacctaatacaattgttggccatgtctctttaataatgatatctcttgacatcagtaattacattgaccactcaccactttaaagaacattttaagaataattagtncaaatattaatgtaaatttcaaactctgctcatttcatggctgtgatattaacatattcattcattattgactggattggctgttcaatttgagtcgctcgaatgttgaatatttccaagaagaattaaagcctgtttgtattttactactgttacatagaggtgaaaataaaggcactgccttaaatatttctattaatcatttggctcccttctcattttccttagctgcagggaattgccctctgtgggtcctgaggtacccagcactcctaggtgataattacttgagattaaaagccgaagaccaacaggccttaaagtgtttaa

SEQ ID NO: 1270 - DNA, 661 bp, Homo sapiens
  misc_feature [331]..[331]: Chromosome 2, SNP identification no. = rs12467804
  misc_feature [331]..[331]: allele = a, in linkage disequilibrium with rs10496519, respectively
  misc_feature [331]..[331]: n is a, t, c or g
ttctctgcttctttctatacctaatacaattgttggccatgtctctttaataatgatatctcttgacatcagtaattacattgaccactcaccactttaaagaacattttaagaataattagtgcaaatattaatgtaaatttcaaactctgctcatttcatggctgtgatattaacatattcattcattattgactggattggctgttcaatttgagtcgctcgaatgttgaatatttccaagaagaattaaagcctgtttgtattttactactgttacatagaggtgaaaataaaggcactgccttaaatatttctattaatcatttgnctcccttctcattttccttagctgcagggaattgccctctgtgggtcctgaggtacccagcactcctaggtgataattacttgagattaaaagccgaagaccaacaggccttaaagtgtttaatggggcaaaataacaaggctgatgtagagacttctctgagcttgtagctgagatggtctgggaaacagatgaatctagcttcctaggaagggtcccgacctgaacttatgctattcatgtgtcaagaaactcgaggagttggtgaatcgacatttctatttcaggagcagctcttgaagaaatatgaaaagcacttgaagagggcag

SEQ ID NO: 1271 - DNA, 661 bp, Homo sapiens
  misc_feature [331]..[331]: Chromosome 2, SNP identification no. = rs12464274
  misc_feature [331]..[331]: allele = g, in linkage disequilibrium with rs10496519, respectively
  misc_feature [331]..[331]: n is a, t, c or g
aataattagtgcaaatattaatgtaaatttcaaactctgctcatttcatggctgtgatattaacatattcattcattattgactggattggctgttcaatttgagtcgctcgaatgttgaatatttccaagaagaattaaagcctgtttgtattttactactgttacatagaggtgaaaataaaggcactgccttaaatatttctattaatcatttggctcccttctcattttccttagctgcagggaattgccctctgtgggtcctgaggtacccagcactcctaggtgataattacttgagattaaaagccgaagaccaacaggccttnaagtgtttaatggggcaaaataacaaggctgatgtagagacttctctgagcttgtagctgagatggtctgggaaacagatgaatctagcttcctaggaagggtcccgacctgaacttatgctattcatgtgtcaagaaactcgaggagttggtgaatcgacatttctatttcaggagcagctcttgaagaaatatgaaaagcacttgaagagggcagctcttagaaatgtgtcaatggacgtttttcatcaattttactttaaattcataacattttcatgagtttgggagaatcttcatggtgacatgtgttagattaatattatacac

SEQ ID NO: 1272 - DNA, 661 bp, Homo sapiens
  misc_feature [331]..[331]: Chromosome 2, SNP identification no. = rs17553549
  misc_feature [331]..[331]: allele = a, in linkage disequilibrium with rs10496519, respectively
  misc_feature [331]..[331]: n is a, t, c or g
tctgcaatgtggtaaccttaacaggtaagcactagagaaaagagtagatttatataaggaatcactttgagcttaacaatattgaataaactttatattttgaaaagaaaaaaaaagactgaatgtgatttacaatgtttatgatacttactttactgtaaggaattgttatattcattaacattttttcttcccacttttgctttttcacttttttttttgaatataaaatttctttcctgaatgggcataagcaaaaatacgggcagaaagatcaggcaaatttgtactattttggccaccttagggattatgccttctctaaaggtanaggagttgccaatcagatttttcaaaatccatcaggttatgttagtgtccagtgtctgttaaggtcaggttccaggtaggggcaaccccttttacctatcgtaccctattagttaagcacatctaaagataccccaatatattcttcctcttatatatctggcccttactggtagagtctaagtcactcatcttgtagtagtagggtctgagcactgtgctctatgctgcatgttcaccttgccttaggatggataaatccaaccaaaggcatcaccacagacctagacatcttagacttaagggagaagaagtaggatgcaagaggctg

SEQ ID NO: 1273 - DNA, 661 bp, Homo sapiens
  misc_feature [331]..[331]: Chromosome 2, SNP identification no. = rs17553584
  misc_feature [331]..[331]: allele = a, in linkage disequilibrium with rs10496519, respectively
  misc_feature [331]..[331]: n is a, t, c or g
ttaacattttttcttcccacttttgctttttcacttttttttttgaatataaaatttctttcctgaatgggcataagcaaaaatacgggcagaaagatcaggcaaatttgtactattttggccaccttagggattatgccttctctaaaggtagaggagttgccaatcagatttttcaaaatccatcaggttatgttagtgtccagtgtctgttaaggtcaggttccaggtaggggcaaccccttttacctatcgtaccctattagttaagcacatctaaagataccccaatatattcttcctcttatatatctggcccttactggtagantctaagtcactcatcttgtagtagtagggtctgagcactgtgctctatgctgcatgttcaccttgccttaggatggataaatccaaccaaaggcatcaccacagacctagacatcttagacttaagggagaagaagtaggatgcaagaggctggcgcgaatttttttttttttttttttttgagacagagtttcactcttgttgcctaggctgcagtgcaacggcacaacctcggctcaccgcaacctccgccccctaggttcaagcaattctcccgcctcagcctccccagtagctgggattacaggtgtgcaccaccactcctggcta

SEQ ID NO: 1274 - DNA, 661 bp, Homo sapiens
  misc_feature [331]..[331]: Chromosome 2, SNP identification no. = rs10496522
  misc_feature [331]..[331]: allele = t, in linkage disequilibrium with rs10496519, respectively
  misc_feature [331]..[331]: n is a, t, c or g
cagaaggaaaaaacagactgtaaggcattatagcaatatgtactaaatcaaaatttatggagaggaatgaattttaataaaagaagatatcaatgcttcttcttacagtaggagccaagaaagataaaccatcattgatcctgtagacccgggctagtgaaaactggaacaatataatattggtgataagattttggctagaatccctttcatagtaaagctatattccagagcatacttgagacatatcaggatttagaagctggaaactatcttgattttttaagttgtcatttgcatcatgatctcatagcttgtaatatattctttngtaaaaatgtgcaccttccaaatgcctgatactttgtgaagacattaagaagaatagttaaacattgacattattaggtcaatccaggaaattaaaaaaaatcatggctgacaagaatgtagaatactgctctccatgaattaatgaagaagaaaaaataataattctatgcccttctctaaactaataattcacttggcaagagcaagcctgaaggggtttggcagtaaaatttttctctgaagatttatcacagtccattcaaatcaagattgaggtctcaagagaaaagtggtgagaaagatgtcaagcgtttatgatttggttacc

SEQ ID NO: 1275 - DNA, 661 bp, Homo sapiens
  misc_feature [331]..[331]: Chromosome 2, SNP identification no. = rs10496523
  misc_feature [331]..[331]: allele = c, in linkage disequilibrium with rs10496519, respectively
  misc_feature [331]..[331]: n is a, t, c or g
aggagccaagaaagataaaccatcattgatcctgtagacccgggctagtgaaaactggaacaatataatattggtgataagattttggctagaatccctttcatagtaaagctatattccagagcatacttgagacatatcaggatttagaagctggaaactatcttgattttttaagttgtcatttgcatcatgatctcatagcttgtaatatattctttcgtaaaaatgtgcaccttccaaatgcctgatactttgtgaagacattaagaagaatagttaaacattgacattattaggtcaatccaggaaattaaaaaaaatcatggcngacaagaatgtagaatactgctctccatgaattaatgaagaagaaaaaataataattctatgcccttctctaaactaataattcacttggcaagagcaagcctgaaggggtttggcagtaaaatttttctctgaagatttatcacagtccattcaaatcaagattgaggtctcaagagaaaagtggtgagaaagatgtcaagcgtttatgatttggttaccatttgctttgcaagaaaaagatacattgttaccattatggactgaaaattttctatcacaacaaaacaatggttttaaaactgcaaagttctccattcctctctgcact

SEQ ID NO: 1276 - DNA, 661 bp, Homo sapiens
  misc_feature [331]..[331]: Chromosome 2, SNP identification no. = rs17618786
  misc_feature [331]..[331]: allele = g, in linkage disequilibrium with rs10496519, respectively
  misc_feature [331]..[331]: n is a, t, c or g
cgcccatggacataaagataaaaacagcatacactggagactgctgaggggaaatgcggaagcgaaagggctgaaaaactacctgctgggtattaggcccattacctggatgataggatcatttgtaccccaaactgaaatgtcatgtaatatgcccacgtaacaaacctacacatgtacccctgaatctaaaataaaaattgaaattataaaaaacaaaagaaaaagggaataatttattactttttattaaaggtatacaagtaattgagcagaagattgggactgcaaaagaaagaagtaaatagaaaacttttggccaataaagaangaaaatatttcttagcaatataaagtgttctttgttgacaggagaaagtccacacggattatgatgtagttaagttatctggggtttgtaaaactcaaaactgatctccggtaatctgggattctataagaatcagattccctacatacctatgagacaaaattatacaagatgtctgggttaacagacagggctgttacaagcaacagttggaaaatgcaaattcaggcagaaaataattcttgagccttaaaaccttcacaaaattatgtatttgaaattaagaagataacatcttctgagttttccagtatcagagaaacattttta

SEQ ID NO: 1277 - DNA, 661 bp, Homo sapiens
  misc_feature [331]..[331]: Chromosome 2, SNP identification no. = rs12478026
  misc_feature [331]..[331]: allele = g, in linkage disequilibrium with rs10496519, respectively
  misc_feature [331]..[331]: n is a, t, c or g
attagactggagaagaccttaacttttagaatcaagaatccattgtctagagaacattctgtcaggcaagctgtttacattatagtttttacattaagtttttttggtctaaatatcctgtggtttatacaaatgtcctctgtggataagcagaatgagaaaaaaacagaaaactgaaaccagacgggggcactgaaaagacttgagtagaaaagacaaagctcaagatgaagaataggagcaaatcaagttggattgttaaagtacatcaaattgtgatggccaattataccagatgcgatctgtacttaaaatgtacttcaagtaaaanaggtggtgaggagtgaccaaaagtaaaatttaacttggtgataatacagataaaaacacaaagagtattctagagatagagatactataacaggaaaacttcagttcatttttttcattaatgtatattcaatgactctatggagatgaattaagtgctagtctagatccaagaaatacaagagctagtctagatcccagaaatacaagattaatacaacatagactttgtccttgagattcaggaattgtatcacatatgcttatatatttataacaattgattaaaagaaaagattccattaaatctaaattgatacagcttcaaata

SEQ ID NO: 1278 - DNA, 661 bp, Homo sapiens
  misc_feature [331]..[331]: Chromosome 2, SNP identification no. = rs12473914
  misc_feature [331]..[331]: allele = g, in linkage disequilibrium with rs10496519, respectively
  misc_feature [331]..[331]: n is a, t, c or g
tgtcaggcaagctgtttacattatagtttttacattaagtttttttggtctaaatatcctgtggtttatacaaatgtcctctgtggataagcagaatgagaaaaaaacagaaaactgaaaccagacgggggcactgaaaagacttgagtagaaaagacaaagctcaagatgaagaataggagcaaatcaagttggattgttaaagtacatcaaattgtgatggccaattataccagatgcgatctgtacttaaaatgtacttcaagtaaaaaaggtggtgaggagtgaccaaaagtaaaatttaacttggtgataatacagataaaaacanaaagagtattctagagatagagatactataacaggaaaacttcagttcatttttttcattaatgtatattcaatgactctatggagatgaattaagtgctagtctagatccaagaaatacaagagctagtctagatcccagaaatacaagattaatacaacatagactttgtccttgagattcaggaattgtatcacatatgcttatatatttataacaattgattaaaagaaaagattccattaaatctaaattgatacagcttcaaataagattgtccaccaaaggatattttcatcaagagtgtaagtggatgctgttgaaaacttt

SEQ ID NO: 1279 - DNA, 661 bp, Homo sapiens
  misc_feature [331]..[331]: Chromosome 2, SNP identification no. = rs12475949
  misc_feature [331]..[331]: allele = t, in linkage disequilibrium with rs10496519, respectively
  misc_feature [331]..[331]: n is a, t, c or g
ccagtgactaattaaggcaagtgtaaagtgtacaaggaacaggctatcccagcaacgacgggacaattttgacaggtcaaatatgctcctgctaaactgtttatctctaataaataccatgcatgctaattttcatttcagcatctgctttggggttgacaatctgcaataccaggcagattggatttttgaatccattgtttcaagccaccgtatttctcttactctttttccttcattcttttctattttccattgcaggatgttgtacattattgggaaataaactctgagatacagatttgtgtgtagagtatttacgggaatgtantctcaaaatcaacacctatttcctcaagaggaaacaggattgggtagagggcataataaattgctacacagtcacaagaaggattttaagttattttacagagctctggagctgaactgaccattcagactttctgcaatgaggcaaaagggccaggctattacgttccagaattatgatcagttgcaagctgtgcctaggaaaggagtgtaataagtagctcaccagttgagggtaatttttagagaaggggtaagctgagagctgaaaataatcaataatgccagctgctgggggaatgcaagtaatgcagtgctgtaaatgaggagt

SEQ ID NO: 1280 - DNA, 661 bp, Homo sapiens
  misc_feature [331]..[331]: Chromosome 2, SNP identification no. = rs4328646
  misc_feature [331]..[331]: allele = t, in linkage disequilibrium with rs10496519, respectively
  misc_feature [331]..[331]: n is a, t, c or g
agctgaactgaccattcagactttctgcaatgaggcaaaagggccaggctattacgttccagaattatgatcagttgcaagctgtgcctaggaaaggagtgtaataagtagctcaccagttgagggtaatttttagagaaggggtaagctgagagctgaaaataatcaataatgccagctgctgggggaatgcaagtaatgcagtgctgtaaatgaggagtttctgggtagtctgccaaaagcatctgctatgatccagccctcactccatttgggtccacagtcttatttgatgtattttaggaacttttacttcaggaaccttcttganttcctttcacaggaacacaaaaggaagattagtaagtaattgataaccccttctgactgcaacatatatatatatgcaatatatatatatattattttctattttgtctgaaggtgagaagcgcagtttcagagcttttgtctttggatgatactaaatatgtcctttttttcttccaattttttattaccctcaccatcaactagacactctaatgaggagacccagaaccccagcaactgggagtctaagcccctggtcaccacactttctcaggccatggctgctaaattagtcaatttatccttgaaactggcaagagagtatcaa

SEQ ID NO: 1281 - DNA, 661 bp, Homo sapiens
  misc_feature [331]..[331]: Chromosome 2, SNP identification no. = rs11123386
  misc_feature [331]..[331]: allele = a, in linkage disequilibrium with rs10496519, respectively
  misc_feature [331]..[331]: n is a, t, c or g
gaaattcaacctggctgcaaaaatttgcctaagtaacaaggagcagaatgttaatccccaagacaatggggaaaatgtctccagggcatgtcagagggcttcagggcagctcttcccttcacaggcccagaggcgtaggagaaaatgatttcctgagccttgcccagggtccccgtgctgtgtgcagcctagggacttagtgccctatgtcccagctgctccagctgtggctgaaaggggccaacatagagcttgggccatggtttcagagggtgcaggccccaagccttggcagctctcacgtggtgttgagactgtgcatacatggaantcaagaattggggtttggctgagaaaaacaagcaatgggaaaaggattccctatttaataaatggtgctgggaaaactggctagtcatatgcagaaaactgaaactggatcccttccttacaccttatacaaaaattaactcaagatagattaaagacttaaacgtaagacctaaaaccatgaaaatcctagaagaaaacctaggcaataccattcaggacataggcatgggcaaaaacttcatgtctaaaacaccaaaagcaatggcaacaaaagccaaaattgacaaataggatctaattaaactagagagcttctgcacagcaaaat

SEQ ID NO: 1282 - DNA, 661 bp, Homo sapiens
  misc_feature [331]..[331]: Chromosome 2, SNP identification no. = rs17554213
  misc_feature [331]..[331]: allele = c, in linkage disequilibrium with rs10496519, respectively
  misc_feature [331]..[331]: n is a, t, c or g
aaacactcactattggttacggtaagatgtaattataccataggcctttggaatgctcagaacacagctgatttaataatttttaagacctttactttgaaatgaaaactaaaaaaactagagttaattaagagtatgttggcaaaaatggtaaaaatttaaatattataaccagaggaaagcaacagaggttcttcagcctgaaaacattacccattattgggcatgagagggcatgaaagaaagatatattgacatctttaaagggattccttcacgtgttgctaagagagtaaaagaaggctcaggtgaaagctatgaagagaagacntgaaatttagtaggggacaaataattgagaaataagattgtacataaaatagaatggctggctcgtgtctcattccctagttaatttattctttaaatatttgtattgactgcatactttatactaagtctttgctggtagatgggatatcgaaatgaatcaaatgtggccaatttctgctttagagatgtcatagttttggggagaagaaaaattgtagacaaatgactgcaatcaagttctatgtttaatgatggaaaatattgagataaaaaagtgggcaaggtgcattacacttgggcaggggacatgaggtaggagtgacacgcc

SEQ ID NO: 1283 - DNA, 661 bp, Homo sapiens
  misc_feature [331]..[331]: Chromosome 2, SNP identification no. = rs12619631
  misc_feature [331]..[331]: allele = a, in linkage disequilibrium with rs10496519, respectively
  misc_feature [331]..[331]: n is a, t, c or g
attaacacatcctcagatttcttttttaaagctgaggaagggaatatgtcactactaaccatgtcctaaaagatgtattcaggggaattttccagcctgaaataaaaataagctagacaaagagttgaagctatatgaagaaataaagaaatccagtaaaggtatatttacataggtaaatataaaagacactatcattgtatttttggcttgtaatacctcttaaaatttcctatatgacttaaaaatcaaatgctaaaacataaccataaatgtatggtaatacacatggaatgaataaagatgtagttcctgacaatgacaatgtaanagagggtggaacaatataggaacagagttttgaatgctattaaagttaagttagcatcaattcagactacatgattataaatttagaacatttcttaaattctatgataatcgctaagaagaactcaaaaatatacatataaaagtgtatgagagggaaatcaaaacagtacactgccagtaataaaaataagatggtaatgaaagaaatgaataatgaacagagaacacatgtagcaaaatatcagaagtaagttctttctttatcagtaattaccttaaatataaatagattcaattctcatgtcaagaggcagagattggcaaaatg

SEQ ID NO: 1284 - DNA, 661 bp, Homo sapiens
  misc_feature [331]..[331]: Chromosome 2, SNP identification no. = rs4954603
  misc_feature [331]..[331]: allele = g, in linkage disequilibrium with rs12614381, respectively
  misc_feature [331]..[331]: n is a, t, c or g
catgatgtattttatttgtctaactctcctactagaatataactttcatgagggcaagaatttttcaatattttgttcactgctgtatcctcagtgttagaacagtacctgccacaaactgtggtcttgataattattgaataaatgaaagaattattaggtatttcaggcataaatgggataagaaatgtactctatctttggttcagaaatatatccttagacctatgtgcattaatgataagaaatatagcattaaaaagctggaaggaacttaaatgctcatcttgtgctctttgtcattttcagaataagtcacttgcttttggtnacaccaagctggtggcagaactacaatgaaaaccctttaactggagtcttcccaacccgtagcccacctatgtagtgtgaacagatctagggatttctttttccacttagctttttgttaaacgctgtcttagaaaacccccaattggcctgatgttgccccctgcccccagtttaggctgcttcccgattggctgactctcgggactttagagggtctctgtggttttgttggatcagggggttgctagctgttgcttttgaagcagtcctgttcattgctgatttcctttaggcatttgtttttgaagccaaggcttcaaaggcaagc

SEQ ID NO: 1285 - DNA, 661 bp, Homo sapiens
  misc_feature [331]..[331]: Chromosome 2, SNP identification no. = rs12615726
  misc_feature [331]..[331]: allele = c, in linkage disequilibrium with rs12614381, respectively
  misc_feature [331]..[331]: n is a, t, c or g
attcatccagctggagaagctagatgcaaaccctcaagaagccatttgttactttcattgggttcagaatagataagctagaagccaccatttgggaggatgggctgacaccctgctttgaggagtggtgtttctgcagagggttgctcagggttaatattttgatttgcagtttcccagagaggggctgtagtaaaatagagcgtggaaattgccatgtgtgtttgtatgtgtgtgtatgtgtgctattttgttctttttttttttttttttgatggtgggtaggcagaaggtttgagaagaaatgttaacatttccaataagaattaanagagcagcagttttcaaagtgtggtccagagacccctggggattcaagaaaccctctaagggggtctgtaaggtcaaaactattttcataataatactaagacattagctcttttctctctcattctctcaccagcatactgaggagtttccagtggctatgtagcatgtgatattgtgaaagaatgggtgcagaagtggatatgagaaatgagctgttttctattaagccccacattaaagagatttgcaaaaaggcaaaacaatgcccttcctctcactctttttttaaacagtagctatttatcataaaattatattttatgttaat

SEQ ID NO: 1286 - DNA, 661 bp, Homo sapiens
  misc_feature [331]..[331]: Chromosome 2, SNP identification no. = rs6430623
  misc_feature [331]..[331]: allele = c, in linkage disequilibrium with rs12614381, respectively
  misc_feature [331]..[331]: n is a, t, c or g
attggggattcatgatggattcacatgatccagtaaagattttgtagggcagtgggactctgtcaacagtatttgggaatacagagggcctggaacattcaggaaaggcctagtgagaagggtagggtttgaaccagtcctagaagaatttaactaggcaaggaggaaggaagaatccaagttctttagctttctagcatgtggccataatcggccttttccagcctcagatccaggaaagcagcttagtgtagagaaagtgaacagactttggagttgggaagactaggcgaaaagtcctggacctgccacatcctagcctttgggaccnaaaacaagtcactcaatctctttaaagctctgtttttctgcctacaaataggaataattcaacctattgagggtaatggtaaagatatctgaaaatatatgtgcttacacatagtaggtgctcaacaaaggttggtttccttccttgtcactgtcctttcagatcccttgtcagaccaatcaggcctgcgggcgcagtcaggccagttgttctctcatcctcttctcatgcccatcctagtctcttgaaaccctccttcaagacaccattgctgcctcctccaggaagcttctcactccctccagccataggaatctcttctttcttcac

SEQ ID NO: 1287 - DNA, 661 bp, Homo sapiens
  misc_feature [331]..[331]: Chromosome 2, SNP identification no. = rs6708702
  misc_feature [331]..[331]: allele = a, in linkage disequilibrium with rs12614381, respectively
  misc_feature [331]..[331]: n is a, t, c or g
taagaactcatgaactcccagacattgtcaagcaagaggatgatgtataggaccctaaactttctttaggcagagagagtcagaggaaaggcaggtgcacatgagattttcaaaaggctgtgtgctctgtcagatgcctcacaacatttcctggtgttacatggggtggctgatattttggtttggcttgataaaatactttgtgaagttgctggcttgttccagttttgaaattgtcatggcattcattgcttcaaaagcttcttctcttttctctgtagatgactatgctctcttctgcatctgagagccctctatttagttctaaagncattcaagtttacaacacacggagaaaacaacaatcatgctacattttcacttgttgaaagttctgagaatataagtttttaatgtgtaaattctatgacatttgaaaattcttttttttttaaagatattagcttaagaatcacaagagatggtctcccttgatcctgccttaaagaggccttcagagcattttatagacaaggccatcttcccactaggctatggctacagtgccaagggccctcaggctttacaaggtctgtgaaaacggtgcaggctggtgccccctcacttagtgcctttgtgaaaggtatgccctctaggccct

SEQ ID NO: 1288 - DNA, 661 bp, Homo sapiens
  misc_feature [331]..[331]: Chromosome 2, SNP identification no. = rs7594034
  misc_feature [331]..[331]: allele = t, in linkage disequilibrium with rs12614381, respectively
  misc_feature [331]..[331]: n is a, t, c or g
gatccagttcctgccatgggcaagtcattaccatctcagtgttgtgatctctaaaatgaaacagggaggggagacgtttgcccaggtgtgttctgtatataccacttctgtgtgtcattgtttgaaggatgacctgggggaggctttggtccccacccctttccagcctgctgattacttggatagaggaagacctcaggcaaagaaatgcagataagtcaggaagtgtaaggcctgagggcatggcttacacacatggcatgaatttccctagtgttctgcatttaggatgctatcaattttcacgttaaaaatcacagtaaaatggaanaaaatgttaatttttgtggttattgttgttttttgagacggagtgtcgctttatcacccaggctggagtgcagtggtgcaatcttggctcaccgttcatggcaacctccgcctcccgggttcaagcgattctcctgcctcagcctcccgagtagctgggactacagatgcccgctaccatgcctggctaattttttgtatttttaggagagacggggtttcaccatgttagccagatggtctccatctcctgacctcgtgatccacccacctcggcctcccaaagtgctgggattacaggcgtgagccactgcacccggcccaaaaagtt

SEQ ID NO: 1289 - DNA, 661 bp, Homo sapiens
  misc_feature [331]..[331]: Chromosome 2, SNP identification no. = rs7570134
  misc_feature [331]..[331]: allele = g, in linkage disequilibrium with rs12614381, respectively
  misc_feature [331]..[331]: n is a, t, c or g
ctcagagctctcaggcagctggttgaagctttgtttatagtagtgccacccactcactccacacccccgactccctataaactactccacaggtggccagacttttggtgcaaataaaagtttgtcaactgttgcaccctttctcctgtctttttttttttttaacttatctaaacaaaattaagctgtggggagttcattaataaaaggtttcttttacaacattattggcactctgcaaggcgctttggaggagagtgggaagatcaatattacctagagtaaaatagcagggcagatattactcaagggaaatcggttcttaataagngagagaatatggatttctatccgggcagtcagtttgaatatgatgaaacagtgtgttagagtcggcggtctagtaattatctgagaagtcttagagactataaatgtgtgtgtgtgttataaaagaacaaaccaaaaaacctctcagccaaagcttttcagaaataaaaagcaagtatttccacagatgaccagacaccaaaaaattagaacaatgtgaatccattaaatgacaaaagtgcagagcatcacacagaaatggtgtgatgacttcctgcgtttgcctctgggagggaggcagagaacagggagaaaatgcaggcttctagat

SEQ ID NO: 1290 - DNA, 661 bp, Homo sapiens
  UBBP1
  misc_feature [331]..[331]: Chromosome 2, SNP identification no. = rs7577801
  misc_feature [331]..[331]: allele = g, in linkage disequilibrium with rs12614381, respectively
  misc_feature [331]..[331]: n is a, t, c or g
catcttccacctgcttgactgcaaagatgagcctctgctggtccggggtaatgccttccttatcctggatcttggccttcacattttcgatggtgtccctgggctccacttcaagggcaatggtcttgctggtaagggtcttcacgaagatctgcattttgacctgttagcggatatgacgaggctccgaaacaccagtcatgtccagccacagggacaccaccacatactcacccaacaaagccagtcatccctaccactgagctatttctatgcgagttcttcccttggcccttaagctgggataaatccctgtcttcatgcaaagttngagacatgattagatacaagatctacaatatttgtggataaaaaccaaacagttccttaagaaaactacaactattttttttggctgacaccagagtgaaatttcccccatttatcccccatcagcctttggtaggagcacaaaagctacgtggcagggcacattccagcaccatgcccatgacaccaactctcgttcattcattccttgacgtatttacattcaaactccgtcctcgtttgctgctgtgctgctggttctggctccaagcacttctttccttcttttttttttgagacaaagtctcgctgtcacccaggctggagtgca

SEQ ID NO: 1291 - DNA, 661 bp, Homo sapiens
  misc_feature [331]..[331]: Chromosome 2, SNP identification no. = rs12614381
  misc_feature [331]..[331]: allele = a, c
  misc_feature [331]..[331]: n is a, t, c or g
cagttctggaggctgggaagtccaagaccaaggcactggcaggttcattgtctgatgagggtctggcctctgctccacactgacaccttgaatgccgcatcctccagaggggtgtgctgtgtcttcacctggcagaggaagaagggcaaagaggagcaaactctgtcaagtccttttataagggcacctaattccattcacgagggaagagctataattagttactttccaaaggcttttcctcccaatattgttgccctggggtcacctgaattttggaggggacacattcaaaccatagcacacaccagtcttaagttctctttgcaangtaacagtagccaacattagctcactcccatcaaatgctgtcccacagcactgaactagcatgttttagcaagcagaaaacacactcttcctgctactggctcttatatactcagagttccagctctctgtcctcctaggtgtttggaacactacctgctatgcaagattcactcaatacggatttaatattataccataggcaggatttttgtccatttatagggacaaaagcaactggatttttccagaccaatagttcaagcaactggaattttccagaccaatagctcagcaagggattgttggtagattaagtctctgtgctgta

SEQ ID NO: 1292 - DNA, 661 bp, Homo sapiens
  misc_feature [331]..[331]: Chromosome 2, SNP identification no. = rs4588245
  misc_feature [331]..[331]: allele = a, in linkage disequilibrium with rs12614381, respectively
  misc_feature [331]..[331]: n is a, t, c or g
acaaaaatatctgtgagtcagatgacaggtgggtacccaggatgagacctctgcagtagatattccaccttgaaaattctcttctgtcctattctagcctattctaaaattctgtacttccattaaattgtttccatatgacccactgtagtgggaagcatattgactaatcaaacataaatcaaattatgccttaaatggtaaagacggggccaacttatttgtctccccaaactgacaggggtaaatttgctccctagaaaacccagccgcctctttaatagcacagagaaaaccgacgtgcaacgtggacagattggttcaaggagcnaggtgatgggactcctgtcacattatttatcaggtttatagaatgtagaagatttcctccatacaagatagcgaccccactgggccctagctctgtgcttattgggtggcttgcagaaaaataatcccttcttttccactcggtcactccaaatttcattttgtacattgcattttattctcacatcatggtttctgctgcttggctgctattaacaatccttaatgcatgtatttgataacttgtgaaatgtcccagcaggtccactgggacctgtaaaggactgtgatgaaaccatggctgaaacaaacaggaaaatgtccaacaaat

SEQ ID NO: 1293 - DNA, 661 bp, Homo sapiens
  misc_feature [331]..[331]: Chromosome 2, SNP identification no. = rs6706755
  misc_feature [331]..[331]: allele = g, in linkage disequilibrium with rs12614381, respectively
  misc_feature [331]..[331]: n is a, t, c or g
actttcggctgctttctgtaatctccccatcattcctcctgggtctgtgatgatctgatacttcacttctttccctttactctgatctcctaatggaaaagacccatgtctcagttgtctctgggcctggcacatagcagctgtccagaaaatgctggcacatgaataatgaaggaacattgccatggaccagctgtctccatctgttgcaccaattgattagatggtggctgttggctccttgagtctcctctttgtcatcaggaaaacattttctcccaagtcagaggcacagcaatgctttccttcctaggaagacctttctttatgnatccctgactcatgcctcccaggtccttgagtctcccttttcccccacaccagcagctgtgcccttcataagctccttcccttgagccaataaatgagaaagccatgcttccatttgccatgtgactttcgaggttaccaggctgcacccccaactccccactttacacctctttcctgagcctctgtcttctgagatgcccgctgttccaccaacttcccacagcctcacttctcctcctcctaagactttactccctcttttggtcaactgcttcctgcctttgatttctgtgatcgctcagcatttggttttcctccccttctattt

SEQ ID NO: 1294 - DNA, 661 bp, Homo sapiens
  misc_feature [331]..[331]: Chromosome 2, SNP identification no. = rs10497017
  misc_feature [331]..[331]: allele = t, in linkage disequilibrium with rs1881569, respectively
  misc_feature [331]..[331]: n is a, t, c or g
ccatcaaaatatgaggagatttattttaaaaaacagtaacaggcagaagactcattcctacatgatctggaggttccaggtgaaattttcagtggctacacaggagcaccgtggatgacatccatgccaaaagcgtcctgaactaaataaagttgtagtcatagtgaagcaaaaggatgctatggtagaacaaacaacatgggtaaatgtgggcatggctaacttaaattagtacggtgaatagaaacttaactacttctggagacaattttctagaacttctctattagactttgaggactaggacttggagatacttttgaaaaggatntgatctatatacagagaaaagaagctatgtaaaggaaaaggaaatactgaactggtcctatatgaagcagggcaaaatcttctccagtgattttttgcatgtagagccatgcttcggtttctttaaaatgattaagcgaataactggagcacccaaacaatattacaggtctttaggaggctataaatcggtaattattagggcatttgggagataagtttaaacaggtatacaaatcttaatgatggctaaataaataaataaatgttccaaacaaaaacaaaaaacctgcagataataatgatcaagattttatatttctcctttgga

SEQ ID NO: 1295 - DNA, 661 bp, Homo sapiens
  misc_feature [331]..[331]: Chromosome 2, SNP identification no. = rs1528842
  misc_feature [331]..[331]: allele = a, in linkage disequilibrium with rs1881569, respectively
  misc_feature [331]..[331]: n is a, t, c or g
tcttcaaggcaaaataaatctgatctcaaaatggattcttgttttggtttttgaggtctgccaataatttgtaccatctaagggcatcgggagcagctattttgaccataaccacatggctccagctttccaaattatctgtatcttcagcgtaactttttttttcatttgttttatggaatttttgtgagtctattggtatctttattttagcaacaaaaatttctccaaggaacatcattttggcctccccctcagctttttcctaatagttgaaattgtgagtttaaaatataaatagaatgatctgttcaactttataatgctgcanagaaatatcagtaactgtttagtcagcgatgcaatttatatagataaattagtctggacccagagtctcaatatctcaacctccttcctctccttcctttctccattccaccccccaaaaaaaacttcagaagaaaaaagtagtaaataacatatgctatagatagatagatagatagatagatagatagatagatagatagatagatagatatcatcaggaaaataaggttatgcttaagcttgaatttcaaccaaactgggcataagatgtgaagaagaccctcaactctttgaggttattataataaagaagtaacaattgagatta

SEQ ID NO: 1296 - DNA, 661 bp, Homo sapiens
  misc_feature [331]..[331]: Chromosome 2, SNP identification no. = rs6733995
  misc_feature [331]..[331]: allele = t, in linkage disequilibrium with rs1881569, respectively
  misc_feature [331]..[331]: n is a, t, c or g
tccatttgaaatggctacatgagttctcataagaaaagtgggggtctaagtgaggtttgagaagtatagatcatacccctgcttcaccccttttgatggccatctcctcattacctctgaataatccagtcacaagcataacactcaaggccttggagagtctggccataggacaccttttgaacttttaactcaccacatcctcccatacgccttcatgttttccacaccaaaaatgcttcaggcatctgcaagcaggccaggtactttctcaccttcatacctttgtttctttagtctctctgcacggaatgttctttccctcttctcngtgaaggaacttgccatgctttaccatgtgcctcaacataactttgtgcttctagcatgcaacttgatttatttgatttggggctatgactaactgaatagatgttcctctatctccagggtgaacagctcatccagatttgactggcactgtcaccattgaaaactgaaaaaatcatgtcctaggaaatccatcagtcccattcaaacttggatggttggtcacccgatacttccttgctatatatcacaagcccaaggacagagagaacatcctagtcttcttgaaacttacacattgctgagcatattaacctgaacacaatagtat

SEQ ID NO: 1297 - DNA, 661 bp, Homo sapiens
  misc_feature [331]..[331]: Chromosome 2, SNP identification no. = rs1919447
  misc_feature [331]..[331]: allele = g, in linkage disequilibrium with rs1881569, respectively
  misc_feature [331]..[331]: n is a, t, c or g
tatgtattgatttcataattaaaaataataaagctgtttaattgggtagggggccctttttggattaaaatgcaaatactcctgggaggaaaagatggtgaaaacctgggatcgtagcttgtgaaggtaggagaagtaggaggaacctttccagggcactgagaaagaaggcttggtgtgggaagaactgcagaatgagaagactgtaagaccctaaagacagagcaagagaaaagcttcacctacttcctggcttaccctaaacctgtacttataatttcctagctaaggtaaatttttttctgacacagaagatatgttgcctagagcncgatgctatccaagattatctatctaggggcagcacagacagaaccagaatctagaatgagtctgaccagggctcagaagtgaaagtcaagggtgggagcccaggacttatattgaagagattgaggcatggcttatgtaagacattctgtggctgcagagatctttctaatgtatttaaaaatagatacccaatgtatcctggaagcatccattattcagtggctatggtccccattgtcattatgtagatacattttttcctgaaccgatccatgtggagggctatcttggacaatttaaaaagcaggaaaataaagtagaaatattt

SEQ ID NO: 1298 - DNA, 661 bp, Homo sapiens
  misc_feature [331]..[331]: Chromosome 2, SNP identification no. = rs1406444
  misc_feature [331]..[331]: allele = t, in linkage disequilibrium with rs1881569, respectively
  misc_feature [331]..[331]: n is a, t, c or g
taatcagattcttccaaagcaatgctatgcatgcaacaattcttctataactctctttggagacagagcccagctgctgtggtaagggttagctgcatcttatggcttgggatcatctttcattaaaaatcacagatggcagtctatccttcccaccataagaagtgatataagtaagctttggtcaggcaaagaggggaggtgtgaccatgaaaagtttcaagcacagcatccctgaattatgtccagttgttgtgcatcttcagtttaacctttattcctgattcttggagagaatgaatacagtcaataaaaatctacagtagtaaantaacattgagtctgggaggctggtgggaatgattaatgaaaggaatttatttcttgttgatttattaataattgaatttgtgtagaaaaaaattaatagggatattagagagatggtttagagaaagaagataactatttgccgaaataaatcattgttttcttactagcttgttgcaactttgctactctaaggagctgtaaagtgaagcaaacaatgcttattgtcagatgtaatccttgaagagtttgtttattgataaccaaagaacatctaaagataatgtgtattttgcaagattattctctttcacctgctgattaaattgtg

SEQ ID NO: 1299 - DNA, 661 bp, Homo sapiens
  misc_feature [331]..[331]: Chromosome 2, SNP identification no. = rs1112809
  misc_feature [331]..[331]: allele = g, in linkage disequilibrium with rs1881569, respectively
  misc_feature [331]..[331]: n is a, t, c or g
tgtctctgaaactttggtttcaactgtcccaccctgtcttctctttctctccctctttgactcccccttatggcaccccattgctgctttctttcatcctcacctggctctgctaacgcttctttccctgttctcccccctacttcctccatccacccccgctgagactcagcaaactcatacagttacaacaaatagaacaaatactgaactaacatttttgttaaatagcttgactgctttgtggacagggatttgtcgacacatctgttctaaagaattttcttttaatagattttttgtgtgtgtgtggaaaccagatcagcaaagngctgtaactatggcctaccatggagacctggaaattgctgtactaagcaggactgattaaatgaaaatttacctgtttggaatgaaactcacaatctgttctagaaattgttgcaattatttggccaaagtcaattgaagagaggaatatactattccttatattataagacatacttgtgttcaatgtctacagacaataggctccctcgtcagtcagatacatgccacatatgaaggttaaagagcacaccattcacaacagagtgaaccctggtagagggagcagcaaggctgatcaccagtgtagctatgaacactaccagataca

SEQ ID NO: 1300 - DNA, 661 bp, Homo sapiens
  misc_feature [331]..[331]: Chromosome 2, SNP identification no. = rs1881571
  misc_feature [331]..[331]: allele = c, in linkage disequilibrium with rs1881569, respectively
  misc_feature [331]..[331]: n is a, t, c or g
aagagtggacaggaggaggagttggtgagggtgctggtacaatctatgtagagggctcttcatgtacaaagctataaggatagaaaatacccaggggctaaggatgctggctggaatacacattgagactggtaagagtgatgggagaaaagatgaagctggaagtgtagacagagtctaatataaaacggttttgtctgccatttaaaaaattagaagtttatttggaatgtcatgggggagcatttaagcatcatgttggtgttgagtgctgaaggaaagaattaagagtgggattagaaagactgtgtgtggatacaattaggtgatnttttgggttttaagtaatactctctgggctgctgagtaaagaatggattgaaggagggtgtgcctgagggcagtagggggtgactggaaaagcctgctggagagctaatgacagtaatggggagaaagggacagatttgagcaacaataaattggaagagttgttggaacttggtggttgactcaatgctggtatgacaaagagagaggagtcaaagaaaactcagaggtatcaggcttgaaaatccagtgctttctcttcctaagagagggggaggagaaggtatgaggtggaagatgatttaagattgctgcatcagaggaaagactg

SEQ ID NO: 1301 - DNA, 661 bp, Homo sapiens
  misc_feature [331]..[331]: Chromosome 2, SNP identification no. = rs1881569
  misc_feature [331]..[331]: allele = g, a
  misc_feature [331]..[331]: n is a, t, c or g
acatgcaatatttttttcagtaaaagttacactgattgtaaccctcctgtctcttcttccaccttctctaccacttatggctctgtcacctctgaggcaacaaaaccaatctctcctcttcttcctcctgttaagactactcaatgtgaagacaaggataaagatgtttatgatgattcacttctacttaatggacagtaaatatatcttctcttctctcattatttccttaataaaattttctgttctctagcttacttcattttaagtatataatacatataacatataaaatatgttttaacggactgtttatgttatcattaaggcntccactcaacaataggctattggtagttaagtgttttagagtcaaaaattatatgggaatttttgactgcatgggggttggtgcccctaacttttgtgttgttcaagggtcaattgtacatgtgtctttacaggtgaggtcagttccttgtaggcagcatatagttgtgtcatgttatctttcattcagctggtggggaatttatcttaaaagctatccttcaagtggaaaatttaatctgtttatattcaagtttattgacagatgaggacttactcctgtcattttgttaattgttttctggttgttttctatatcctttgttccttt

SEQ ID NO: 1302 - DNA, 661 bp, Homo sapiens
  misc_feature [331]..[331]: Chromosome 2, SNP identification no. = rs1581669
  misc_feature [331]..[331]: allele = t, in linkage disequilibrium with rs1881569, respectively
  misc_feature [331]..[331]: n is a, t, c or g
gagagattggttttgttgcctcagaggtgacagagccataagtggtagagaaggtggaagaagagacaggagggttacaatcagtgtaacttttactgaaaaaaatattgcatgtaagtgaacccatgtgggttcaaacccgttattcaagggtcaactgcatactgaaagtggagggatggaaaaagacattccatgtcaacagaaaccaaaagcaagcaagagtagctatacttaaatcagataaaacaaactttaagtcaaaaagtgtaaaaagagataaagaaggttattatataatgataaaggggtccatctggcaagaggatanaacaataataaacatgtatgtacccaacaccagagcactcagatatataaagcaaatactatttcatctaaagggagagatagactgcaaaacaataatagttggggaccccactctcagcattagacggatcatctagacagaaaatcaacaaggaaacattgaatttaaacttctttagaccaaatggtcctaacagacatttacagaacattttatctaacagctgtagaatgcactttttttttcatcagcacatggaacattctccaggatagaacacgttaggccacaagccaagtctcaactaatttaaatgaattgaaatta

SEQ ID NO: 1303 - DNA, 661 bp, Homo sapiens
  misc_feature [331]..[331]: Chromosome 2, SNP identification no. = rs12151490
  misc_feature [331]..[331]: allele = t, in linkage disequilibrium with rs1881569, respectively
  misc_feature [331]..[331]: n is a, t, c or g
ttaggccacaagccaagtctcaactaatttaaatgaattgaaattatatcaaatatattttctgaccacaatggaataaaactaaaaaccaataataagaggaacttttgaaaatgtacaaatacctggaaattaaacaacatgttcctgagtgaccaataagtcagtaagaaattaggaagaaaatttaaaaatgtctcgaaacaaataaaaatagaaacacaacataccaaaacctaggggatacagcaaaagtaatagtaagagagaagttcacagcaacaaacacctacttcaaaaatgtagaaagatttcaaataagcatcctaangacgtatctgaagaaactagaaaaacaagaacaaaccaaactcaaaattagtggaatgaaagaaataataaagatgcgagcagaaataaataaaactaggtctaaaaaatatataaaacaaggaagtgaaaagtttgttttctggaaagacaaataaaattgacaaatcattagctagactaaccaagaaaaagaaaagacacaaataaataaaataataaataaagaaggagacattactattgataccacagaaatacaaagtctcattagagactgttatgaacaactgtatgccaacaaattagatacctaatgaaaatggttaaa

SEQ ID NO: 1304 - DNA, 661 bp, Homo sapiens
  misc_feature [331]..[331]: Chromosome 2, SNP identification no. = rs4361062
  misc_feature [331]..[331]: allele = c, in linkage disequilibrium with rs1881569, respectively
  misc_feature [331]..[331]: n is a, t, c or g
atgtatacatatgtaactaacctgcacaatgtgcacatgtaccctaaaacttaaagtattaaaaaaaaaaaagtgagaaaaaaaaaaagaaaaagaatttggtgcttgatcagactaagtgctaggtgatacattgcactttgatgtctaaaaagccaaaccccagagacaaattttagcaatttccctgccagccttttccatattaatatctaaattatatattaattacagttctgtaagagtgagcctttaatttattctcgctgaatgaagaaattaatgagtgcacatttatggaattattttattgcagataccacttccctgngtctcttggactcagtggctgtcttttataattcagcaggagggtgagcattttaagaggctgtgcatttcagcagctttcagaacaaacttctatcctgaaagccagagctagtcttagctccatcataaggcagctctaggtccttagagaagtaaaccacttagcaccatgtgccttcatctacctaacaaaggagggcatgattcttcactccctatttcatcagagaaaggatccaagttgaggtttactaagtaaagaaatctattggagaaatgagttgggtgaatgtctaaaacaaagaaagaaaagttatcattgcagaga

SEQ ID NO: 1305 - DNA, 661 bp, Homo sapiens
  misc_feature [331]..[331]: Chromosome 2, SNP identification no. = rs1609365
  misc_feature [331]..[331]: allele = t, in linkage disequilibrium with rs1881569, respectively
  misc_feature [331]..[331]: n is a, t, c or g
attggtctatgtgtttgtttttatgccagcacaatgctgctttggttactatagctttgtagtatatttgaaagttcagtagtgtgatgcctccagttttgttatttttgctctgtattaccttggctatttggggtcgtctgtggctccctgtgaattttaacattgttttttctatttcttcaaggatgtcattggtattttgataggcattgcattgcctctgttgattgcttttggtagtatgatcattttctcaatattaattcttccaatttatgaatatagatgtttttccatttttcagtgacctctctaatttctgttatcngtattttatagtttcctttgtagagatcattcatcttcttggttaactttattcctaggtattttattattttttgtaactattataaatgggattgctttctggatttctttttctgttagttcactgttggtacataaaaacatgacagatttttgtatgttgatttcatattctgcaagtttactgaatccgcttattctaagagttttttggtgaaccttttagggttttttatatataagatcatgtcatctgtaaacagggacaactgacttgcccttttccaatttgaatgccctttatttctttctcttgcctaattgctct

SEQ ID NO: 1306 - DNA, 661 bp, Homo sapiens
  misc_feature [331]..[331]: Chromosome 2, SNP identification no. = rs2049740
  misc_feature [331]..[331]: allele = c, in linkage disequilibrium with rs1881569, respectively
  misc_feature [331]..[331]: n is a, t, c or g
ggcttttaaaatgcatatgtgtcattatgtttgaaaataatatctcctgtagcttccatactgtattaaggcataggagacatctacatttctagtgggaaaatgctttttgttatttcatagctttttggtatattgaatacataattatattgtctgttattttccattaatgaaggtttgtattgctttgttttttataatatcatgatggactatttcagactcttaaaatgccagtaattgtgaagtgtttccgatggatagagtgtaaatagatgcctgtggatttgacaggaagctgggaagtttccctgctcaaagatatagncctactgtggatagttgaaatgccactgataatgattcattgctttctgttgagctttttcctcatatagtggctcttttctgaattgcaaatactccagggaggtataacatactgtgtaactcacaccctattatgaaataattgatcgtatcttttctatcagaagagagactagaggggaagtactgacagaggactcgtgaaagaagactacctaaggatggtcctgatcagataagtataggctgcagaagattttcccttctatctaaacagatagctaagttccagtcctttttaaaaacaagtttctcaattgcaagttta

SEQ ID NO: 1307 - DNA, 661 bp, Homo sapiens
  misc_feature [331]..[331]: Chromosome 2, SNP identification no. = rs2382108
  misc_feature [331]..[331]: allele = a, in linkage disequilibrium with rs1881569, respectively
  misc_feature [331]..[331]: n is a, t, c or g
ctgttgtggggtggggggaggggggagggatagcattaggagatatacctaatgctaaatgacgagttaatgggtgcagcacaccagcatggcacatgtatacatatgtaactaacctgcacattgtgcacatgtaccctaaaacttaaagtataataataaaaaaaagaaaaaaaagaaagacaaaaaataaataaataaataaataaataaaagagaagcataattgaaagatttggaaaatttcatcctggccatgtaaagaatgaaagagtatgttcaggagagaataccaaggactcagccaaatgacagtttgctaaagggattnacatgaatagaagggattcaggtgctgttcattaaaacaatgggagagagattctgaaagcattttagagatcttcaaggctgcccagggctgcctcaggtctctgctccctgtattctggtgtagtgcccctcaactacctcagccatggcttaaacagactcaggtgaagctcagcccactgctccagaaggtgcaagcagcaagccttggcagcatctgcatggtatgaagtctgtaggctcacagaatatgaaagctgtgggggccatacctacctttacctagatttcaaaggatgccatgtaccatcagggaacccaggcagag

SEQ ID NO: 1308 - DNA, 661 bp, Homo sapiens
  misc_feature [331]..[331]: Chromosome 2, SNP identification no. = rs1919442
  misc_feature [331]..[331]: allele = g, in linkage disequilibrium with rs1881569, respectively
  misc_feature [331]..[331]: n is a, t, c or g
gcaattaaaattcaacatcagttttggaggggacattcgaaccatagtattccatctctagtcctcccaatattcatgtccttctcacatacaaagtacattcatttcatcctagtagctcccaaagtcttaatttgttctacatcaactcagaagtccaaattccagagttatctagatcagatatgagtgcgaatgaaggcatgattttcctgaagcaaatacatccagctgtaagcctgtgaaatcaataagattatctacttcgaaaatacaatgataggactggaataggatagacattcccatgccaaaagggagaaataggaangcaaaaaggggtaactggtcccaagtaagtccaaaacccgacagcatgaacaacattaactcttaaagctggatgatattcttggttggctgtttcacatcttggacacattagtgtaggggctgggcttccaaggcctcaggcagcactgccccttatgccttgttgggcttagtccacccagtagctgtcatgggttggaatcttgtgtctgtagcttttctacgctaatgttgcatgctgctggccctagagttctggggtctctgaggtgacctttctcccacagctccattaatcattgccctagtggggactctatgaggtggc

SEQ ID NO: 1309 - DNA, 661 bp, Homo sapiens
  misc_feature [331]..[331]: Chromosome 2, SNP identification no. = rs7607970
  misc_feature [331]..[331]: allele = g, in linkage disequilibrium with rs1881569, respectively
  misc_feature [331]..[331]: n is a, t, c or g
agtgctacgagtaaagaaatgaataagccacagtcctgaatggctctcaaaatgctcctgatctaatgggccatgaaaatctcttgacaaccacgattctttatatcagacactgttctccatggattatttcagctttctaccaatgttacaccatgaaactagaaaacaaggggaacataattcatatccatatgatttcatatccatgatttcatatccatatgaattcacacattgtacccatacacagggtagaaaggaaaaatgggaattgcttcattagttttcagaacattctccaaccacttaggttttggtcaaatagatngaccggctcctttacttactagccatgaaacactggacaagaattataaatctctgtgcttcacttctctcatctttaaaacaggaatgataatggtatctacctcaatggtaatattatacatggaacaaaatagccactccataaaagctgatattttataaacttacattgcttttagcttcatactacagttattaaaattctgagcagcgaaattaacttggccacagtggttactttaaccagtggtgaagatgaaaataatactcaaaccttctccctctaaaattccttctaacatatgttgctgcttctcctcaccacaaa

SEQ ID NO: 1310 - DNA, 661 bp, Homo sapiens
  misc_feature [331]..[331]: Chromosome 2, SNP identification no. = rs7581569
  misc_feature [331]..[331]: allele = t, in linkage disequilibrium with rs1881569, respectively
  misc_feature [331]..[331]: n is a, t, c or g
gggccatgaaaatctcttgacaaccacgattctttatatcagacactgttctccatggattatttcagctttctaccaatgttacaccatgaaactagaaaacaaggggaacataattcatatccatatgatttcatatccatgatttcatatccatatgaattcacacattgtacccatacacagggtagaaaggaaaaatgggaattgcttcattagttttcagaacattctccaaccacttaggttttggtcaaatagatagaccggctcctttacttactagccatgaaacactggacaagaattataaatctctgtgcttcacttntctcatctttaaaacaggaatgataatggtatctacctcaatggtaatattatacatggaacaaaatagccactccataaaagctgatattttataaacttacattgcttttagcttcatactacagttattaaaattctgagcagcgaaattaacttggccacagtggttactttaaccagtggtgaagatgaaaataatactcaaaccttctccctctaaaattccttctaacatatgttgctgcttctcctcaccacaaatctgaaatatcagaaatctttcttcagtattacaaagaaaaaaaaaaactttatatctcagtaatac

SEQ ID NO: 1311 - DNA, 661 bp, Homo sapiens
  misc_feature [331]..[331]: Chromosome 2, SNP identification no. = rs1528844
  misc_feature [331]..[331]: allele = t, in linkage disequilibrium with rs1881569, respectively
  misc_feature [331]..[331]: n is a, t, c or g
tttctttatttttctcctaattatcaaatgagtttctcctattctatataagtttctcctcttctatataagaggtgatgctttccaaacttacaactccaattctggcctcttgcccagacttttgtcaactgcctgctcaacatcgcctagttttctaataggcatctcaaatttaatatgtctcaagtataactcttgattaacccccttccactccaagtactttccatttcactaaggagatctgccattccagcagctgatcaagataaaacatagaagtcatctttaatttctctttttctcactctcaatagccaattcatcngtaagcctacccagctccaccagtaagcctacccagctccacctttagaatatatcctgaaacctaccaattctaattactacctctgctattatcctttctcttgctactgctgcttccactatgccaacccagtcctcctaacatcattacttatctagatgaattagataaccttcagttcccaatcttgtctctttctagtttattttccacacagcattcaagacgagcttttaacaagtcacatcatgtcacatgactgttaagaagtagccagtgactgtctatcatacttataacaaattccagcctccttttatggtctag

SEQ ID NO: 1312 - DNA, 661 bp, Homo sapiens
  misc_feature [331]..[331]: Chromosome 2, SNP identification no. = rs12611679
  misc_feature [331]..[331]: allele = g, in linkage disequilibrium with rs1881569, respectively
  misc_feature [331]..[331]: n is a, t, c or g
ttatacaatccacctctgtctacaactgtgaatttgcaagttgcagaaacttagcatgcactgcagggataagtatacttcttactttctaactgtaatgtcagtacttgcaacatcaccaaatcaatgggaaaatagcggaatttggccatatgaaaaaagtattttttaattggttgttggctgctcatctctcataacaaaatcccacctactatgtgacttaaacaacagaaacatgttctctcacagctatggaggctagaagtccaagatcagggtggcagcatggtcagtttttggcaaggggtctcttcccaatttacagatngctgccttcttgctgtgttctcacatgatggagagaggaccagcaagttttctggtgtctcttcttataaggagctgtagtcctatcatgagggccctatcctcatgacctcatataaccctaaatacttttgtaggagtcctatctgcaaataccatcacactgagaatttggggctttgacatctgagttttggggaaacacaaacattcagtccataccattagtcctttctatggtgattttataattaaaagaactataaaaagaatgaaaagtagtgaaaaatgtcctggattagaagtcaacagatttgagttgtatcacaac

SEQ ID NO: 1313 - DNA, 661 bp, Homo sapiens
  misc_feature [331]..[331]: Chromosome 2, SNP identification no. = rs1528843
  misc_feature [331]..[331]: allele = t, in linkage disequilibrium with rs1881569, respectively
  misc_feature [331]..[331]: n is a, t, c or g
ttttctccagtggattgttcccaatgtctctttgttaattcttcatcagtcatgtggtatacattatacatggttttgcaatgttaaactgtctctcctatagatattgggatttatttctagcaacaaaactagatttttgtttggaaaagataattgttgaaagagaaaaggaggttataattcaattgccttttcacagctggagagaaattaattttagccagtgttagaaaaattaagttctataacatttcttttgctttgaataaatgcagtattagctttggtggtgagtctcttgtgtacctgtttcattttaacaaatganagaaactgagagatatttaatgtctagctcaaggacacaaggagttgtgatacaactcaaatctgttgacttctaatccaggacatttttcactacttttcattctttttatagttcttttaattataaaatcaccatagaaaggactaatggtatggactgaatgtttgtgtttccccaaaactcagatgtcaaagccccaaattctcagtgtgatggtatttgcagataggactcctacaaaagtatttagggttatatgaggtcatgaggatagggccctcatgataggactacagctccttataagaagagacaccagaaaacttg

SEQ ID NO: 1314 - DNA, 661 bp, Homo sapiens
  misc_feature [331]..[331]: Chromosome 2, SNP identification no. = rs4662550
  misc_feature [331]..[331]: allele = a, in linkage disequilibrium with rs1881569, respectively
  misc_feature [331]..[331]: n is a, t, c or g
taattacacacatttccttcataccttcttaaagaatgttaactgggctaagtggttcccaagtccccagctaactgcagtcaagattcagttgcccaaagtgaatgagctaagtgagcattactcctagcagagggcgtctgaacaagtcttattcctacctggctgtatatagagtacaccagcctttaactaggtaataaatggacgactactctagaaacttattacatagttgagaaggcaaaaactaatatacatacacgcacaaatgtagcaaacgagggtctaagtgtaagacactatgctacgcataatataaagatgaacnagacaggcatggtcttgaattcaaaatgatcataatcttgtaagtagtagaggacataataataacaatgaaataataatttaaaatatatagggctcacataatgtggcaaggactacaccaagagacccatagcacattctgttttatccttttattaatacttacggggtaggtataattattctcaacttacaggagaacaaactaagttcacagagtttaagtaagcagttcaagtttataaagctacttagtaggacttgtctgtttgactccaaagagcattagctcctttctgtgacatcatatttccacatataggcagat

SEQ ID NO: 1315 - DNA, 661 bp, Homo sapiens
  misc_feature [331]..[331]: Chromosome 2, SNP identification no. = rs6430240
  misc_feature [331]..[331]: allele = g, in linkage disequilibrium with rs1881569, respectively
  misc_feature [331]..[331]: n is a, t, c or g
ctgtctcagtctcctgagtagctgggattacaggtgcaagccagcacgcccagctaaattttgtatttttagtagagatggggtttcgccatgttagccaggctggtctcgaactcccgacctcaagtgatccacccacccaggccttctgaagtgttgggattataggcgtgagccaccacacctggcctgttgactatatttatgatccatgattatctttataattattttgtcaaattccctccaaaaaacgcacttgtggttttgatgaggattaccattcacatgcagattttgagaacactgtcatctttacatatagtgtacntttctagccaagaaaagatatctttacactattgttatcttcttttatgcctctttattagtcaattttcacactgctatgaagaaataccagagactgggtaatttataaagaaaaagacgtttaatggactcatagttccacattgcaggagaggcctcacaaacgtggcagaaggcaaaagaggagcaaaggtgtatcttatggtggcaggcaagagagcatgtgcgggggaactgccctttataaaaccattagatctcatgagacttattcactatcatgataacagcacaggaaaaacctgcctccatgatcagttacctccca

SEQ ID NO: 1316 - DNA, 661 bp, Homo sapiens
  misc_feature [331]..[331]: Chromosome 2, SNP identification no. = rs730356
  misc_feature [331]..[331]: allele = t, in linkage disequilibrium with rs1881569, respectively
  misc_feature [331]..[331]: n is a, t, c or g
tctatctttaaaagttttacaaattacaattacttcactaatttctttattgacttaaaagcattaccaagatgaaggccatgaacgaaatgcttcatttatccctttcttattttaggactgggtttctgcattttcccttttcttcagagttaggtgactcatgcttttgtcctacccagtcttaactaggttttatagagtgctcactacagactacaccttttactgtgtgcacttatttcatattttcccttagtatttactccatggtattgtcatgtagatttgactatggatgatattctcagtaactgtggtaatagggttntcccctgtgtttcataatagtgtagtaagggggaacatgtgttgatttgatggaattattaatatttcattgtttatctagcactatatggtactgattaagagctaggactcaatgcaagaactgcctgggtaagaatcctgccatgctacttgctagctgttaagcactttaagttcatttagctaaatacataattggaacgtggtgagccacttgctatagtaggggaatgtatacagaaagtacaacaggagctaagtctagttgaatgcttacagtgcgaagatgatgctaggtattatgctgcacatttcacatatatcacca

SEQ ID NO: 1317 - DNA, 661 bp, Homo sapiens
  misc_feature [331]..[331]: Chromosome 2, SNP identification no. = rs7595052
  misc_feature [331]..[331]: allele = c, in linkage disequilibrium with rs1881569, respectively
  misc_feature [331]..[331]: n is a, t, c or g
aaacagataatgctgtgtagtctttcaaagctttttcctgcatattttttccttttaaaaaaaatgtactctataccaccttcctaccactgccagggtatcaagggctgccttaattgtgtagttctatctaggatagctcctatgaccatagatactcttcagttttctcatctctcccctaaaaaatatactcatcctctcttccacctccaggtgtccaaacctaatcttataaacaattttaaagtaaggtatagatgctcaagatggcagcagtttcatgacattcaggattgtttgtgcaaattgtaggcagtgaggtaacacnggaagtgggagggcaatgcgtaaagaactttgcatgtccctcaaataacaaaaccacatgggctaaactcagtggtccaagggtatccagtaaagtatcatcattgtaagggggagaaaattctccttaaaatcgatttgagtagtaaaacatcataaaatgagtaatctatagaaataattttagtattgaggatttgtattcctattgtagctattgtggctgtctatatataagtctatggttataagagaattgcatagaagctgagcagctacttcatataaaagtttattttaaaaaataatcattttctgactcataaacatc

SEQ ID NO: 1318 - DNA, 661 bp, Homo sapiens
  misc_feature [331]..[331]: Chromosome 2, SNP identification no. = rs721344
  misc_feature [331]..[331]: allele = g, in linkage disequilibrium with rs1881569, respectively
  misc_feature [331]..[331]: n is a, t, c or g
gaagagggaagaagctttcagataactaaaatagtgcagtctggtttaccccacttctaggtagttgaacaatttggcaaagttgcagctgaagagtagtcagttatagacatgcttctagaggaaatgaatcaaatgatagtgcaaagctgtgatgagtgtagttgcttttatatttcgttgatttcctgatgaaagaattgaaaacatattgttatacttttagggagctgaaatggatggtttgttaattaatatcttagaggagagaaaaatgaccttcataagttggtaagatgttagtctgaagccagagtgtgaaatcagaggngacacatacaaggtgagccttaagcacaaagaaactctcatgaattcagtttgagaaacaatcctttccactacacttttcatttgacaagcttgtactaaaacaatatttccaccttgatgagaaaactttaaagttctttagacaaactgaaatcatttcccacgttaatggcaaaatcaacaaagatagaggaaatatcagctttcaaaataacattaaaaaggttacggccaggcgcagtggttcacgcctgtaattccagtactctgagaggccgaggcaggtggatcacctgaggtcaggagttctagaccagcctggccaaca

SEQ ID NO: 1319 - DNA, 661 bp, Homo sapiens
  ACVR2
  misc_feature [331]..[331]: Chromosome 2, SNP identification no. = rs6747792
  misc_feature [331]..[331]: allele = t, in linkage disequilibrium with rs1881569, respectively
  misc_feature [331]..[331]: n is a, t, c or g
gttactacattagaaggactggctacacatgtggggaggggttgcctttcaaaagattttaaaaatgaatcaagtctttacatattgtaataaaagtaagcctatttataaagcttagagggaggagttttcgtagttatgattattaactttaaaatttttattttaaaggaaaagtttattgttcttcccatcttcataactatatgtgatatatcaagcttgctccaaggcattatttcaagaggaaggggcatggacaagttatgagatcttggcacatttctaaaactctgagattaacttttaaaatttgtaaaccaagatgtantaaatgaattgataactccacataacatggtagctggtccagagtagatcttacatattagtttttaatctatctttaagtcccatttaaaaggatatggtatgtaaaacattaaaaaatatagatttggttcttgggggatatttacatttgcaggttacttatcagtcagttaatgtgaaataatactctgactaaatgatacagccaaagaacatatcattatagagagccagatagctgccaataaatatctagaatattcagatatcgtggttccttacaaagagttctttaaggtctcactgttttagcatgcattaaaaagaa

SEQ ID NO: 1320 - DNA, 661 bp, Homo sapiens
  ACVR2
  misc_feature [331]..[331]: Chromosome 2, SNP identification no. = rs17742134
  misc_feature [331]..[331]: allele = c, in linkage disequilibrium with rs1881569, respectively
  misc_feature [331]..[331]: n is a, t, c or g
gacaagattaggttaaataggggaataacatatagggtaacagccattgaaaagcagtgtgccttttattttgttgctgtggagaaaacagaaagctgtggcctatgcttatgctctagttgaagggagaattctatatttaaatcaacagtaaatgttacaatatagtttatatttaaatgcaaaattgcatgagaaaccagatgaataccagctgagtaactaagaaatccaggacaaagaaaaatcaagaggcaaagtaggctggaaagcttcatgaaggaaatgggacttcagtgaaccttgaaagatgagttaaaatctatatagntggaaaagtggttgtggttgagggggtgagaagttgcggggaaggcaagggaaggggcatgaactaagatggggtgggacagtgagaacagtatgtttgcagtgtagggtttagaactgggttgggagggtcaattattgccaggttatttatgtaggtccttgaatgtcagagtaaaagagttggaaaggtgtttggggctgtatgaaggggtataggtgggtgtaggggtatatgggaggacgtatgaggaggggggatgtgaggtatgtgggggatgtgaaggtgttgtcaggtgtgtgagaaggtcttaatgtggtgtattctcta

SEQ ID NO: 1321 - DNA, 661 bp, Homo sapiens
  ACVR2
  misc_feature [331]..[331]: Chromosome 2, SNP identification no. = rs17742246
  misc_feature [331]..[331]: allele = t, in linkage disequilibrium with rs1881569, respectively
  misc_feature [331]..[331]: n is a, t, c or g
ttctctaaagcaaaataaaaaaattagtagagtgaaaaatgtctgacctataagaaaaccttctataatcgtaaatgcctgttagtcattgtgattagcataacattacagtaagtattggcctattttttcctctctttaatattctacttgatcatctttgttattaatttaataaaaaatgctacttataatctgaaataactctatgtatctgcccttttttgatttagtctttgggtgaagtataccttgccacaatgctgaatttaacatgccacttctgatttttcttgttagagtgtttgagtcttgagagcagatgtcacanttcgtacaattctttggcctgtctagtaccctgtgggctgcccggtatggagttggcactaaatattggagatctatgcattaacccttacgtcttcaggcttggtaacctgtaaagtcagtatgcagtaactctgaatatcatagataattgtcgtgagtcttttagttgcaagaactgtttaccctgatttatctcatttcattctcctgtttaatccactgactatatcgtgaagacaaccccatttttccttcttcccttttaatgagtttcctttttcattacttctcagtacagactgctttctgcatatgtgccattcttttc

SEQ ID NO: 1322 - DNA, 661 bp, Homo sapiens
  ACVR2
  misc_feature [331]..[331]: Chromosome 2, SNP identification no. = rs17742342
  misc_feature [331]..[331]: allele = a, in linkage disequilibrium with rs1881569, respectively
  misc_feature [331]..[331]: n is a, t, c or g
aagaaaaagtacttacattaagaaaaactattgagctttattagatactgagtactgtgctcttgcaagcatcttctacagcactagtgttcacctcttaaaagcattaaatgatactggcattgccttcattcccttcaatcctcagtttttggtcctctttcctcttcctaatttaaacagtctactcactgttattctattcttgtaatttgtctcacttttttggcttccatgacttcttgcttttcttttttattgtatagtataaatacaaaatgaataaaacagcttctaaaagaaaatttaaaatatgtatcaaaagtgagcnaaaaatttaaatttggtttaataaaacccattttctttatagcagtgttgctgttttttcttttaggtatttaccccaaaattatgccttgaggcatatgcctcaaggttgaggtatatgccataaattgcttatttatatttttaaaatgctaatattaaaggctaagatcttggactgtgtggcacctagggacataattctcatcagcctatcactgtcattcacttcatcagaattacaagggcttttaacacctgtagatatgtaagttcctcttgcgctttcattgcagttgtttcctcttcttaatttgtttttaaaaagcag

SEQ ID NO: 1323 - DNA, 661 bp, Homo sapiens
  ACVR2
  misc_feature [331]..[331]: Chromosome 2, SNP identification no. = rs7560502
  misc_feature [331]..[331]: allele = a, in linkage disequilibrium with rs1881569, respectively
  misc_feature [331]..[331]: n is a, t, c or g
gtagaaagaatgtatcaaggcctgagatagtttgatgttcaaagagtgtccacttgtctcatgtgagttgaggctaaagaagagccaaactgtggaaaggcctgtaagatttgttaaagattttgattttaaggccaagggtagtgggaagccattgaatggctttaagttggggtagtgacttgattttgtttgctttagtaaattgtctgacttgtgaatgaagaactgattagatgggataaaatggaagctgggagaccagttaaagaggctgttgctatagtccagggagagatgttggtgacttgcagtaataaccttccagtgntactcacattctttaaaaatctaacttagattttctaattctaatgcttatgccttaaacctcttccctgatgttcttttttgttgttgtttcaattctctataaattctcatttgacaagctagataacatggttttattgttttactgattaagagtgctagtataaatgggtgatatctttatgactagtatgaattcctttatagagggtttatttactttctaaggtatcattactacctaccatcaagaagctgttatggttgctgctctgtattatcaagcagtgatgactagtaagcattttttattttaaaaaaaattttt

SEQ ID NO: 1324 - DNA, 661 bp, Homo sapiens
  ACVR2
  misc_feature [331]..[331]: Chromosome 2, SNP identification no. = rs1424941
  misc_feature [331]..[331]: allele = c, in linkage disequilibrium with rs1881569, respectively
  misc_feature [331]..[331]: n is a, t, c or g
tgaaatatacaaacctttccatgtacatcatacagtccaatatatacttttattaatttagtcttatgaatgttttaaaatcacaaagcacataaattttacaaaataactttattcaaactttacctacatcttcaccaagtatcatctcgttactttctttttgagtgacctgtaagtatcatgaagtgaataatctttacttccatttaagttgttctgagaaacaatacttttagaagtcataataccatcattgaaaatgtttttccaagccacaaatatccattcacatgattctaagatggttggttttttaattgtgctacangtacatactatgatcttcacaatgtaactgcttacatatctcttttaaaagtgattgtaaaggcttttttcacaacaacttataagagtataactccctgcccacaaataatttctaatttgtttaaactttttactatacccttttatctattccctcaggaaacctctacagacttttaaaacaagtactgactgacatcatttcaagctcttctatattctccaaatactatacttctattcaaaataaaataattgagagagagctcaaaatatgaaaaactttttaaggactcaaatataagatgacttttttttagaaattttt

SEQ ID NO: 1325 - DNA, 661 bp, Homo sapiens
  ACVR2
  misc_feature [331]..[331]: Chromosome 2, SNP identification no. = rs3754541
  misc_feature [331]..[331]: allele = g, in linkage disequilibrium with rs1881569, respectively
  misc_feature [331]..[331]: n is a, t, c or g
cctcctataaaaaccttaacaaatttatttataaatgtggttcccagcttgttcctagcatatcacagatctggtaaactgaggaaactattataatactgaatactctctcttctaaattttgatactaaaacaaattttttaaaagttatcactgacagaaggtaaagtgtatcctatggccatttggagtaaactacatagactaggtactaaaactttttattttaaaacactttttagaaatgattcttaatgaacacaaacttagctactactgtttaaaagttaaaatactcaaggtgtacaaaataatgtttacctaattacngaacatggtattttacctttgggtttatttctctatatacacatcttacaaggattatgggaatccatgatctaatgctaacagattgctgcaagcgctgagaaataaatgtgttatataaataaagcttagagggaaggagttgttttggtcattaaattataggactttgccatttttttctatcaagttttaaccattaatccttctggtattaaagaagcaaagttacaccaagagattcagaaggctgaggtaatgtgatcttaagagttaaaagaaacacagtaaaaactacaattcagagatgtctcaagcaagtaaaaccaa

SEQ ID NO: 1326 - DNA, 661 bp, Homo sapiens
  ACVR2
  misc_feature [331]..[331]: Chromosome 2, SNP identification no. = rs1469211
  misc_feature [331]..[331]: allele = c, in linkage disequilibrium with rs1881569, respectively
  misc_feature [331]..[331]: n is a, t, c or g
acaaaactctggattcacaacatagaaaatgtagcttgactattatatactataactgtaggtaacggtgaaaatcgaatctgcacattaatatcaagctattaggtttgtaggtgagaaaaagatttgttgcttctccctgaggtggaaaaaaaactactgccaaatatcagaaaagaatgaagaatagttcattcattcattcattcattcatccaacaaattttactgagtaactagtctgtgccaggcactgactagccaggctctcatgaagcttgcagcagtgcaggacagaaggactaatcaacaattcacactaataaaaagnaattcagtaccttcaacatctgtaaagagaaacctgacttataatgacaggtaaagtctgagaagatttccctgtggagaacacccttgaaaaatggagtaagtactagggagaagcagttaaggtgaaaaacagagttgagacatcctagtttcctggcttatgcaaccaaatggacagtggttccatttactgagaaccaggtttgtgagagacaatcactacctgtgaatggtaagtgcttggagacatataaatggagatatttagtaaacacatacacagatctggaatacaaaaaatctttccagaaaatagagatttttgttt

SEQ ID NO: 1327 - DNA, 661 bp, Homo sapiens
  ACVR2
  misc_feature [331]..[331]: Chromosome 2, SNP identification no. = rs17743157
  misc_feature [331]..[331]: allele = a, in linkage disequilibrium with rs1881569, respectively
  misc_feature [331]..[331]: n is a, t, c or g
ctttgatctgtcactaacttgcagggtaattatcaccaaaatgtaattgctagttttcctcaatttttctacttttagagtcagtgtgaaagtaccattaatgaagtaggaaattatgtttttggtaattggtttcatcattgtgaaatgtaagtggttcttttacttctcttatcttgacctaaaggacaacaataatctagaggaatattctacatattagttgttattttatgttgttattttgtgttctgctagtcccatgatataacaactctatagtcaggatattttaacttttaaaatattttctagaaccttagattttcanctagtctttaaaaaaaaaaaaaaacaaacttgtcttatagattggtggaagttgactattcttgtaacaaaagtttaaagctctggtatttccttctggtcaaatgtttattaatgtgaaatggaaggaaatttgaaccatttgaaccattccagaaagattgtttcttggatattatttttccctgaaagggaaactcacaacctcttataggtaaaaagaaaagtctccttatacatatggcctttgtcaagaacataagtttctttttttccctctttttttagggttcactatcagactttcttaaggctaatgtggtctcttgga

SEQ ID NO: 1328 - DNA, 661 bp, Homo sapiens
  misc_feature [331]..[331]: Chromosome 2, SNP identification no. = rs17692648
  misc_feature [331]..[331]: allele = a, in linkage disequilibrium with rs1881569, respectively
  misc_feature [331]..[331]: n is a, t, c or g
actcgtcttgtattttgcctttctgatacccatcagaactgctgctgctctaacttatactctttaccttgcccagatctccgcgtaaggaatgctttatgatcaacttgccataggactgatggattaaccagtgttcggctttatttgaagtctatgccctgcacagctcttgtatgtattttagatgctagaagtttttttagcatgtgatgtgtgattcttgtttgaattctaggtaccttgtgaattccagaaaaagagactgtgcttcacgattgttagtcccatgaacttgcactatctatctttcatggtgatgttttgaaantacaatcaggaaaaaacccaacacctttggaatttaaaatagaatcatatcatgaaatttaaaaagaatctcttctgttgcatttcctcacccctaagtaacagctacatttaagtaaaatgcaggtggtaggggaaaaaaaaccatggcgagatggtggtttagtggaataaactgattactggtttttttgtttttttttttttttttaaagaaagaagcttcatcacagatactttccagtttctcttttatacttttttgaaagattactttttaggaacatttggtatgatatgcataaaattatttatccatttatgggcaaaa

SEQ ID NO: 1329 - DNA, 661 bp, Homo sapiens
  ORC4L
  misc_feature [331]..[331]: Chromosome 2, SNP identification no. = rs17692696
  misc_feature [331]..[331]: allele = a, in linkage disequilibrium with rs1881569, respectively
  misc_feature [331]..[331]: n is a, t, c or g
gggaatatggaaaggccaacaagcagcactgttcctccccacaaaaatgccttgggaatataataggcgtacacttcatttgtgtaacttttcctaatgtatttttttttaatttgctttataacggtttcatgtttacctcaattggtacttagtcttaaaatctttctttatacttggttattgatggatcttctgcagctcttatgtagccaatgagacagatgagggctgtcagcttttaagtgacatcttaagctaataagaaattggaatcctcaagtcatttcatgaggctgttaccctttaagacaaataatactttcctcanatagttcagaaaatttttaaaaggatcacttagagcataagtgtaaaattcttgcttctagtatataatagtgatgttaccatgtcaagtattttggtgaaatatcccctaaaaatgtgtagactacggcacagattgagtatgcaagccttagcttgaatgagactgctgagaagtaaatgacagggatctgaatacttagcaggcttaactttttgcagggaaggaaaggctatgtatgcaaaagaataggttgtaactactgaagagctactttatgctcagaaaccttttattccactttgtatccaagatttcattaaaacattg

SEQ ID NO: 1330 - DNA, 661 bp, Homo sapiens
  ORC4L
  misc_feature [331]..[331]: Chromosome 2, SNP identification no. = rs3820715
  misc_feature [331]..[331]: allele = g, in linkage disequilibrium with rs1881569, respectively
  misc_feature [331]..[331]: n is a, t, c or g
aactgaccactgatttcccaacagattgtctctttgaggatttgttatattacggtaaattatggataacacctcttggtctgcctgccttggaaatagcataacaacatcacaatatgtgaaagttttaaaacctttatgctatttttatgttagatctctcaactggagagtgaataagtgtgtttcttttctcctttatatctcctcaaatttaaagttggctgtttcttttagttatgaactctgaatgaagtaaaagttaataattttaatgaaacaaatattttaatggggcttctacccacaatctggagcacctggataatgnatctactacactaagtttcatcaagaatatttaatagtatccaaaaatgttttggctatattccaagtaaacatagccaaacatgatatgatatacataaattcttcagtatactcttgaatagacaaacactgttatagtatctaatgtttcaaaaaagccttttctttttgtttctcatttaaattcatggttatttctttaccagtacaaattagagacttgcaagaccccattgtgtttgaagacacaaagtagaatccatttctaggtctcaaactatatttagaatatggcaattctacaaaactaccttcaaataaatttaac

SEQ ID NO: 1331 - DNA, 661 bp, Homo sapiens
  SCN2A2
  misc_feature [331]..[331]: Chromosome 2, SNP identification no. = rs6731083
  misc_feature [331]..[331]: allele = c, in linkage disequilibrium with rs2082366, respectively
  misc_feature [331]..[331]: n is a, t, c or g
gaattgaacccttacttaataacatatataaaaattaagataggtcataggcctaaaggtagagctaaaactatgaactgttagaaggaaatttagaagtaaatcttcatgacctattattaagcaatgatttcttagatatgataccaaaagcacacacaatagcaataagaaaaaaaaggttcattggactttatcaaaattagaaactttcatactgcaaacaatatcatcaagtaaaaagacaacttaaagaatggaagaagacatttgcaacccagatatctgatcatgatttgtatctaatatatgtaaaggattattataactncacaacaaataaaatagataactcactaaaaatgatcaaaatatttgaatagacatattgaaaaaggagttagacaaaaggccaataagcacataaaagatggtcagcgtcactggctaattttaggggaaaggcaaatcaaaactaaaatgagataccacttcacacacactaagatggctataatcagaaagaaagccaataccattttttatcaaggatgtggaaaaattagaatggttatgctttactttgagaatataaaatgatgcagtcactttggataataatttagctgttccccaaaaagtttggggtagagttaccaca

SEQ ID NO: 1332 - DNA, 661 bp, Homo sapiens
  misc_feature [331]..[331]: Chromosome 2, SNP identification no. = rs2082366
  misc_feature [331]..[331]: allele = g, c
  misc_feature [331]..[331]: n is a, t, c or g
cactaccctcttatactcccctccacttgaatgtgggcagaatgtgtgacttgcttccagctgatagaatacgacaaaagtgaagggattttgcaaatgtaattaaggtgctgaaacagtttgattttgagtcagtctaaaggagattatactggatagcctgaccaaatcaaataagccttttaaaagagggtttaggtcttccctgagctcaaagacttgatgcagtgaaactctcctgggtcttgaagaaactaactgccatgggttctaaagctgatggaaacgaattttaccatcagctgcttaaacttggaagagaactccaagnttcagatgagcttccagtcctggctgacattgtgattgcagccttgtgagactgagaagagggcccgggtaagctgtacccagactcctgacccaaagaaactgtaggataataaatactggatgtgttgtctgggcctctgcatgtgtggttatttaacaattgaaaaccagtatgctataataaataacaatatctgaagattatgtcataaagatgacaaaaggatatccatttgtttgtttttaaaatgaataaactgagacaccttagaaaatatatacagtatatgatttcttatattgactacaaagtaggttctggtataca

SEQ ID NO: 1333 - DNA, 661 bp, Homo sapiens
  misc_feature [331]..[331]: Chromosome 2, SNP identification no. = rs1991775
  misc_feature [331]..[331]: allele = g, in linkage disequilibrium with rs2082366, respectively
  misc_feature [331]..[331]: n is a, t, c or g
ttatttcttgttcccaaatcctcaaaaaagttcaaacagttgtaaagacacttggcaaaaatgacaatttttttttccctaggatagtttaacctgagtggaaatgttggctgttcacatttttggagagggaaaaagcttcaggagtactttgacctgctgctttgtcaaaaccattgagtgagttaagaaattgctagaataaaaaggagttgagtcagactcacatgtgcggcacatttcagtgggcacacgcttgagtcacagtgcataggttcaaatcctggctctgccactcaattctgtgcagttaagcaagttacccaatctnatgtgcctcagtttctccaattgaaatgtagaaattattatacttatttttttatgggagtggtaaatgaggcaaattacttggaagagtgtctgacagtgaaattcaagtttgcaataataataataaatataacaaaagtattgttatatattggaatataatttaatatgtaataataatactattatttctaggtgaggagtagagataattgtgaaagaagaatctcaaagaatatagtggagagagaactcataggggacttattctatgaaagcttacagtggtaaccagtgattctcctcagaaagataaaagattatagac

SEQ ID NO: 1334 - DNA, 661 bp, Homo sapiens
  misc_feature [331]..[331]: Chromosome 2, SNP identification no. = rs16850592
  misc_feature [331]..[331]: allele = t, in linkage disequilibrium with rs2082366, respectively
  misc_feature [331]..[331]: n is a, t, c or g
ctctaacatattatatctccactttcccttccagccacttcatcacttcactgttgcctgactttggtttcgggaaggcatctctggagccacatggtggaacatgcctgtggacaggagtagcttcagagactggggaccctgccagagcaatgtggactcaacaaacagtactgggagcatgaaaagagagggtgtgagcatcaagtatgctcacttgactgccaaatccccagctgccttcctgtccttttcctgtcctgctcataaaaagcatagacaaacaggaaggggaatacgacgttgtaacaaccatctggaggttgtatgnaagagaaggtagtaaaatccacattttataatgacctttaattgatccaacctggatatttcttatccaaaagtatgggccctgtgggtgaggctgatgagcatattttacacagtgttatgaactggggttttagaattcaaagtagcatcggccagctttcatcaatttggaccctgtgacatacgaatagagtgagtatgtgtagacccccagaaatagggtctaaacaatttttttccagcatacatctcaagaatgaaggttgtcttagattggctttattgactctactgcactgcagaccaagcagaaataagcaggcaaaga

SEQ ID NO: 1335 - DNA, 661 bp, Homo sapiens
  misc_feature [331]..[331]: Chromosome 2, SNP identification no. = rs16850602
  misc_feature [331]..[331]: allele = a, in linkage disequilibrium with rs2082366, respectively
  misc_feature [331]..[331]: n is a, t, c or g
caaaagattagctaaaggaaagactatggatggatacaggatttagagttgtgaaaactggatgtctttacttgttgcgtttaaaattttaataataagcaattctgtttagatattaactttacatttttttcttgtaagtgaaaacaaaagaatacagatgaacaaacagacaacaactctctacattgaggttctgattttgtacaaaagtattgaaagatgaagggattaaaattcaatattcaagaaattttggagtttaaaaaatggtgttctctttggaaagttatctacttaggtaattgttaaaactacttaagtggaaacngaaagctgcatcattgtaattgcaaaagatcctctccttttatgacttttaaatatcagtgtttgtgaatattacatgcatatgtctagtcaggcaatatgatctctgttagcaggctgcagctataaattcaccaatgaaaatttgcagactccagcagaatgctcacattaatgagtcctttgggataacatttgcttgaactatgtttatctaaaccaaagtgttaaaatcaattaacttataaataataatgaattaagtttcctatttcagccacagttattctctattagctgaaatgctccttctctcgcgctctctctctct

SEQ ID NO: 1336 - DNA, 661 bp, Homo sapiens
  misc_feature [331]..[331]: Chromosome 2, SNP identification no. = rs12475216
  misc_feature [331]..[331]: allele = g, in linkage disequilibrium with rs2082366, respectively
  misc_feature [331]..[331]: n is a, t, c or g
tcttataaaaatgtgactatagtttgtgttgttgtattattatttttgtaataattataataatattttttgaagatctgaacttcaatatttgataatacaataataacatttgaatagctcatctctatagagtaattcattacttcaaagtacaaaatcggaggaagctgcatggcatattgaaactcctgtgtttatctgcactaatcacttcctggtaccattgtgctcaatgttacatgaaatactctgacataaaaacaaaaatgtacttgtaataataaacatatttgcaaaattataataaaaatgtactgcaacccacctntgtttttgtcctttgcaatttgagttttatcaaccctataaaaggacccatgaacactctactactgttatattataatgtcatatacatgtctcaaatggctattagtttgtttttcaggtatactctcttagacctctaaataattcatgttgagttaaaggtttgccaaaaattcttcaatctcctagatttctttgtcactggtttagttcaaactgcttaattatctccgaaagcaaacagcaaggccagggactgctttgcctattttttgccactgttgctttttgtgcgatttatacttctgcatccggtgcttctgaaaaa

SEQ ID NO: 1337 - DNA, 661 bp, Homo sapiens
  misc_feature [331]..[331]: Chromosome 2, SNP identification no. = rs12619374
  misc_feature [331]..[331]: allele = c, in linkage disequilibrium with rs2082366, respectively
  misc_feature [331]..[331]: n is a, t, c or g
acctcactgtggctttgaattgcatttccctgatcattagtgacactgagcatttttccttatgtttgttagccatttttatatcttctttcgagaactgtctatccatgtccttagtccaccttttgatgggattgttttgtttctttcttgctgatttgagttccttgtaaattctggatattagtactctgttggatgcatagtttgagaagattttctcccactctgtgggttgtctatttactctgctgattatttcttttgctgcacagaagctttttcatttaattaagtcccatctattcatatttgttttcattgcatttgntttttggttcttggtcataaagtctttgcctaagccaatgtatagaaggttttcttctgatgttatcttctaggatttatatggtctcaggtctcagatttaagtctttgatccatcttgagttgatttttgtataacgtgagagatgaaggtccagttttataattctacaggtggcttgccaattatctcagcacaatttgttgaataggatgtcctttccccattttatgtttttgtttgctttgttgaagatcagttggctgtaagtatttggctttatttctaggttctctattctgttccatcagtctatgtgctttttttttt

SEQ ID NO: 1338 - DNA, 661 bp, Homo sapiens
  misc_feature [331]..[331]: Chromosome 2, SNP identification no. = rs1816393
  misc_feature [331]..[331]: allele = a, in linkage disequilibrium with rs2082366, respectively
  misc_feature [331]..[331]: n is a, t, c or g
tgtcttaaagaaatttttaaaaatacagcatatggatgaagaagtctccagagaaatagatatcataaagaaaagacgattacaacttctggaaatgaaagacacacttagagaaaagcaaaatacactagatagttttaacaatagaagtttgaacaagtagaagaaaggacttcagaattcaaagacaaggcttttggattaacccattcagacaaatacaaagaaaaaagaattaaaaaaatgaactaagcctctaaataatttgggattatgttaagtgaccaaacataagaataattagtactcctgaggaagaagaaaactcagncaagagaaagaaataaagagcatccaaatcagtaaagaggaagtcaaatggttgctgttcactgatgatatgattgtatacctagaaaaccctaaagactcacccaaaaagctcctagatctgataaatgaattcagtaaagttttaggatacaaaatcaatgcacacaaatcagtagcactgctacacatcaacagcgaccaagctgagaatcaaatcaagaacccaaccccttttacaatagctgcaaaaaaagaaataaagtacttaggaatatacctaaacaaggaggtgaaagacctctacaaggaaaactacaaaacactagtg

SEQ ID NO: 1339 - DNA, 661 bp, Homo sapiens
  misc_feature [331]..[331]: Chromosome 2, SNP identification no. = rs2390259
  misc_feature [331]..[331]: allele = t, in linkage disequilibrium with rs2082366, respectively
  misc_feature [331]..[331]: n is a, t, c or g
tttatttctttctcttgtctgagttttcttcttcctcaggagtactaattattcttatgtttggtcacttaacataatcccaaattatttagaggcttagttcatttttttaattcttttttctttgtatttgtctgaatgggttaatccaaaagccttgtctttgaattctgaagtcctttcttctacttgttcaaacttctattgttaaaactatctagtgtattttgcttttctctaagtgtgtctttcatttccagaagttgtaatcgtcttttctttatgatatctatttctctggagacttcttcatccatatgctgtatttttnaaaatttctttaagacaattttcatctttttctggtgtctccttaagtagcttaataatcaactttctgaattctttttctggcaattcagagatttcttcttggtttggatccattgctggagagctagagtgagtcttgaagaaccttgggtatcttacagaatcttactttgctatgtgaccaaaattacttttctggttccttctcatttgggtatactgtttcagtggaaagatctggaactcaagggctgctgttcaagttcttttgtaccatggggtgatgccttgatgctgtgctcttccccttcctctagggatagggctt

SEQ ID NO: 1340 - DNA, 661 bp, Homo sapiens
  misc_feature [331]..[331]: Chromosome 2, SNP identification no. = rs2163709
  misc_feature [331]..[331]: allele = a, in linkage disequilibrium with rs2082366, respectively
  misc_feature [331]..[331]: n is a, t, c or g
gaatgacacagccaccaacaacttgcactacactcctgaaaaagccacagacactcaatgccagccaatgagagcagctgtggcagctaaaccctgtaaagccacaggggcagggcttcccaaggccttgggaacccaccccttgcatcagtgtggcctggatgtgagacatggactcaaaggagattattttggagcttttagatttaatgactgctctgctgggtttcagacttgcatggggcctggatcccctttgttttggttgatttctcctttttggagcagaagtacttacccaatgctaatacgcttattgtatcttgtaggnaactaacttcttttttattttacaggctcataggtagaagggattagccttgtctcagatgagactttgaactttggacttttgagttaatgctggaattagttaagatttggggggactgctgggaaggcatgattgtattttgcaatatgagaagagcaagagatttggaggggccatcagcaaaatgacatggtttgcatctgtgtccctaccatatctcatgtcaaattgtaatccccagtgttggaggtggggcctggtgggaggggcctggtgggaatcataatggtggagttcccatgaatgaattagtaccatgcccttggg

SEQ ID NO: 1341 - DNA, 661 bp, Homo sapiens
  misc_feature [331]..[331]: Chromosome 2, SNP identification no. = rs7573855
  misc_feature [331]..[331]: allele = c, in linkage disequilibrium with rs2082366, respectively
  misc_feature [331]..[331]: n is a, t, c or g
aattggagctgtagcagctgggatgcagtgagcattgtcctcagactgtgcagggcatcaggaccctgggcctgtcccacaaaaccattcttctcttctagacctccgggctgatgatgggaggggctgccaggaaggcctctgaaatgccttggaggccatttcctttctgttgtcttagctatcagtacttggcttccttttagttatgcaaatttctgcagcctgcttgaatttctccacagaaaatcggcttttcttttctaccacatggccgggctgcaaattttccaaacttttattctctgcttcttttttaaatataagttgncagtttcaagacatttctttgctcacacatatgagataaggctgttagaagcaggcaggctacatctcgaacacttcactgctttcatatttcttccaccacataccctaaatcaccactctcaagtttaaagttccacagatccctagaacagggacaccatgcacccaacctctttgctaatgcataacaaaagtgacctttgctccaattcccaataagtttctcatttccatctgagacctcctcagcctggacttcattgtatataccactataagcattttggtcacaataatttaacaagcctctaggaagttccaaatttta

SEQ ID NO: 1342 - DNA, 661 bp, Homo sapiens
  misc_feature [331]..[331]: Chromosome 2, SNP identification no. = rs1984632
  misc_feature [331]..[331]: allele = t, in linkage disequilibrium with rs2082366, respectively
  misc_feature [331]..[331]: n is a, t, c or g
ttcctgcaatgaaaacttcccagacttacaaacctggcatccccgcatgagctccctgatctaatagatgtattctaatacagcagttcccaaattttgtttccaagacaatcttaaacttctggaaaatcccaaagagcctttgtttacatggactatatttactgtatcagaaattaaaactgagataattgtaaaatatttattttaaaatctatttaaaataacaacaatgaactgaatatgtgttggtataaataattttctgtgtgtaaaaaaaaaaaagtcgctgtttttcaaaacaagtgagaaaaatggcattggtttttanttttgcaaatctctttaatgtcagccttaatagaagacagttggattctcataccagtttctggatttaaagtgttgaaatatgttgttctagttgaattatattaataaaaattatctcacattgatatgtagttgaaaaagtgagaaatatgttaataacctttgtagattattgtgaatattattttattactattacaaaaattgacaagggtagttttttttaaaggttagctgcaatgtgaaatttgaaattatatcaatgaaatctttgcactctgctacattaaaatcttttcgtctctcttgcactttgaacacatatttt

SEQ ID NO: 1343 - DNA, 661 bp, Homo sapiens
  misc_feature [331]..[331]: Chromosome 2, SNP identification no. = rs11893357
  misc_feature [331]..[331]: allele = a, in linkage disequilibrium with rs2082366, respectively
  misc_feature [331]..[331]: n is a, t, c or g
ctagtaccatgctgatttggttactacagccttgtagtatcgtttaaagtcaggcaatgtaatacctctggttttgttctttttgcttaggattgctttggctatttgggctttttcgtggctccatgtgaattttagaatacttttttgtaactctgtgaaagatgacattggtaatttgataggaattccattgaatctgtagattgctttgggcagaacagtcattttaatgacattgattcttctaatctatgaatatggagtgtttttccatttgtttgtgttatctatgatttcttttatcagttattttttctggttcttttanataatgaatatttatgggtaaaataatatgaagcccatagtgtgctttaatataatggggtagaagtggatagggtctgaaggaaacaacaacaatcatgggttattactgaaacttggtgaagtacacatggaaattattgtatctattctttctaaatttgtatttgtttaaaattatcattaataaacagttaaaatgtaatgtcctttaccttataaaaatacatatttctgagacagaaacttcatgatttttatttcgcgggtgtgaggtaagaaccaggagtttgattttagctggggtcccaaatgtttctcatgtacatta

SEQ ID NO: 1344 - DNA, 661 bp, Homo sapiens
  misc_feature [331]..[331]: Chromosome 2, SNP identification no. = rs4667823
  misc_feature [331]..[331]: allele = t, in linkage disequilibrium with rs2082366, respectively
  misc_feature [331]..[331]: n is a, t, c or g
aagtcaatttgaggtctgctgtgtaccagagctacaccataaaccacctgctgctttccctcactttaggaaagagaaaaactaaaaaccattcttcagaatttaatgaaacatagaaatacctataaactaatcaagagtgcttttaaaaattatattaggattcttagtttttaaggccattttggtggttgtgaaggagaaaattcacctgaataatttttacttaccaagtccgtcagaacacctgcttccatttcgaatatttgaattttatagacatctttggccaaacctcacactgtataccatggaaaaattttccatgttntttttgctgttttgcaaataaaactcttctgtttgcaatgtgcagctggatataccatttattttcttcttgtatggattaaacagaacaaataagcttaaatatttcatttatacaatagcattcttaattatgttgtcatttgttttatttccaaaaattcttatttaaatatatttttatacattctttgaagtaaagtatttgacctcacttttgtctttaatataaataaatttaaatggctacaatttcttgctattatcatcccaaatttgttacataattatctatttattgaaaaggaaagagtgcctacccataatactg

SEQ ID NO: 1345 - DNA, 661 bp, Homo sapiens
  misc_feature [331]..[331]: Chromosome 2, SNP identification no. = rs4667825
  misc_feature [331]..[331]: allele = c, in linkage disequilibrium with rs2082366, respectively
  misc_feature [331]..[331]: n is a, t, c or g
aataatttttacttaccaagtccgtcagaacacctgcttccatttcgaatatttgaattttatagacatctttggccaaacctcacactgtataccatggaaaaattttccatgttttttttgctgttttgcaaataaaactcttctgtttgcaatgtgcagctggatataccatttattttcttcttgtatggattaaacagaacaaataagcttaaatatttcatttatacaatagcattcttaattatgttgtcatttgttttatttccaaaaattcttatttaaatatatttttatacattctttgaagtaaagtatttgacctcanttttgtctttaatataaataaatttaaatggctacaatttcttgctattatcatcccaaatttgttacataattatctatttattgaaaaggaaagagtgcctacccataatactgtctgggagaaatagctccataggggttatggctcagatcgacttggagataatgaaatgacgaagcagctttcatttctatcattcactctgggatgactacagaagaacaggatgtgtagtcctgtagtacccatcataaagatttacacaaattgttcctttcttccagagtgctgttactttcctcagtgttacatactgtcattaaattc

SEQ ID NO: 1346 - DNA, 661 bp, Homo sapiens
  misc_feature [331]..[331]: Chromosome 2, SNP identification no. = rs7601930
  misc_feature [331]..[331]: allele = t, in linkage disequilibrium with rs2082366, respectively
  misc_feature [331]..[331]: n is a, t, c or g
tctgggatgactacagaagaacaggatgtgtagtcctgtagtacccatcataaagatttacacaaattgttcctttcttccagagtgctgttactttcctcagtgttacatactgtcattaaattctccaccctcactattacagcttccattaccacccacatggcactacggctttatccatgggtggcagatgttatcaccatatgtcatccgatcaattttccattcaagggtaatgtaatgtttgggggaaagccaactcacactttagtaaaggctgtctctgtagtcttcaccagccataaatgcaagcatcctttcaacttantggctctgttacctaaccaaaaatcagcagggatcttagaggctcattgcatgtttccatgttagttgggctctctctcactatcacctgccaaattgtttcctattaaggagtttggcattattttgttttcctctacttttatttatctcagaatattctggacagagcatcattagatagacgagtaccaaaggaaagtatcagtctcaggtctggtgtatgaggctgttactgcttgtttatttctaagatctatagctcatctccttgctccaggagctggcattactcagagagtttgaaattcttattcaatataattctaag

SEQ ID NO: 1347 - DNA, 661 bp, Homo sapiens
  misc_feature [331]..[331]: Chromosome 2, SNP identification no. = rs12470466
  misc_feature [331]..[331]: allele = t, in linkage disequilibrium with rs2082366, respectively
  misc_feature [331]..[331]: n is a, t, c or g
atcacctgccaaattgtttcctattaaggagtttggcattattttgttttcctctacttttatttatctcagaatattctggacagagcatcattagatagacgagtaccaaaggaaagtatcagtctcaggtctggtgtatgaggctgttactgcttgtttatttctaagatctatagctcatctccttgctccaggagctggcattactcagagagtttgaaattcttattcaatataattctaagaggcagccaaagtaaagacaatatcaatttatctgtacagttctgatttactcacgtgctctctctctctctctcaatcctcnttgctttcttcttttctctccatttccttccaactccattcttactcttgctgtggatttgtatctttttccagtagatgttattgaacatctattatttgccagtccctaccttatgctctgcatatttaagtattaaataaagtataattcatgtatgatttccaaaccttgaagataaaactgaaattattttgaaactagtctagtctaatcactgcatttcctatccatgttgggcaattaaaatgtggaatgttagggagatgagaaagtagaaacaattatgtatttttattgtttatgagattgcctacgtttcaagtgctc

SEQ ID NO: 1348 - DNA, 661 bp, Homo sapiens
  misc_feature [331]..[331]: Chromosome 2, SNP identification no. = rs4542865
  misc_feature [331]..[331]: allele = t, in linkage disequilibrium with rs2082366, respectively
  misc_feature [331]..[331]: n is a, t, c or g
ccttcagcttatttttttagcaaatttgaagctcttaacttttattactttggtctcttacaagagtgttctcgattctgagctacataatttttgattcatctgcactaccactccttaagatcttttcaattccaatcacttgacaaatttctgactttcaaaaatataggttttattaagatagtctctttggacagttaggtatgaaaaatttttatttaatcatttgatctgtgccaagcctcatctatttccttagtggtcattatattatcccaaaaccttacctctacagctcaatggaagaaacttcacttaattaatacanaacatattgaaatcccttcctattacaacctgctctaattttggactttcttaaaagttgtccattatgttactctttaggcttatttctattttcagcttttaaagaatattttattatttaatttagggtattttaacctttagaaattttgtaatatttctcttgttatgaaagatttttaaagtcactcagacacactctcagacggtctattacctttgcttcaggcaaacaaggcaacatgcagctgagctcccgtggccatcaaaggcctgactgtcactgctccttaggaaagcatctccctctatcaatatcagcctgtga

SEQ ID NO: 1349 - DNA, 661 bp, Homo sapiens
  misc_feature [331]..[331]: Chromosome 2, SNP identification no. = rs10497261
  misc_feature [331]..[331]: allele = g, in linkage disequilibrium with rs2082366, respectively
  misc_feature [331]..[331]: n is a, t, c or g
tcaaaaatgtttaattcaagcttgttactaggaatcgcaggaaggatgagaaaacctcggtaaattccacaggtcctgagaaaatggagccttctgtgaatatacaatataaaatttcatgtgatggcttttaatattgacaatacagtaaaaggcttaggaaaactatttttgcaggttgtagactcttttagcattaatttagaatgaatgatttgtgtgcatttaagccctgttatttaacttactcctcttgataaatctcatgttgttcaatatttgcattattttattcagcaaactttaagcttatgtgataattaaacaatgntttgtctctacttgttaacttacatggagccatttttattttaaagcacagaaacctaattttgaaagattaaacattgctgtaaaaaatagcatcttaacagtcatgtttcatgggtagtttaatttatcagtcaaacacatctagataagaattccatcagagcatttatattgttgataatatctctaggcaatttttttttagcaactttactaggtgcttgtatctcctaatatggtcctttatattgccttagggaaaaaagggacaagttctaagtatgtagaataaataacacacttgcagtaaaaacatacaaaaaaactg

SEQ ID NO: 1350 - DNA, 661 bp, Homo sapiens
  misc_feature [331]..[331]: Chromosome 2, SNP identification no. = rs1464087
  misc_feature [331]..[331]: allele = g, in linkage disequilibrium with rs2082366, respectively
  misc_feature [331]..[331]: n is a, t, c or g
aactctccacttcagacctgcccctgatatccagtgagcctagtggctttgacctactatcacagtctccttgacttttttagtttgctgtcactgtcaaaatgcatttcagctttgtattttagcaagtgtggatacagttagttgctgtcatgttgtggatatatcacaatatatttaataatgaaacaaatagtttcctaaacaggagccctgaatgtatttacaaagattttcatttgcttttctctcctcaggttaggctagccatgaaaaatcaatatttgtcatcagtcattaccaggtaatactggttgtgatggtgtcagcnttttaaagcagaaagattctggaaaagggtttcaaaagtgatttaaaaaaaaaagacgtctttgttctgtctaattaaaattcccttctcgttgctcatgaaactcatacttaaaattttaaatgatttgccccctgtgcatccaaatcaataagggccccaaggggctgctctcatgctgcccactgaacttacctagagctgagtgttaaatggaaaactgatcttggggatgccattataatccattttcagagatcttcccacaacatacaggcagggccaaggagagaagccgtgggcctgtcctgtgctccctgccagagcttc

SEQ ID NO: 1351 - DNA, 661 bp, Homo sapiens
  misc_feature [331]..[331]: Chromosome 2, SNP identification no. = rs4435467
  misc_feature [331]..[331]: allele = a, in linkage disequilibrium with rs2082366, respectively
  misc_feature [331]..[331]: n is a, t, c or g
tcagtgtgacaatgtccatgtcacctaaatgtcattaagccatgcaaggttttgtcttgcagactttttattgtccaaacgctatctgtgctctcctacattaacgggattttatctgcatgtagttcccatttcatgcttccctgctctgtttcattataatactgcttggtttctgatacacacacacagattatcatatactaaatcaatgggttaattgtaaattaatgtaattaactgtaattgttatattaatatataatacaagtgttaattaatgtttgtgtaagaaaatatagtagtatatatttaaccaatctgagtgctntcatacatccactcttagtcaatgaatccccattctcctgagttaaatttgttcaacaacatttgattaaagttaaaattgtttggcaatatttttgtgctgctctgggctcactttctgccatttgtggtctgttctggtgaacaattctaagccgtaatgcctggtaagtgacaatgctgcataagctacaaagaaaacaagtgtgcatgcttgcttgctgtgtgtcactggggtttactatgcctcagggtaaaggtaagcagataatatgggactggtagaagtcctttgatataaatatcaccacaactaggtaaaaataaccaa

SEQ ID NO: 1352 - DNA, 661 bp, Homo sapiens
  misc_feature [331]..[331]: Chromosome 2, SNP identification no. = rs4625921
  misc_feature [331]..[331]: allele = t, in linkage disequilibrium with rs2082366, respectively
  misc_feature [331]..[331]: n is a, t, c or g
tctgtgctctcctacattaacgggattttatctgcatgtagttcccatttcatgcttccctgctctgtttcattataatactgcttggtttctgatacacacacacagattatcatatactaaatcaatgggttaattgtaaattaatgtaattaactgtaattgttatattaatatataatacaagtgttaattaatgtttgtgtaagaaaatatagtagtatatatttaaccaatctgagtgctatcatacatccactcttagtcaatgaatccccattctcctgagttaaatttgttcaacaacatttgattaaagttaaaattgttnggcaatatttttgtgctgctctgggctcactttctgccatttgtggtctgttctggtgaacaattctaagccgtaatgcctggtaagtgacaatgctgcataagctacaaagaaaacaagtgtgcatgcttgcttgctgtgtgtcactggggtttactatgcctcagggtaaaggtaagcagataatatgggactggtagaagtcctttgatataaatatcaccacaactaggtaaaaataaccaaaagaataacgaatgaaatatcctgatgaatttaaactgaaggaaaaggagtgcttaccaatgtactgtaaacgtgttcatttac

SEQ ID NO: 1353 - DNA, 661 bp, Homo sapiens
  misc_feature [331]..[331]: Chromosome 2, SNP identification no. = rs4332939
  misc_feature [331]..[331]: allele = c, in linkage disequilibrium with rs2082366, respectively
  misc_feature [331]..[331]: n is a, t, c or g
cacacacagattatcatatactaaatcaatgggttaattgtaaattaatgtaattaactgtaattgttatattaatatataatacaagtgttaattaatgtttgtgtaagaaaatatagtagtatatatttaaccaatctgagtgctatcatacatccactcttagtcaatgaatccccattctcctgagttaaatttgttcaacaacatttgattaaagttaaaattgtttggcaatatttttgtgctgctctgggctcactttctgccatttgtggtctgttctggtgaacaattctaagccgtaatgcctggtaagtgacaatgctgnataagctacaaagaaaacaagtgtgcatgcttgcttgctgtgtgtcactggggtttactatgcctcagggtaaaggtaagcagataatatgggactggtagaagtcctttgatataaatatcaccacaactaggtaaaaataaccaaaagaataacgaatgaaatatcctgatgaatttaaactgaaggaaaaggagtgcttaccaatgtactgtaaacgtgttcatttacatggagctatactgtggtatacatataccccttaaaggtgtgattcagtcatgcaggcagcatgccggtttctagaaatgcatcatttgagctaatggg

SEQ ID NO: 1354 - DNA, 661 bp, Homo sapiens
  misc_feature [331]..[331]: Chromosome 2, SNP identification no. = rs16850755
  misc_feature [331]..[331]: allele = t, in linkage disequilibrium with rs2082366, respectively
  misc_feature [331]..[331]: n is a, t, c or g
ctgtaacctcatgtggcaggaaggcaagggatctcttctggggtcccttataagggcactaatccgccttcatgacttacttatgtccccaaagctccagcccctaataacaccaccttgggggttagaatttcaacatatgaattttagggagaccctagcattctattgaataaatattcagaccatagcattctattgaataaatattcagaccatagcattctattgaataaatatagcaattgtaacaattcttatcttaggaatgctagtaagaaaattgtattttatatatgtctcaaaatgaattattgtatacggaatcagnaataatgcaacaattcccattagagctattttattttattttattatttttgagacagagtcccactgtcacccaggctatcttggctcactgcagcctccacctcccaggttcaagcaatttttcttatgcctcagcctcccaagtagctggtgttacaggcatgcaccaccacattcggctaatttttgtatttttagtagagatggggtttcactgtgttggccaggctggtctcaaactcctggcctccagtgatccacctgcctaggcctcccaaagtcctgggattacaggagatctattttaaaaacctaataaggtatcatc

SEQ ID NO: 1355 - DNA, 661 bp, Homo sapiens
  misc_feature [331]..[331]: Chromosome 2, SNP identification no. = rs10930169
  misc_feature [331]..[331]: allele = a, in linkage disequilibrium with rs2082366, respectively
  misc_feature [331]..[331]: n is a, t, c or g
tgttttaattcccaacaaacttcatttaaatttggctttaaactcaaaagcacaattggaccaaacttcaaataaaattttatttatctataacaatgaatctagaaaaacaacaatcactgtggttttaactctcaagtagctgtcatgaaaaactaaatataaagttagtcctggtgatgttaatggtgctgtcgctcacatcgtttgaaggatatggctttattagcatgagatccaaaatacatcatagaaaacctccaaatttcccacatctattatttactcaggatgttcataggtggaattgatactgtagctacatttcatnaagagcacaagaattaaagttgctattaaatattaaagataccatcttcacattagtgatcaaaacattttcatctgacagtgtaatttatttacaaataaatcttagagtgttcgtattttataaacctcttgttagagaatcacatccttactttgggtccatctagcagtggtcacaggcaatacataaatgattgcccaactgtaaaatatcatggcttgaaaaatgcatccaaacaaatttaggtaattaaaattctactaaccatcttcaaagtaccatcatcttctagctttggtttgaataccagagattgacttgctttat

SEQ ID NO: 1356 - DNA, 661 bp, Homo sapiens
  TAIP-2
  misc_feature [331]..[331]: Chromosome 2, SNP identification no. = rs729869
  misc_feature [331]..[331]: allele = c, in linkage disequilibrium with rs12185748, respectively
  misc_feature [331]..[331]: n is a, t, c or g
tgccttttgttgttttgttttgttttctgtgaggcagctgaggcatcacaggtatgcgacttgtcccaggtcatttggttacttgttggaccagaagagagacctaaatcagaggcagagtgaaatgttttccctctagggtcattcatgaaatattctaccaagtgagaaatgaagatatctcgatatgtttgattcagaaatcaaattagtaaatgttaaaccccagaaccatcagtaaactgtgaaaatctgaaatggtggcctagcattaatcctatttgatctccctgctttttttcccctttaaaagttttcatctttatttgtnttcattttgcactctacctttcattgattccccttttatttctggctgccctgcctgctgcattcagcaagccattccttctctcaggtctagaggaccccaagctgatttcctgtggttcacttctaaccacttaaaagaaaggttgcagcattttcttttgtactcaggtgaatttgattgtttaaaacaagctttctttcaaagactctcaacagactgtacaaaagcttaatcatcctatctgtacgtagactaaaataaaacctagggtgcatcatccaaggctgtctattctttgatttttgaagacgtaaaaaagctcctttt

SEQ ID NO: 1357 - DNA, 661 bp, Homo sapiens
  TAIP-2
  misc_feature [331]..[331]: Chromosome 2, SNP identification no. = rs6753778
  misc_feature [331]..[331]: allele = g, in linkage disequilibrium with rs12185748, respectively
  misc_feature [331]..[331]: n is a, t, c or g
tactcggcatatgtaatgctttccatctgtggttcataaggatttttacaaatgtaattatttcttataatattcctgtgaggtagataaacataattctgaaaatattaatggaggaactaagaaatgcagatgctcattaatataacttgtataatggattttagcaagtattaaaattcagactttaaatcgattacattatttgacaacttattattttgcagacattgggataggaaaatattttctctaattcattagcaatatgacatgcttacaataaaaaaaaccagcctttaaaaatgaaaaggcagatacctcaataatntatgttccatatgtaaatgttaatattggctgtgtggaaatctttaaaattccctggaaaatattaatgttatctaaaatatatagatagtgtggagagagaaaggagctgataacattgatcaaaattctttaaaatggttctcaacagtaatgacgtcaggtgatagctgagtacagatagtccctgactccttaatgctggttggacttacattttttgattttacaatggtgagagagcagtaggcattcagtagaaaccgtactttgagtacccatacaaccattctgtttttcactttcagtacagtattcagtaaattacata

SEQ ID NO: 1358 - DNA, 661 bp, Homo sapiens
  TAIP-2
  misc_feature [331]..[331]: Chromosome 2, SNP identification no. = rs10165242
  misc_feature [331]..[331]: allele = a, in linkage disequilibrium with rs12185748, respectively
  misc_feature [331]..[331]: n is a, t, c or g
tttttatattacttctgttcttgctattttgttcttgttgtttaaatgcatacacagtatttgcacatatcttgatagaatacttattatgtcacttagtcttatatgagagggtttttttctttgtaaactagcaatttaaacaaaagagtcttgtcttgaattatttcactcagaagctgcaatgtgcaaaagacattattagtcttgagggtaatccattgtgaatattttcaatttcatataggaatgggaaatatttacagctaaatggatatgctacctaatcctatgtatgaattataaacctagttctcctctaccaaaggantgatatcagaatgacaactggttcttatatgtgtctatcatattttatatggtctagtctacttgctgctttactaatacataagttggttggttggttagaaatagagaagagtggtatttaaggactgaggagagacatgcactacaattttaatagcacttagagctattagtcgtaatacagggaaccgaatatatcagcaagaaatagacttggactaaaaatgatgagcatcacctaagtggaggctactttttcttgatttttatttttgaatgctactttcatagtaataagcaatagtaaaaaaggaaaaaaataagaccc

SEQ ID NO: 1359 - DNA, 661 bp, Homo sapiens
  TAIP-2
  misc_feature [331]..[331]: Chromosome 2, SNP identification no. = rs10167482
  misc_feature [331]..[331]: allele = t, in linkage disequilibrium with rs12185748, respectively
  misc_feature [331]..[331]: n is a, t, c or g
gtatatcagggaggtttcagattccctacggcagatgtgctgagtgaatttagtctgcttctcccaggctcaaagggcagagactcttttttatgacttcattttgtgatgttagtcaaattaaggcctggagtcaggagatagcccataaaggctcatgttagtcctctgattgaatcatcagaagagagacttgggtggctcttaacttcaggaaagccacacttataatatcccctgtaaggctgatcttgtagtattttgaagacttccttttaaatagattccataggcttttgaatcattgttctcacaatgttatgtataatangcaaatgctaaagtaaacacaaacacatgtttgaattatgaaccctaatagataggaggaagcactattcctaattccttttgacagtgtcagctctgccaggggcccagctgaaggccttctgctccctgacactattgtcgtcttcaaggccttagaaaatcacttccaaactctagcttttagggaaaaggtaatttggcttttctgggaaagcatgatgcaatagattcatccagaagggtgaagaattcttataatctcaaactgcaggtggagatctaaatacatttagaaaggaaatttgttgagagtgccaccaattgtcta

SEQ ID NO: 1360 - DNA, 661 bp, Homo sapiens
  TAIP-2
  misc_feature [331]..[331]: Chromosome 2, SNP identification no. = rs2054026
  misc_feature [331]..[331]: allele = a, in linkage disequilibrium with rs12185748, respectively
  misc_feature [331]..[331]: n is a, t, c or g
ttatttgtcaattaaaaaaataagaagaagaaaaagtagttctgatatatctcaggcaatttcatttgtcccaatgtatacttgcattagaatcccattgttcataatgctatttaatgagaacactggtcttttcaagtgaaagttttattagatttagattgataaaatatctaaatagtgccagtgagcctttttgtgtgtgtttttattgctttttgaaattttctaaaatttgttgacatttgttttaatgtcaaacaccctccacatagaaataagatccgaggtatgagggtttgtactatgtgtcttttttgattatagtatnatacaactcctgtgaaagtcataaaaccaaagttcaaaggattagaggaaatgagaaattatagttgtccctggttatctgcagttttgatttccccagtttcagttatctgtggtcaagcacaatccaaaaatattaaatgaaaatatcctgaaataaaccatttttagttttaaattgcaggctgttgggagtagtgtgatgaaatctcacactgtcccattcccattccccaaggatttgaatcttctctttgtccagcacatcagtgctgtctatgctactggcccattagttacatagtagccatctcggttatcagatcaactg

SEQ ID NO: 1361 - DNA, 661 bp, Homo sapiens
  TAIP-2
  misc_feature [331]..[331]: Chromosome 2, SNP identification no. = rs10180814
  misc_feature [331]..[331]: allele = a, in linkage disequilibrium with rs12185748, respectively
  misc_feature [331]..[331]: n is a, t, c or g
aattcaagatgagatttgggtgaggacacagccaaaccatatcagctaccttgtgccaggagggaacacagtgagtccacaatggcttgtgtggctggagcagaggcaagaagaatgaagtaacgtgaaggaggcaggaatgaggctttgtaaaccatattaaggtattttttcctctacttcctaaggccatcaaaagtcgtcaagagttttaagctgagttggagtggcagaatatgatccagctcacgaaatggtgggagaaaaagttatgggtagggtaagtggtgttgagacgggatggaatatatgaagttagaccagttagaangctgttaccacagtcagggagagaggtgacagtaggttatattagactgatgatggtaggggagtcggagagagatgaatagagggagaaatttagcaaacaaaatcagcagtgcttaatgacaggttggatttaggaggaagagaaggagattgtcaggaatgacccctaaatttctggcttgcaaaactgaatgggttgtaggtgataatactgttttgctatgacaaggaacacaggaaggggacaggctgggggtgggatgtggatagtgagatcatttttggacatactgagtttgaggggcttttgagttaccaagagatgtca

SEQ ID NO: 1362 - DNA, 661 bp, Homo sapiens
  TAIP-2
  misc_feature [331]..[331]: Chromosome 2, SNP identification no. = rs17265654
  misc_feature [331]..[331]: allele = t, in linkage disequilibrium with rs12185748, respectively
  misc_feature [331]..[331]: n is a, t, c or g
aaagcctagtttctactgaatgtatattgcttttgcaccatcataaactcatgaaaagccaaaccatcataaaccagggaccttttgtaaatgtggctaaattgatttcattattttgactggggcagcagaagggtcattggtacggaaaagcattccagaaagaaaagtaaggattgttaaagacaaactttgctcactgtgagttggcctgagttggtcctttgtgagtgacagtgaattgcccgctgaataaggagtgaggaaaggcagcatctgacaagagagacagtttccaaacccatcattatggagacatgtagtacaccangggaaactcaccgaactcagagctagatagttttccttctacttctttgagaaccaacagccccaaaacaggaagaagaagttcctctttccactgtccctctgtatctttccagggtgtctttgctgagttccaaatagagaacacatttatataatggcacctctcataatggggctttaatagagaaatatgagaaaaagaaatacatgcatatacacttctagatattatagtacatctatagatgttattttggaaacaaaataaagatgttattttgaaaacaaaataaagatgttattttgaaaacaaaataaaagtaggaat

SEQ ID NO: 1363 - DNA, 661 bp, Homo sapiens
  TAIP-2
  misc_feature [331]..[331]: Chromosome 2, SNP identification no. = rs10497266
  misc_feature [331]..[331]: allele = g, in linkage disequilibrium with rs12185748, respectively
  misc_feature [331]..[331]: n is a, t, c or g
attgagcaacctgctgccatgtgacccgaattctgccccataagtacacagagtaaatcttccctattttccgaattctggctgtttgaaagcaatggtgatggacatgcaaatatttgaagaaagcttatgggctctatatgtttctgttctgcaggattaaacatccttggttctttccactgatcctcctggggcatggcttttaggctctttgttgccctggtttccttcctctggatacagggctatttatgtctcctttataatatggtacttgacctggacatggtgctccaggaatatgttacgttatcttctcccaagttcnggatgttctttccatggaatacactaaggatatagtggcttttggactgtgatcaatttttttttgttcttagtaagctggtggtaagcaaaaaacaaacaaacaataaataagctaaactaaacaaaaaacaagcaaacaaaactcagatcttttaagccaactctgcattatgatataaaccaaaattttgtaacatctccatggcaaaagccctctttagtgctagacatggcctgtagagagtgatcaataaagttttgttacatttaatttcaataaacttggtcttgtcatctgtagatgtgataagcttgccttttaggtctt

SEQ ID NO: 1364 - DNA, 661 bp, Homo sapiens
  misc_feature [331]..[331]: Chromosome 2, SNP identification no. = rs2194754
  misc_feature [331]..[331]: allele = a, in linkage disequilibrium with rs12185748, respectively
  misc_feature [331]..[331]: n is a, t, c or g
tttttggctaggtctttgttttctagctttgtttccaaaaggatgcttaagaaaacagagtttttttcccctatccatttatctagggtagaaagtcactgccctgtgagaagaattacccttccaatcatgacagcttctattccaacttttcatatacctgactaacctgtaaacatatcccacaaaccacatacacaggctacctattaaaactctcccatatacctaacacatacacatgcacacacatacaaaatatatacatatcacacacttagagaatgacagatttcaggcaatggccaatagtcagtattgagtttttctnaccccagaatctggttgggctttatgatctaaaaaaatgtggtttagaaaagaggataattggtagagctgtagtttgaaaatatcaggtcaaagttgcaaacatacttatgatggaatcatttcatttttagttcctttcccagaaaagctgagagagcacactgttccagctgacttttttttccattaatagccgttctattcaacaaagagctgcccacatgccaggaaagtgctacagtccttctaagcttttaaaaatggggatcaagctacatgcagccagttggaatacttaagatctttatgccaagacacaataacctga

SEQ ID NO: 1365 - DNA, 661 bp, Homo sapiens
  misc_feature [331]..[331]: Chromosome 2, SNP identification no. = rs777355
  misc_feature [331]..[331]: allele = g, in linkage disequilibrium with rs12185748, respectively
  misc_feature [331]..[331]: n is a, t, c or g
actggccaaatataagaccaatagaaagtggccggaagggaaaatgactatgaagtcaatgtcagatcatcaagttccttgtatctcatgcttaggactttggctattatgcagtgaagtagtgcctggcttggcacttcaaaaggtgaatctgacagcaaggaagataatggattagggagaggcatgagatagaaagcaggtaaaccaattaagggtagctatgatcaatagaattcatgtctgtctttctgctcattgtatttgcagtacctggcattgaaccttcatataaaagaccctcaataaatatcaaatagatgaatgttcnaggaaagtaccaacggttgtctgaactaagccaatggctatgggaatacagaggggttaacattcaaaagatctgtagaaggtggaatggaaattaaaggagaggaagaagtcaaggataatagatttgttgatttgttcctagtggcatacctgctgtggacctgaaatactgaaggaaaagtggtcggtgggcaggtgaagggaaggaaaaaaagattgctaaaggtctcatttatcatctatgattaggctctatctgttgctgaaatttctcaacaaagtctctactaatgtgctttctcatcgatgttttctatgcacaagttcc

SEQ ID NO: 1366 - DNA, 661 bp, Homo sapiens
  misc_feature [331]..[331]: Chromosome 2, SNP identification no. = rs1863196
  misc_feature [331]..[331]: allele = a, in linkage disequilibrium with rs12185748, respectively
  misc_feature [331]..[331]: n is a, t, c or g
atggcatgagaacagctgttttcagggctctggcctcaatcttgagcgttgccatagtgacagctgcccgcaggaacccaccgggagcccagtaggagaactggctgccagagctttgtatcagtgtgccatccccagcctttcagaaacaagcgtaatgaactctttagccagggtgtttctgcctactaacctaagggacagtttattcttgcttgaattgtcaactgccagatgtcagttcaggcaaatcaactctattccctctttcctcctgtaccctttctctcagcttattttcatatcaaattccacttttccccattttatngctacataattaacagctattaatagagcaaattcaattcataaatttagatataacaaaaaaatccaaagatacaaagtcctctaacacagcactgcccaatagaattttctgtgatgatataaatgtttcatatctatgctgttcaatacagtagccactggtcaccaagtggcaactcagcatttgaaatgtggccagtgcaactgagtaaccaaattatttaactgatttaatttgagttcattttaattttaaatagctacacgtggctaggactaatgtattgagcaacacggttctagaatcgtattcaaatccagggagtgg

SEQ ID NO: 1367 - DNA, 661 bp, Homo sapiens
  misc_feature [331]..[331]: Chromosome 2, SNP identification no. = rs12185748
  misc_feature [331]..[331]: allele = c, t
  misc_feature [331]..[331]: n is a, t, c or g
agagtctttccaaacgtggaaccttttgttagagtgagtgtaaaaaaaaagaacaagaggacctcaggacatgggagagaaagaaggacaatgaaaataaacaatagccttaaaaatagaagcggaaaacagagctaggtgagaagatgctgaaactatctttactgaacaccgactcttaaggcttttggtaactttttctcttctcccatcacaaaataaatatgaatgccaaagggcaggcacacttccactgttgagagaaacagatctaaaaataagtaggaagcagacaagaacgagcaatgaacatgatgagaaccatggtgtntacttttaggttaactatggaggcatgtaggcacagatggaggaagttagtttatctttgctgctgcacttaaaaaataaaaaccaaaaatataaatgccatcaaaacattgactcttctctaaccaaaatttttggttttatatttaaggccaagcccatttagaagaaaagcacattcatttgggttttgtggtttggagaaaggactgccagagaggaggtgaaagccacagtggagcattcctggacaatccattgcaggcttgggagatcaccatgcaggcagctcctgctccataatagccaaaatagcaacatgaccacaaat

SEQ ID NO: 1368 - DNA, 661 bp, Homo sapiens
  misc_feature [331]..[331]: Chromosome 2, SNP identification no. = rs7586085
  misc_feature [331]..[331]: allele = a, in linkage disequilibrium with rs12185748, respectively
  misc_feature [331]..[331]: n is a, t, c or g
aaaggactgccagagaggaggtgaaagccacagtggagcattcctggacaatccattgcaggcttgggagatcaccatgcaggcagctcctgctccataatagccaaaatagcaacatgaccacaaataattcaaaggctgaaacattttgttcccaccagttcaaactctcctgcttctgtcaaatggctggtaatcctatctcctctactaagcctttcctaaatgaaacagtggcaactccttttgaattctactatttattacataaacacacaattcccgtggttcccttatcactccattaaatgcacttgccctctgattgaancacaatgcaaatccttttatgctacatttgttcaatgcttgttgccttgactgtatatagccttaatatccggtaggtgcttctaacttattgtaagttccacatctaattcacaaagtattttgcttagcaatgcctcttatgatgcaaataaactagtatttatcacgagtgctttaggatacagacaagaagactattttagagaaaataagaattaaataatggtaaggaaagcaaaccacccctgcgatgtgcatgctctccaccaccaccccttttccctccctggatggtgtctcactctccacctcctttttgtcacttgtc

SEQ ID NO: 1369 - DNA, 661 bp, Homo sapiens
  misc_feature [331]..[331]: Chromosome 2, SNP identification no. = rs6726821
  misc_feature [331]..[331]: allele = t, in linkage disequilibrium with rs12185748, respectively
  misc_feature [331]..[331]: n is a, t, c or g
ggtgtctcactctccacctcctttttgtcacttgtccttggtcacacatcaatctgccctcagccctccagagaagacttattcttcctgcctgaaatgttatttctcccttgttcatctaaccttgttcctttttattaagtgctttatatatacggaagactacataaattatgtcttcacgttaaataatagtaatacaatgaacacctgtgcatccactttaagaaatagaatgtatctttgaagtctttgtgtgtactgtcatgctcgtgtccttccacattccaaggtaaccatattcctagtttagtgttaatcactgtcttgngggttagtccaagtcttgctattctttagagttttactacctatttctccctaacaatacatatatttagtttgaaaaaaaactcagagcaatcgcaagcctagtggagtaagagaaagatcaacattgacactaagagaggacatgtcccagaagatgagctaacagaggctctccgttacagcatggcttcagtttccccaggagtttacaaaagtcatttgcagggaagtcagaaggagagagactggggatgtcgggctctctaagacagggcattggggtggtctgtgaatgtgagtctggagctggaggtctccaaccataagg

SEQ ID NO: 1370 - DNA, 661 bp, Homo sapiens
  misc_feature [331]..[331]: Chromosome 2, SNP identification no. = rs6710388
  misc_feature [331]..[331]: allele = c, in linkage disequilibrium with rs12185748, respectively
  misc_feature [331]..[331]: n is a, t, c or g
tgtgtgtgtatgtgtgtgtgtgtgtatgtgtgtgaactttcatgccacaaatatttattcaagcctataagagatgctaatcactgcaaactaaatattgataatccaagaatttaaaaaatgtaatagttaatactttatcttagtgggcaattaaaaatagaaacaatggctagaaaaatagttttacacaagaggtaattaaaatgggcctagaagaccatagatttcaaacattaaggaaagtaataagcaataggcaaaatatggtagtgtaaaagtgaatggcatttcagggaataatgaggtcagtacgttagatgtaagtgangagaaggaatatagcgaggggaagaaatccctaaaaaaaaagaagaaaagaaaaaaacctagaggccaaattatgacactagagcctttggacagtatctgcccgaagattagaagccgctgtagctgggcatggtggctcgtgtctgtaatcccagcaccttgtgggcaaaggcaagaggattgcttgagaccaggagtttgagaccagcctgggccacatagcgagacctcatctctaaaaaaaaaaaaaaaaaaaaaaaaaaaaaaattaaaaattagccagatgtgatggtgtgcacctgtggtcccagctacttgggaagctgag

SEQ ID NO: 1371 - DNA, 661 bp, Homo sapiens
  misc_feature [331]..[331]: Chromosome 2, SNP identification no. = rs6710518
  misc_feature [331]..[331]: allele = c, in linkage disequilibrium with rs12185748, respectively
  misc_feature [331]..[331]: n is a, t, c or g
atccaagaatttaaaaaatgtaatagttaatactttatcttagtgggcaattaaaaatagaaacaatggctagaaaaatagttttacacaagaggtaattaaaatgggcctagaagaccatagatttcaaacattaaggaaagtaataagcaataggcaaaatatggtagtgtaaaagtgaatggcatttcagggaataatgaggtcagtacgttagatgtaagtgacgagaaggaatatagcgaggggaagaaatccctaaaaaaaaagaagaaaagaaaaaaacctagaggccaaattatgacactagagcctttggacagtatctgcncgaagattagaagccgctgtagctgggcatggtggctcgtgtctgtaatcccagcaccttgtgggcaaaggcaagaggattgcttgagaccaggagtttgagaccagcctgggccacatagcgagacctcatctctaaaaaaaaaaaaaaaaaaaaaaaaaaaaaaattaaaaattagccagatgtgatggtgtgcacctgtggtcccagctacttgggaagctgaggtgggaggatgaggctgcagtgagccgtggttgcatccatgcactccagcatggatgacagagaaaaactttgtctcaaaaaagagaaagtcattgtaggctt

SEQ ID NO: 1372 - DNA, 661 bp, Homo sapiens
  misc_feature [331]..[331]: Chromosome 2, SNP identification no. = rs1346003
  misc_feature [331]..[331]: allele = c, in linkage disequilibrium with rs12185748, respectively
  misc_feature [331]..[331]: n is a, t, c or g
actagtcaagttctgcagcataattttagcttcaaagctatgcactttgttttatcctgcctgcccattttttaagccttttctctagtgttccaaatgactctgtgaactactcaatatcctttcaacaaacttcttttccacttgaatcatccagagttaatttctattgctggcaatactaactctgatggaaaaataaaataataaatgcactctaacacagaataacagaaataatgctccacctagttaacaaggattttacaaacaagtagaagttatttggtcttctttttaaaaatacgttcttaaaaataacatttttganaccatgaattccacctgtgttttcaaactatttttcactattaacattatgttttaaaggagatacgttttcaaaagatccactggaaaaaattagacttctcctataataatttacacagtgagtggctgagattctaaaggaatatcataaaattatgataatattaaataaaagcaaatactctcataactttcaaggaaacatgcgatgactgatgtagtatcaaagggatatgttttggaagatgctctcttctatgtgactgaaaatatggggacatgctatacattctattttttcttattgattgtgaatttgttagtcatc

SEQ ID NO: 1373 - DNA, 661 bp, Homo sapiens
  misc_feature [331]..[331]: Chromosome 2, SNP identification no. = rs1346004
  misc_feature [331]..[331]: allele = g, in linkage disequilibrium with rs12185748, respectively
  misc_feature [331]..[331]: n is a, t, c or g
aattaatgcagggaatgaattaagataaatgacctataaattcatggttgacagcagcacgaaggggtagagcataatatatccacatgacacggcttcaaataagctggggcatttttgaagaaggacacacctatcccaaatcctagccttgaagtgcaagaggaatgatagaaaacaaaaacaaaaaacaataaccctcactagaattggaagatttatccttaattaatgtccagttcagttaaggcaagacaatacgtagaattttcagagacaaaattgctgatataatagagttttctaatcaaagaagtttgcagagtagaangttatcagaaggtgggggatttatcaacttagagatatacaaaggatgtaggatctgccagggaagaataatgatgataatggttgatagagaggcattgacttctggtcgtactagaagtaattatggatgtcaagcatggtcaaagtcatcatggtagtctcgaagaaccctgggcattggttcactgggtagcctttctattcaaagcgcggtaccagggccagccgctttggtatcacctgaaagtttgtcagaaatacaaaattacaagctctaccccaggcttaatcaatcagaatcttattcaatctgattgattcttaatca

SEQ ID NO: 1374 - DNA, 661 bp, Homo sapiens
  GALNT3
  misc_feature [331]..[331]: Chromosome 2, SNP identification no. = rs1895701
  misc_feature [331]..[331]: allele = c, in linkage disequilibrium with rs12185748, respectively
  misc_feature [331]..[331]: n is a, t, c or g
tgacacttgagcaatagcctgaggctgccaaatcaggtaagaaggactttcccataataatatcaacctactctaagtagatttcagttggatcatgatatatcaacatatgagtgatacatgcagggcactcactttggtttttttgaaaatatgtttaagttcatttatgaaatatttttgagaaataattttgtgtttagagatataataagctctaagagaaatatatgctcatagatattcatgcctagtggtacttaccttctactttaaaattatttgcctttctttctgacccatgagacatagctcaaaagtaataacaagncttactctgcctaccatcacttctgatatggtttggctgtgttcccaccaaatgtcatcttgaattgtagctcccataaatctcacgtgttgtgagaggggcccagtagtagataattgaataatgggggtggttttccccacactgttcttgtggtagtgagtaagtctcacgagacctaacggttttataaggggaaaccactttcacttggttctcattctgtcttgtctccctccacgtaagacatgcctttcaccttccgccatgattgtgaagcctccccagccacgcggacctgtgagtccatcgaacctatttttctttata

SEQ ID NO: 1375 - DNA, 661 bp, Homo sapiens
  GALNT3
  misc_feature [331]..[331]: Chromosome 2, SNP identification no. = rs13429321
  misc_feature [331]..[331]: allele = a, in linkage disequilibrium with rs12185748, respectively
  misc_feature [331]..[331]: n is a, t, c or g
gttttaaaatttgccaagaaatttaagtgttaaaaatactcttctccttattcagtttcatgtttaaggaaacatttgacagacaagtaaaccaaacgcaaaaaaaagttcacctgcattttaaactaataaattctggatctgtaaaagctcttggtttgtacacagaggccaatgctgacatttattgatctatttttatgtagttaaaaaaatacagtaacaaatctttcttcctatccccccaaaaaactaggggaaatattttaaattgtgagtgtgtgaatgtagctatatatatatatccctaagtgtacaaaacacacaaacntcactttacttggaaaattattttcatcatactgtaaacatctcttcccctacatctggacattttgaaatagtctttggtattactagttattgtgctttgaaacagaaacttgcagaatttctgtagtagtgctacataaagatataaataagaaaaatgcacttggaataagttacatttagctgcttttgcataattttcaaaaactacagtgtatgcctagtcacagttttatgagaaagaatatttcctttttcaacttaattttaaggaacacttaatcattttggctaagtatccatttttggagtggatctgatgggttgc

SEQ ID NO: 1376 - DNA, 661 bp, Homo sapiens
  GALNT3
  misc_feature [331]..[331]: Chromosome 2, SNP identification no. = rs2303393
  misc_feature [331]..[331]: allele = a, in linkage disequilibrium with rs12185748, respectively
  misc_feature [331]..[331]: n is a, t, c or g
atatgaaaaagattttatggtttcattgaagcaaacctaatagcaaatctttctaaggtgagccatgtctgataaactctttttggcttctagtgtaaatgccaccttttaagctactactcttcaattagtaagatattacataatgaagagaggcagacagaacaaggtttgaatcacattttcaaacaagaagtattcccttgatatatccataagtgacaaactcttaaaaacatcataaattataaaagccagtgttaacgttttctagtactgcacaaaacaatgttcaggtaagaattgctatgatacagctaagccttaaacntgtttaaaaacagaagagacctgttatgtattctctcaattctaggtttgtgaaaaagtgctaaaacagggtagaaaaaaattaatcacttcaagtgagaagatataataatttttcttctctctgacagaaaaaaaatatgactgttgctaaaagcattataagaaaccctaaatagtaaaaaacaagcgactaatattaataattcacagaagtgctcatctgcatatatcacggttcaaccaagcaacttaattttttgttactaagagtacttaattcatagatatattctcttatcacatgggtagaaacacataataacaaagt

SEQ ID NO: 1377 - DNA, 661 bp, Homo sapiens
  GALNT3
  misc_feature [331]..[331]: Chromosome 2, SNP identification no. = rs2303394
  misc_feature [331]..[331]: allele = a, in linkage disequilibrium with rs12185748, respectively
  misc_feature [331]..[331]: n is a, t, c or g
ttagtaagatattacataatgaagagaggcagacagaacaaggtttgaatcacattttcaaacaagaagtattcccttgatatatccataagtgacaaactcttaaaaacatcataaattataaaagccagtgttaacgttttctagtactgcacaaaacaatgttcaggtaagaattgctatgatacagctaagccttaaacatgtttaaaaacagaagagacctgttatgtattctctcaattctaggtttgtgaaaaagtgctaaaacagggtagaaaaaaattaatcacttcaagtgagaagatataataatttttcttctctctgncagaaaaaaaatatgactgttgctaaaagcattataagaaaccctaaatagtaaaaaacaagcgactaatattaataattcacagaagtgctcatctgcatatatcacggttcaaccaagcaacttaattttttgttactaagagtacttaattcatagatatattctcttatcacatgggtagaaacacataataacaaagttaataaagggagagaaattctgatagataatattaatgtaccatgttccactcattttcccagataagcaagtagagctaagaaaaatagttaaatagatgaattaattgcactgaggtaccttctg

SEQ ID NO: 1378 - DNA, 661 bp, Homo sapiens
  GALNT3
  misc_feature [331]..[331]: Chromosome 2, SNP identification no. = rs13427924
  misc_feature [331]..[331]: allele = t, in linkage disequilibrium with rs12185748, respectively
  misc_feature [331]..[331]: n is a, t, c or g
cctttttaatccttcaagagccaactcaaatactaccttccttctttggctttgcctgaatttgccctgctgcacaaaattacaatcttttcaaggttcccatagtacatcagagataacttttctagcactctattagaattgtgtgtggtgtgtagacctggcttccccatagactgaagtcaggcaatttatcgagtcataacacccatcacaaatccaatatttcataatattgacattataaagataaaataagttaacataattgattttcaataatgaaataattagtaggagcactaatatttgttaagtccttattacatgntaggcaggcactgtgttaaactctttatgtgtattacagtaggcactctacaaacattcgctgaattcacagagccatatatcttgagtttccctactcttagtctcatgcttaatttatctccgcccacaagcaaaacatcagtcatttttagaactagtagttcttcagatggaaacacaggaagaaactgagtttagatgatgaaaatagcattctagctatacttggctaagaaagataagccttaagatctcaaaaatggtaacaaaggctgtcgagtattttacccattattaaaaagtcattaaaataaaaattacaaaaaat

SEQ ID NO: 1379 - DNA, 661 bp, Homo sapiens
  GALNT3
  misc_feature [331]..[331]: Chromosome 2, SNP identification no. = rs3791848
  misc_feature [331]..[331]: allele = t, in linkage disequilibrium with rs12185748, respectively
  misc_feature [331]..[331]: n is a, t, c or g
caaaaattgttaaacaagtaagttaaagctaagtagttaaattgcaataaaatctataacaagttcacacgtccttttgcgtcgattcatctcaagtacaaaacatcaaaaaatttgaaagtaggtttttaactcttaaagtacatgacttatgaatccaagtttccttttttaagaaaaaaactaagtaaactgctttttaaaaatcaggaattctacttgatgtttttaatatgaaagatagttcatttttgttgctgccctggttcaatattttactcgaagaaaattaagtagaactgtttttactggttttaggagatataacacntaaataaaggttctaagtgactttttgcactggagatagagacagtgtcttaatgtggcatgagaataaaccaggagtgccaagcctttttttttcaagctctagtttcactacttactggagatgttactttggcaaagcctttgagaatgtaaaatagggaagacacttcatagagtggctgcaaggtggctggacatggagtgcatgcttaacatatttcttttctctccttccctgttttaagagatgaaatacgcatgctgtctctctcccagagtagctgtgaaataagaaagtgataagtgctaacaaatatatggtactctt

SEQ ID NO: 1380 - DNA, 661 bp, Homo sapiens
  GALNT3
  misc_feature [331]..[331]: Chromosome 2, SNP identification no. = rs13431319
  misc_feature [331]..[331]: allele = c, in linkage disequilibrium with rs12185748, respectively
  misc_feature [331]..[331]: n is a, t, c or g
tgatcattctactgaacttgcaaagtagaggatgattatttaaaaattcatgccaatttagagagaaaacgtcaaaaaaaatccttattggcattaatgctaaataaaatggcaaatcatgaaatcaatgccttttcacttaaatatcttaataattgactctgccatagttaccaagcaaagaatcagaaaataagtcatatttaatactatgtgcttgtagtagagcaagtgattacaaatctctttctctcctttctttcttgaacaaatgagaagactcagtgatatgttcaattcaacaaactgtgcttgtgacccaacacgtgcnaggggttggaaatactgaaatgaataaacaagaccccgccataagcagttcaaacttggctaagatcatcactgccagtatgtgatggagccagagccaaaacttaaatcttctaactcctagttcagttctttttccactacattccagcctaagagatgaaaaatgaatgataaagttactgcagaaaatgaaactcatgaaatcaaatacataaggtacatacggagtctacccaaagcctttttttatattaacttataatatgtatagaaaaaatcaagctcattcattccaaacagttaagtccaatgtcctttaaaattattc

SEQ ID NO: 1381 - DNA, 661 bp, Homo sapiens
  GALNT3
  misc_feature [331]..[331]: Chromosome 2, SNP identification no. = rs3762552
  misc_feature [331]..[331]: allele = g, in linkage disequilibrium with rs12185748, respectively
  misc_feature [331]..[331]: n is a, t, c or g
attttcttttaatatgtaacttaatatatttattcattgtcgccagtgtaacaagaggaatcagttaaactcctgtgtccaggcagtaacaccaattaatgcacttgtagctactgaattccagccaagataaatataattaaatctagtgcttcaggaaatgagttgatcatcaagggagttagaatggaaaaacatttatgaataattttaaaggacattggacttaactgtttggaatgaatgagcttgattttttctatacatattataagttaatataaaaaaaggctttgggtagactccgtatgtaccttatgtatttgatttnatgagtttcattttctgcagtaactttatcattcatttttcatctcttaggctggaatgtagtggaaaaagaactgaactaggagttagaagatttaagttttggctctggctccatcacatactggcagtgatgatcttagccaagtttgaactgcttatggcggggtcttgtttattcatttcagtatttccaacccctagcacgtgttgggtcacaagcacagtttgttgaattgaacatatcactgagtcttctcatttgttcaagaaagaaaggagagaaagagatttgtaatcacttgctctactacaagcacatagtattaaa

SEQ ID NO: 1382 - DNA, 661 bp, Homo sapiens
  GALNT3
  misc_feature [331]..[331]: Chromosome 2, SNP identification no. = rs4667835
  misc_feature [331]..[331]: allele = t, in linkage disequilibrium with rs12185748, respectively
  misc_feature [331]..[331]: n is a, t, c or g
atatctgctatatttaatttccataaacttactctgaaagacatttctatattttcacctccccagatttccatttcttcatcatagcttccaatatactcaaaatattcttttgatatggaaaaaagtcctcctgcaaaagtgggtgttctgaaaaataatccattgtcaaattttgttataaaaactaaacaagataaaacagcatattttaagaactgaagttaaaaaattaaagccatatcacattttcaaagcttttattcagattaataaaaactagaaatgctatcttcaaagtcaagatttttggggtcggggggagtacttngtgtcctctcccattggagtaaacttaaatgtcttctcctaaccatgctttacgatttttaagtaatgattgatgaggaagacataagagctcactcactgctacctcttactcagcaacatcatgtataagcaagtacacaaatgaatgacttttagattctctttatatagaatatgtgtgttctttatcaattacctcagaggcaattgctataaagcaaacagtgtgtacatattcaatgtatggtatagggtgtaaatataagactctgagagcaatcatcttacttaattgggtaggtttcatctttccttctttgcttctcat

SEQ ID NO: 1383 - DNA, 661 bp, Homo sapiens
  GALNT3
  misc_feature [331]..[331]: Chromosome 2, SNP identification no. = rs1968294
  misc_feature [331]..[331]: allele = c, in linkage disequilibrium with rs12185748, respectively
  misc_feature [331]..[331]: n is a, t, c or g
ggctgatcttgaactcctgacctcaaatgattcaccaacgccggcctcccaaagtgctgggattacaggaatgagccaccacgcccggctacatttaaatagtaaataagctttcattcactttaaagtgtgggaatcaagaaaacaaacaaacaaacaaacaaacacttttttttttaacagaaaagaaacatggaaaaaaaaaaaagaggcaaggataactggctggaacagctagtaactggagaacactgaagttgaggaaacttaaacacaaaaggagataagaattctgcataagtgaaaggaattttctccacagagctgttanctgcttgggctgtcattgctataatcgccagttgaaaacgctgttaaagaaaatgcaattaggcatttagaaaagaaaagacttccttaccttttaaattagagggagagggagggaaaatgttacaaccatatccatacatatatacttacagtgagcatctaaaaatgtgagcgtttcagctgttgcgactgttgctcctagcaaccgagcagtgatcagaccttttctttctctttgtctgactatttttactatagaaaattgttttacatattcatctagtttatcatgtaagtactctgtaaggaaaaaaaatcagggttaatt

SEQ ID NO: 1384 - DNA, 661 bp, Homo sapiens
  GALNT3
  misc_feature [331]..[331]: Chromosome 2, SNP identification no. = rs13422985
  misc_feature [331]..[331]: allele = c, in linkage disequilibrium with rs12185748, respectively
  misc_feature [331]..[331]: n is a, t, c or g
tttgggaggttaagaacagaaagctacatgaaatcagatgccctgatttcactttatggcacaattacttttagctgtgtgaccttgggcaaggaattttaccttttctgcgcctcagtttctttaagatgaggataatcggactcaccatcacaagacattgctgggaggataaaatgagatatctgaccttcaggaatctaactccaaacttggatttattaaggaataaattttgtaatcattgaaataatatgtatctgtttgacacaatatttaaaatacttatgatgtttgaaaatttacaagttagagtatttgttaaattagncttgtgattccaatttaaaatgtgtaatttagtatttgacttccaattttaagtggaaatgtactaaagaatttgactaacattgtaagtaatattggaatatttaagaacaccgaaataaaatagaacatggtgactctttttaactattcatttatattatttattgatatttatattaactcattcagtctttaaaacaactctagaaattatgtactagttctgtatttcctcaattttaagctacacaattggattcttcttataatcaatttcttataatcaatggcatgttaagtttaattagctgtgggttttctctagtga

SEQ ID NO: 1385 - DNA, 661 bp, Homo sapiens
  GALNT3
  misc_feature [331]..[331]: Chromosome 2, SNP identification no. = rs13430211
  misc_feature [331]..[331]: allele = c, in linkage disequilibrium with rs12185748, respectively
  misc_feature [331]..[331]: n is a, t, c or g
gattacacacgtgtgccactgcgcccacaatattaaatcatttttataaagattatctttaattagatatttacctaagtatgtaatataggtttcttaagtatttcctaggtttattgaatcaatttacttaatctatacacagaatcaaaagggaaaaaatagctttattgtaaaacctatgttcttcttatttttatttaaaatagagacagtctgtgatgttgcccaggctggtcttgaactcctgacctcaagcaatcttcctgcctaagcctcccatagtggtgggattataggggtgagccatcatgtccagcctaaacctatntttttatgatgttcatcattcagcaaatacttattaagtactgccatttgccatgtgttaaagattttgctccaataatttgatctactatcaaataagactagcgtttaaaaaaaccctttaaaaatacgtagaaataaagatctaaataaagacctaaatccatgttaaaagtcctgtgctcatgtcaccatctaaaacattgattgggcacagggagagagaccctaagtgcccttgactgattagtggtactactatccattagttaaaaacattacttataaattgatctcaaattcatttgtataggaatgtctttcctcaatg

SEQ ID NO: 1386 - DNA, 661 bp, Homo sapiens
  misc_feature [331]..[331]: Chromosome 2, SNP identification no. = rs744158
  misc_feature [331]..[331]: allele = c, in linkage disequilibrium with rs12185748, respectively
  misc_feature [331]..[331]: n is a, t, c or g
agggtatcctaattgcctttagcctcctatcaggtttttctacctccccaaaaattccatattcagcacaacttcaacgacaatcattctaaacttccgttctcattaggtcatcaccttgctgaaaactcatcagggcctctccctttgcctaaagaattaaatataaatcccactgaattaagcaccccaccctcccctatttggagcttggcatccagtgtgtgtttagtaggcctcactgtgtatggtaattgactatgcatggttctgggtaaaattaccctacttgaggccagctgttgatagaagaattaaagtttaggctganaccggtttatttccaacccaaattttacattaaaggagcttttcttgtgccttaaccatgaagagtggataatgcaggaatttcagatggtagttggagaagtggagggatattgttcgcttcaaattaggcacatatatagcctaatcttaaaggtagacacagattttatgtataataaaaaatgatgttatggaagacttgaaaaaaattctgttttatatctggggaggtggcagctaatggggaaggggtaaatatggggagacttacaaatattgagattgaagtcttttagaatttctagagcaggggttagtaaactatagt

SEQ ID NO: 1387 - DNA, 661 bp, Homo sapiens
  misc_feature [331]..[331]: Chromosome 2, SNP identification no. = rs10197337
  misc_feature [331]..[331]: allele = g, in linkage disequilibrium with rs4666828, respectively
  misc_feature [331]..[331]: n is a, t, c or g
tagtggttttgagtcagactcccttagacttcagatctggttcctctacttactagttgcttgaccttacacaaattattttaccttcctctgccacacttccttacctataataacgaataataatgccttacagagtagttgtaggaagtaaaagagataatgtaagaaaataatataatgcactagtatgactacaataaactaaaactacatgattatactctttaattgtcagagataaaaatatatcaactgagatgcaaaggaaactctccaaccttcacacatattaagcaaattacctagaaattaattaatgttattaagnaataaaaagccccaactagagctttaaacataatgttggcccatatatagaaaatgtatcttaaatatttacaattacctccaaagaaatgataagattaatgtaataatgcaggacattattaggtgtttgctttttagactctaaaatatacattgtctttattgtccaggacttgtattaaatggtagagaaggtttgccgtatttagaaaaacatttaaacagaggacagaaggcttaatatattattgcttccaaaggaaatatgtgttttatatctaaattatatttctaaacataaatatggactttcatatttaaaatatag

SEQ ID NO: 1388 - DNA, 661 bp, Homo sapiens
  PDE1A
  misc_feature [331]..[331]: Chromosome 2, SNP identification no. = rs7370295
  misc_feature [331]..[331]: allele = t, in linkage disequilibrium with rs4666828, respectively
  misc_feature [331]..[331]: n is a, t, c or g
gttcttctggcctagttctgcagtgaactttgtttcagagggaggcatgcttctactaggagacacaaaaatgattcaactgaactgggaattaaaactgtgacccggctgctttgggttcctcatgattcttgagtcaacaggctaaaaagggagttagggtgttggctagggtgattcatctaggctactaagggcgattgattggcctactgttccacaatggagataaagaatagtatttctggaatacagaaggttccttagagcaactattagtattaccctgtcctgtgatgaaggtcaatgggaaactacaaccactcaatanaggctgactatgaattgcccagactcttcaggaatgaaggtttgggtcaccttgccaggcaaagaaccatgaccagctgaggtgcttactgaaggcaatacagaatacagaatgggtagtagaagacatgtataaataccatatacagccatgtggccagatacagaaatgaggattgtaatttttataagtatttcctattttgttaagaatacatttgtatgtatattaacatgtcttaagcaagtatctttgttttctctttttcctttatcatgtaacataagatttattgacttaatatcagcatttgaatactgttaattttat

SEQ ID NO: 1389 - DNA, 661 bp, Homo sapiens
  PDE1A
  misc_feature [331]..[331]: Chromosome 2, SNP identification no. = rs13420620
  misc_feature [331]..[331]: allele = t, in linkage disequilibrium with rs4666828, respectively
  misc_feature [331]..[331]: n is a, t, c or g
ggacattcagctccaggttctcaacctttggaccctgagacttgtaccaacagcctcccgggaagggggtggtctaaggcctttggcctcaggctggggctccactgttaactttcctggtttctcggcttttgcatttggactgagccaagccaccagcttttctggctctccagcttgcagatggcccatcatgggactttgcctttatgactgcatgaggcaattctccctaataaatttcacttcacatgtatttcttattgtttctgtccctctggagaaccttgactaatctgatgatattttatagccaagttttccacctccngtgtgaaggcaaggtgagatagatgaaataaatatacttatttgtgaaaatacattattcaatactggacatcagccattcttagctaattaattattggagtgcttctactagtctagcagagttaactattaagtaaactgataacagtaaaagatgatgtaggaaagcagctcttaaaaaccagactttttccaaaaagaaataacttagctaaccttaaactgaattatgtagaaaacaagtcaatttcaaatccaacaaaaacagtacagtaaaccgttcatgttctgagagaccaaaataaatacccacttattaactaagatg

SEQ ID NO: 1390 - DNA, 661 bp, Homo sapiens
  PDE1A
  misc_feature [331]..[331]: Chromosome 2, SNP identification no. = rs2195878
  misc_feature [331]..[331]: allele = t, in linkage disequilibrium with rs4666828, respectively
  misc_feature [331]..[331]: n is a, t, c or g
aaccagtaacctgtatcatgttctagaagttaattatgatgggttggtttagttaaattctctaaacttccctccagagcaaaaagtgtgctcaaaatctactgatggaaggattctgacagcagcataacttaaggatattttaagtaatattgtgtgtgtgagtgtgtgtgtgtgtgtgtgtgtatgaaagagaaagagagagagggagagtgtgtgtgtgtgtgtgcgtgtgtgtgtgtgtgtgtgtgtgtgtgtgtctcctgtccactgtatttgcatggacaacaaaagtaagaaggaaggtagagggagcatgcctgcattcccntagagattattagctggcttggtgatgataaaatgttttcccaagaggggcaggactaggacaagaaaggatctgggttggtaggaagatgaattatcagatgatgtactctttactaaatttgaaagtaggggtggtctgtgaagctcatctgtcttggagtaactcttagatgtttactcatagttagatacagtcaggatattagaagttatttccagaagactccaccaatcctcttcatccaaggtatgcattttgtccctcccatttgtttaacaggaaccctagcagatggtccttattgagtattatagattttttttcttt

SEQ ID NO: 1391 - DNA, 661 bp, Homo sapiens
  PDE1A
  misc_feature [331]..[331]: Chromosome 2, SNP identification no. = rs3769803
  misc_feature [331]..[331]: allele = g, in linkage disequilibrium with rs4666828, respectively
  misc_feature [331]..[331]: n is a, t, c or g
gccacagcttgcttgctctcttttcttctccttctcattgtacttctcagggctgaaggacaggctggtcttcacatcagagtcactggggttgactgaatactgcaggcgctctctcaggctctcctgtcctgacattctacacagccacccctcctctattccttgcatgctgagaacacccaccttgttcagaatgctggataagggaacatgacaaagatcttctctaacccctggatccctgactttttctcagaattctttcttgtttttccctcggaaataactcaaaatgcacagggatggccaaattcagagagcaggtccngtctcagactataactgtctaagtctcttgaatcttccaactcttttctcccttacaccttacttttggtttcatagggggtgaaaaatatgtcactggaagggtaaggagttaagcttttccctcctccaatttgaatggcaccttcatacccctttttgcttctcttagggaaaacctagatccatgtccagggagtgagaaacctggatctcctctggaagtatgggtgggaaggtagaacttgattaagtattttccaaaaaccttttagccatgcatggatgtggcttttgaatttgaagacaaaggatagatgcctttgttttt

SEQ ID NO: 1392 - DNA, 661 bp, Homo sapiens
  PDE1A
  misc_feature [331]..[331]: Chromosome 2, SNP identification no. = rs3820963
  misc_feature [331]..[331]: allele = c, in linkage disequilibrium with rs4666828, respectively
  misc_feature [331]..[331]: n is a, t, c or g
atagtttctagctatgtcctcatgctacctgtttgaagaaaatataagcttatcatttaagtgttttgactgaatcagagtaagcctggtcaatccagggtttctgacctctctttcctccttctttagatggcattgcagtccctggggactaatgttgtggtattaatggatttcagatgagcatcaggttcttgcttgacctctggcctctctctcatctttccagacagacagcccccattggtttttggctggtatcaccttctgactctgaccccttgctttcccacggcaggcccccacatctttgcttgccacagcttgcttnctctcttttcttctccttctcattgtacttctcagggctgaaggacaggctggtcttcacatcagagtcactggggttgactgaatactgcaggcgctctctcaggctctcctgtcctgacattctacacagccacccctcctctattccttgcatgctgagaacacccaccttgttcagaatgctggataagggaacatgacaaagatcttctctaacccctggatccctgactttttctcagaattctttcttgtttttccctcggaaataactcaaaatgcacagggatggccaaattcagagagcaggtcccgtctcagactataa

SEQ ID NO: 1393 - DNA, 661 bp, Homo sapiens
  PDE1A
  misc_feature [331]..[331]: Chromosome 2, SNP identification no. = rs3769800
  misc_feature [331]..[331]: allele = g, in linkage disequilibrium with rs4666828, respectively
  misc_feature [331]..[331]: n is a, t, c or g
cccttcattatttctctgtgaccaaacatagtttctagctatgtcctcatgctacctgtttgaagaaaatataagcttatcatttaagtgttttgactgaatcagagtaagcctggtcaatccagggtttctgacctctctttcctccttctttagatggcattgcagtccctggggactaatgttgtggtattaatggatttcagatgagcatcaggttcttgcttgacctctggcctctctctcatctttccagacagacagcccccattggtttttggctggtatcaccttctgactctgaccccttgctttcccacggcaggccccnacatctttgcttgccacagcttgcttgctctcttttcttctccttctcattgtacttctcagggctgaaggacaggctggtcttcacatcagagtcactggggttgactgaatactgcaggcgctctctcaggctctcctgtcctgacattctacacagccacccctcctctattccttgcatgctgagaacacccaccttgttcagaatgctggataagggaacatgacaaagatcttctctaacccctggatccctgactttttctcagaattctttcttgtttttccctcggaaataactcaaaatgcacagggatggccaaattca

SEQ ID NO: 1394 - DNA, 661 bp, Homo sapiens
  PDE1A
  misc_feature [331]..[331]: Chromosome 2, SNP identification no. = rs13400054
  misc_feature [331]..[331]: allele = t, in linkage disequilibrium with rs4666828, respectively
  misc_feature [331]..[331]: n is a, t, c or g
tggtaggttttctacctctctccttccttcttcccttctcctcctttctctaccccctcctctctcgtcctccctcttgcgctctgtctctctctttcttccctgcctactgcagataatcatttgaatttctactttgtgccagtctctgttcaaagagcttgggatacatcagcaatggaaacaaacatctttattttaatgaaccttatttttaagagggtgaagtagataataaaaatgaagcataataggtcaacagtctctccctgctctaggactagggagatgtttttgcgatatctgtgaaatagagcttaagggttaatangatgatgagcaaacatctggaattctcttcaaagccctgatgcttaattaatattccaaagctctaaacatcatatgacctgcttattttaatctcaatgcaattgtaataaagaaactttcatcttcagcgtataagactagaagtggtaggtactggaaaattaaaatggcaatatctgatactcagtgactttaaaattgatcactatgttagtagatgcattttaatagcttatcattgtttcatttttatgcaatatttcatgtatataaatgaattatagatacatatataaagcacatgttagacataatcataatcataatg

SEQ ID NO: 1395 - DNA, 661 bp, Homo sapiens
  PDE1A
  misc_feature [331]..[331]: Chromosome 2, SNP identification no. = rs9653242
  misc_feature [331]..[331]: allele = g, in linkage disequilibrium with rs4666828, respectively
  misc_feature [331]..[331]: n is a, t, c or g
tgcttgaggaggcagtctgtcccttagcagaactggtgcactctgctgggagagtcccccttgttagggtcagctgctctcttcagagccagcagacaggaaagattaaatccgctgaccctgcgactgcagctgcctctcccttcaggtgctctgtcccagggagttgagagtcctgtctgtaagcccctgactggagctgctggatttcctgcagagatgccctgcccagtgaggaggaatctagagaagcagtctggacacagccgctttgctgtgttgtggtgaattttgcttagtccaaacctctcagtctccttcacactgtcangggaaaaccgcctactaaagcccagcagtttgcttattttgtgcaacactgtgtccttcattcctgtggtgattagttaaattttaacagttttatactgttccataatatgtacatactacagtatataaatcaattttactgttttttacactttattttgcagtcatgaacaatgctgctgtgaatattttagacatgtctttgatgcatatgcacaaaagtctctctggggtaaaaatacagaagcaaaattgtcgagaagtatggcacatgcatctttaaatttcctacagaatgccaaattgttccatgaaatgattatataat

SEQ ID NO: 1396 - DNA, 661 bp, Homo sapiens
  PDE1A
  misc_feature [331]..[331]: Chromosome 2, SNP identification no. = rs7583421
  misc_feature [331]..[331]: allele = g, in linkage disequilibrium with rs4666828, respectively
  misc_feature [331]..[331]: n is a, t, c or g
agaaacagtaaacttgaagataaatcattagaaagcagccaatcaaaaatgaatgaagaaggaaggaaggaacaaaagaaggaaggaaaggaagagaagaaagaaagaaagaaagaaagaaagaaagaaagaaagaaagaaagaacaattaaagaaattgacagagatccagagcatccaggacaatttccagaatcctaagttatgcataacacaatcctcagaaggagagaacagagagaaagaggcagaagaaaaatattgaacaaaatgacagaaagctttctaaatttgaagcaaattattaatttgtggatttaagaagctagtnaacactaagtagaatactgaaaaaaaaaaagacctagatatatcatcatcaaattgctgaaagtcaaaataaagtctagaaaacagaaagaaaaagataatactcagtacatacaaggaagcaacaatacaatttatttttggccaacactatcagaaactatggaagccagaggcaatagaattacacattaaaagtgctaaaataaaaaaaaatcattcaacaattctaaatcaagtaaaattattcataaataaaagtaagatacagacattcccagataaagaaaatctaattgtttgtcagtataactgtgttataagaaaatac

SEQ ID NO: 1397 - DNA, 661 bp, Homo sapiens
  PDE1A
  misc_feature [331]..[331]: Chromosome 2, SNP identification no. = rs13388034
  misc_feature [331]..[331]: allele = a, in linkage disequilibrium with rs4666828, respectively
  misc_feature [331]..[331]: n is a, t, c or g
ggaagtgtaagtcctccaacttctttaatctttttcaaaattgttttagctgccttagactcttatatttctatacagattttagaatcagcctttcaacttctacaaataagcctgttacaatttctgataaagattatgctaaatttattaaaaatttgtaagaattgacatcttagaaatattgagtctttcagtcattaacatatctctccatttatataggtcttaaaatttctctcaaaaatgttttgtggtttgcagtgtggaggtttcatatacatttaattaaaggtttcccccaaaattttattattttatgctgttatanagcatactgttttcaatttttattttcaaattgtttgcagcttgcatacagaaacacaattgattctacaactaataaactcatttattaattctagtaagtagccttttgtagatctcttgaggttttctatgcagatgctcatgtttctgcaaataacagttttatttatttttattcaaactatactttgttttttattaccttcctacactggctagaacttcaaatgcaatgttgaatagaagtggtaagagtacctataatgatcttagaataaaaatgttcagtatttcattgtgaagtatcacattcgctatagacctttga

SEQ ID NO: 1398 - DNA, 661 bp, Homo sapiens
  PDE1A
  misc_feature [331]..[331]: Chromosome 2, SNP identification no. = rs12475647
  misc_feature [331]..[331]: allele = g, in linkage disequilibrium with rs4666828, respectively
  misc_feature [331]..[331]: n is a, t, c or g
gtttatatcttcagaacaggtataaaattaatgaacaaactttcaaaataccacacattatgtccatcaacaatgggagacagaaacgtgagtcatccaaacatagtaatatatttggtgtttatatcttcagaacaggtataaaattaatgaacaaactttcaaaataaagaacaatactgagaaatgaaataatctgaaaatacagaaataaaagaacttctctaagtgggactgtgatataataaaacaaaattatctgatattcattcccagttcctagcagagcttcaaaaacctgtggaatttcatgagtgataggagactctangctaatgaggcaactctgggcctatcccctagatagtttcagcatagggcctggtcaccagaaaccaaccacatgattagaaagttggaactttaagccagccaggggatatctgggaaggaagtgaggctggagactgagttcaatcgcatgtccaatggtttaatcaaccatgcctatgtaatgaaaccttgataaatactctggacaggaaagctcagtagagcttcctggatggtgaaaacattgacaaggcaggatggtggtactcgctaactccactggaaatagcaaggaagctctgcatccaagaccctcccagacctttcc

SEQ ID NO: 1399 - DNA, 661 bp, Homo sapiens
  PDE1A
  misc_feature [331]..[331]: Chromosome 2, SNP identification no. = rs724851
  misc_feature [331]..[331]: allele = t, in linkage disequilibrium with rs4666828, respectively
  misc_feature [331]..[331]: n is a, t, c or g
ttgaacaacataagtttgaactgtgtgggaccactcgtacacatattttttcccctctgtcacacctgagaagcaaaaccaatccctcctcttccattctcctcctcagcccactccacataaagacagaggatgaaggcctttttgatgacccacttccacttaataaacagtaaatatattttctattctttatgattttcttaataacattttcttctctctagttactttattgtagtaatattgtatgtaatacaaataacatacaaattatgtatttatcaacttttatattattggtaaggcttcctatccagagtgggctatnagtagttaagtttttgaagtgtcaaaaggtatacatgggttttcagttgaatgggggtgccccaacccctgtattgttcaagggtcaactgtaaaatgaaaggcctgaactgtgtctccaaaagaaagttccaccttccctctacctgacagcattttctagagttgcaaaaatgagcccatatctctagatatggccttgaagaaccaggaaactttgaaaatttgaaaaagtgttcacaggagatttaggcttattttaaactctgatttttatcttttacgttttttaatgtttttattgtcactttccttttggatatttcttttt

SEQ ID NO: 1400 - DNA, 661 bp, Homo sapiens
  PDE1A
  misc_feature [331]..[331]: Chromosome 2, SNP identification no. = rs16822886
  misc_feature [331]..[331]: allele = g, in linkage disequilibrium with rs4666828, respectively
  misc_feature [331]..[331]: n is a, t, c or g
tttcaagttcatgtagaattaattcattaaatagttgaccctgttagacaattttttcccatttttatacagagttttaaaatataaattgaaaaaaacatgattcttctttttccttctctgcccccatctaccccttcttgtcctcctcttccttgtcatccccctcctttcctccaccacctcctcctccctctccacagccaaatgcataagtaaatcaggactcttcatccacttgcagatgaatagtaaagggagaaagctagagtgatgatctaacactgctgctggaagaggccagcccactggcctttacttttcaaagtcnaaagggcaactggcattcactgataacaaatcacttgctttcttctcaaacccctagaactgttttcctgtacagagcccagctcagtgatgagcgatctttaattaaaatcctccacatcgtggatccagtggatgtagagagcctttgttaagcaaaatgatctgcatagtcttgttttcctttgacattaaatacaaataaaagcaaaaatctccctatactctgcaaatatgggtagaaaaacaacattcctgctacataaccagactctgacgttttccttttccctccaaactgtatcaatctctgggaccctggggtttcctc

SEQ ID NO: 1401 - DNA, 661 bp, Homo sapiens
  PDE1A
  misc_feature [331]..[331]: Chromosome 2, SNP identification no. = rs7567112
  misc_feature [331]..[331]: allele = a, in linkage disequilibrium with rs4666828, respectively
  misc_feature [331]..[331]: n is a, t, c or g
aggcaaaactaaagagacattaaagagaccagtggttgccaggggtaaaggggcaggaagagaggaatgatagctgaagcacaggagacttttagggccgtgaaactattgtgtgtgatactgcaatggtagatacatgacattatacatttgtcaaaacccatagaacccataatgcaaagagtgaaccttcatataaacaatggaacttagttaataacaatgtatcgatactggttaatcaattgtaacaaatatctcacaccagtgtaagatgttaataacaacgaaactttaaggtagcaggaggaagcatatggaactcatgcanctctgtacttcctgttcgatttttctgtgaatctaaaactgctctaagaaataaagtctattaattagaaaaaaaaatcagatctaatctttcctcaacaagaatggagatttatgcagtggttcaagagagacatcagctcttaacatatatctccttattaagcatcctgactagtaaaagagaaatttcaggatcccacacatgtaaagtaagttggatcctgatggggcctagaccaaatcctgcttctcagatactgacttctgtgcctaactaaaaagaggttagggtaactctctgttatggactgaattgtgtctgccctaa

SEQ ID NO: 1402 - DNA, 661 bp, Homo sapiens
  PDE1A
  misc_feature [331]..[331]: Chromosome 2, SNP identification no. = rs16822889
  misc_feature [331]..[331]: allele = g, in linkage disequilibrium with rs4666828, respectively
  misc_feature [331]..[331]: n is a, t, c or g
agttaatggactaatttgatgagaattgatgaatttaaattttgtgtaaaaggtaaaagaaagccattgtaggtccatgagtcaaaaatgaaggcagtgacaattgttgaatctcataggtaccaaaggtataatcttattaatcttagctcccttcacataacctatcatgatattcggcacatattaggaacttagtatttgtttgttaaattgtagttttgcattaaaaagaggcaacagtggtaagagaccatggaatcagtcctggttttaaatctctgttaatcctcaggaaaataagttatttaccctcttagctacagttgtngtgaaaatggcattagtaatctttcccctatggggtttaaaaagaagttttgggttaatgtatgcactgcacctatcatgtcttgtcatatggtaaaataaagaataaatggcattttgctaggaacttactatgttaaatgaattgataaaggcattaaatctgggaaataatagctaacatatcattagtgattgtaattcatgtacaaatgcctcacaactggatgagtgaagcagaaataattttcagagccaaaagaagttaatataactagctgttctgtgttcatagacacatttaattgtgagtcattaaaaggaagaaagt

SEQ ID NO: 1403 - DNA, 661 bp, Homo sapiens
  PDE1A
  misc_feature [331]..[331]: Chromosome 2, SNP identification no. = rs9784041
  misc_feature [331]..[331]: allele = c, in linkage disequilibrium with rs4666828, respectively
  misc_feature [331]..[331]: n is a, t, c or g
caaagaaccaacacattcatatacatgaaatttaatagtcacctatcactactttttaatgtagagaaaacttgttaaaataactttccaaaaattgtcaagctgacagtgtaacctagtttagacaaaatagtcaatacattcataaactcatgttgtcttccctttctccatctatggtaaaagttctcattattctctttagttcaaaggtattttcttggttctggaaaacactaaaggtctaccaccagactatttttgtaatggttaaattaatggatgagtaaagaggccagtgacacatttttgctaaaggatgaataaaatnagaaagttacatttatatttggtaagtcatagctgtctcagaaagtgactatgtgatctttgctaacaactttaactttctaggagtcatgcgaggctgggccaaattccctagtcttacagagaagttggaacggcttatttggtcccataacagtcttccttataattctgagggtaaaaccacattgtggatttgattttctctatttaccaattaatatgacacccacatctcttcaatgtcaccttcacaccaggtgaagctgatatagtagacttttatttggctccctttacacttgtagcaagtgtaaaaaaaatgcattca

SEQ ID NO: 1404 - DNA, 661 bp, Homo sapiens
  PDE1A
  misc_feature [331]..[331]: Chromosome 2, SNP identification no. = rs2623438
  misc_feature [331]..[331]: allele = t, in linkage disequilibrium with rs4666828, respectively
  misc_feature [331]..[331]: n is a, t, c or g
caatactaaacctactgtatgtgtataaacagtaggccttcctgctagcagtttctgataaccattagaatggactacagtgcttctatagattttcaaagcaaaatcatgaggtggctggagtggtttatatccctgctcactctcctctctctctgttagggggtactttccagtttccctactggcctgcttgcttccctagggaactgcatgaaatgcgagtattactatcctcctcctcaatcaaaaggcccacttccttttcctcaccacttgtccctcaagcaaagtattagtaaatcagccaaagatagagcaaataataatngttgaaaagtagtgtaaaaaataccttttaataattaaagatagtgtatactctatctcgctatgatatttacatatttttctatctttctttctttctttttggagatggagtctcactctgtcacccaggctggagtgcagtagtgcgatcttggctcactgcaacctctgcctcctgggttcaagcgattctcctgcctcagcctcctgattagctgggattacaggcgtgcaccaccacacctggctaatttttgtatttttttgtagagatggggtttcactatgttggtcaggctggcctcgaactcctgacctcgtgattggc

SEQ ID NO: 1405 - DNA, 661 bp, Homo sapiens
  PDE1A
  misc_feature [331]..[331]: Chromosome 2, SNP identification no. = rs10930995
  misc_feature [331]..[331]: allele = g, in linkage disequilibrium with rs4666828, respectively
  misc_feature [331]..[331]: n is a, t, c or g
aatatactttctcattacatggaatgtaaaggaagacaaagaggattacccttccaaagagatagcaaaactttcccattatcatacttttctaattctataatcaggaatagaattctaggatggaaaattagaaatagaacactaagatggaaaattaaggtgactcatccttgaattagaatgagcatcggagatatcttaacccagttgtctcacactttagtaaacaggtgatatattacaagtttctgaaaaatgatagtgaatttcctgggctcctaaaggtggtgaaagtctaactggaaatgtagtggattatttgtggaantttccataatagttacaagatataattcaaaaactctttaaaaatactattttaaggacgggcgcagtgactcacgcctgtaatcccagaactttgggaggccgaggcgggtgaatcacctgagatcaggagttcgagactagcctggccaacatgggaaaccctgtctctactaaaaatacaaaaaacaattagccgtgcgtggtggcatgcgcctgtaatcccagcaggagaatctcttgaactcgggaggcggaggttgcagtaaacggagatcaagccactgcactccagcctgggtgacagagccagactccgtctcaaagaaaa

SEQ ID NO: 1406 - DNA, 661 bp, Homo sapiens
  PDE1A
  misc_feature [331]..[331]: Chromosome 2, SNP identification no. = rs10930997
  misc_feature [331]..[331]: allele = g, in linkage disequilibrium with rs4666828, respectively
  misc_feature [331]..[331]: n is a, t, c or g
atactcataaatgatccaagagagctcaccaaacatgacaaaaccagcatatggaagggatattccacatagtagagtggtacttaggaggctggaaatccttagtcgtgatgcatgaggtcatctactgagaagaaagtgcatataattttagggagaaataatgatacggattaattagggacacacaaataaaggacgacagtgtgttaagggaagagcatggaatatgctattgtgtaacttgaaaagggaatcttgaaaaggcaacaactacctccgtgaggtttaattttatgtgtcaccataggtaggttatggtggccagtcntttggtcaaacaccaatttaaatgtcgctgtgaaagtattttttagatgtgattaacatttaaatcagtagactttgaataaagcagattaccctctaaattatgggtaagcctcatctaatcagttgaaaaccttaagaaagaagattaaggtcccccaaagagaaaggaattcagcttccagaacgcctttgaaatcaagactgcaacaatgactcctgccagggtttccagcctgccagtttgctttgcaaatttcagacttgccagcaccaataatcacatgagcccattccttaaaatacgtatctcgctctctctctcctctct

SEQ ID NO: 1407 - DNA, 661 bp, Homo sapiens
  PDE1A
  misc_feature [331]..[331]: Chromosome 2, SNP identification no. = rs2568675
  misc_feature [331]..[331]: allele = t, in linkage disequilibrium with rs4666828, respectively
  misc_feature [331]..[331]: n is a, t, c or g
gggcaagtacaaaggcccgaggcatgatcagtattggcatgtttgaggaacaggaaggaggccaaatgtggctggagtatactgactgagagagagagtgacccaagttgggaggcaaacataggtataagtaagctaatatcaggccttggaaggattctgtcatatttgcaatggcaggtcattgaattattttaagcaggatgtgatatgatttatgtatctaaaagaccaatgtgcatgctgtgagaggaatagacaaagttgtaagaatggtgttttgagtttagttagtttagttaactgagcacaattgcaaaaatggtctttnattttggaagttcactacttttcaaagaccgtaattggtattgagttgggtatcattttgtcctataaacatatggctcaaagtcttaatggtatattattttattgacttattattattatttttgagatggagtttcgctcttgatgcccaggctggagtgcaatggtgcgatctcggctcaccacaacctctgcctcccgggttcaagcgattctcctgcctcagcctcctgagtagctgggattacaggcacgtgccaccacgcctggctaattttgtatttttagtagagacggggtttctccatgttggtcaggctggtctcga

SEQ ID NO: 1408 - DNA, 661 bp, Homo sapiens
  PDE1A
  misc_feature [331]..[331]: Chromosome 2, SNP identification no. = rs1594615
  misc_feature [331]..[331]: allele = c, in linkage disequilibrium with rs4666828, respectively
  misc_feature [331]..[331]: n is a, t, c or g
ttgtggtacagttatttcagttgatgagccaatgttaatacataattattaattaacatccatagtttctatgaggactcacactttctgttgtacattctatgggttttgataaatgtataatgacatatgtctaccattacagtatcatacagggtagttccactgccctaaaaaaaatccctatacttcatctattcaaccttccttccttccctcacctctggtccctgacaaccactatctttttgctgtctccttagtttggccttttccagaccatcagatacttagtatcatatagtaaaaggctagactttttaatattggnttattccacttggtaatatgcatttttctccatgtcttttcatggcttgatagctaatttctttatattgctaaataatattctattgtgtgcatagatagtctatgcattctactattgaaggacatcttgattgctccaaggtttgacaattatgaataaagctcctataaacaggtacagcttttttcaactcatttgagtaaatgccaaggaacacaatggctggatggtatcataagtgtttagttttgcaaaaactgctaaactttcttgctataccattttgtattcccacctgtaacgaatgagccagaggccaagctgcca

SEQ ID NO: 1409 - DNA, 661 bp, Homo sapiens
  PDE1A
  misc_feature [331]..[331]: Chromosome 2, SNP identification no. = rs11681840
  misc_feature [331]..[331]: allele = t, in linkage disequilibrium with rs4666828, respectively
  misc_feature [331]..[331]: n is a, t, c or g
tccatagtttctatgaggactcacactttctgttgtacattctatgggttttgataaatgtataatgacatatgtctaccattacagtatcatacagggtagttccactgccctaaaaaaaatccctatacttcatctattcaaccttccttccttccctcacctctggtccctgacaaccactatctttttgctgtctccttagtttggccttttccagaccatcagatacttagtatcatatagtaaaaggctagactttttaatattggcttattccacttggtaatatgcatttttctccatgtcttttcatggcttgatagctaanttctttatattgctaaataatattctattgtgtgcatagatagtctatgcattctactattgaaggacatcttgattgctccaaggtttgacaattatgaataaagctcctataaacaggtacagcttttttcaactcatttgagtaaatgccaaggaacacaatggctggatggtatcataagtgtttagttttgcaaaaactgctaaactttcttgctataccattttgtattcccacctgtaacgaatgagccagaggccaagctgccatcatctcttgcctggcctcctgtgcagcctgctaactggcctccccctcttgctcctg

SEQ ID NO: 1410 - DNA, 661 bp, Homo sapiens
  PDE1A
  misc_feature [331]..[331]: Chromosome 2, SNP identification no. = rs4666828
  misc_feature [331]..[331]: allele = a, g
  misc_feature [331]..[331]: n is a, t, c or g
acagatacaaaaatttagctgggtgtggtggtgcatgcttgcaatctcagctactggggaggctgagacaggagaatcacttgaacccagaaccagaggttacagtgagccaagatcacaccactgcactccagcctgggccacaagagcaagactgtcaaaaaaaaaaaaaaaagaaaaaagcaattcttaaaacgtgctatacagaaaaagaaacgataaggaatatatgtgtaaaatgttaccactgtttacctctgaaaaatgctcccactggtgtttgatactttagtttttgtcccagtggagtcaataaagcataaagtcaagngtttctaaacacgacctgggtgcagatggcagccggtgaactgtgaaaactgaccctgcatccaatctgtgactcaactaatccttcggagctatttataatcataattttctcttgaaatcagatgacataactcccaaagggcttatattttgaactaaaaagtttgcagggaagggaagtaaagaaggaggcggccacggaaggagaggtcatgggattttgactcttacaatcatatgtcagtgaaaatatttctgtccacagtggactcttggaaaatgattacattcatgtactgatgtggttatttctgggcaattggtaccc

SEQ ID NO: 1411 - DNA, 661 bp, Homo sapiens
  PDE1A
  misc_feature [331]..[331]: Chromosome 2, SNP identification no. = rs10930999
  misc_feature [331]..[331]: allele = a, in linkage disequilibrium with rs4666828, respectively
  misc_feature [331]..[331]: n is a, t, c or g
tttggtttcacaggaagatatgctaaattcctgtttgagataaaggagggtcaagaaagaggaagaaaaacgggagagaatcaaagaagataaaagagaagaaggttaaaacttaccttgtttcatcgatataaactgcttccagcacagatgccgcatattcaatattcttctttaagtcgacgacgttaacatcacctctttccagctgcttcaccaagcatcttagtctatttcaaaaaagtagccaaagagagaaagagcaaggaatttattgtaactatatggaaaatagtacagtattaaatacactcagttaagatttttaacntagctatttctaggtcaacaaatagcattattttcagatttttttttgatataattaagaccagtctttattatgtaaggaattattaggtattatattcagctcgcaataatattaggagtatgggtagctagtttaagtataatatttcagagatagtcttcctgaaaattcaagacaatatagacattttcagaaaagtatattcctataatttattctatggtttttctgtttttttaatgttggcactaggagaatattcaaaggacactcttcttaattcacagttgcaaaaatatggaaccaacctaagtgcccattgaccaa

SEQ ID NO: 1412 - DNA, 661 bp, Homo sapiens
  PDE1A
  misc_feature [331]..[331]: Chromosome 2, SNP identification no. = rs12474371
  misc_feature [331]..[331]: allele = a, in linkage disequilibrium with rs4666828, respectively
  misc_feature [331]..[331]: n is a, t, c or g
gtggtgctcatagcttccactcatattacattgaggataaatctatcatatgatcacatctaactttaagggaggctggaaaaggcaatctgactgtatgccaaagaaaaagaggtaataggtatgatgaacaactagccatacattaacccagttccctcagtggcctccatgcttccagcctagtccttttgcaattcagttcctacaagaagccagagttttgtttgtttgttaaacataaattggatcatctcactcttatgtttaaaatttccaatgtctttcagtagggcattgactaaaacccaaactccttaccttgacttcntaatcttgcccctgctttaccttgctgaacttgtctcattccaatctcttcatcatgcactatggtttactcacattgattttctttctgttccttgatcttctgaaacaaactcttcccctatgatctttataccagctcttctttccttctagaacactcttccataatcttcacatagctggtatcttcctcccactaagacttcattttaaatgacacctcttcagaaaagccctccctgacaacccagtcgaaaataatcacccagtcactttctaccacatcgatgtattttaacattctacataaaacttatgagaatttggt

SEQ ID NO: 1413 - DNA, 661 bp, Homo sapiens
  misc_feature [331]..[331]: Chromosome 2, SNP identification no. = rs10931217
  misc_feature [331]..[331]: allele = t, in linkage disequilibrium with rs4264536, respectively
  misc_feature [331]..[331]: n is a, t, c or g
cagttaaaattttctgggatgagaacattaaaaatttattcttttagcagttttgaaatgtactgcaatgtgttattaactatattcaccatgctgtgcaatagaactcaagaagaaaaacatatcctttctgtctctgagattctgtgccctttgactactatttcttcattctcccatgcccctgctttgtgtaatcaccattctactttctgcttctatgagtttaattgttttagattctacatataagtgagattatgtggtattttctttttgcctggcttatttcatttagtataatgctctccaattctgttcatgttgctangtataacagaatattctttttaagcctgaatagcattttattgtgtatatatacattttctttcttcattcatctgttgatggacacgtagattgattccctttcttggctgtagtgaataatgctatagagaacatagagtgcagacatctccatctctttgacaaactgattttaaaacttgtgagtaaatacccagaagtgggattgctggattatatgccaattctatttttagtttttttgaaaaacctccatacacagttctccataaggcccacaccaatttacatttcaccaagcgtatgaggcttcccttttctccacatc

SEQ ID NO: 1414 - DNA, 661 bp, Homo sapiens
  misc_feature [331]..[331]: Chromosome 2, SNP identification no. = rs10804001
  misc_feature [331]..[331]: allele = g, in linkage disequilibrium with rs4264536, respectively
  misc_feature [331]..[331]: n is a, t, c or g
gctgtctttgaatgttgttgtttcctttggtgtgcagaaattttagtttgatgtaatcctatttgtctatttatccttttgttgcatgcgtgttttgggtgatatccaaaaataatttcatggcccaaagttgtgtgaattttcactgatgttttcctctattagctttaaaggttccggtgccatgtttaagtgtttaatccattttggtttgttttttgtatatggtgtgagatgaggatccaattttattctcctgcatgtggatatttagtgttcccaagaccatttattgaagagactgtctttttccctttgcatattcttggcntctttgttaaaaattaattgactgtacatacatgggtttatttctggggtcactattttgttcaattggttaatatatctattttttttttttgccagtaccatgctgttttaattgcttcagctttgtagtatagtttgaaattagatagtgtaatgcctccagctttgttcttcttgctcatggttgccttctttattcacggatttttagttccatgtgaattttacggttgtttttttctatagctatgaaaaattacactggaatttggataagcactgcactgaatctgtagatctctttggattgtacagacattttattata

SEQ ID NO: 1415 - DNA, 661 bp, Homo sapiens
  misc_feature [331]..[331]: Chromosome 2, SNP identification no. = rs875162
  misc_feature [331]..[331]: allele = g, in linkage disequilibrium with rs4264536, respectively
  misc_feature [331]..[331]: n is a, t, c or g
ttttcactgtggccagcagctgtggcatgtgttgaatttggggtcagtgagatggggaacaacagggctatatcacaaataaccactaaaggagggaaaattttaataaaaccaaaggtgacagggcatgactggtcaccttgaccatgacaagccaaaactggatgctgaagcagcaactatattagacaaatttatgacacaaaataatgttcatccctatgcctagagtttgactgttttacacttattaccttctgaaataaaaaacagtccctaaaacattaaatctctgctagatgttccttgattcctccacagttgtctccantgtgcttggatataatgctctgcttttgtttcaggttttcaaacttcagatcttacataatgtctatgttctgaaagttactgcgaagagctactttgctatcaccactcctaccctctgtgaaggggtgaacagctacccacccaggtgtacccataaccataacagtttcaggttaccacactatactttagttctcactgcactaacaaaccatgccgcagtggcataatgaccaaagaaaatgttccactcccagattctgtgtggcttggtcactgaagtcatgctgcttatacataaatctcaaagtgttttcaggtatctgtc

SEQ ID NO: 1416 - DNA, 661 bp, Homo sapiens
  misc_feature [331]..[331]: Chromosome 2, SNP identification no. = rs6715226
  misc_feature [331]..[331]: allele = c, in linkage disequilibrium with rs4264536, respectively
  misc_feature [331]..[331]: n is a, t, c or g
acatgccaaggatcaatcataaacctcaaaaaaaaagaaaataacatttacaaatatatagagagataatatttattctcaaaatgacttagctttgcttgtacttcttcctgctagtatggaaccccaaataacatccaattgtcgcaagagaaatttgctaagcaggcggaaatatgattcaagagcctcttttagcttacagccagaaacttgctgatttcaatctttcccatattagcagctgcaaaaggagcaaagtgagagagagttagcagagctaacaaaaattcattagactcaataaatttataaaacttattaagacgtnattgctgaggtatcatggtgcatctcgaaaggctgctgcattagcaagctttactatgggtgctctcctcagcccctttaatcttatgctgaccagttgtgtttctgagactagctggggtgaggtgaaggatctgctttatgttgttgttgttattattatataattaccagataattctgtcaagtatatgaaattgggaaactttgaactaatcctgacaaggatggttgctcacagaacctcagagaaaatgttttaaaggtcagctctactataaggttttggggaaaaaagaacccttgctaacttgctttttccacacatcct

SEQ ID NO: 1417 - DNA, 661 bp, Homo sapiens
  misc_feature [331]..[331]: Chromosome 2, SNP identification no. = rs7582258
  misc_feature [331]..[331]: allele = c, in linkage disequilibrium with rs4264536, respectively
  misc_feature [331]..[331]: n is a, t, c or g
tattttgattattgttatggttttactgctgtgtacataagccaagcttatgaaattgtatgctttaaacatgcacaatgttttgcatatcaattttccttcaataaagctgttaaattaaaagcaaagaaaagcatttctgaatccttaacatagctcaaatgttaaagggaattcatctttattttttaaattactactacaattgattatatcaaagactacactactggcactaatagtggtctcataaaacagtcatattttactttgcacttttaaattacacaattttcaaagtatatacacacatatttttcaaaatccctanatacaaaccattaaagttgtaaaagaattttaaattattatatacaaacttcacaaatatatctgtatgcttataaatttatctttacagcaccagaatgcttactttttacagggttctaaattctattttactttcttaaagtctgatattctacaatttttctttgaatggcataccccttaagcataatgaaggatgatatgagtacctcttaacttcttgcagagtcttgtccaaacttcttatagaacacttctttttctcctacataaaaacaggtaaaataattacaaaataatgctaaggattggttttaagttttaaata

SEQ ID NO: 1418 - DNA, 661 bp, Homo sapiens
  misc_feature [331]..[331]: Chromosome 2, SNP identification no. = rs6434159
  misc_feature [331]..[331]: allele = c, in linkage disequilibrium with rs4264536, respectively
  misc_feature [331]..[331]: n is a, t, c or g
gaaagacgtttagttgactcatagctcagcatggctggagagacctcacaatcatggcagaatatgaaggaggaacaaaggcatgtcttacatgtagcaagcaggacagcgtgcgcagggaagctgccctttataaaaccatcagatctcatgagacttattcactatcatgagaacagcatggggaaacctgcccccatgattcaattacctcccaccttgtccctcccactaacatgtggggattatgggagctacagttcaagatgagatttgggtggggacacagccaaaccatataagtgggagaatgaggggttctaataaatanttttgtcaaatcaaaagaagacaattctacctgccatcaaagcatagaattagaaggaaaaaatattttaatgtattattctcacttatatgtgttttttttaacttgggcaaggagaagaaacaaagagattgaacataaataaactaaggatacaactgcttttcctttcaagtttagtgttcaaacacagctcaatacaattcttccccgcaggaaacactttcatttagggccaattgagaggtgacaaattcaactgcttaaaattaagagcatctacagccctaaagtactaagtgaaagagatagactgagagcacatgatga

SEQ ID NO: 1419 - DNA, 661 bp, Homo sapiens
  misc_feature [331]..[331]: Chromosome 2, SNP identification no. = rs7605905
  misc_feature [331]..[331]: allele = t, in linkage disequilibrium with rs4264536, respectively
  misc_feature [331]..[331]: n is a, t, c or g
aattagagctgattaccatttcccctggaagaccagcaataccaatcctgacttccttgtttatttcagatactcccaaaagtgaaaatctccccaagcccccatctaattctgtgtacaaatcttactctacacccatcaagctttgacacaactgaccatgccctccttgaaatttcttttcttttttgcagacatcacaatcttaagattctcatttctcactggctactcttattcttcatagctggttcctccttatttttagatcttgagactttggagtgactcagttctcagttattagcactctttgctctctatattgtcnttccctagctaacctcatttattcttacattttataaatgatattattaatatattgatgaatatcaagtttacatgcccatgatattattaatatactgatgaatatcaagtttacatgccccaaactttacctttaatttcaaacttatgtatctaactttccagacaacatcagcaattggatttctcataatctaataggcttagcatatataaaagagaactcttgatttgcccctccaaaaaacaagtccagcatcatcctcaggcttacttatctcagtaaatgatactaccattcttccagttgtttaagccagaaacacac

SEQ ID NO: 1420 - DNA, 661 bp, Homo sapiens
  misc_feature [331]..[331]: Chromosome 2, SNP identification no. = rs11689385
  misc_feature [331]..[331]: allele = a, in linkage disequilibrium with rs4264536, respectively
  misc_feature [331]..[331]: n is a, t, c or g
tcgtcattaagtgcagtcaactctatcttcaaaatatagactgtatccaaccaataatcatcccttccacaactactatcctagtttaagctaccaacatctcacgcaaggactaccaaaattttttaattggcttcccaatttactctccatgcagactttttctgtctgtctctgcagatccttacagtgctcacttacctattctttgacttcaatctcttgttgctctctttactccacattccaaagtaaacaagccttttttttttttaatttccttagaggcgtatagtggaagaaagggaacaaatcttgcttaaattcaccntctactagctaccatttcatttccttctctcctttcactaaaaaatacctcaaatgaaaaattaacatcctagtcaatggtttaacaaatattaattgttcaccgatttctcaagtatcatcaattacctcttagttatgatatataatgcttttttcccagttcacattcgccttgtcctccctatactgctctctctctctatatataaatacatacatacacacatatgtgtgtatatatgcatatgtatgtatatgcatatatacacatgtacacatgtacatacacaatgtacacatgtctatacatatatgtatatgtgtgcat

SEQ ID NO: 1421 - DNA, 661 bp, Homo sapiens
  misc_feature [331]..[331]: Chromosome 2, SNP identification no. = rs12615770
  misc_feature [331]..[331]: allele = a, in linkage disequilibrium with rs4264536, respectively
  misc_feature [331]..[331]: n is a, t, c or g
ggaagatggaaaaacagaaataggtggttttcttgggaggagaatttgaggacaagttttataaaaattatatttcattttaaattctacattatttttataatgttgctttgtgtaattagtataataaaattaattatccagaagttaaaattcaagtgatctctataatatgctttcaacattgtttttgcacttcttattccactgttccattaaataaaatttctgctatctctatatcctctctattttcaaactatgaaaattacatccttgaattattttaaacttaaattccactattttataaatctcctgattatattcnctggaaataattcccttttccatataacaaccctaacttcttatgagaacgaatcacttaacccacatcatttaggcttttcattagcatttacgattttattttatttttcttttctcctcaaattgaaacaaaaaaatccttaaaaacaagactctctcctttgaagcagaggccacagtagcttgaaaacacacagtagtcatttaataaatatttattgtttcatcagataggtaatcatatgtttctaaagcaacaagatattttctcacggagtaacttttgactttcttttaaagttaaaagcataaacagagatgtgttgcc

SEQ ID NO: 1422 - DNA, 661 bp, Homo sapiens
  misc_feature [331]..[331]: Chromosome 2, SNP identification no. = rs1021281
  misc_feature [331]..[331]: allele = t, in linkage disequilibrium with rs4264536, respectively
  misc_feature [331]..[331]: n is a, t, c or g
ttcatttacccacttaagagaatctttcccttaggattttgtaatctacccaacgtcagcacaaactatatatactatatatatatatatatatatagagagagagagagagagagagagagaatattttatatattcatcattcactatgtctgagttttaacaaagaaaattatttcctacaaaactaatttggtcccaatcatttaaaaaattactttaaataattcaatgatcactgcagttattgatgtctctacaaccaccattggctgaaacctgtacttcctcaggttcagtacatactctgcacttaagtgcagagtaatantaagtggttgctctagttatgttacctatagggtggaaactgacaaaagtagccaccagttggtggctaaggtggtgattttgtactgccacctctctcctttgccatcagccggggtggaaggcagaaatccaaagagctatttttattctctggcaatttgccagcattatataagcaatcccttggccagctttgagctttgtttactgctagctaacataagatttagaatgagtgtaatcttcagcttttgtaaagagtatcaaatgataaattgagtaatcagatctttgcctgaattgcttactgcagtgaaacatttattaa

SEQ ID NO: 1423 - DNA, 661 bp, Homo sapiens
  misc_feature [331]..[331]: Chromosome 2, SNP identification no. = rs12998383
  misc_feature [331]..[331]: allele = g, in linkage disequilibrium with rs4264536, respectively
  misc_feature [331]..[331]: n is a, t, c or g
gtgcacattcccaagaagaaaacagtatatgcacaccaacaatacagaactcttatatttagaaacttttcaatttccaacacttctcttatttatggagtaccaaataacattggaattttccagatgttttaacacttttgtttcaaagtatcatctttcctgtgtagagtacaatgaggctgaccacaaaaaaaaatagaaaaaagaataagaattctatgtattgctatcgaaattttctgtcattacaatgtgtgccttagcttctagcaggtaggtatctatcaaaaatatatctctagttctatattaatatttataaattttncatggggaatatggacaaaaataaagagtatgttaaatctaaaaacattttaaaattagccacataaatagtttcagtacaagcccaaattttgtatatcttattggagaaagtaaaaaacaaatatggtttattccacacaggtaaagtaggaagacacaaatgaggaaataaatagcttctttcctgacagtgggaaaagcattaacaaagagctcaccaacctctaaacattattagtgctcagaaaaggcctagaagggattcataattaagcccttgggggaaacacaagaaataagtataaagttgaggcagtagaaaggaaag

SEQ ID NO: 1424 - DNA, 661 bp, Homo sapiens
  misc_feature [331]..[331]: Chromosome 2, SNP identification no. = rs16827480
  misc_feature [331]..[331]: allele = a, in linkage disequilibrium with rs4264536, respectively
  misc_feature [331]..[331]: n is a, t, c or g
cccacaacctcaaaaaacactcctgcaacctcaaaaactaggactgatggtcaacttctgacaatcatttgagagaaatttacaccataatatgataaatcggacagagaattaatcattatttttgccagaaaatgagtaaaattgttagccaaaattaacattagaaatatattttattgagtactccagcttttcctggacagataaatgaaaaatctgtaaacattaaaactggccatctcttatttctttcaagcaacttgggaatgggttacctacttcctctataattacttttttctacgttttctgcatccattctgagacnaaatgctacccatggcaagtaagtacataggaggaggggaatggagttagcatagatcatcctgttaaagtttacatctcaaacataacatttttaactggaatgaccaagaagcgggagctacaaagctcagtgacctcaatgcattttgaagattatagtttttcatgtaccttttcttatgtgaatgtcgtaaaaccaacctaagaatgcattcatctgggttagttgtattaactaacattaacaactaataataaagttgtgttagttaatacaaccaacccagatgaatgcattcttaggttggactaagaacaatgcacattc

SEQ ID NO: 1425 - DNA, 661 bp, Homo sapiens
  misc_feature [331]..[331]: Chromosome 2, SNP identification no. = rs7566161
  misc_feature [331]..[331]: allele = c, in linkage disequilibrium with rs4264536, respectively
  misc_feature [331]..[331]: n is a, t, c or g
ctagagagccctttctctctattgattattattgatttcttccatcagaaaagagaagcaaacgcaatacaaatacataggtgtcataaaataactgtgtttttagacccaaaacatatcatgaagcaaagatatctttgtacgcgtaaacattaaccagccagaagattcttatttattaaatatcacttcctaaaaatttgttaaaagttgtggcaactgtaattactactccactgctctaactggctgttaagaaaaaaataataaaccaaagaaaattagatcctcttcccctgctaccagcatccctgtattcctcaatagaganacacatgtgcatgcatacactcacactattcacacacatgcacatacacacacaccccaaacattgacagtgaagaaagaagcagggaagtcctaatcatgctctagtaacaaagtgctatggaggtgggctgggggtagggtgtcatgttataaaatatcttaagcctaaatacagcctctttctacggaagttgttttatattcattactcaaatggataacgctttgagaacgatccacattctactaagtatatgaaaattgggaagatgggaagctaagacacagtccaggacaaccaattaacactatcataggcagtaaggtt

SEQ ID NO: 1426 - DNA, 661 bp, Homo sapiens
  misc_feature [331]..[331]: Chromosome 2, SNP identification no. = rs10165461
  misc_feature [331]..[331]: allele = c, in linkage disequilibrium with rs4264536, respectively
  misc_feature [331]..[331]: n is a, t, c or g
tgaagcaaagatatctttgtacgcgtaaacattaaccagccagaagattcttatttattaaatatcacttcctaaaaatttgttaaaagttgtggcaactgtaattactactccactgctctaactggctgttaagaaaaaaataataaaccaaagaaaattagatcctcttcccctgctaccagcatccctgtattcctcaatagagacacacatgtgcatgcatacactcacactattcacacacatgcacatacacacacaccccaaacattgacagtgaagaaagaagcagggaagtcctaatcatgctctagtaacaaagtgctanggaggtgggctgggggtagggtgtcatgttataaaatatcttaagcctaaatacagcctctttctacggaagttgttttatattcattactcaaatggataacgctttgagaacgatccacattctactaagtatatgaaaattgggaagatgggaagctaagacacagtccaggacaaccaattaacactatcataggcagtaaggttcccaggaaaaacaatatttaaacaatgaggaagaaaataagaattagatgatcttttatacttctgtggaggaagaaaataacaattagatgatcttttatacttctgtgttttcacattt

SEQ ID NO: 1427 - DNA, 661 bp, Homo sapiens
  misc_feature [331]..[331]: Chromosome 2, SNP identification no. = rs12990062
  misc_feature [331]..[331]: allele = c, in linkage disequilibrium with rs4264536, respectively
  misc_feature [331]..[331]: n is a, t, c or g
ctgattgtttcacaaatatagatgagatgaattttaaaaggccaattgagattagcccaggacctatttactcattgatgtgatgtgaccaaagtgttactgatatggtttggctccacatccccacccaaatctcatgttgaactgtgatccccagtgttggaggtcgggcctggtgggaggtgattggatcatgggggtggtttctaatggtttagcaccatgcccctagtgctgtctcgtgatacagttctcacgagaccttgttgtttggaagtgtgtagcacttcccccatcactctcacttcctcctgctccagccatgtaggangtactggcttcactttcacctcctgccatgattgtaagtttcctgaggcctccctagctatgtttcctatacagtctatagaatggtgagccaattaaaccactagcaatgtgagaattgactaatacagtgagaaataaatttcccagttcttcaaaatttatagtttttaaaatgtttgaaacataaatatatttcataaattcacacctaataatctttcatttaaagattttatcttaattgttaaagttagattgtcctttccctgtcaatgatctcatagttgttacatagcattttccaaaggttgctaatatttattacttt

SEQ ID NO: 1428 - DNA, 661 bp, Homo sapiens
  misc_feature [331]..[331]: Chromosome 2, SNP identification no. = rs2029233
  misc_feature [331]..[331]: allele = c, in linkage disequilibrium with rs4264536, respectively
  misc_feature [331]..[331]: n is a, t, c or g
tctaaaaaaaaaaaaaaaaaaaaaatcaccaaaatattttctaatattttcttctaaaatgggcttttcatttttgcatctttaattgacataaaatttatttttctttatggcattaggtagagatttaattttatcctgtatcatagagatatgctgattctgccacttattagcagtgtgtccttgtccaagttacctaccttctgtgtacaatagtttcttcatcgatgagatgggattaataatagtctttacctcgtatatcatttagaagattaaataaaataatagtgtaaactacaatgcctgctacataatgatcaccctntacttattcgttaatagacctaacgacttattcagcaccatttattgaatagcccctacttcacctgttgagtgcctcatgtacacatatatggattaatttctaggttctctattctgtttcttgatatattaattctttgcaacaatactcaaatttcaattattgtaatttaacagcaattcttatctgatggagtgagtccctcctaagggttacttaaaaacgtttgggctttttactcatatgtatgaaatttatgtgaaagttaatttctgttaaatcagtgttggaattttgatcagagttgcattgaatttataagttatt

SEQ ID NO: 1429 - DNA, 661 bp, Homo sapiens
  misc_feature [331]..[331]: Chromosome 2, SNP identification no. = rs12614513
  misc_feature [331]..[331]: allele = g, in linkage disequilibrium with rs4264536, respectively
  misc_feature [331]..[331]: n is a, t, c or g
atcctcatgcatttgcagaaatatctgaacttcatcataaatgtcagcacatctatagttgaaatttcatatttttatctgcaacttgataccctattttaactttatttttatgtaatgaataagatggtcaagttaagtatttaaatctttaagctataaagaattgttttcattttgcctttttttgtgcttttaacctggaataacatagatatttctttgaaactatattggtacttttaagttttcatttttcatttaatgtgagaaaactaacaactggcttttcagcatcatatgttaaattactagagatttgatagttatntatagattttaaagaatgatcccattcttcattataaataatttctcttaagagatctcactttagaagtctgaatgggtttctacaacttaaatttgtattactcttttaatgttttatccctaaaaaacacaaaagggtggttttatccctaagtttagcaaatgctattttggtaacagaccataaaatatagcttttaagtcctctaaaatcgatactcccattcaactgaagaagaaattgtttcttttttatttttttgagttgtttttttcctaacaacagtgcccttaactattcagcattcacatctgtgacttaaacaca

SEQ ID NO: 1430 - DNA, 661 bp, Homo sapiens
  misc_feature [331]..[331]: Chromosome 2, SNP identification no. = rs2029234
  misc_feature [331]..[331]: allele = t, in linkage disequilibrium with rs4264536, respectively
  misc_feature [331]..[331]: n is a, t, c or g
gccaattttgtagtttccatctgaaggctggcaggcttgagacccaaggagagttgatattttagttagagtccaaaggcagaaaaaaaaaaattccagttctaagggcagtcaggcaggaagaattctgtcttaattgggaaagtattatcctttttgttctatccgggccctcaactaattggaaaaggcctaagcacactacagaggataatctattctactcagtttacaaatttaaatgtttatataccatctaaaaacacctccacagaaacacttagaataatgtttaaccaaatatttgggcacctcatggcttggtaaaatngacacataaaaagcatcacacctgccatatagcaataaggaaccattttttgttttgttttgttttaagtggagttgcaatcattcctggaatatagtagctttagagtaaataagattcttgtttttgatgaattgggatggcacacaggtggaaatgtgatagcttatccaatatccgtattgtgtgacggatatagtggcaatgatactatcagaaatgtgtaactgttaagtgcaattgattcactgaacaaagaaacagacagcctgaaattagccaaccaccatctagggtcaggtttggaagccaaaagtcctctatggtggt

SEQ ID NO: 1431 - DNA, 661 bp, Homo sapiens
  misc_feature [331]..[331]: Chromosome 2, SNP identification no. = rs1487351
  misc_feature [331]..[331]: allele = g, in linkage disequilibrium with rs4264536, respectively
  misc_feature [331]..[331]: n is a, t, c or g
actgaacaaagaaacagacagcctgaaattagccaaccaccatctagggtcaggtttggaagccaaaagtcctctatggtggtgtttttttaaaaaagcttcatcttcagcaaggaaacagtagattagtctgaaaactaggccaagatttggttgtaactatagcagaattgcagagaaattttaaattaataaccctatcaactttcctctgctgacatcaaagcactaataagaactactataacatctggttgatgcacttaagagctttgattctctgattccctggaaccctctgatccaggggttctagccaactatactcttnctagaagatagcaccctccctcgcctggaaataatatagaagcgttagttagaatacattttgcaagaatatatttgtcctgcttaagaagtatccttcatggcttctaagcatctaactaggtcttttccagctgagaaagaaagggctgccccagctttgagaaaaaataaattatttgccaaaaagccccagtgaaaacagctaaggattagagcttaggagtgatagactggcttaataaaagagtggataagacttgggtttttaaaaaattgtttctttatccagtattaactctaaacaattacttgcagacactccaatctg

SEQ ID NO: 1432 - DNA, 661 bp, Homo sapiens
  misc_feature [331]..[331]: Chromosome 2, SNP identification no. = rs2887769
  misc_feature [331]..[331]: allele = t, in linkage disequilibrium with rs4264536, respectively
  misc_feature [331]..[331]: n is a, t, c or g
atccttcatggcttctaagcatctaactaggtcttttccagctgagaaagaaagggctgccccagctttgagaaaaaataaattatttgccaaaaagccccagtgaaaacagctaaggattagagcttaggagtgatagactggcttaataaaagagtggataagacttgggtttttaaaaaattgtttctttatccagtattaactctaaacaattacttgcagacactccaatctgagaagtatggtaatgacaagcttagacattcactgatgaggattctgttatccaaccaaagaagggaatctagagcagccgagccatctaagnatgagaggattctagatcaggtgctagagaaagaagatgaatttccattgcagccttagtaccaattacagcagggtgactgtagtttttctcaccaaccctgtgattttaaatgtttgtttttttaaaaaaagtaaccaggtaccacttttaagaaacagtaattagatgtagttaatataagatgtaaatatgcagaaaacagaaactggaccccttccttacaccttacacaaaaattaattcaagatggattaaagatttaaatgtaaaacttaaaaccataataaccctagaagaaaacctaggtaataccattcaggacatagg

SEQ ID NO: 1433 - DNA, 661 bp, Homo sapiens
  misc_feature [331]..[331]: Chromosome 2, SNP identification no. = rs10184559
  misc_feature [331]..[331]: allele = c, in linkage disequilibrium with rs4264536, respectively
  misc_feature [331]..[331]: n is a, t, c or g
ttaaaatgtctgcatctctgtgattaaggcatgtttctgaaactggggaaggccactttctggaaatgcaaaggaatcaccaccaccagaagcaaactcaataaatgattcttgggaggtggttataaatgtctaattatcctcaccactcaggtgagatattcttttattttttataagctttactgaggtgtaatttacacaactattttatatagaaagatataaatcatctatttaaagtatgcagtttaaagtttataatttgaaattttttgttataatcacagatgtgttaccatcgctatagtcaattttaggacattttcancaactcaaaaataaactctctactagttagctgccattctccaatctcccaatctacatgccagctctaagaaatcactaatttactttctgtctctatatatttgcctattctggacatttcctataaattgaatcatataatatgtcatttttgtgatttacttctttcacttagcattaatgtctcaagattcgtccatgttgtagcatgtatcagcacttcattccttattatggttggataatatttgtctttcattttactttttgtttctatttatctcacgtctttttgttcgatgctgctttcattgttttattttgattg

SEQ ID NO: 1434 - DNA, 661 bp, Homo sapiens
  misc_feature [331]..[331]: Chromosome 2, SNP identification no. = rs3919953
  misc_feature [331]..[331]: allele = c, in linkage disequilibrium with rs4264536, respectively
  misc_feature [331]..[331]: n is a, t, c or g
ccttcaagatttcctccttgcctttggcttctagcatttttactgtcatatatctgtttgtagctctctgtgtttatcctgctcagagttcactgaacttcctagatgtgtggattcttgttgttcagtaaattttggaagttttaagctattatttttttgaatattttttccttgtctcctgatattcttaatatgcatatattggtatgtttaatagtattcaacccttctctgaggatctgtttatttttcttcatttctttcctctgtgttttgaacttgcataatctctatcaatctatcttcaagctcaattctttcttctgtnaatttacgtcaccaaattcaatgatacaatgttataaatattaagcaccactagttaatttttcatttcagttattgtactctcagctccagcattttatttccatttggttctttctataaatcatttttatctctttatttttattctctattttataccacattgtcttcatagcttcttctatttatcattttttaaatttctttgaacatattcataatgattattttgaaatctttgtgtgttaaaatctgatatctggttactctcgcaggtagttttaaatgcctgctttttttggtgtttgagtcatacttttctgtctct

SEQ ID NO: 1435 - DNA, 661 bp, Homo sapiens
  misc_feature [331]..[331]: Chromosome 2, SNP identification no. = rs10931222
  misc_feature [331]..[331]: allele = g, in linkage disequilibrium with rs4264536, respectively
  misc_feature [331]..[331]: n is a, t, c or g
ttttacttcgtaatacctcaaaactaattatgataacaggcaacacattttcagatactattatcattcttgtttcctcaccatgcttagttagtcctgaaagcatgcctgtctattttatgtgaagtgcttttcttccttttgctattcagcctccagttcggaactctggtattatctttctgcttggatgaatatccctgtgtagctgctttaaaaaaaagagagacagagagaaaccatactgatacctaatggagagactgcattcttgaacttcattattagagatataaccaccaaattgactttaaatgtgagatgcagatgnccacaaatgtaactttccaagttgtaatcaaaattttacatttaacttactattgcctctctataaaaaattcatttttgtggtttttatatatgctttatcctcacaataatttggttaaaatatataaaaatatataatattatacatatccaactatgtgaacatatatttggatataatatttggtatgtatatttagtaaaaaatatgaagatatattttgtaaatatatatatgtgtggagatatatatatatggggctatacctaataaatacattgtcctgcccattttaccaaaataaacacaacattttatacacacaca

SEQ ID NO: 1436 - DNA, 661 bp, Homo sapiens
  misc_feature [331]..[331]: Chromosome 2, SNP identification no. = rs991084
  misc_feature [331]..[331]: allele = g, in linkage disequilibrium with rs4264536, respectively
  misc_feature [331]..[331]: n is a, t, c or g
gaataattggataattcctattcaagtctcatattttgtttcctcaatgataccttaataattaattaaattatgctgtcatagtactctgtatttattcttcttagcatatatctacatagattataattcaatacttgttgttgctcaaaggcacatcactctatggtggtacaattaaataaaaattctgaccaagaagcattactgagtactgagagtaacactatcaatacatagcaaaacttatcaaaagaaatctgcttattgcaactcctcccctaaagattcattcaacagtgtgatggctctaatccctttttcacttttntctgcctaaaacaatctgaattgtacctccacctaatcaactatcctcttcatttcttactcaattatctcgctacctctttactatatatagaaatctagtctttttcagcagcattaaaaaaatgtcttctaagaaggatagagaccttgtatccttctataaatgggaaagggttataaactcttcagtaatgtttaatttataaccttactacttacttagtccctatctttcttagatctcttacctataattgagggagtgaatgagtgaataaatatttgaaaaagaaattggtaatgacatcgtgattcactgacaatatgc

SEQ ID NO: 1437 - DNA, 661 bp, Homo sapiens
  misc_feature [331]..[331]: Chromosome 2, SNP identification no. = rs9630989
  misc_feature [331]..[331]: allele = t, in linkage disequilibrium with rs4264536, respectively
  misc_feature [331]..[331]: n is a, t, c or g
tccttacaatacgagggcacatttgtttcctgcctatgatagtaaagataatgtcttcctctggaacaaagataggacagattttctagcagtaccttacatgattttgagtttcctaagccctggattccacagctgtcccacaaatctattgtgtgtccacttgagttcacttctgcattgccccctatgggacttgtcaggagaggaagcaaaggaagtgcagtgaacataaagctctttgcaggccactgttacataagtaataaagttctttgtctttaacccaggaatgtcatgtcttctactagcatctatgaaactgtaaaangctaattcattagtttgaaagcagggtaaaatctgaaaatcatttttttgacataggcagattatagtctttctttaatgcctggtaattttgtattaaatcctaaattaagtaatacattgttcagtgctatattaaagtatttcctttaaataatttttgtttgtgaagttttccagttaaatttcttggaatgtgttgtatttgtacatccatcaaggtgatgcccttcagaagactctatagaatacagattacaaactcttctctggttgatggcaactttatgtctagccctgtgtgagctctggaagttgtgtaatctacctc

SEQ ID NO: 1438 - DNA, 661 bp, Homo sapiens
  misc_feature [331]..[331]: Chromosome 2, SNP identification no. = rs1386516
  misc_feature [331]..[331]: allele = a, in linkage disequilibrium with rs4264536, respectively
  misc_feature [331]..[331]: n is a, t, c or g
tgtgaagaaagtcatttattatttttaaaattttctaagctcgtaacctcttaacagtaatttttagtaacttttatcagcaaacatttttaagacattttgctatgtgtgatatggcatgtaaagatgtgtaggtctgagttttctgattcaagaacttcaaatctagtcatggaaacaagataatttctgtctgctatacattagctgtatgaatctatgccaattacttaatttatccaagtgcaaataaataaaaagtagaaatagatgatatttaaatgttttcttacatcagaaaagttaggctcaataaaacagtactttaaangtttatctgtgtgtttacctatatgttagataagagggtgtcagaaaaaaaatgactccatgacttaccctcaagatgtttaaaactaactgtaattcaaaggcttttatttattttgtaaaagaatgttccaatgacaaaactgtgaagttgctaaaataggctctattaataatgaatgaaataatatttattgatgtgagttgagaatttcattattattgctccccaaataaccagaagacagaacgaaagggatatcactttttttaattatgctttagttggtagcttaatttggctgtaaaaagagggaggagttcatctccc

SEQ ID NO: 1439 - DNA, 661 bp, Homo sapiens
  misc_feature [331]..[331]: Chromosome 2, SNP identification no. = rs13005466
  misc_feature [331]..[331]: allele = g, in linkage disequilibrium with rs4264536, respectively
  misc_feature [331]..[331]: n is a, t, c or g
ttatgtttatgctttaaggcacctacttctacactatataaacaaagtaataataggtaaaatataaaaatataaaactaaagtgctatgattggactcaaatataagacaaattactgtggtccagaaatacaactttcctgcctaatgggactgaatcagcacgtgtgctgcactgtggatccagagacaggcaacatctcaagtttggctctggtgaggtaatggacatcagtattgctccaaaagaaacattaactggaaacaggcacatggcctgatgtcaagaggtgggaagactcatgacagaaccagcatagtatttaaggangatgaatccaaactgtttccaatctgctgaatgtaactatgacagttataacaatataggcaaaaaggcagaaggacaaaactaaactgcatgatcagaacagctaagaacacaccttgctcccaagacccagactaggagatctggctctaaagagttggagcgaaaaaacccacaaaactcactaattcaaaaaaagaaaatacgaaaaattcaatgctaagaaaggcagcaattaaacattaacatcaaaataggagtgcagtccagaagatatttaacttcatagaacaatctatcaaagacttatattggatactgtcttagtct

SEQ ID NO: 1440 - DNA, 661 bp, Homo sapiens
  misc_feature [331]..[331]: Chromosome 2, SNP identification no. = rs1386517
  misc_feature [331]..[331]: allele = a, in linkage disequilibrium with rs4264536, respectively
  misc_feature [331]..[331]: n is a, t, c or g
gtaataataggtaaaatataaaaatataaaactaaagtgctatgattggactcaaatataagacaaattactgtggtccagaaatacaactttcctgcctaatgggactgaatcagcacgtgtgctgcactgtggatccagagacaggcaacatctcaagtttggctctggtgaggtaatggacatcagtattgctccaaaagaaacattaactggaaacaggcacatggcctgatgtcaagaggtgggaagactcatgacagaaccagcatagtatttaaggaagatgaatccaaactgtttccaatctgctgaatgtaactatgacagntataacaatataggcaaaaaggcagaaggacaaaactaaactgcatgatcagaacagctaagaacacaccttgctcccaagacccagactaggagatctggctctaaagagttggagcgaaaaaacccacaaaactcactaattcaaaaaaagaaaatacgaaaaattcaatgctaagaaaggcagcaattaaacattaacatcaaaataggagtgcagtccagaagatatttaacttcatagaacaatctatcaaagacttatattggatactgtcttagtctgttctgtgatcctataaagaaatacctgagggtgggtaatttataa

SEQ ID NO: 1441 - DNA, 661 bp, Homo sapiens
  misc_feature [331]..[331]: Chromosome 2, SNP identification no. = rs10189482
  misc_feature [331]..[331]: allele = a, in linkage disequilibrium with rs4264536, respectively
  misc_feature [331]..[331]: n is a, t, c or g
tccagcttgaggatttttagacttgtatactttattttagtaaattaagttcattgtatataagcataatataattaaacagcaaagctgaggttattacaatcattataaaatatatcaactgtagaaatatgtcatacggttgtgaaaagaatgagaaaataaagtagtagttaactgatgaaatgatagatgtttttatattgtattaatcttctaactgaaacttttttattgaaggtaaaggaggagaaataaaaggataaaaatgaatttatttttaaatcaacatgtacaatgagatctctgtgtgtttcctagttatgcaggnaattaattcgggggacgaaagatgaaaggaaaaagaaacagatcaaagttttcctagtttttctgcctttaagttatccttccagtgagttactttagaagatttgttattgttattttgccatccacaagtgttagctttattccaaataaggcaagggttctatttctaaataaataatattatagcaaaagttaaaaattaaatattaagcaaaatagtttatccatttaaactaacttggaacattattagaatatttttaaaatcctaagaaccaatgcaatctaacaaattttttaattgcatgtcttctaagattatactcaa

SEQ ID NO: 1442 - DNA, 661 bp, Homo sapiens
  misc_feature [331]..[331]: Chromosome 2, SNP identification no. = rs1386519
  misc_feature [331]..[331]: allele = a, in linkage disequilibrium with rs4264536, respectively
  misc_feature [331]..[331]: n is a, t, c or g
ttgtatactttattttagtaaattaagttcattgtatataagcataatataattaaacagcaaagctgaggttattacaatcattataaaatatatcaactgtagaaatatgtcatacggttgtgaaaagaatgagaaaataaagtagtagttaactgatgaaatgatagatgtttttatattgtattaatcttctaactgaaacttttttattgaaggtaaaggaggagaaataaaaggataaaaatgaatttatttttaaatcaacatgtacaatgagatctctgtgtgtttcctagttatgcagggaattaattcgggggacgaaagntgaaaggaaaaagaaacagatcaaagttttcctagtttttctgcctttaagttatccttccagtgagttactttagaagatttgttattgttattttgccatccacaagtgttagctttattccaaataaggcaagggttctatttctaaataaataatattatagcaaaagttaaaaattaaatattaagcaaaatagtttatccatttaaactaacttggaacattattagaatatttttaaaatcctaagaaccaatgcaatctaacaaattttttaattgcatgtcttctaagattatactcaaggagttacataatgaatagtac

SEQ ID NO: 1443 - DNA, 661 bp, Homo sapiens
  misc_feature [331]..[331]: Chromosome 2, SNP identification no. = rs7424484
  misc_feature [331]..[331]: allele = t, in linkage disequilibrium with rs4264536, respectively
  misc_feature [331]..[331]: n is a, t, c or g
tctgtctcccggtccttgggccaccctattccctgagacacaacaatattaaatttaggccaataaataaccttacagtggcctctactcattcaagtgaaaagtgtcaggtttctcactttcaataaaaggctagaaaataatcaagtttagtgagaaaagcatatcaaacatctagataggctgaaagctaagcctcttgcatcagttagtcaaattgtgaattcaaaaaaaaattcctgaaggaaatcaaaagttctactcaagtgaatacatgaatgataagaaaaagaaatagccttatttctaatatggagagagtttcagtggnctagatagatcagaccagccacatttctttaagccaaagcccaatccaaagcaaggacctaaatcttcaattctataaatgctaagagaagtgaggaagctgcagaagaaatgtttgaaattaggagaagttggttcatagtgttgaaggaaagaagccttctccattacataaaaatgcaaggtgaagcagcaaatgctcatacagaagctgcagcaagttaaccagaagagctaactaagattattgatgaaggtggctacactaaagagattttccatgtagacaaagcagccttatatggaacgaagatgtcatctaggactttca

SEQ ID NO: 1444 - DNA, 661 bp, Homo sapiens
  misc_feature [331]..[331]: Chromosome 2, SNP identification no. = rs12619867
  misc_feature [331]..[331]: allele = t, in linkage disequilibrium with rs4264536, respectively
  misc_feature [331]..[331]: n is a, t, c or g
agagctaactaagattattgatgaaggtggctacactaaagagattttccatgtagacaaagcagccttatatggaacgaagatgtcatctaggactttcatagctagaggagaaaacaatgcgtggctttaaagcttcaaaagacaggctgactctcttgttagaggctaatgtagctgatgaatttaagattaaactaatactcatttaccatcctagaaatcctagtaccttgaaggtttatgctgaatctattgtctgttctctataaatggaacaacaaatcctaaatgacagaacatatgtttacaacacagtttactgcatatnttaatccagccatagagtcctacttctcagataaaaaaaaaaaaatcctttcaaaatattacttccattggcaatgcacctggtcacccaagagctctgatggagatgtagaaaggagataaatctagttttcatgcctgctaacacagcatccattctaagcctatggatcaagtaattttaactctgaagtcttattatgtaagaactatccctcataaggctatagttgccacagatagtgattttttctgatagatctggggaaagtaaattgaaagccttctaaaaatggttcaccattctagatgacattaagaaaatttctga

SEQ ID NO: 1445 - DNA, 661 bp, Homo sapiens
  misc_feature [331]..[331]: Chromosome 2, SNP identification no. = rs6750636
  misc_feature [331]..[331]: allele = a, in linkage disequilibrium with rs4264536, respectively
  misc_feature [331]..[331]: n is a, t, c or g
tcttattatgtaagaactatccctcataaggctatagttgccacagatagtgattttttctgatagatctggggaaagtaaattgaaagccttctaaaaatggttcaccattctagatgacattaagaaaatttctgattcatgggaggaggtcaaaatatcaacactaaaaggagtttggaagaagttgactccaaccctcacagatgacatagagtggtttaaaacttcggaggagaaagtataaaacttgacagatgagttgcttcttatggatgcataaagttgtttattgagatggaatctattcctggtgaagatgctttgaacnttattgaaataactacaaaagatttagaatattacataaacttagttgataaagcagtggcaggatttgagaggattgactccaattttgaaagttctactgtaggtaaaatgctgtcaaacagcattgcatgctacagagaaatattttgagaggaagagtcaatagatttagcaaccaccaccctaatccacaatatagtcaaaaataaacaaagacagaggaatatgtaaaaactagttggtaagagttaaacactagatataatcaggacttgaagaattacgattttcatactcccctaaatcttattgtactctgacctaatgt

SEQ ID NO: 1446 - DNA, 661 bp, Homo sapiens
  misc_feature [331]..[331]: Chromosome 2, SNP identification no. = rs12693431
  misc_feature [331]..[331]: allele = c, in linkage disequilibrium with rs4264536, respectively
  misc_feature [331]..[331]: n is a, t, c or g
tatgagacacaatggaaataacatggaaaatgtaacttttactaaaagagaaggctgttttactaagagtctgcaacacgatggtccctgctatctttgaacttactcctaaagcagcacaagatttctctttgcctatttatcatataataaaagtacttatgcttaataatacctgcaaacattcagggtttgacatgtgagtaaaaggcaaaacaaaacagagtatgtgacagattcatagaatagacatacagaattggaaattctctaccccccaacaacaaaaaatagtaaaaattaggaattgccaattacatctgtccccaanggtatttagtaagagattctggacttgaactacctatgcaggccttattgtaagttatttctggaagtaggtacaaaggaagaaaataaagtatttacaagtttatctacatgagttatttgtccctaaagaatgccttttaaatgtaagagtaatacttttattccagagggcaataattctattttttaaacagattgtacttcatatgtccagaaattgtattcttggaagctactcactagaacttataactagaaatgattcctatatggaaaatggaagcatgacagaatgtgatgggctgctgttagagttagtacaaccctc

SEQ ID NO: 1447 - DNA, 661 bp, Homo sapiens
  misc_feature [331]..[331]: Chromosome 2, SNP identification no. = rs7586293
  misc_feature [331]..[331]: allele = c, in linkage disequilibrium with rs4264536, respectively
  misc_feature [331]..[331]: n is a, t, c or g
ggaggaaaagaaatcatttttgtgattcataacaagtaaccctgcagtttcatctagtgattattcagagatctgaaattgcactacataactttgtgtcagtgtaatatatgattcacaatgtaggacacaatacagaaagatttcaggaaacttaattgactagaactgcaggtgacttagcatgatgttttcttaaagtccaccaaaagcattgttttcagctgcctaaacattcacaatgcagtaatataactgatataaagaatgtgttggatgccaaatggtctgaggctgcttgcatatcacctagacaaaaataaagatcttnctaattctgccttgttcctctaggctgtatggcacagttaccatggctcccagggcaagaatgataggagggaaagagtggtaggaaattgaagccactgttagtgttctcagagtttgtctattcttctctctctctccagcagcagagaaagaagggaagcaggcattctgtacagcaggaaaggaatccttatgtacctaaaagagctccaaaacaggccaggcgcagtggctcatgcctgcaatcctagcactttgggaggctgaggcgagtggatcataaggtcaggagttcaagaccagcctggccaagatggtgaaaccccat

SEQ ID NO: 1448 - DNA, 661 bp, Homo sapiens
  misc_feature [331]..[331]: Chromosome 2, SNP identification no. = rs13003934
  misc_feature [331]..[331]: allele = a, in linkage disequilibrium with rs4264536, respectively
  misc_feature [331]..[331]: n is a, t, c or g
gccaaatggtctgaggctgcttgcatatcacctagacaaaaataaagatctttctaattctgccttgttcctctaggctgtatggcacagttaccatggctcccagggcaagaatgataggagggaaagagtggtaggaaattgaagccactgttagtgttctcagagtttgtctattcttctctctctctccagcagcagagaaagaagggaagcaggcattctgtacagcaggaaaggaatccttatgtacctaaaagagctccaaaacaggccaggcgcagtggctcatgcctgcaatcctagcactttgggaggctgaggcgagtgnatcataaggtcaggagttcaagaccagcctggccaagatggtgaaaccccatctctactaaaaatacaaaaaaattagctggtgtggtggcaggcacttgtaatcccagctacttgggaggctgaggcaggagaatcacttgaactcggagggcggaggttgcagtgagctgagatcctgccactgcactccagcctaggcaacagatcaagactccgtctccaaaaaaaaaaaaaaaaaaaaatcgccaaaacaacttactaagaaatttaaaatatgcaaactacatcaaaatggcaatggcatgtttacatttgcttgtttctttat

SEQ ID NO: 1449 - DNA, 661 bp, Homo sapiens
  misc_feature [331]..[331]: Chromosome 2, SNP identification no. = rs12999989
  misc_feature [331]..[331]: allele = c, in linkage disequilibrium with rs4264536, respectively
  misc_feature [331]..[331]: n is a, t, c or g
agcttgattcttcacatgccagataagcaaagatttaagtattgtctgtttaaatatttcaactctctacaaagtaccttaatatctggagtagctcactctattcaacattgagcagcttgggcaggatttccctcagatttcaaccttgctgcctgctttccccactgaggaatatagccaatagggttgtaatattgcatccatattccaccaccgtaggtttctatatagagcccaatccctaatgtactttgctagggactctatatatctcagaacattccaaatacaaaaggaggatactgaaaaggaaacttcagaatatcanactctaaaatactacacttaatttacactaaatgaagtggtggaataatctccatttctgaccctaagcttgtcccatgattgtaaactcaactcgaccaaacattaaggataacttggtggtgttaaccaaggagataagagatgaaatgggtaatgcgattggggaggatccaaaacaaaaaaaagctttttcactcttatctatttcatctactaagcttttgagtattattttcaatatggtgttctacatttaaaaaaacagttgcaaaaccattctagtatatgaatgtcttcaaaaagcttgtgaaaatgcatattttgacaa

SEQ ID NO: 1450 - DNA, 661 bp, Homo sapiens
  misc_feature [331]..[331]: Chromosome 2, SNP identification no. = rs13028175
  misc_feature [331]..[331]: allele = g, in linkage disequilibrium with rs4264536, respectively
  misc_feature [331]..[331]: n is a, t, c or g
ctgtttaaatatttcaactctctacaaagtaccttaatatctggagtagctcactctattcaacattgagcagcttgggcaggatttccctcagatttcaaccttgctgcctgctttccccactgaggaatatagccaatagggttgtaatattgcatccatattccaccaccgtaggtttctatatagagcccaatccctaatgtactttgctagggactctatatatctcagaacattccaaatacaaaaggaggatactgaaaaggaaacttcagaatatcatactctaaaatactacacttaatttacactaaatgaagtggtggantaatctccatttctgaccctaagcttgtcccatgattgtaaactcaactcgaccaaacattaaggataacttggtggtgttaaccaaggagataagagatgaaatgggtaatgcgattggggaggatccaaaacaaaaaaaagctttttcactcttatctatttcatctactaagcttttgagtattattttcaatatggtgttctacatttaaaaaaacagttgcaaaaccattctagtatatgaatgtcttcaaaaagcttgtgaaaatgcatattttgacaaaatacatgaattttaaattatttttgcaccaaaataaactcatac

SEQ ID NO: 1451 - DNA, 661 bp, Homo sapiens
  misc_feature [331]..[331]: Chromosome 2, SNP identification no. = rs13429778
  misc_feature [331]..[331]: allele = c, in linkage disequilibrium with rs4264536, respectively
  misc_feature [331]..[331]: n is a, t, c or g
aagctttttcactcttatctatttcatctactaagcttttgagtattattttcaatatggtgttctacatttaaaaaaacagttgcaaaaccattctagtatatgaatgtcttcaaaaagcttgtgaaaatgcatattttgacaaaatacatgaattttaaattatttttgcaccaaaataaactcatactaacttattatgacatatatgaacaggatctagtttgaggcactaagaaagataagacatcagcttgaaaagactccctgagttcagagcgacatgaattctgctaaagtcaaagcaaaaacaaacatcaaatttatcgtnaagcttgggaggaagaacaatgaaatcattgatactttacaaaaagtttatggagacaatgcactctccaaaataagcagtttacaaacggattactcatttcaagaagggaccagataatgttgaagatgaagcccacagtagcattgcatctataccaatttcttagaaaaaattaattttgtctgtgccctaatggaagaggacctatgattaacagcagaaactgcgaacatcatcaacatctcaattggttcaggtagcacaattatgactgaaaaattaaagtttagcaaactttctacctgatgagtgccaaaaaccattgca

SEQ ID NO: 1452 - DNA, 661 bp, Homo sapiens
  misc_feature [331]..[331]: Chromosome 2, SNP identification no. = rs12693432
  misc_feature [331]..[331]: allele = a, in linkage disequilibrium with rs4264536, respectively
  misc_feature [331]..[331]: n is a, t, c or g
atctccttctatctttttttatggggaggcatttgaaatttactttatgttgaaatacgcaatacagaattattgactgcagttgccctgttgtgcaatagatgtcaaacctattcctcctgtgtacatgaaactttgtaccttttttttctgaaattatattttagattccaggggtcatttgtgccttttgatcaataactctctattccctttgtccccacctcccacccccagcctaccactattgtattctctgcttctgtgagttaaactttattagattctacatatgagatcatgtcatatttgtctttcaatgcctggcctntttcatttggcataatgtcctctagattcatctatgctgttgaaaaatgatgagatttccccattttataaggctgaatagtattgcattgtgtatatctaccacattttatttatccattcctccactggtggacatttagattggttccatatcctgactactgcaattatggaagtacgggtatctctttgacatagcaatttcagttcctcttcatatatacccagaagtggaattactggatcatgtgttctatttttaatttttgaagaacctccataccattttccataatggctgtataaatttacattctctcaaacaata

SEQ ID NO: 1453 - DNA, 661 bp, Homo sapiens
  misc_feature [331]..[331]: Chromosome 2, SNP identification no. = rs12328015
  misc_feature [331]..[331]: allele = t, in linkage disequilibrium with rs4264536, respectively
  misc_feature [331]..[331]: n is a, t, c or g
tagattggttccatatcctgactactgcaattatggaagtacgggtatctctttgacatagcaatttcagttcctcttcatatatacccagaagtggaattactggatcatgtgttctatttttaatttttgaagaacctccataccattttccataatggctgtataaatttacattctctcaaacaatatataaaagttcccttttctgtgcgtcctctccaacacttgctatcttttgttgttttgataaaagccattctaacaggtataaggtgatatctcattatagttttgattttcatttccctaatgattactgatgctcagnattttctcatgtacctattggtcatttgtatgtcttctctgagaagtgtctagtcaggtcctttgctcatttttaaatcaggttatttgttttcttgctatttaattgttggcatttttttattactcacttaaccccttatcagatgtatgctttgcaaatattttctcccactccacggttggtctcttcactttgttaattgctttcttcactgcacagaagttttgtagtttatcatccaatttgtctatttttgattttgttggctatgtttttacagtcatatccaaaaaaatcattgcccagaccagtggagtcacagagtat

SEQ ID NO: 1454 - DNA, 661 bp, Homo sapiens
  misc_feature [331]..[331]: Chromosome 2, SNP identification no. = rs10931224
  misc_feature [331]..[331]: allele = c, in linkage disequilibrium with rs4264536, respectively
  misc_feature [331]..[331]: n is a, t, c or g
aagtggtaagagtcagtagacttatcttgtccctgattatagtggaaacattttcaactttcaccattgaggataagttagctacagatttttcatatatggcctgtatcatgttgagatatagtccctgtatacctaatctgctgctaatattttttttaatcacaaaagggtgttgaattttgtcaaatgctttttctataccgattgagattatcatacaatatttattcatctttttttaatgtggtgtatcacatttgttgatttgcatatatggagtcatccttgtatctcaggggtaaatagttgatcatgattaataattaangtgttctttaattttatttgctaatatttgttgggaatttttgcatctatattaattatggatattggcctgtaattttcttttctcatagtgtccctgtctggttttgacattagagtaatgcggtctccttggatgagtttgttagtactctctccatttcaatttttccttttttttttttttgagacagagtcttgctctctctcccaggctggagtgcagaggcgtgatctcggctcactgcaagctccgcctcctgggttcacgccattctcctgcctcagcctcccgattagctgggactacaggcgcccgccaccacgcccg

SEQ ID NO: 1455 - DNA, 661 bp, Homo sapiens
  misc_feature [331]..[331]: Chromosome 2, SNP identification no. = rs12693433
  misc_feature [331]..[331]: allele = c, in linkage disequilibrium with rs4264536, respectively
  misc_feature [331]..[331]: n is a, t, c or g
gatttgttttgtggcctaacatgatctatcctagagaatgatccctctgcacttgaaaagaaagtgtattctactgctattggatggaaggatctatgtatctgttaggtccatttggtctaaagtgtaacttaactccagtgtttccttattaattttcggtcaagatggtctgtccattgttgacagtggtaccttgaggttccctactattacagtattgcagtctatctctttcttgagatcactgaataattgctttgtgtatttaagtgctctgataatgggtgcatatatatttacaattattttgttttcttggtgaattaanccctgtatcattatgtaatggctttttttttctctacttggcttaatgtctattttgtccaacatatatagcatcaactgcccttttcaggttatttcacagaatatctttttccatcattcactttcagtctatgtatgttcttaccagtaaagtcaatctcttgtacacagaacatggttagattttgtggtatttttttattcagccactctatatctttttattctagaatttaatccatttaccctcaaagtaattattgataggtgagaacttgcaacttccattttgtaactatttttctgattgttttgtaggtcctttgtt

SEQ ID NO: 1456 - DNA, 661 bp, Homo sapiens
  misc_feature [331]..[331]: Chromosome 2, SNP identification no. = rs12999474
  misc_feature [331]..[331]: allele = a, in linkage disequilibrium with rs4264536, respectively
  misc_feature [331]..[331]: n is a, t, c or g
tatcatcccactctcttctgtcctgcagggtttctgctgagaaaatcaccgaaagctatattggggctttgttgaatgtgatatatttcttatctctggttttactttcagtattctttctctatttttggtttttgatactttgattataatgtttcttgttgaactcatcgttggattgaaattggtgacttttgagcttcctgtacttggctattgtcatttttttctaagacttagaaaactttaacttccagccattagtttctcaagtatgttttctaggccttttactctctcttatccttcagaaaacctgtttggtgaaaantagtttgcttgatggtgcctgataattcccataggccttttttattcttttcctttcttcttttttttctcttctgggtgaataattttaaatgtcctatttctatgctcaccgagtctttcttctgcttgaccaagtatgtagttaaagcttgctattgaaattttcagttcgggtattgcattctttatctctaggatttttattgttattgtttctatttatttgttaaacttctacttttgtttataaaatgttctccaaattttaattattttttaatctgtattttcttggagttccctgaacttctttaaggagattatttcg

SEQ ID NO: 1457 - DNA, 661 bp, Homo sapiens
  misc_feature [331]..[331]: Chromosome 2, SNP identification no. = rs10197403
  misc_feature [331]..[331]: allele = c, in linkage disequilibrium with rs4264536, respectively
  misc_feature [331]..[331]: n is a, t, c or g
tggtatcacatttccttgattcttcataatctttgtgttcttacactgctggcttcaaatttgaaaaggcaaacaaacacctgttacagcctttgtaggtgttctgtggtgctaatagatctttactatctaatttagcctggggttctggatgaacgttctggtaacaccaccagacaggcagaccttggtatcaggttctctagtttggcttggttacttcccatgctttgaagtagattggtactgcttgctgtgctctatggtatggtgagaccactagccagagtaaactgtcaggtggtgctactactggatgggctctatgatnagtctctaatgaggtagggttgcaggttgtttttcctggctgagtgctactgttgtttagagtctagttgggcagggccatgtgctgggctctgaggctgacggagatctctagggttgttgctcagccataatagtgagctgagcaagaggctatgttccaggtgacatgcttggacttaagcttgtcacctcacaccttgggtaggcttaagtagagaaccaaggtttgttggagtaattgatcagcagctaaggttgagttaggccagatactttctctgtaggtaattgacttgcagttgcctttttgtgtctggaagacttaatg

SEQ ID NO: 1458 - DNA, 661 bp, Homo sapiens
  misc_feature [331]..[331]: Chromosome 2, SNP identification no. = rs12615701
  misc_feature [331]..[331]: allele = t, in linkage disequilibrium with rs4264536, respectively
  misc_feature [331]..[331]: n is a, t, c or g
gatgctatatcactttaataattataaaatatgcaatattgtaggctttgcctgccttcccctttctcatgtatttgggatagaaatattttgtggtcttatattcaaagaaaggaaaggaaaaaaagaaagaaaggaaggaagagagggaaagaaggaagtaagggaagacagacattaaaagagatattagaagagctgaatttagcccctccaaaattcagaaattgaatttctaacacccagctcttcggaatatgactgtatttggggacaggattttaaaagaggcaactgtgttaaaaatgaggctattagggtggtccctaanccaatttgaccaatgtccttatgagaggagattaggaagctgtaggggaagaaaactaattttcactctaccctaccgagattttctctgggacagacccctgtaacaaaaggcagactaccaagagaacagccaacagaagtttattgatgtgtatacttcatagatacctggtaaatgtccacagaaatgcataaatctcaaagagatggcttagagttcaggctcacatatcatcttctgctgaagcaaataaagaggatgttaagaggcaagtaatggggaagtgactaggaaaggcatggtaagcagagtaaggttttctatgca

SEQ ID NO: 1459 - DNA, 661 bp, Homo sapiens
  misc_feature [331]..[331]: Chromosome 2, SNP identification no. = rs12693434
  misc_feature [331]..[331]: allele = c, in linkage disequilibrium with rs4264536, respectively
  misc_feature [331]..[331]: n is a, t, c or g
tactacatttttttccattcatccattgatggacatttaggttgcttccatgtcttggctattttgaatgatgctacaatgaacaccgtagtataaatatctctttgatttcaattccagaagtggaattattgaatcatatgggattattgaatcatatgaatgaaaaatcatatttttaattatttgcggaaccttcatactgttttccaaagtggctgtttcaatttacagtcctatcaagagtggacaagtgttgctttttttctacatcctcaccaactcttgttatcttttgggctttttgctaacagccatcataacaggtganaggtgatatctcatggtggttttgatttgcatttccctgatgattagtgatgttgagcagcttttcatatacctttggccatgtgtatgtcttctttacaagtatgtttatcaagatcctttggacatttattaattggattatttggggtttttgctattgatttgtaagagttctttatgtcctttggatattaactcattatcagctatatggtttgaaaatattttctgctattctgtagattgtctttttgtttattgtttcttttgctgtgcagaagctttgtagtttaatatagtcccacttgtctatttgtctattttttgc

SEQ ID NO: 1460 - DNA, 661 bp, Homo sapiens
  misc_feature [331]..[331]: Chromosome 2, SNP identification no. = rs4386289
  misc_feature [331]..[331]: allele = t, in linkage disequilibrium with rs4264536, respectively
  misc_feature [331]..[331]: n is a, t, c or g
atttggttaagtttactcctaagtactttttatgctactgttataactttagatacattgtagacaatagtactatatccatatttgtttggtgaaaataagtgaagaaatctctgctgtctatttatatgatgggaataagtgaggcaacctctgctctctgttctttaatttggcattttcattttcactggtgatagttacttgaattgctgagaatgtaatcaaatataaattaatcagcctcttaaagtacatgtctaaccaatgagactaccttgccctaaacagaaccgtaagaaatctctagttcacctttcctcccattgcnttgggttcacagattagggagatgttagaatattccctcacagacttccaccacagccctctccaatcagtgtataattggccagttttctaggagtgccagtgaaaatgaacaacaaattcactaacatctaggcttttttatgatcaaaaattaccttttggaactgtaaaattttgctgatcaatatataaaggaacttgagatatgctatggctccaactttcttaaactaaagcctcaaatgcaaacatctataggaagctgcctaattatgcagtccagatcccttcaggtttctatctttgctgtgattttagatggactact

SEQ ID NO: 1461 - DNA, 661 bp, Homo sapiens
  misc_feature [331]..[331]: Chromosome 2, SNP identification no. = rs4552153
  misc_feature [331]..[331]: allele = a, in linkage disequilibrium with rs4264536, respectively
  misc_feature [331]..[331]: n is a, t, c or g
taaattcattatactatagtacaataggaaggaattataatctagagactattagtgtcaccagtggtattctccagaagcaggggctgaaatggagtttggagtgaaagatgagtttagggatcaacctctataaaaggaagaggaagacagtagcattgggcacaggaaaatgctgaaatacaatttatgtgtcacccagctttggccaactcagctccagttctagagcaagtattgctatcaaagcatcctatgacaggctgaaatggctgggccttataccctgtcttagtcaagggatgtaggctgccaagaaagtgtgtagtgnttgccaaaggctgcctcctgagtgcactgcctcaatccaagcagattttattttgaaaaaggatctggacagtttagtcctgcatctgccacatcaagcctagaaattccccaaaggaatcctgcactctaatatctaggtcttaatatcacaaaaataatttatacttatttttccttcttaataaaaaaagagaaaactatatttaatatgattttcccccccaagatgatcacaaatgaaatgtaccaaataagccacataaaactgaactcacatgtaaaaaaatctataaattccgaagaataattaagatgttgaacgctgaaa

SEQ ID NO: 1462 - DNA, 661 bp, Homo sapiens
  misc_feature [331]..[331]: Chromosome 2, SNP identification no. = rs4264536
  misc_feature [331]..[331]: allele = a, c
  misc_feature [331]..[331]: n is a, t, c or g
aattccccaaaggaatcctgcactctaatatctaggtcttaatatcacaaaaataatttatacttatttttccttcttaataaaaaaagagaaaactatatttaatatgattttcccccccaagatgatcacaaatgaaatgtaccaaataagccacataaaactgaactcacatgtaaaaaaatctataaattccgaagaataattaagatgttgaacgctgaaaatatagtataagggaaattgttaaaggaacaaaatataatttggatgtcttactaactattaatatgtatggtgaaatatctatacaagtaacaatgaaaagtgnttttaatgtcacagaattttctatttctaacactatagccatagaaacatagatgatacattgattactaatacatgtcccttgccatgatcaacagttcataggctaatgcagtaaagagacacattagcaaataatgacaataatatgcaataactgcatctgggaacacgggtgctaaggagtcatctagcctaggtctgggttagggcagtgtgcagacatcatgaaagacctaatgagaaaggctctcccagctctcagaatttccactcgcagtcatctaccaccaggcaaagagcacagggtttatcttaaagaaatgcagaa

SEQ ID NO: 1463 - DNA, 661 bp, Homo sapiens
  misc_feature [331]..[331]: Chromosome 2, SNP identification no. = rs4493221
  misc_feature [331]..[331]: allele = g, in linkage disequilibrium with rs4264536, respectively
  misc_feature [331]..[331]: n is a, t, c or g
agagaaaactatatttaatatgattttcccccccaagatgatcacaaatgaaatgtaccaaataagccacataaaactgaactcacatgtaaaaaaatctataaattccgaagaataattaagatgttgaacgctgaaaatatagtataagggaaattgttaaaggaacaaaatataatttggatgtcttactaactattaatatgtatggtgaaatatctatacaagtaacaatgaaaagtgattttaatgtcacagaattttctatttctaacactatagccatagaaacatagatgatacattgattactaatacatgtcccttgccntgatcaacagttcataggctaatgcagtaaagagacacattagcaaataatgacaataatatgcaataactgcatctgggaacacgggtgctaaggagtcatctagcctaggtctgggttagggcagtgtgcagacatcatgaaagacctaatgagaaaggctctcccagctctcagaatttccactcgcagtcatctaccaccaggcaaagagcacagggtttatcttaaagaaatgcagaaaactgtctgaagaacaataaggcttccaatactagcaccccgacataaagctctacttattctggcatttaggaacccatatttcat

SEQ ID NO: 1464 - DNA, 661 bp, Homo sapiens
  misc_feature [331]..[331]: Chromosome 2, SNP identification no. = rs4591311
  misc_feature [331]..[331]: allele = a, in linkage disequilibrium with rs4264536, respectively
  misc_feature [331]..[331]: n is a, t, c or g
tagaaacatagatgatacattgattactaatacatgtcccttgccatgatcaacagttcataggctaatgcagtaaagagacacattagcaaataatgacaataatatgcaataactgcatctgggaacacgggtgctaaggagtcatctagcctaggtctgggttagggcagtgtgcagacatcatgaaagacctaatgagaaaggctctcccagctctcagaatttccactcgcagtcatctaccaccaggcaaagagcacagggtttatcttaaagaaatgcagaaaactgtctgaagaacaataaggcttccaatactagcaccccnacataaagctctacttattctggcatttaggaacccatatttcatcaacctcaaagcaatgcctgattgttctcacaccccattcaagccacatacacagttcacagtcaaaattccacctcaggggaaacaaacaaaaaaacctaatttgaatactatatacaaagtctatgtatatgtgtgagtgtggatgtgtatactcaatctctctctcatgcacacacacacacacagagaaacatatatatatatacatatacacacacctatatacacacacacacacacacacacagagagagagagagagagatccctaccctcctaaac

SEQ ID NO: 1465 - DNA, 661 bp, Homo sapiens
  misc_feature [331]..[331]: Chromosome 2, SNP identification no. = rs4442964
  misc_feature [331]..[331]: allele = c, in linkage disequilibrium with rs4264536, respectively
  misc_feature [331]..[331]: n is a, t, c or g
tgcggtatttggttttttgtccttgagatagtttgctgtacgaaagaatgagaataagactgacatccactatctcatcaaaaatagtatgtcaagaaaaatggagaaattagctataaaatatagcagaaatttaaaattcaatatttagaaattatatcaatcaactgtaaaagcatttttcgatgtacaaaagctcaaaaagttaatttttcatacaccttctcttagaagttccttatgaagtatggacattacggctgcaattgaagtatgggttaaggatcaacagaaataaaccacaaacatagacctgctgtaaatgtctcanttctgtggcaaaggaaacaatttaacagaagtgtccacacagagcagatgtagcatgtatctttgtgtggcttctgaacctttatccctgtggggcacagggctgctggtgaaactcagaattcctgctaagctactgttcttttatactatgatttcattttcataccagaacttaacctcaccatccattgcacttctactcaaagaggtctttagaaaaatgatgctttcccggattttgaaccaaacttagtataagaattttttttcctcagagacaagccgagtaggtgcccaggtatccctgaaaaatattactgcccaactt

SEQ ID NO: 1466 - DNA, 661 bp, Homo sapiens
  misc_feature [331]..[331]: Chromosome 2, SNP identification no. = rs4420679
  misc_feature [331]..[331]: allele = a, in linkage disequilibrium with rs4264536, respectively
  misc_feature [331]..[331]: n is a, t, c or g
ttgcccttctctatttcctgctgaaactcactacagccaaacccagctggaagccagtagccagggaagtacaagtgacagtctccccaggaaagagagggtggggtttgtctagaaaggaaatatttggcccaaatgtcatcctacatttcttatattttcaatgggtgctatgtcctgtgttcctcttatctgaaaatgtttccttttgtaatttatatgtagaattttagtaagtaggtttaaatgtaatccattgattctaggcaggaggaaacgctcaagaggcatctttggtgccaaggtaaacagctaaagctcaaatctttcnctggccatggctagtagtttcaagttacaagaaaccaaaaacctctgaactctacaggaagagatgtctttgagtgcaaacatttctgaattcaaagtacacaacttagaggtaagctgactttatgttggaaacacctgtagttgtcttggtactggaaggctgatgcaactgggaggggagtatgaaatattgcagttagttaagagggagtctggagttcaaagatttctggttattatttctctccttttgtttgtatgccttggttaaaatgagctatgtgtgagacatccataactaagccccttcagttttttgcaaacataa

SEQ ID NO: 1467 - DNA, 661 bp, Homo sapiens
  misc_feature [331]..[331]: Chromosome 2, SNP identification no. = rs13383401
  misc_feature [331]..[331]: allele = g, in linkage disequilibrium with rs4264536, respectively
  misc_feature [331]..[331]: n is a, t, c or g
ttatcaatgacctgacaacttcatattacacatagaaacctgaacttcattaaatagaaatggatttatgcccagagagtcttattgcttttgttctgcttgactgttcactacctaccctttgcaatggtgtaaactactcattaattttgtatatttgattagtgacagtttccattctcaaaatccttgtgatgaattacacgacacagtggaaacagctatagaacaaaacaaaaacaccacatgtggtctgctaaccagtctcctgtcaaacaaaattggatgctgcgttcccatggtttcctttgagcagtaaaagagaaaatgnatgctcagaagcaccatttctgtaaattgctgaaaaatcttcatattagtgtagcctagaaaatatttcagtggcaaaaaagctacaaggaaaccaagttatacattttttttttttttggctaacacaaagaaatacattctttacaagaaaatggagcagaaataataacaataggtccattattctcattcagtaataaatcccatttagggagaaggtattttaatgagcaaatgctttattctaccttgtggttaaataagaatttttaaatgtcacatatactgagtagagagctagagtgagtatcaaacaaaaagaaaggac

SEQ ID NO: 1468 - DNA, 661 bp, Homo sapiens
  misc_feature [331]..[331]: Chromosome 2, SNP identification no. = rs10189831
  misc_feature [331]..[331]: allele = a, in linkage disequilibrium with rs4264536, respectively
  misc_feature [331]..[331]: n is a, t, c or g
aaattggatgctgcgttcccatggtttcctttgagcagtaaaagagaaaatgaatgctcagaagcaccatttctgtaaattgctgaaaaatcttcatattagtgtagcctagaaaatatttcagtggcaaaaaagctacaaggaaaccaagttatacattttttttttttttggctaacacaaagaaatacattctttacaagaaaatggagcagaaataataacaataggtccattattctcattcagtaataaatcccatttagggagaaggtattttaatgagcaaatgctttattctaccttgtggttaaataagaatttttaaatntcacatatactgagtagagagctagagtgagtatcaaacaaaaagaaaggacctggccctttgagagttaacctcctgaaattaatgcataatggatgaaattaatcatcttcaggggcctcctaacaagaagggacgttgcctaggacaaagcaggaagactaaagcctacaaatctaatcatctccattagaatttgaaagacaacttttgtttaattaatgggagaaagatacctaaaagaaaaagaaaaaaggtcacttgtgactaggtggattctacataagaccttacaaaagtgggttcaggaaataggaatttggcagggtt

SEQ ID NO: 1469 - DNA, 661 bp, Homo sapiens
  misc_feature [331]..[331]: Chromosome 2, SNP identification no. = rs10189763
  misc_feature [331]..[331]: allele = g, in linkage disequilibrium with rs4264536, respectively
  misc_feature [331]..[331]: n is a, t, c or g
cctagaaaatatttcagtggcaaaaaagctacaaggaaaccaagttatacattttttttttttttggctaacacaaagaaatacattctttacaagaaaatggagcagaaataataacaataggtccattattctcattcagtaataaatcccatttagggagaaggtattttaatgagcaaatgctttattctaccttgtggttaaataagaatttttaaatgtcacatatactgagtagagagctagagtgagtatcaaacaaaaagaaaggacctggccctttgagagttaacctcctgaaattaatgcataatggatgaaattaatnatcttcaggggcctcctaacaagaagggacgttgcctaggacaaagcaggaagactaaagcctacaaatctaatcatctccattagaatttgaaagacaacttttgtttaattaatgggagaaagatacctaaaagaaaaagaaaaaaggtcacttgtgactaggtggattctacataagaccttacaaaagtgggttcaggaaataggaatttggcagggtttatcccagattctcttttttttttttggttcttgagatggaatctctcactgtcgcctaccctggagtgcagtggcatgatcttggctcactgcaacctccacttcc

SEQ ID NO: 1470 - DNA, 661 bp, Homo sapiens
  misc_feature [331]..[331]: Chromosome 2, SNP identification no. = rs10189985
  misc_feature [331]..[331]: allele = a, in linkage disequilibrium with rs4264536, respectively
  misc_feature [331]..[331]: n is a, t, c or g
atttcagtggcaaaaaagctacaaggaaaccaagttatacattttttttttttttggctaacacaaagaaatacattctttacaagaaaatggagcagaaataataacaataggtccattattctcattcagtaataaatcccatttagggagaaggtattttaatgagcaaatgctttattctaccttgtggttaaataagaatttttaaatgtcacatatactgagtagagagctagagtgagtatcaaacaaaaagaaaggacctggccctttgagagttaacctcctgaaattaatgcataatggatgaaattaatcatcttcaggngcctcctaacaagaagggacgttgcctaggacaaagcaggaagactaaagcctacaaatctaatcatctccattagaatttgaaagacaacttttgtttaattaatgggagaaagatacctaaaagaaaaagaaaaaaggtcacttgtgactaggtggattctacataagaccttacaaaagtgggttcaggaaataggaatttggcagggtttatcccagattctcttttttttttttggttcttgagatggaatctctcactgtcgcctaccctggagtgcagtggcatgatcttggctcactgcaacctccacttcccaggttcaag

SEQ ID NO: 1471 - DNA, 661 bp, Homo sapiens
  misc_feature [331]..[331]: Chromosome 2, SNP identification no. = rs10189845
  misc_feature [331]..[331]: allele = a, in linkage disequilibrium with rs4264536, respectively
  misc_feature [331]..[331]: n is a, t, c or g
agttatacattttttttttttttggctaacacaaagaaatacattctttacaagaaaatggagcagaaataataacaataggtccattattctcattcagtaataaatcccatttagggagaaggtattttaatgagcaaatgctttattctaccttgtggttaaataagaatttttaaatgtcacatatactgagtagagagctagagtgagtatcaaacaaaaagaaaggacctggccctttgagagttaacctcctgaaattaatgcataatggatgaaattaatcatcttcaggggcctcctaacaagaagggacgttgcctagganaaagcaggaagactaaagcctacaaatctaatcatctccattagaatttgaaagacaacttttgtttaattaatgggagaaagatacctaaaagaaaaagaaaaaaggtcacttgtgactaggtggattctacataagaccttacaaaagtgggttcaggaaataggaatttggcagggtttatcccagattctcttttttttttttggttcttgagatggaatctctcactgtcgcctaccctggagtgcagtggcatgatcttggctcactgcaacctccacttcccaggttcaagcaattctcctacctcagcttcctgaatagctg

SEQ ID NO: 1472 - DNA, 661 bp, Homo sapiens
  misc_feature [331]..[331]: Chromosome 2, SNP identification no. = rs10205061
  misc_feature [331]..[331]: allele = a, in linkage disequilibrium with rs4264536, respectively
  misc_feature [331]..[331]: n is a, t, c or g
atggaatctctcactgtcgcctaccctggagtgcagtggcatgatcttggctcactgcaacctccacttcccaggttcaagcaattctcctacctcagcttcctgaatagctgggactgtaggcatgcaccaccatgtctggctaatttttgtatttttagtagagacaaggtttcagcatgttggccaggctggtctcgaactcctaagctcaggtgatccgcccgcctcagcctcccaaagtgctgggattacaggtgtaagccaccacatccggccctatcccagattctctaaaacagtaacagcctatatctggaaggctgagaancaggtgactgcttagagaggccttgatcgttctgctttgctgcagtctatagaatgcattacaaaactaccttctaattaaattgagcttcccatgttcccataggcagggaaggaaacattctgacaggtagcattatcccaattataaaagtaaacacataatttcaaggtccatgtcagttactcatcagtcctcaaccaataagtcaactttgggagcactcacaaaactatttttctaggtacaaaagctggtgaccagaacttgaaccactgttacttcaactggacactgtgagtagccaccgttctatcttctctgatgttg

SEQ ID NO: 1473 - DNA, 661 bp, Homo sapiens
  misc_feature [331]..[331]: Chromosome 2, SNP identification no. = rs10205148
  misc_feature [331]..[331]: allele = c, in linkage disequilibrium with rs4264536, respectively
  misc_feature [331]..[331]: n is a, t, c or g
tgatcttggctcactgcaacctccacttcccaggttcaagcaattctcctacctcagcttcctgaatagctgggactgtaggcatgcaccaccatgtctggctaatttttgtatttttagtagagacaaggtttcagcatgttggccaggctggtctcgaactcctaagctcaggtgatccgcccgcctcagcctcccaaagtgctgggattacaggtgtaagccaccacatccggccctatcccagattctctaaaacagtaacagcctatatctggaaggctgagaatcaggtgactgcttagagaggccttgatcgttctgctttgcngcagtctatagaatgcattacaaaactaccttctaattaaattgagcttcccatgttcccataggcagggaaggaaacattctgacaggtagcattatcccaattataaaagtaaacacataatttcaaggtccatgtcagttactcatcagtcctcaaccaataagtcaactttgggagcactcacaaaactatttttctaggtacaaaagctggtgaccagaacttgaaccactgttacttcaactggacactgtgagtagccaccgttctatcttctctgatgttgttgcatcaattctttaacacttacaccacaaataccacaca

SEQ ID NO: 1474 - DNA, 661 bp, Homo sapiens
  misc_feature [331]..[331]: Chromosome 2, SNP identification no. = rs10205245
  misc_feature [331]..[331]: allele = a, in linkage disequilibrium with rs4264536, respectively
  misc_feature [331]..[331]: n is a, t, c or g
gtctggctaatttttgtatttttagtagagacaaggtttcagcatgttggccaggctggtctcgaactcctaagctcaggtgatccgcccgcctcagcctcccaaagtgctgggattacaggtgtaagccaccacatccggccctatcccagattctctaaaacagtaacagcctatatctggaaggctgagaatcaggtgactgcttagagaggccttgatcgttctgctttgctgcagtctatagaatgcattacaaaactaccttctaattaaattgagcttcccatgttcccataggcagggaaggaaacattctgacaggtagcantatcccaattataaaagtaaacacataatttcaaggtccatgtcagttactcatcagtcctcaaccaataagtcaactttgggagcactcacaaaactatttttctaggtacaaaagctggtgaccagaacttgaaccactgttacttcaactggacactgtgagtagccaccgttctatcttctctgatgttgttgcatcaattctttaacacttacaccacaaataccacacatttttaatttctttatttataagtctattactctttttactctaacaataatacagcttaatggcaaaacattgaaaagcacaaaagaagatttt

SEQ ID NO: 1475 - DNA, 661 bp, Homo sapiens
  misc_feature [331]..[331]: Chromosome 2, SNP identification no. = rs10205253
  misc_feature [331]..[331]: allele = c, in linkage disequilibrium with rs4264536, respectively
  misc_feature [331]..[331]: n is a, t, c or g
atgttggccaggctggtctcgaactcctaagctcaggtgatccgcccgcctcagcctcccaaagtgctgggattacaggtgtaagccaccacatccggccctatcccagattctctaaaacagtaacagcctatatctggaaggctgagaatcaggtgactgcttagagaggccttgatcgttctgctttgctgcagtctatagaatgcattacaaaactaccttctaattaaattgagcttcccatgttcccataggcagggaaggaaacattctgacaggtagcattatcccaattataaaagtaaacacataatttcaaggtccatgncagttactcatcagtcctcaaccaataagtcaactttgggagcactcacaaaactatttttctaggtacaaaagctggtgaccagaacttgaaccactgttacttcaactggacactgtgagtagccaccgttctatcttctctgatgttgttgcatcaattctttaacacttacaccacaaataccacacatttttaatttctttatttataagtctattactctttttactctaacaataatacagcttaatggcaaaacattgaaaagcacaaaagaagatttttaaatgatctgatacctcactatcaacattgtggtgttattac

SEQ ID NO: 1476 - DNA, 661 bp, Homo sapiens
  misc_feature [331]..[331]: Chromosome 2, SNP identification no. = rs12373738
  misc_feature [331]..[331]: allele = t, in linkage disequilibrium with rs4264536, respectively
  misc_feature [331]..[331]: n is a, t, c or g
cttctctgatgttgttgcatcaattctttaacacttacaccacaaataccacacatttttaatttctttatttataagtctattactctttttactctaacaataatacagcttaatggcaaaacattgaaaagcacaaaagaagatttttaaatgatctgatacctcactatcaacattgtggtgttattacctatagtctctgtaaattttatttcagttcttgcatttacattgtgatataaaatgtgcttaaagaaaaaagtgcataaagcatatgccttgagttctactccaagatcttgaacaatcaacttcctctgctatagcnataaatcacaatcaggatttatcttcatcttcactaaatccctaactgttttccaaattagtgacaattttcaaccaaagttggtattgtaatttttgccaatcaattcgatgtgtaataaagattcatgtggttttaaagttcattacataactgtgtatgtagttagagggagcctaggccacataagactgttcctacttctgacatcaacataagtttggaggttcctcaaaccaccctcaggttcaacaattctttagaaggactcacagaactcactgaaagctgttctactagtatggcttattacagaggaaggatacagat

SEQ ID NO: 1477 - DNA, 661 bp, Homo sapiens
  misc_feature [331]..[331]: Chromosome 2, SNP identification no. = rs13416226
  misc_feature [331]..[331]: allele = c, in linkage disequilibrium with rs4264536, respectively
  misc_feature [331]..[331]: n is a, t, c or g
ttcctctgctatagccataaatcacaatcaggatttatcttcatcttcactaaatccctaactgttttccaaattagtgacaattttcaaccaaagttggtattgtaatttttgccaatcaattcgatgtgtaataaagattcatgtggttttaaagttcattacataactgtgtatgtagttagagggagcctaggccacataagactgttcctacttctgacatcaacataagtttggaggttcctcaaaccaccctcaggttcaacaattctttagaaggactcacagaactcactgaaagctgttctactagtatggcttattacanaggaaggatacagattaagatcatctaagggaggaagcacataggacagaaaatccatggaaaaagaatcaaacacagagcttctgctctcctctccccatggagtcaagacagtgtcaccgtcgtggcatagatgtgtgacaatacacatagaatatttccaactaaggaagctcacctgagcctgggtgtctagtgtatataatggagctccatcatgtagaagtgatggacttctcatttccagattctccaaaggttgagcttcaaagccctcactctaagtcatatatttaccatctggtttggcccaggattctcaccctaaat

SEQ ID NO: 1478 - DNA, 661 bp, Homo sapiens
  misc_feature [331]..[331]: Chromosome 2, SNP identification no. = rs12693436
  misc_feature [331]..[331]: allele = a, in linkage disequilibrium with rs4264536, respectively
  misc_feature [331]..[331]: n is a, t, c or g
caatattcccttactctaacagaatgtactataaccctattcccccatctattaaaatacagtactataaaaaaggagcagcttggaattctttgccaccacttggaagaggttctcctcgatattccaggatttttgaagacaaaataatgttaataataaataggtaagtgaaatgtcagcttctagcaaccttctgccatatttctgaatattgttctgctatttaaaaatcttttcctttgctaatattggttggtggtagagaacaaagctcaaaattaaaatacattacaaactacttgagttctaaaatgtcatgagaaaatcnaatctagtgaacatttctatagaaaagatattttatctgttttaaagtaagagaatattttataataaattatcatagtaaatttgcgattataattatgttgattcaagcttcaaggttcaatattttgatttataaaatttatgaacaatttatcattgtaattatcatcaagaaataaaacctttactaattttaaaatttgttttactttaaaaaaggattacattgtctaattctcacacaggttccatgtggtatagagcaagccttatgtgtaccaatcccttgaagttcttattatagttataaatttgtatttgtgtaaca

SEQ ID NO: 1479 - DNA, 661 bp, Homo sapiens
  misc_feature [331]..[331]: Chromosome 2, SNP identification no. = rs13422495
  misc_feature [331]..[331]: allele = t, in linkage disequilibrium with rs4264536, respectively
  misc_feature [331]..[331]: n is a, t, c or g
tttaaatatagccaatatctttgattttctcacttagaaattatatatacagttgacccttgaacaacatgagggttaagggcaccaacagcctacttttgaccaaaagtcttactaatagcaaaaacagtcagttaaaacatattttatgttatgtatgttatatattgtatccttacaataaagtaagctagagaaaataaaatgttaagaaaattataaggaagagaaaacatatttactattcattaagtggaagcaaatcatcataaaggttttcatccttatcatcttcatgttgagtaagctgagaaggaggaagaagaggaanggttgttcttgatatttcaggggtggcagaggcagaagaatatttgtgtgcatatgaacccacagagttcaaacccattttggtcaagggtcaactttatacacatatataattctgcaaatacataaagttctggatatacatgtatatacatgtgtatatatatatacacactatatatgtgtgtgatatagatatcactatatatatatatacacaatatagtgtgtatatcagaaatagatttgagaaaattttatgataaacatgtcaaatttgagaaactgtaatttcaaacccactacgcacatatatatgcatttatttttt

SEQ ID NO: 1480 - DNA, 661 bp, Homo sapiens
  misc_feature [331]..[331]: Chromosome 2, SNP identification no. = rs13403908
  misc_feature [331]..[331]: allele = g, in linkage disequilibrium with rs4264536, respectively
  misc_feature [331]..[331]: n is a, t, c or g
actcttccttagactttttctctttttcttctgttgttacataattttgtattatttacagtgtattcaaacgatcatattgcactcatttaatctttagtgtcaatgccccagcttcaggatattaagagattactttctacttctatctcagtcttatgaatttagcagctccttgcttctgtgtcctctgtccatggatggtatgtcactgatgtgaatactctgcacatactcatgatgttcacaggctagcacctttcccttttgaattgctttcactgtgctgggttaagttctcattacccttcatttgcttttctgatcccantaaaggttctctttctgtactgccttccataaaattataccatcaggaaaaccctacaggaaacttctctgaaaaggcaagctacttggtgtccattaaagagacctccaactcattacagctgtctgtttgatatcattacagagcccttccatgaataagggatagcataaagcccctaaaaaacaatgaaagttacacaataattgcctcagaaatgaagagatagcaagcaaaaaattactgaacagtgtggtaatacattgatagaattatgaatgagagaggatcctagagagagtagtttaggttaaatttaagtattgaagt

SEQ ID NO: 1481 - DNA, 661 bp, Homo sapiens
  misc_feature [331]..[331]: Chromosome 2, SNP identification no. = rs10931227
  misc_feature [331]..[331]: allele = t, in linkage disequilibrium with rs4264536, respectively
  misc_feature [331]..[331]: n is a, t, c or g
attaaaagagttagagaggcaagagcaaactaatccaaaagtcagcagaagacatgaaatgactaagatcagagaagaaaagaaggagatagagacacaagaaacactccaaaaaatcaacaaatccaggaggtggttttttgaaaaaattaacaaaatagatagaccactggctagactaataaagaagagagagaaaaatcaatcagacacaatagaaaatgataaagggaatatcaccactgatcctcccaaaatacaaactaccatcagagaattctataaacacctctatgcaaataaactagagaatctagagaaatggataaantcctagactcacacatcctaccaacactacaccaggaagaagttgaattcctgaatagaccaataacaagttctgaaattgaggtagtaattaatagcctaccagtggaaaaaaaaagtccaagaccagatggattcacagctgaattctaccagaaatacataaaggagatggtaccattccttctgaaattattccaaacaattgaaaagaagggactcctccctaactcattttatgaagccagcatcatcccgttaccaaaaccaggaagaggcacagttaaaaaaaagaaaacttcaggccaatctccctgatgaacactgatgc

SEQ ID NO: 1482 - DNA, 661 bp, Homo sapiens
  misc_feature [331]..[331]: Chromosome 2, SNP identification no. = rs13017923
  misc_feature [331]..[331]: allele = g, in linkage disequilibrium with rs4264536, respectively
  misc_feature [331]..[331]: n is a, t, c or g
aaatttgagacccctgtgggatgatcacatggagataatcagaaagtagttggatgtaggtcaagtgttctggactgcaacataatcaatataacaggaagagtatatagattcaaaggcacataacgcctagggtagaagccataagaataaatacacttgaaaggttaattaaataaaaatatacaaagaagactataaacaaattatgacaaaagtattttttaaagttatgtttattaaaaaaaaaaaaaaccctgaggtaaaagacagtctcaaagaattagcaataaaacatgtcaaatgccataggacaatctggtaagataangacaatcactaatctactgtctttggcaacatggaagtaattgatgatttccttcataacgaataaattactttacagtctctattcttacatttgttccccatataaattaaaaattaaaagtactaacttttggatattttcggagaatactttaaaaatgtataaatctgaactgctgagagatagttattatataattttaaaaatgtttgcattatttactggtattatttatttacttttaattcaccaccaccttcccaagggcattataaaagtgtccctgaatttttcaaggggcagttaaacatatagctcttttaaaat

SEQ ID NO: 1483 - DNA, 661 bp, Homo sapiens
  misc_feature [331]..[331]: Chromosome 2, SNP identification no. = rs10193729
  misc_feature [331]..[331]: allele = g, in linkage disequilibrium with rs4264536, respectively
  misc_feature [331]..[331]: n is a, t, c or g
attgtgcactagatcccatcccctctcacttgctccaaggattcacttcacaaactctaccctcttctgaatcattgatttcaccctttctgttcttccattaaaaataaatgaaattgaaataaatatattattttacttgacttggttttatttctgtgccagttcttccctgtagccctaatttctcttccttcctttgcagtaaaaattatgtttatatttgctgtctccaacttctttccttacattttctcttaaacacactgtaagaaaggtttctgcctatccctctaccaaattgctttgttaatatctccaataatctgcntgttgctaaatctttgttgagttcagttatcatcttcactgacctaccagcaccgacctttgccacagttgatattttcattttccttgatatactttcttcacttggcctctctctaccacactcaggttttctcctcatcactgcctgctgcttttgtttcctttcttgattccttttctacctgacctctcaaagttcttccattggcttctcctttctttctacattctctcttcctgtaacctaaatctccaccataactttaaaacctatttatatgtggacaacccttaaaattttttatttagtccaaacatttttcctgaa

SEQ ID NO: 1484 - DNA, 661 bp, Homo sapiens
  misc_feature [331]..[331]: Chromosome 2, SNP identification no. = rs10186498
  misc_feature [331]..[331]: allele = a, in linkage disequilibrium with rs4264536, respectively
  misc_feature [331]..[331]: n is a, t, c or g
tcccccagtctcctttttttttgtaacgtttttattattctctactcttatcagctttcaaaatgctgcataatttattacttactatatttctctttgttttttgtctcccattacaagctaagggagtttggtctgttttgttcaacgatatattccaagcacctagaagagtgtgtggcacacagtagtagatacagaataaataaataaatatctgtttttgagtgactgtttgaaaaacaatcttgactaacttaaaatgcacttgttgcccctccatcattccaaattaaaggtcaaactggaggtttcactggattacttttanataggtgcatagcattataatctgcgttcatccctttataatttgtcattaaataatacaacaaaaatgggtaatgcttaaaattcccttattcttattgttcagtatctaagcatcactatcgttttggcaataaagtcttatttgtcagatcatttaagatttgtattaattgcaatcaaaacaatcctttaaaataaacctccatatttatacatctatcgtatatacatgtaaatactacttttgcttaaagagatctgaaataagattcaactaatggcaaaaatagtaattcaaagatgattacatttggggtaaattttttat

SEQ ID NO: 1485 - DNA, 661 bp, Homo sapiens
  misc_feature [331]..[331]: Chromosome 2, SNP identification no. = rs13419562
  misc_feature [331]..[331]: allele = t, in linkage disequilibrium with rs4264536, respectively
  misc_feature [331]..[331]: n is a, t, c or g
gttgctagacactctcaggaacctaactttatatttcctgtaagaatagtggttccgtatttgccagttctatatttgcagtgactttataccacatggtgactacgaataataaaaattggctcttcttttttccattccttacactatgaacagctatataccctggatgttgtgcataaaacaaacaagattcagagaggtgaggagaaaaaggtagatgggccagggacttcagggctcaaagagtaacatgacagcaatttttctggagtttgtcatttttttgcctcatatattctggattagttgcagaggaagccaagaaccnagaattgccaatagacacagaccaacacaaccccaagaaaatcctgttctaccaaccaaaggaccgggaaagaggcagcctagcaagagagaaaatgtttaaacaatagccactctattccagccaaatagcatgcgcgcatacgcgcgtgcacacacacacacacacacacacacacacacacacacacacaactatgaccccatccacccctacaccaggaaagaccaagtgaagaatctagaattgcacctttgtgaggctgtaaggagtcaccctaacaaccccaccaccacagtggtgtccgagaagggcaagtagggagctggg

SEQ ID NO: 1486 - DNA, 661 bp, Homo sapiens
  misc_feature [331]..[331]: Chromosome 2, SNP identification no. = rs13394207
  misc_feature [331]..[331]: allele = g, in linkage disequilibrium with rs4264536, respectively
  misc_feature [331]..[331]: n is a, t, c or g
ttttttccattccttacactatgaacagctatataccctggatgttgtgcataaaacaaacaagattcagagaggtgaggagaaaaaggtagatgggccagggacttcagggctcaaagagtaacatgacagcaatttttctggagtttgtcatttttttgcctcatatattctggattagttgcagaggaagccaagaacccagaattgccaatagacacagaccaacacaaccccaagaaaatcctgttctaccaaccaaaggaccgggaaagaggcagcctagcaagagagaaaatgtttaaacaatagccactctattccagccaantagcatgcgcgcatacgcgcgtgcacacacacacacacacacacacacacacacacacacacacaactatgaccccatccacccctacaccaggaaagaccaagtgaagaatctagaattgcacctttgtgaggctgtaaggagtcaccctaacaaccccaccaccacagtggtgtccgagaagggcaagtagggagctgggagcagctctgaccccatggcatcagtggagagatccgaagaagatcatggacatccaccccacactatataatgaggttcccctctccctccacactgaggtagtgccaaagactacctagtggagag

SEQ ID NO: 1487 - DNA, 661 bp, Homo sapiens
  misc_feature [331]..[331]: Chromosome 2, SNP identification no. = rs13421172
  misc_feature [331]..[331]: allele = g, in linkage disequilibrium with rs4264536, respectively
  misc_feature [331]..[331]: n is a, t, c or g
caatttgtaaaaaatgatagttaaaaatatgaggatttaaaaaaataattttgagattggtgcaaaccttcctttccaagtaagtcagaaatcgaagtcagttttttaaaaagatttaccaattagctacaataaaaataaaataatataaaaagttaaaagagaggcagtagcataaaatgaattgtttggaaatatgcaaaagatgaattaattctgtaatttataaatttaaaatataccaccactcacccattatgatggctactataaagaaaaacagaaaataacaagtattgatgaggatgtggaaaaaattaaaaccattttncactgttgttgggaatgtgaaatggtgtagccaactatggaaaacaaaaattaaaaatagaattaccaaaggatccaaaaatttaatttatataccccaaagaattgaaagcaggctcttgaagagagatttatgcacccatgtttatagcagcattattcaaaatagccaaaaggtgcaagaaacccaaatgtccatcaatggataaatggataaacaaagtgtggtatatacatacagtggaacattattcagtcttaaaaaaggaaattctgacatacactacaacaaggatgagacttgcatacattacgctaagtcacataagcc

SEQ ID NO: 1488 - DNA, 661 bp, Homo sapiens
  misc_feature [331]..[331]: Chromosome 2, SNP identification no. = rs2887816
  misc_feature [331]..[331]: allele = t, in linkage disequilibrium with rs4264536, respectively
  misc_feature [331]..[331]: n is a, t, c or g
ggactccaccctcaatctgcaactatatgaaaaaatggcagaaggaataacacattttgtcttcttttaaccaataacaaactccccacttagccctacaaccactacaccaggagatataaatttaataccatcaattaccaaaaaaaaaatactggttagggacttaacattttgtaattgacaaagctaattccaagctggcctacacaataaaggacatattttgatccacataaataaaactccagtaccaggtctagattcaagaaagttatactccagtggcgaaaaccatgtcaccataaatccagcttctttttgactttgnactctccccctcattggtgtctttaatcctcaagccacacattgcctttcatccaccatcagtacaagattgatattattcccctgtgatcaataatggctgctacagttccagccctcacatactaacacttcattatccttggaaatggggtctctttttcctctcatacaaagttctggaattcactaacctctcagtatctccaaatgtgtcatgtaccctgccctgatctaatcagtgtatgcagttgaatgtgacttaataatatggtaaaagcagtggagatctgtctttgagctaactcatataaatgaaaatcaaagaaat

SEQ ID NO: 1489 - DNA, 661 bp, Homo sapiens
  misc_feature [331]..[331]: Chromosome 2, SNP identification no. = rs13388196
  misc_feature [331]..[331]: allele = c, in linkage disequilibrium with rs4264536, respectively
  misc_feature [331]..[331]: n is a, t, c or g
ggccagcagaaaagttgtaaatcaggacagtctcagacaaactgggaagcatgccatccttgaagctccagattcttctaactgctgccatctctacttcaatgtttcacagatacataaaattaaacgtgatacataaaattatcacgtttatgtatctgtattaaacagatacataaaatcaatatattctcttccaaacttagtccccttctagtcttccctttgtgagtgataccaccatccatccagaagcacaatgcaaacctggcagagttagccttgacacaacctccttcctgttattcttcatccagtccatcacatttanattgtaaaatactttaaatcatccaaactccccatctacactgcaatgtttcaaggccactttttcatcacctcgtaatgggactagagtaataaccatctaagcgagctctcaatatttatttttgcctttattccaatctaaataagtcatttcaaaacacaaatgtcatcaagtcaactacttgtttaaaacattcaatgatttcttattgatcttggaaaccaatgcaatgttcatattgagacacgatctggctgtgcctgcctttattacctgtctccctctactgcccctgctcctttttatccatctccagccacattagtt

SEQ ID NO: 1490 - DNA, 661 bp, Homo sapiens
  misc_feature [331]..[331]: Chromosome 2, SNP identification no. = rs2370681
  misc_feature [331]..[331]: allele = g, in linkage disequilibrium with rs4264536, respectively
  misc_feature [331]..[331]: n is a, t, c or g
attcaaaatgagatttgggtgggtcacagccaaaccatatggcatatctgcttggagtaagcctgttatttagagagcattgaaaactagccagaaaggtttacttttaacttagttggctgtaagaaattattgaaatttttttcccgtaagaaaataatacgattgaaataaaagtgaaattcagaaatcaaatacagttatgaggtatatgcaatatgcaaactcaaattaaaaatagtctagagatgttcaactttaaaccattgttttggcacattctatatatttaaacttaaagttaatacctcaaggtgggctattaattaanaaacagtatatatttattcaagtttgtgtatatattagaatctacagaaactatgtatgttataaaatgaagatgaaaacattctaaaatagaaagaaaaataaaaatggccagatatttatgaacatttaacttcagagtatgataggaataaataagataataggcatgtgttattgtgttcagttttcagaataaaatattgaagtatgttatagacataatgatggtagatatatcccttcagcatcctgaaattcactctatgaagaaacttcagcatactgatatctgaagacaaagtcagccgatttataaatctatgatacc

SEQ ID NO: 1491 - DNA, 661 bp, Homo sapiens
  misc_feature [331]..[331]: Chromosome 2, SNP identification no. = rs12233005
  misc_feature [331]..[331]: allele = t, in linkage disequilibrium with rs4264536, respectively
  misc_feature [331]..[331]: n is a, t, c or g
tctagactatttttaatttgagtttgcatattgcatatacctcataactgtatttgatttctgaatttcacttttatttcaatcgtattattttcttacgggaaaaaaatttcaataatttcttacagccaactaagttaaaagtaaacctttctggctagttttcaatgctctctaaataacaggcttactccaagcagatatgccatatggtttggctgtgacccacccaaatctcattttgaattgaagtttctataatccccctatgtgtcgtgggagggacctagtgggaggtaattaaatcatggggacagttaactccatgctncggttctcttgatagtgagttctcacaagagcttatggttttataaggggctttcccctcttttgctcggcacttctccttcctggcatcatgtgaataaggatgtgcttgcttccccttttgccatgattgtaagtttcctgaggcctcctcagccatatgaaactgtgaatcaattaaacttctttcctttataaattactccatctcaggcagtactttatagcagcatgagaacagactaatacagtaaattggcactggtagagtggggtgctgatattaagatacccaaaaatgtgggagtgactttggatctgggtaacaggc

SEQ ID NO: 1492 - DNA, 661 bp, Homo sapiens
  misc_feature [331]..[331]: Chromosome 2, SNP identification no. = rs13416578
  misc_feature [331]..[331]: allele = c, in linkage disequilibrium with rs4264536, respectively
  misc_feature [331]..[331]: n is a, t, c or g
ttattgcagaacaggaaatgtactccctgatccttcctctggaagcttcatctcagagggggatccggctgtatgaggtgtcagtcggcccccactgggaggtgtctcccagttaggcttctcgggggtcagggacccacttgaggaggcagtctgtccattctcagatctcaaagtccatgcttggagaaccactactctcctcaaagctgtcagaaaaggatgtttaagtctgcagaagcttctgctgccttttgttccgctatgccctgcccccagagatggagtctacagaggcgggcagtggtgggctccactcagttcgagtctncagaggtgggctgcggtgggctccacctagttcgagcttcccgccactttgtttacctagtcaagcctcagcaatggtggatgcccctcccccagactcactgccaccttgcaattcaatcttggactgctgtgctagcagtgagcaaggctccatgggcatgggaccctccaagtcatgcgtgggatataatctcctggtgtgctgtttgctaagaccattggaaaagcacagtattagggtgggagtgtcccaattttccaggtaccatctgtaacggcttcccttggctaggaaaaggaattccccaaccccttgcacttcctgggt

SEQ ID NO: 1493 - DNA, 661 bp, Homo sapiens
  misc_feature [331]..[331]: Chromosome 2, SNP identification no. = rs10195099
  misc_feature [331]..[331]: allele = g, in linkage disequilibrium with rs4264536, respectively
  misc_feature [331]..[331]: n is a, t, c or g
caaaggtgaccaataaatatttgtttaacaatctacttattcaaaatggcactcatcttttaatgtataaatttcctaagaaataaggtattctgacttggttttttcctgccatacatgtatgttatacatcactacagcaagtggctcaagtggactgcctaatagtcttatcatctgaaaatctctgattgtcactaaaaaaactactgcattggagtaataagtaattcatcacctctaatctcaattaagtaatctaaatagactctcaagttgttgttggaatcaataagccataaaaataataacatggatatttaccttaagntgtttctattttgttttacagtaaaaattctttgtagaaatacatgttagaattcattgtttaaagttcatctttaaactgatcaagtatctacttgttacattaggtcccaagtaatatactgtaagcatatataggtcaatacactttgtaaatttctgcagccaaaatattcactctaatccaagcctttcaaatggattctattgctcacaaatctagaaaagacaagaaatcaaatttcttttcttcttaaatgacatcacaactcaaagacctctacgttctaataattcttcactaacaattttcttctttttctaagaataa

SEQ ID NO: 1494 - DNA, 661 bp, Homo sapiens
  misc_feature [331]..[331]: Chromosome 2, SNP identification no. = rs4277558
  misc_feature [331]..[331]: allele = c, in linkage disequilibrium with rs1371469, respectively
  misc_feature [331]..[331]: n is a, t, c or g
tcatgtatttggtttatttcatttgtttattatagagataaggtcttgttctgttgcccaggctggtctcaaactcctggcctcaagcaatcctcctgccttggcctcccaaatgctgggattccaggcatgcactactaggcccagccttgggtttgttttgatcttcccttgcctctctgttatacacttatgtttatttcctgacttaaaagtattaggttgagtgttaagctgattgtttcaatgagaaaaatgtgttcctgtgtcagattagaaaatggtggttgggcttcagtgaaaactaaaactacttaatctgtaatttacntgagccatcatgctgatgaccctttccaattatacctccacatcttggataggcattgagtagaaatgcattggaatattctgatgtgctcctgatgtgagacaccagcaaaaaaatttatcttacttcagtagaacgcatgacagttgactgtagagtaaaaaatgatggctgggcatccatctcaatgtccactcaccatatctgaagtactcctggtcctcaggtgaactcttgcacacaaaacaaggtaaaacttgttttaccttgtttatctattattttgataaatggtgtgtagtgcatttcaagctaattaaataatgaaaa

SEQ ID NO: 1495 - DNA, 661 bp, Homo sapiens
  misc_feature [331]..[331]: Chromosome 2, SNP identification no. = rs11685775
  misc_feature [331]..[331]: allele = g, in linkage disequilibrium with rs1371469, respectively
  misc_feature [331]..[331]: n is a, t, c or g
aaaaacctcgttcagctctgcttaactcactttaatatatatttgtctaatgtttgatcatttttcaattaggaggaaaatgacaaaaataatatttgtttgaaaaagtttgactttatagtaattcaacaataatcaaaagagatctaacttgatgttttgaccagttggtatacaccaagtgcattgtggttttttaaaatagtgactcgttttaatataaattctattaacactttcttccatccaaacaatgaaagatagtttagaaatttcattcaagggcatgatttctctcaaccactggctatagtataagatgattttaggnaagagataatttagaaggaatttacagaaaacagactaatgatttttctaggataaacatgaattaaaatcacatttattttcttatgattttcccaactgtagctattcacaaaaactttctaagttttagctaattgacttttagtaatacaacattttatcccacattgagactagaaaaaaactttcatcataacagtttcaaaacatttaaacttttgaatgagccaatgccagtcatacagtcttcattattctccaccaacatctgggagagtcagtccttcagcatgagtttaacaggttagctttttaataacgcactcca

SEQ ID NO: 1496 - DNA, 661 bp, Homo sapiens
  misc_feature [331]..[331]: Chromosome 2, SNP identification no. = rs11674773
  misc_feature [331]..[331]: allele = g, in linkage disequilibrium with rs1371469, respectively
  misc_feature [331]..[331]: n is a, t, c or g
cactttcttccatccaaacaatgaaagatagtttagaaatttcattcaagggcatgatttctctcaaccactggctatagtataagatgattttaggcaagagataatttagaaggaatttacagaaaacagactaatgatttttctaggataaacatgaattaaaatcacatttattttcttatgattttcccaactgtagctattcacaaaaactttctaagttttagctaattgacttttagtaatacaacattttatcccacattgagactagaaaaaaactttcatcataacagtttcaaaacatttaaacttttgaatgagccantgccagtcatacagtcttcattattctccaccaacatctgggagagtcagtccttcagcatgagtttaacaggttagctttttaataacgcactccaatttggtcaggtgacaaaacacgagatgaattttttttcagcatagcaaattaaacccatataatttgttaacagtaaattttagtctgattataaatgttatagatttcatgatcccattatagcacaaatgaattaacttatattttccattttatgagtctattttcaagccaaccatctgaaattacagtatttaataggaatatttaagaagtatattattgttttaa

SEQ ID NO: 1497 - DNA, 661 bp, Homo sapiens
  misc_feature [331]..[331]: Chromosome 2, SNP identification no. = rs12465339
  misc_feature [331]..[331]: allele = a, in linkage disequilibrium with rs1371469, respectively
  misc_feature [331]..[331]: n is a, t, c or g
tttgtatttttagtagagacggggtttcacggtgttagccaggatggtctccatctcctgacctcgtaatccgcccgcctctgcctcccaaagcgccgggattacaggcgtgagccaccacgccggtcctgcttactgctttctaaatgtgccatggcccaaaaaaagtaaagaaactgttttcatattagaggtaaatcttacaatcaatgatgtttgcctaattggctgcgcttaccaagtatattaaacaaactccttttaacctcttgctttcttgagaccttgcagagaatgtgttaattacattaacattattggcactaaaccntgacttaagtttacaggtgaccttcaaataaatatttctgtagcctagaactagacttttactgccaccataaagcttgccttaaggagaagacattcttgaaaaaaatcaaagtaggcacaaatcaaagagactcattttctgtgctgcaattatttttcttagttcctctgaggcaactaatctgctattcagattagttgaattcaaaccttgaattctgaaatagacaaccaaacaagatggtttttgtgcaactaaatgaccagccataaaagaccaagctgcaactgtaaacctgaatgattgacatatgttcttcttttcttt

SEQ ID NO: 1498 - DNA, 661 bp, Homo sapiens
  misc_feature [331]..[331]: Chromosome 2, SNP identification no. = rs4667285
  misc_feature [331]..[331]: allele = a, in linkage disequilibrium with rs1371469, respectively
  misc_feature [331]..[331]: n is a, t, c or g
atgattgacatatgttcttcttttctttatactggaaaacaaagttttacccagttcagaatgcctaatcagctgttataaagacttctcaactaaataattggtttatattttggattattacctgaaataatatatgacttggtatacttaaaaagtaatgattgaaataataggtattagccatctttccatcaatttgaggatttccctattgttttttaaacctggttaacaattcccctgaactttaattaaaacaaaaaagatatatggtcatttcacaaagataactgtataaatcaaccatctcacctccattatatatatnaaaaaaaagctaatgcagatggaggcacccctaaaattagaagacctatatataatgccatgacacacgctgcataagtagctttgatgagaagctgtatttttctaggggtatttttaaccaagtgaagagcaattattggccgtggaaagacaaaacttggtgttgcaacacctgggatgaaggccctgctcagtcccttattagctaggagacgtcgggttagtcacttaatccttctaagcctcattttccacagctgtcaattaaagaaaaatagattacttcagagagtgtttggggattcaaattacataatggaaatgtata

SEQ ID NO: 1499 - DNA, 661 bp, Homo sapiens
  misc_feature [331]..[331]: Chromosome 2, SNP identification no. = rs920266
  misc_feature [331]..[331]: allele = c, in linkage disequilibrium with rs1371469, respectively
  misc_feature [331]..[331]: n is a, t, c or g
gaacctatgtttgtaagctgggatcagcaggacctgcaagacaagctccaattgttaacttctgacatgcgatttcttatcagtgagtcatagtggaaagctgtcagagtgacaagaaggtctgcaatctcattttggttaacacagcacagactagcataacaccaagggctagaggcttgaggaagtctcccctcagtaagagaaagactgaatcatggtgactgagacagagcaagtagtggggccccaagggcccttacctgactaggtaaggggaaagtttccaagtcattgaagacagagatgggtgagatggacccacaagagntgttaggaagcaacaggacatggctgtgcatagttgtgaggaaagaagtctttgaatgagagggaagctccagacttatgtgaagaaatgttgcgtctttttttgttcttccacaaccataccattgaaagcagcttttagaaaccataagccctggtgtggggcttgttggtagtgagtgaatgaataactcactcatcttttaaatttaatagtctatatatatattcatctaatctccatcctcctcctcaaatactctctaaggctatagtctaaataggaccaactttaccccaagtagaagggagaaagacattctagaccaat

SEQ ID NO: 1500 - DNA, 661 bp, Homo sapiens
  misc_feature [331]..[331]: Chromosome 2, SNP identification no. = rs10189190
  misc_feature [331]..[331]: allele = c, in linkage disequilibrium with rs1371469, respectively
  misc_feature [331]..[331]: n is a, t, c or g
gtcaccatgattcagtctttctcttactgaggggagacttcctcaagcctctagcccttggtgttatgctagtctgtgctgtgttaaccaaaatgagattgcagaccttcttgtcactctgacagctttccactatgactcactgataagaaatcgcatgtcagaagttaacaattggagcttgtcttgcaggtcctgctgatcccagcttacaaacataggttcaacaccttcttagactctgcggccttttctgcgaggtttcttctagctgaacagacctgttgtagggagtatagtatattctgcaactctgatgtattttctaaangtaaatttattttccattactgacctaatttattagctagttaatgaaaataatgagaatccctaaggatcccaaatactttatgaaattaaaaaaaaattaaagagtattctggaagccatttccctactcctgggctgctgagctctcaagtgaatctagagtacaaacatgaaggctatatctgtggggaatgtgttggcttctgtctttgaaaggaaacaagacaaataacttgtacatggtattaatatattttccaatttggaaaaaatccataacttaagtcagaaaattgtacattgtaaaataaaggctgggcacggtggc

SEQ ID NO: 1501 - DNA, 661 bp, Homo sapiens
  misc_feature [331]..[331]: Chromosome 2, SNP identification no. = rs2119070
  misc_feature [331]..[331]: allele = c, in linkage disequilibrium with rs1371469, respectively
  misc_feature [331]..[331]: n is a, t, c or g
taatctttcagattggcttttttcattcagcacaattatctgaatatccaagttgtatcaatagtttgtttctttttattgctgggtagtattccatggtatggatgtaccaccatttgtttaatcagtcatccgttgaaagacatctggtctgtttcaggtttttggctattacaaataaggattgctatgaacattcatgtacaggttttggtatgaacatatgttttaatttctctaggataaatgcccaagagtgcaattgcagggttgaatattaattgcacgttaaaatgtataagaaactgccaagctgttttctagtaaagtnaccttcccaccagcaaagtatatgtgatctagtttttgaacatcctcattaacacttggtgttgtcattattttaattttagccattctgttaggtatgtagtgttatttcatttttaaaaattttttttggagacaggggtctcactgtcacttaggctggaatgcagtgtcacaatctcagctcactgaaacctccgcctccaaggctcaagcgatcctcctgcttcagcctcctaagtagctggatgacaggcgtgcactaccacacctggctaatttttgtattttttgtagagacagagttttgccatgttgcccagactggtct

SEQ ID NO: 1502 - DNA, 661 bp, Homo sapiens
  misc_feature [331]..[331]: Chromosome 2, SNP identification no. = rs751664
  misc_feature [331]..[331]: allele = a, in linkage disequilibrium with rs1371469, respectively
  misc_feature [331]..[331]: n is a, t, c or g
tattgacacagctgtcttaacctttgcatggcaaaatatttgcttaaaaatgaacattcctcatcaccattttgcttagaggcatatctaagcaaaaaatggtacagactgcggtaagaatttgctttgtattcgattttatttgaaactttttattgagatagtcatagattcacatgcaatttaagagataatacagagagactccttttatactttccccagtttcccaaatggtagcattttgcagaactgtagtataatatcacaaccaggacattgacattaatacaatcccctgaacttatctgaatgttctcagttttagttntactcgtgtgtgtgtgcgtgtgcatgtagttctatgcaattttatcacatgtaggtaccctgtatctactattactgtgtcagtctgttttcatgctgccgataaagatatacctgagactgggcaatttacaaaagaaagactcacagttccacgttgttggggaggcctcacaataatggtggaaggcaaggaggaccaagttacatcttacgtggatggtggcaggcaaactcccattttttaaagccatcagatgtcatgagacttattcactctcatgagaacagcacaggaaagacccaccccatgattcagtgatctcccact

SEQ ID NO: 1503 - DNA, 661 bp, Homo sapiens
  misc_feature [331]..[331]: Chromosome 2, SNP identification no. = rs751663
  misc_feature [331]..[331]: allele = a, in linkage disequilibrium with rs1371469, respectively
  misc_feature [331]..[331]: n is a, t, c or g
agttcatgtggtggggtagcctattgacacagctgtcttaacctttgcatggcaaaatatttgcttaaaaatgaacattcctcatcaccattttgcttagaggcatatctaagcaaaaaatggtacagactgcggtaagaatttgctttgtattcgattttatttgaaactttttattgagatagtcatagattcacatgcaatttaagagataatacagagagactccttttatactttccccagtttcccaaatggtagcattttgcagaactgtagtataatatcacaaccaggacattgacattaatacaatcccctgaacttatcngaatgttctcagttttagttttactcgtgtgtgtgtgcgtgtgcatgtagttctatgcaattttatcacatgtaggtaccctgtatctactattactgtgtcagtctgttttcatgctgccgataaagatatacctgagactgggcaatttacaaaagaaagactcacagttccacgttgttggggaggcctcacaataatggtggaaggcaaggaggaccaagttacatcttacgtggatggtggcaggcaaactcccattttttaaagccatcagatgtcatgagacttattcactctcatgagaacagcacaggaaagacccacccc

SEQ ID NO: 1504 - DNA, 661 bp, Homo sapiens
  misc_feature [331]..[331]: Chromosome 2, SNP identification no. = rs11680808
  misc_feature [331]..[331]: allele = g, in linkage disequilibrium with rs1371469, respectively
  misc_feature [331]..[331]: n is a, t, c or g
gaatactttatattcttttcaaataacatgccagtagccaattcactatatgaaaaccacaatcattaattttttccaaatctgctttttttttttttttttggcaatccacttctatgaaaatgtagtaggaattgccatctgggcaggagtttgcaaaaggctctttaatttgcccaacagaatgctgactttgctttctacacaaagagtagttatgtgaggggctcctattaacctacaatccataatcctatgattttaggagcaggtttggttatgaattcccttctctgctcctctgctcataaactcatctaagatatccaantcatgagaagggcactcattcctccagcttctcaacagtttgccaccatagcaatcagatcacatttttaaaatcccattactaactctaacacagacactttcacaaatgtaatttaacattttatcttctattttagaaagggttgttcataagaaatagccatatgaagactttttctgcattttttaaagtatgaatacaatgtgttatcttctatattattaagtgtctcatatataatgagttttttaaatcaggaatttctttttctttagtgttggggaaaacaaaacacccatttggatagaaaagtataattccttagat

SEQ ID NO: 1505 - DNA, 661 bp, Homo sapiens
  misc_feature [331]..[331]: Chromosome 2, SNP identification no. = rs10206543
  misc_feature [331]..[331]: allele = g, in linkage disequilibrium with rs1371469, respectively
  misc_feature [331]..[331]: n is a, t, c or g
ataaaatcatttttgtaatacaactttaattcttttttacaaaaagataaacaatatacttgaaggaaataagcctattaaaagaatatgtgagggttacttcttgtgcttgtgtttccactcgaaaacttaagactcagcgatgtttagttccccattttaacaatttcatgtatttttcttgatttaaaacaaattgattgctcagatgtgaatctaaataactaagcctaattcatgtagtggaccttaaaaaaaataagaagaaaacaccctgtcagagattctccagatggttttgtttctgacgataaataaaataaatgactcntgcatatatatatattctgcttgggtataagcaaaatcacataggaagaaaacttatgatcactaaaaaggtgtgtattaatttttaaaatgactaggatgcaaaagtcaccattgaaagcatctttttttttttttttgagacagagtctagctttgttacccaggctagagtgcagtggtataatctcagctcactgcaacctccgtcttctgggttcaagtgattctcctgcctcacactcccaagtagctgggattacagatgcacaccaccacgcctggctaatttttgtatttttagcagagacggggtttcaccatgttagcc

SEQ ID NO: 1506 - DNA, 661 bp, Homo sapiens
  misc_feature [331]..[331]: Chromosome 2, SNP identification no. = rs11694976
  misc_feature [331]..[331]: allele = t, in linkage disequilibrium with rs1371469, respectively
  misc_feature [331]..[331]: n is a, t, c or g
tcactgcaacctccgtcttctgggttcaagtgattctcctgcctcacactcccaagtagctgggattacagatgcacaccaccacgcctggctaatttttgtatttttagcagagacggggtttcaccatgttagccaggctagtcttgaactcctgacctcagctgatctgcctggaatgcatctcatttctaatctaccagtttgcaaaccaaaaagcagtgataaaggacatcacatatttcttggctttatggagcaatctttgttctgaccctcttccaagagttcaaggacaggttttaattctgtaacagttggtctaagctcntgccaagaatcgtttcccaattcctctccatctttatttctggtcttatatcaagaatgacttttattagaattttagaaaacactggatatagaccactgggctatgtgatcttccaacctgatcctctatctcccctttcagaggccacttccatcttgaacttcttagctgtgattttcactggtttctcttgacagaagttcccaatgtcaacagttctgggtggtagattttggtaacttctctggtttaccatggctttctttgatgaggactcttgcaggtgatagttctaataatgaccaatctttcaacagtgttcctcac

SEQ ID NO: 1507 - DNA, 661 bp, Homo sapiens
  misc_feature [331]..[331]: Chromosome 2, SNP identification no. = rs1371468
  misc_feature [331]..[331]: allele = a, in linkage disequilibrium with rs1371469, respectively
  misc_feature [331]..[331]: n is a, t, c or g
cactgggctatgtgatcttccaacctgatcctctatctcccctttcagaggccacttccatcttgaacttcttagctgtgattttcactggtttctcttgacagaagttcccaatgtcaacagttctgggtggtagattttggtaacttctctggtttaccatggctttctttgatgaggactcttgcaggtgatagttctaataatgaccaatctttcaacagtgttcctcacttttgtacaaatctaccatgaccttacatcttaactgaggtctgtttgtgcaagtacagaccaatacaggaaaacccaaacattattactccgctcnttgcaaaaactccagacctctacctttttgcccataagctttttgatccccttcatcttattcccggattcctgcttgatttttggatgcataactgatgtgttttttgtttgttttttctgattttgacctcagcacatttccttagatatatactatagactaagctctctgggtacttccaattcctatagctaaatagtaacgatcttgtgtagtaccccataagcctgtcccactctccctttaaccccattatgaggcgctacagttctttcaaggatcatattcaaagcctcttatgaatgctaatgtccagtcctttaagga

SEQ ID NO: 1508 - DNA, 661 bp, Homo sapiens
  misc_feature [331]..[331]: Chromosome 2, SNP identification no. = rs17198934
  misc_feature [331]..[331]: allele = g, in linkage disequilibrium with rs1371469, respectively
  misc_feature [331]..[331]: n is a, t, c or g
gccacttccatcttgaacttcttagctgtgattttcactggtttctcttgacagaagttcccaatgtcaacagttctgggtggtagattttggtaacttctctggtttaccatggctttctttgatgaggactcttgcaggtgatagttctaataatgaccaatctttcaacagtgttcctcacttttgtacaaatctaccatgaccttacatcttaactgaggtctgtttgtgcaagtacagaccaatacaggaaaacccaaacattattactccgctcattgcaaaaactccagacctctacctttttgcccataagctttttgatccncttcatcttattcccggattcctgcttgatttttggatgcataactgatgtgttttttgtttgttttttctgattttgacctcagcacatttccttagatatatactatagactaagctctctgggtacttccaattcctatagctaaatagtaacgatcttgtgtagtaccccataagcctgtcccactctccctttaaccccattatgaggcgctacagttctttcaaggatcatattcaaagcctcttatgaatgctaatgtccagtcctttaaggaggctagccctagtaaaggtagagaggagatactcagagctgccgcacaga

SEQ ID NO: 1509 - DNA, 661 bp, Homo sapiens
  misc_feature [331]..[331]: Chromosome 2, SNP identification no. = rs17198941
  misc_feature [331]..[331]: allele = t, in linkage disequilibrium with rs1371469, respectively
  misc_feature [331]..[331]: n is a, t, c or g
ctattttttggttcccccagctggataaattaactgaactctaatggtcaaataggataccgcttataagattgattttaaatattttacttaggtgttcctaccacagtggcctgctttcaattccccatgtacaccagattcaattcctcatatacaccagattcaattcctcatatacgccagatacaatcgcttactaggaattacacaatctggcttctattcacttctccatactcatcctttgccatttcccttctcaccccagccacagtgatgttcttttagtttttcaaatgttctcactggcatctaggaattcatagcngcatttgctttcaactgaccttttatagccccagttcttattcatccttaggtcttacctcccttaacaacacctccttagcccaagtttgaaatgtatagtccaactgtatgtatacatggtgtggggctgtagagtatcattatttaacaagaattaaaataacatttgtttagcattttcaaaatgttatctgttacacctggttacttgatagtctctgtcattagactgcaagttttgtgaggtcacaggctgtgtcaacatagaaaatggtcaatacgtacttttaaatgaatgaataatcaaactataattttccaataaatc

SEQ ID NO: 1510 - DNA, 661 bp, Homo sapiens
  misc_feature [331]..[331]: Chromosome 2, SNP identification no. = rs1371469
  misc_feature [331]..[331]: allele = c, t
  misc_feature [331]..[331]: n is a, t, c or g
gtatgctctgctattttcccccccacagaaatgtgtttatgtagctaaccaaaatagaaacaatccctgtagtcagttcccttggaaatgaagaaaacattggctcttccttcagaaagaggatgttggtccatgggaacaagtaccagcagtgagtcctgaccaaaatacagggagcactgaggtttttttaaaaaatcagatatttgtatcagaacaggattcagctacttcagaaggtttaatacctgttgagaagaaaaacatttaagtcttgagttcatcacatctaattaataggttcagttaatcaaatttttgaagatgtacnattttacccctaaatcttttagcaatgaaaaaaataatcattttaacctctaacttcaaaaatctagaactttcaaatagttttattattaatgcaggcaactgcccaagcaaatacattaatcttattcaacatcttcaaatccccaaatattgtcctgagacctgagatcagaacattcaaaccacagatcctacaattctcagattcgttctaaggtcctggagcatgtctaactcaagagccagtatagtgaaatggagcaaagggatggttcagtgaacagtgagaccagcccactgggaatcagatatagaaacaactgttaat

SEQ ID NO: 1511 - DNA, 661 bp, Homo sapiens
  misc_feature [331]..[331]: Chromosome 2, SNP identification no. = rs7608796
  misc_feature [331]..[331]: allele = g, in linkage disequilibrium with rs1371469, respectively
  misc_feature [331]..[331]: n is a, t, c or g
ttattctacagcattagttcaccgttaagcaaaatgtagtgcttcctctctttggcaatcttctgttcgagcttcctccacaactacccccatcatgctcattaaagccacctttcaccatcactgttcaacaaaacatttattagcaaaaagaacaatattcattggctttattatctctggaacatgacagacatattagattaactaatcttaaaacaatattttacagataataaagctaagagtttagaaaacttacataaattgtctatgatcacatggatgtcagagctgctgtccttaaaatataaatggaactcaaaagagnggttaatgtgggagtagtaagtttggcattggcaggtgacaacacattggtaattgttgaagctatggaaatgcatgaaataactaatttagggagacagcactgaataagaataaaggatgccaatgtttacagcagcacaatccacaactgcaaagaaaaaaaattgagcaatagcactgattttacaaagaggtcagcaaaagtgaggattgaaaaagagattctggatttgtcaattataaagttactggtaattctaacaaggtcattttctaagaagttgtggagatagaagtcaatttgaataaaaagatcatgaagataaga

SEQ ID NO: 1512 - DNA, 661 bp, Homo sapiens
  misc_feature [331]..[331]: Chromosome 2, SNP identification no. = rs12622601
  misc_feature [331]..[331]: allele = g, in linkage disequilibrium with rs1371469, respectively
  misc_feature [331]..[331]: n is a, t, c or g
cagcagcacaatccacaactgcaaagaaaaaaaattgagcaatagcactgattttacaaagaggtcagcaaaagtgaggattgaaaaagagattctggatttgtcaattataaagttactggtaattctaacaaggtcattttctaagaagttgtggagatagaagtcaatttgaataaaaagatcatgaagataagagagcaaatatagacaaacgttatacaaattttggtttcaaagggaagaagagacaaagcagtaatttgaggtaaaggcagaatcaagggaagattcttttagtcttttttggcttgtttttaagggggagganacaacatataaaatatgaatatgaagccacagataattgactgaacaaaggcctaaagcgggaggggaaggattagcttggggacatgaggtgggaggaggtagtggtgggtgacattataaatactggaaggatagagaagggaaataatgggctttattttatccatgacttcagaggtaacatcatacagttaaaatgagaaaatgaataggataaagagttacaggaaaattgaaaacatttgggactatcttagcatagaaaaagaaaagaaaccaaaaataaataaaggacttcctggaagaatcaagagccctgatggagaat

SEQ ID NO: 1513 - DNA, 661 bp, Homo sapiens
  misc_feature [331]..[331]: Chromosome 2, SNP identification no. = rs12616162
  misc_feature [331]..[331]: allele = a, in linkage disequilibrium with rs1371469, respectively
  misc_feature [331]..[331]: n is a, t, c or g
acaaagcagtaatttgaggtaaaggcagaatcaagggaagattcttttagtcttttttggcttgtttttaagggggaggagacaacatataaaatatgaatatgaagccacagataattgactgaacaaaggcctaaagcgggaggggaaggattagcttggggacatgaggtgggaggaggtagtggtgggtgacattataaatactggaaggatagagaagggaaataatgggctttattttatccatgacttcagaggtaacatcatacagttaaaatgagaaaatgaataggataaagagttacaggaaaattgaaaacatttgggnctatcttagcatagaaaaagaaaagaaaccaaaaataaataaaggacttcctggaagaatcaagagccctgatggagaatgggaatcaccataaatatctcaattttccctacagaacccaaggttggcaagttccctgtcttaaaatcattctttctagtaagaggatttgaagatggaagccagattggccaggtcgggaggttccactctgtgaaatcagccgcattcaagacacagtaagggtttaaaagccagatgcagtgctcaagtggtacgacaaagtaaacgcctaactttatctttgccttctctacctccgtctcttag

SEQ ID NO: 1514 - DNA, 661 bp, Homo sapiens
  misc_feature [331]..[331]: Chromosome 2, SNP identification no. = rs11677198
  misc_feature [331]..[331]: allele = t, in linkage disequilibrium with rs1371469, respectively
  misc_feature [331]..[331]: n is a, t, c or g
gataaggcattttccctacatcatacagcaaataaatgacagtttgtaatataattcaaatatctccattcaataactagaaaccacaacagtcatatagctaaccattcttgagcatggtttttaattctttacatgattttttgtatttattttccaatctataatgtaggtactactgtcattctcatttcacatctggggaaatgaagcacagagtggctatacagcctcttcgaggtcacacgcagctagtaaaaagaggcaggagtgaaattcagccagcctatctccccagtccatggtcttaaccactatactctcacccttnatttttctaccaacttccccattgtaactgtttgtgggtgctgtatctattagataaccataaatgacccaggtgtagagcaagtcctccaacagtgcaaagacaaaatgaaaccactagggtgtctttttgtctaattatcaataaccaggatcagcccaaaggaggcaaatgtacccccaatcccccaactagccacaattcttgtcatcacttgtggtcttttggttcagggcctcagtgctctgagaattcctaactctaccagcattcacattaattttactgaggcattctctccatgtacacagttgtttgttttatagaaat

SEQ ID NO: 1515 - DNA, 661 bp, Homo sapiens
  misc_feature [331]..[331]: Chromosome 2, SNP identification no. = rs17198955
  misc_feature [331]..[331]: allele = c, in linkage disequilibrium with rs1371469, respectively
  misc_feature [331]..[331]: n is a, t, c or g
aacacatttcaccactcactgttgcttaaataccttctatgatattcttgccaaatggcctggaaatttgaaacctcccatggtagctcattccatgtttggacaactttaaatgtcagaaatttcttcctctcattgaaactaaatctatctgtagctgccttttattttccctagttaataacttttaggtttaatctgatttttcttattttgagcatttaataaaaatgacagaccttatctccaggaaaaaaaaatttagacatgaataaaaacttgtacaatctttgcggaattgcagtgttctgaaggcctatgaatggtctanggactttggacttagaaactctcttttaataacagcccttcaaataccataaggcaagtgtgttccccccctttactgatgtactgtgttcaagtacttatacctctcttctctctccacggaattgcatctgcttagattttgctgcccatttcagcccacggaaacctttctaaatcaagttctatgatctaatctattcacttcccctccttggagttgcttttaggcttcatcagcatgctctagtcttttcaacacagccaatggaaagatatgggctgggaaacagctggaaacaaagcactgtagttggcaactagcaacctg

SEQ ID NO: 1516 - DNA, 661 bp, Homo sapiens
  misc_feature [331]..[331]: Chromosome 2, SNP identification no. = rs13008704
  misc_feature [331]..[331]: allele = c, in linkage disequilibrium with rs1371469, respectively
  misc_feature [331]..[331]: n is a, t, c or g
ctccaggaaaaaaaaatttagacatgaataaaaacttgtacaatctttgcggaattgcagtgttctgaaggcctatgaatggtctatggactttggacttagaaactctcttttaataacagcccttcaaataccataaggcaagtgtgttccccccctttactgatgtactgtgttcaagtacttatacctctcttctctctccacggaattgcatctgcttagattttgctgcccatttcagcccacggaaacctttctaaatcaagttctatgatctaatctattcacttcccctccttggagttgcttttaggcttcatcagcatgntctagtcttttcaacacagccaatggaaagatatgggctgggaaacagctggaaacaaagcactgtagttggcaactagcaacctgcctctcaaagaatgtcattcagtgtaagtaggatgtgtccaggacattttttgcaaagatcatttactgcgaccaaagtccatgaatacacaaggaagtgtgcatatttaacaagcagaatataatcatacgcagttaactttattcccaatagagacctgcttttgttctgttttcttctaggttggctaggtcaggaattggactaaccaactcagggagtatgaaaacatgtgagccacat

SEQ ID NO: 1517 - DNA, 661 bp, Homo sapiens
  misc_feature [331]..[331]: Chromosome 2, SNP identification no. = rs11691332
  misc_feature [331]..[331]: allele = c, in linkage disequilibrium with rs1371469, respectively
  misc_feature [331]..[331]: n is a, t, c or g
agttcacattcaccctgtccatgtactccatagattttataaatgaagtcatatcccttttaaagtttatcacttcaaaactaagagttgtaatgaagccagcattgaggagtagaaagaaaattgaaaatgatctgtcaggggaccctattctgttattaaccacccaagaaattgtggacaattaaattatcctttctgggccccttatttctcatatgtaaaaaaagaggtcgtgacttcttctctaaggcctcctccatttttcaaaattctgtcattctcattttcttaaattagaagggtgcactaaaccatcagaagtaagacnaacaggccaggtgtagtggctcacgcctgtaatcctagcactttgggaggccgacgtgggtggatcacttgaggtcaggagttggagaccagcctggccaacatggagaaaccccgtctctactaaaaatacaaaaattaaccgagcatggtggtgggcgcctgtaaccccacctactcaggagaatcacttgaaccctggaggccgaggttgcagtgagccgagatcgtgcccctgcactccatcctgggagacagagtgagactccatctcaaaaaaaaaaaacaaaaaacaaaactaagacaaagagtagcatctggattcctttct

SEQ ID NO: 1518 - DNA, 661 bp, Homo sapiens
  misc_feature [331]..[331]: Chromosome 2, SNP identification no. = rs13027987
  misc_feature [331]..[331]: allele = g, in linkage disequilibrium with rs1371469, respectively
  misc_feature [331]..[331]: n is a, t, c or g
caggtgcaaacagttgttcaaatccagagtcctcaattctggctgcatacaagaatcactcggtgatttttcacacctgccaatgcctagccccacctccagattctgattgaattggcctgtgggacctgggccttgataggctttaaaactctccaggtggttctgatgtgcagtcagcgttgagaaccattcttctattccctaccacacaagttctatctagttgatcatcctgacctcctactccatcccacagtggccactcattgaatgaaagaaccttggaccttattaaaaggtacaactctaccttcattatatcaacctngtgccaacttcctgctttttctctagaatcataagcctttcatcttgtcaattaaccaacgctccctatcctgtgacttgacctgttttttgatctctcaaaagcttcttttcagattgcaaccccgctcctttctatcacctcctgtctgcttcattcatcactctctccagtagtttgagtgcttttgcccattacttcaaacttccggattatcctgaccaaatttctcctatgattccaagcaactactattaaagagaatctaaaagacacatcaaactgaaaaaaatctcattatggccaacaaaccagcaaatgctgggcata

SEQ ID NO: 1519 - DNA, 661 bp, Homo sapiens
  misc_feature [331]..[331]: Chromosome 2, SNP identification no. = rs17271134
  misc_feature [331]..[331]: allele = t, in linkage disequilibrium with rs1371469, respectively
  misc_feature [331]..[331]: n is a, t, c or g
tgcctagccccacctccagattctgattgaattggcctgtgggacctgggccttgataggctttaaaactctccaggtggttctgatgtgcagtcagcgttgagaaccattcttctattccctaccacacaagttctatctagttgatcatcctgacctcctactccatcccacagtggccactcattgaatgaaagaaccttggaccttattaaaaggtacaactctaccttcattatatcaacctcgtgccaacttcctgctttttctctagaatcataagcctttcatcttgtcaattaaccaacgctccctatcctgtgacttgacntgttttttgatctctcaaaagcttcttttcagattgcaaccccgctcctttctatcacctcctgtctgcttcattcatcactctctccagtagtttgagtgcttttgcccattacttcaaacttccggattatcctgaccaaatttctcctatgattccaagcaactactattaaagagaatctaaaagacacatcaaactgaaaaaaatctcattatggccaacaaaccagcaaatgctgggcataatatagcaagagaattaaaaactcacacacatgcattagaatgatttataaaactatgacactttcttccatggaaacttggt

SEQ ID NO: 1520 - DNA, 661 bp, Homo sapiens
  misc_feature [331]..[331]: Chromosome 2, SNP identification no. = rs13018571
  misc_feature [331]..[331]: allele = a, in linkage disequilibrium with rs1371469, respectively
  misc_feature [331]..[331]: n is a, t, c or g
gacggagccttgctctgtctcccaacctggagtgcagtggcacaatctcagctcactgcaacctctgcctcccaggttcaagtgattctcctgcctcagcctccagaatagctgggattacaggcgcccaccaccatgcccggctaatttttcatttttaaagactagtggtctacacgtagaaaaaaattgagaggatgagcaaagcaagatgaaggcacgagtgtgggtgaaagtaaaggtccagttgggaggctattgctatagttcatgaaggagatggtggcagctgagccagaagcatagcaatgaatatatgaagaagtagacngttgcaaggttcatctacaaggtaatgccttgacaggtattttaaaagagacaagagtcaagggcaacattagcatttctgttatgagcaattgggagaatgggggatggggaaactgagactatacaaatgaagagtagatttcagggattaaaaaatgagttcaaatccagacatgttaaaattgagatgtatgaaaggtgtccaagagtaagtaacatttacttagtaacacttactaagcaaatattgtaggtatgtctttggagctcagaaatgtctgtgtttaatattggtgtatattatgtatatatcaatctccaagtcatt

SEQ ID NO: 1521 - DNA, 661 bp, Homo sapiens
  misc_feature [331]..[331]: Chromosome 2, SNP identification no. = rs726093
  misc_feature [331]..[331]: allele = c, in linkage disequilibrium with rs1371469, respectively
  misc_feature [331]..[331]: n is a, t, c or g
ggtgagaggaagcaaagatacaccccggagggaaattacgaacacaagtaaaggcccagagacataaaacacaattaaaattcttcgtacaccctgcccatgtacagggaatctacaaacacatcagtcactagaatatatagttgcagtatgagagttaagtctggagaggcaagctcatggatcatttgtgtgccatgttaggaggatttgactttatactcaagtaactgggttcaaatccaagatcaacaacctgttagtgctgtcattttgggtgagttacttaaacttcctgagcttcaatttcctcagtgagagtgtttatttncaatttctttaaatgaaaacttaaataatacctacatcctagcaaaaatgtcattaactctcaattaaggttaaaaattgttattagagaaggacgtagccttagacaatttcatccaatctatttattctgcatataaggaaattgagtgctagggagattgataacttatccaagttaatgccttgaagaagcagtagaatctagagcaaatctaagttctgttatctgttgctatgacactactgtatatttctttcttccagaagttaaaagctaaagcaaccaacaggtgaaaatgcaggcagaggacaggttgtccaatgtcaa

SEQ ID NO: 1522 - DNA, 661 bp, Homo sapiens
  misc_feature [331]..[331]: Chromosome 2, SNP identification no. = rs11682165
  misc_feature [331]..[331]: allele = c, in linkage disequilibrium with rs1371469, respectively
  misc_feature [331]..[331]: n is a, t, c or g
cctgcctaattatatctgagtcatgtactctccatttttgtcactactgatgaattatttgtactcttaaagttacttaagtgtctactcaagggctttgctttagcaactcttccatttcttgttcacacagggggatgtttcccaatagcttataaagataaacatattacactacatatactgtatatactctagaatatatatataatagtgtgtatatatatactgtatatacactgtatatattctggaaacctagctctccacttaaaaattaggttgcctttagcgagctttgttatgtgtctaattttcaatttcctcatcnatccaatgtgaaaattaatgccaatttcataaagttgttgagtaggttaaatgacttaccatatgcaaagtactttatacaaaaaaagcattcaataaatgttagctccaaatttcctcaacactgcgggttaagcacaggtaaacaatggagaaatgaaaacattactttgttcaaatgaactgcacttaagctattctgataacacactgtacaaacttctcgttatctttcacttccagctcttgtcttcacaaacctattattttgactctaccattcactacagccaagacgagacaccaaaatggtatctaattttaaacactt

SEQ ID NO: 1523 - DNA, 661 bp, Homo sapiens
  misc_feature [331]..[331]: Chromosome 2, SNP identification no. = rs11677494
  misc_feature [331]..[331]: allele = g, in linkage disequilibrium with rs1371469, respectively
  misc_feature [331]..[331]: n is a, t, c or g
tataatagtgtgtatatatatactgtatatacactgtatatattctggaaacctagctctccacttaaaaattaggttgcctttagcgagctttgttatgtgtctaattttcaatttcctcatctatccaatgtgaaaattaatgccaatttcataaagttgttgagtaggttaaatgacttaccatatgcaaagtactttatacaaaaaaagcattcaataaatgttagctccaaatttcctcaacactgcgggttaagcacaggtaaacaatggagaaatgaaaacattactttgttcaaatgaactgcacttaagctattctgataanacactgtacaaacttctcgttatctttcacttccagctcttgtcttcacaaacctattattttgactctaccattcactacagccaagacgagacaccaaaatggtatctaattttaaacacttactaaaggatgcagaaaggaaaatccatttctaatgattttatgcctaatctgtgatacttggtagatgaaaaattggtctccttcttcaactgtaactgttcttagaagtcacttaatttaaaaatatatattaatcaatataacatatacacatggtaacaaagcaaatagcacatatgataaaaagcaaaaatagcacccaca

SEQ ID NO: 1524 - DNA, 661 bp, Homo sapiens
  misc_feature [331]..[331]: Chromosome 2, SNP identification no. = rs1469967
  misc_feature [331]..[331]: allele = a, in linkage disequilibrium with rs1371469, respectively
  misc_feature [331]..[331]: n is a, t, c or g
caccaccacgcccggctaattttttgtacttttagtagagacagggtttcaccatgttagtcaggatggtcttgatctcctgacctcgtgatctgcccgccttggcctcccaaagtgctgagattacaggcgtgagccaccactcctggccaaatgaatgcttttgaaaaattacacgttatacacttttggggttactgaaaaatagctaaaatccccaaggttaagtcttcaaatgacaagtctactataatacctacttcttaattttgttgtaacaatcagaaaatgtaacataggtagaagagttagaacatagtataatcaatanatatgacactccttccttccaaaataatgtttgttggataaatcaaggaatattggtaagagaattgcttctgttcatgtagaagtatgataagtgtaggcggtcgttggacattttttctagaattctctagactcatcaccttggaaacattggttgtgcccatacattgggtctgtggccatataaggaagaagccaggtcacaattgcctgttcacccctcctcactcctccctcttcttgattctctatgagggaggatttgagcttatctgcagtatgtatatagagaggagggaggttttattttttaaattcattttcttat

SEQ ID NO: 1525 - DNA, 661 bp, Homo sapiens
  misc_feature [331]..[331]: Chromosome 2, SNP identification no. = rs11685197
  misc_feature [331]..[331]: allele = a, in linkage disequilibrium with rs1371469, respectively
  misc_feature [331]..[331]: n is a, t, c or g
taggctgctaatggctggggacttggaaaagaggggtgggaaacagaagaaggaagcttcatatgcttataaactctattgaaagtggaaaaagtaatcttaaatcttagtcttaagaacgtccccatagacaaaatttgcaaacatagttatttctattgctctttagtacaagatttcttgcaagagacaaggcttagctttgcctaattatttaaattgaacagtcagtaataaatgttggtcttcttgggcttccccacaagctgacaatgaatcatcctggtctatatttctaatttatcttggagtctgaactcacctacagagngatgggagactactttcttcaaaaggacatctttggtttcccctcagctggtgggatacatattcaattacaatgatgctgggatttctaaaaatgtagaagaacttgatactgtaacagttgtcgagtaccttgcttgaaacaaatgaaatctaaaaatgtaggtaaatgagtatgaaaaatattcaccatttgtatctatgtaggaggcatagggatcacttcccacagcaagttgctctagcctaggatactttaaaatgtaattcaagttgtaaaatgtgatagacattattatttccagaaaatatctaccaaattatagattga

SEQ ID NO: 1526 - DNA, 661 bp, Homo sapiens
  misc_feature [331]..[331]: Chromosome 2, SNP identification no. = rs12466217
  misc_feature [331]..[331]: allele = t, in linkage disequilibrium with rs1371469, respectively
  misc_feature [331]..[331]: n is a, t, c or g
ttcagtaaaaacaaattataagaacaaaccctaagctgttcacagtgggtacttctgaggattcagggagtgggatgggagaagtggacgttcattctttaaaatttggtgcttttttctttttcaaaacaggagtgcaccatctttatgattctggcaacttgaaagctttttaattttttttaaacgtcattatcctatagcccaatagtgcaaacacatggactaaaggaactatgtggtagaattcgtacttacatcagtatggcaagtaataaatacatagatcatttgacctaaaggaacctccaataaaggatgcctaatagcntaatactctttaccacaaatgtctgcccagttctttcttgttctccttactttgcagttcttgtccattcattctgctctcttcctacacttagtagctttaattaaattctatctccttgctcacaaacaatcccctgagagaaaagcttttaaaatggcatgtattttgtttggctagcaaagtatttttagcactttcaaataagttgtcaatatttaagaatttggagatcccaggccagaggcagtggctcacgctagtaatccagcactttgggaggccaaggcagtcagatcaactgacgtcaggagttcgagacaagccagg

SEQ ID NO: 1527 - DNA, 661 bp, Homo sapiens
  misc_feature [331]..[331]: Chromosome 2, SNP identification no. = rs2352262
  misc_feature [331]..[331]: allele = t, in linkage disequilibrium with rs1371469, respectively
  misc_feature [331]..[331]: n is a, t, c or g
tcaggagttcgagacaagccaggccaacatggtgaaaccccttctctactaaaaatacaaaaattagctgggtgtggtggtgggggcctatagccccagctactcgggaggctgaggcacaagaattgcttgaacccaggaggcggaggttgcagtgagcccagatcatgccactgcactccaccctgggtgacagagtgagactctgtctcaaaaacaacaaacaaacaaacaaacaaacaaaaaagaatctggagattccagaatccccagctcctctttgaagatcaaaagatctgacaacacaggacccacattccagcatggcaanggggagtgcttacagctgacccgttaacctgggtgtaccctattaccactccagtaggactgccaaggccatgtgtcatttagcatgcctcttgtactgtcttttgtcttatgggaaacagtaaagtaatttcttatttacacttttattttcttaaagggtagggaaaaaggaaaaaaaaaaaatcaagccagattttccaaaaaagggggatatttctttatagaaatgaagatgatttacctatgtttaatatgcaaacaaagggtgtgtatgctgaaagaaccaacttaataactgtaagaagcctgcaacagagaaaagcaggaa

SEQ ID NO: 1528 - DNA, 661 bp, Homo sapiens
  SLC40A1
  misc_feature [331]..[331]: Chromosome 2, SNP identification no. = rs2304704
  misc_feature [331]..[331]: allele = a, in linkage disequilibrium with rs1371469, respectively
  misc_feature [331]..[331]: n is a, t, c or g
acatcaaggaagagggctaggggacccattctaaccccaccagattcaacccggagtttttccctagatcctcaaaagcctgctcttgcctcgtctaccaaagcgatatatttaacctcatctggcccccactggtaataaaacctgatacaaattcaaaatagttttgatcttcaccaacatttaaggtctgaacatgagaacaaaaggagagatcattgtgttcagtttacctttgtgtaaattcagctgtttcaattcagtttcctcttctttaagaccagctttcacagctagagctggggttttctggtaaaccttccagagcagnacgtactccacgcacatggataccaagttccatcccgaaataaagccacagccgatgactggggagccaaatgtcataatctggccaacagccatgggggctaagatgttggttaactggtcaatccttcgtattgtggcattcatatctagagaggcaggtgaaagaggcaggtaagtgtgcaaacccatcaaagagagactgcccatttacacaatacaaagctgtaaaccaagagtatagattcctaaaatgtggttttctaaaagtacatttgtaagaaagacattttgttggaaaaatatttgttgtttgggtcaagtcccacta

SEQ ID NO: 1529 - DNA, 661 bp, Homo sapiens
  SLC40A1
  misc_feature [331]..[331]: Chromosome 2, SNP identification no. = rs4145237
  misc_feature [331]..[331]: allele = c, in linkage disequilibrium with rs1371469, respectively
  misc_feature [331]..[331]: n is a, t, c or g
agacagaaggtgatttctcaaaatatggatgcctaagactgagattatgggaggagagaatttagtggtgataacaaagtctagagtttgactacgggaatgtattcctgagtcagagtgcaggacaaaatcaataaagaggaagttaaaaaaatgtccaacacaaagaaatgatacatgtttgagatgatggagatgtatctccatctcatctcatcacaacatgactatgtactccataataagcacaattatgtgtcagtataaaaaattaattaaaataaaataaaaccaaaagttttaggacaaaaagaaagtgaagaaagtgatntactttttcacttcctgtctcacagaacagagtgaaaattagtgagacaagtcttaagcaatcatttgggtcaccttaacagaaaaacaatacgtgacgaagaagtacattaacagaagattgcctttattccttctgtaattcttcctggtcctcaattgctttccaattagccctatgagtatatattgcatatatgataacaggagaactttgacatatttcacctttcacttgagaggcaaaggcagccttcattgatcttacacttgactgccaccgcagaggtttcactaccatctgcctcccactaactaataagtttccaac

SEQ ID NO: 1530 - DNA, 661 bp, Homo sapiens
  SDPR
  misc_feature [331]..[331]: Chromosome 2, SNP identification no. = rs4280394
  misc_feature [331]..[331]: allele = a, g
  misc_feature [331]..[331]: n is a, t, c or g
gaacagagataatccagaatgagttggatgtgtctttatgcaactggaaacaagtgagatatgtcttcttggctaactgctatgcttctgctgtcattttaattacacaaacaggatttaatgttctgtatattgaacagtgtttattttgtggcttctgatggcatctactctgaaggtaagccctttcttttcacacaaaaatctgtgaatgtccaagcacatgtagctcttacctttccataatgtttgtttggaagcagaaaaatactgatacttttcaaaatttctgttctatagtaaaacatgtgagtggtgtttgacagtgaantaactcttatggtggtggaaactcagtctaaacttaagataatggatgctggataactgccctctcctgaggtgcctaatctcacctgcacacgtgccctgtgctcaagctcccccacacacctcgtggaaacacttgatatttcatatgcctataagcaaggtgacacttctgccttcagcctcctgttgtagtgtttctgatttgctttctcttacaggttgcaagactgatgacgatttcaagagagaagatcaagtacacatcctcaattctgtcactgcttccctgccctagttacttctaggtctacttagggttcgtagctcc

SEQ ID NO: 1531 - DNA, 661 bp, Homo sapiens
  misc_feature [331]..[331]: Chromosome 2, SNP identification no. = rs295134
  misc_feature [331]..[331]: allele = c, in linkage disequilibrium with rs10497857, respectively
  misc_feature [331]..[331]: n is a, t, c or g
ccttttgtgtaagtgatactgtggcagagactgcaaacaaattgtccaccaaaattaatgatccccttccatattatgaagctatgacttccatattatgaagctatgacttcataatatggctcagagccagagactctaattcctagttcctcttgcaggtagatgggaccatgtgatgggtccttgccagtggagtgtaagcagaagtgatacgcatcacttccaggcagaagtggttaaggagcaagtgagtcttctcgctctcttcttctcttgctattgcctccatgcagacgaacttactgaccttgggaactctgtgttgganatggtgaagccagaagatggaactagcctggtgcttcagacgctgcttggagaacagcctctgcccttcaggaacacctattttggtgttcatatgagcaagaagtaaacttctcttgtatttgtgccattatacatattggagggtctgcttgtcatgacagtgagtgatttgaatccagaaaacacccaacagctggagagagagcactggaggctgtgcttcacgcagggcctggctggcacgcaggcgatactgcattctgttagagttcctgtatgcttgtcctgcatgtgaaagaggtaacagaacatgtgttcagtagtcttg

SEQ ID NO: 1532 - DNA, 661 bp, Homo sapiens
  misc_feature [331]..[331]: Chromosome 2, SNP identification no. = rs17531061
  misc_feature [331]..[331]: allele = a, in linkage disequilibrium with rs10497857, respectively
  misc_feature [331]..[331]: n is a, t, c or g
ccagctgagtgcaagtggcatgatcacagctcattgcagcctcaacctcccgggctcaagtgatgctccgacctcagcctcctgagtagttgggactacaggttgtgcaccaccacgctttgctgttttgttttgtttttgtttttgttttttgtagaaatggagtcttgctacattgcccaggctggtcacaaactcccagactcaagcaatcctccctcctcagcctcccaaagtactgggattacaggtgtgagccaccacgcttggctgtgcattattatttttataaaactccattatttagttaaaaggggctcttttggctgantttggttctctccaaaatttaatgaaaaggccctttactggcatcatgtggcaaaataacacagtagagtaatacatgtttaagaaggaagagctggctgggcgtggtggctcacatctgtaatcccagcactttgggaggctgaggccagaggatcacttgagatcaggagtgcaagaccagcctggccgatatggtgaaatcccatctttactaaaaacaggaaaaaaattagctaggtatggtggtgcgtgcctgtaatcccaactactcaggaagctgaggcaggagaatcgcttgaaccccagaggcggaggttgcagtgagccg

SEQ ID NO: 1533 - DNA, 661 bp, Homo sapiens
  misc_feature [331]..[331]: Chromosome 2, SNP identification no. = rs842830
  misc_feature [331]..[331]: allele = a, in linkage disequilibrium with rs10497857, respectively
  misc_feature [331]..[331]: n is a, t, c or g
atcacaggttggattgtctgcaagtagatggtgaggcaagatatttattagggattaacacctgtgaaagggcaaagggagaaattcaactgcaatgcggacacagagcctaggccaaatccaaggagggcactggtgcatttacaacctgtcaggattgtcctgcagtggacccaaataatcaggcctttagacccccaccaagataaatcactggatgtgggccaacccagaatgggtatacctggggccaagtgactctcggttcttgaggcaaacatagttggagactatctgctgattcccagcacctactacaaaaatatccctnttgaagacgcatctgggcaggcatctttatatccgccgccatagtccaccccttgcaccactcaaatctatttctttatatgcattcagctcttccaggatcaaagtgtgcttgtctttctgcaggaaacttggtatggttaacaggacaaacgactgccactacagctggacataaggatgcaactgatacccattatctacctcctagactatccattctggatttccccacccttaactatgagctctgctgtcttggtggctaatgtcctggtgtgatgcagaccatccgtaaaggatctgagcccttggtcaccatgtccttctc

SEQ ID NO: 1534 - DNA, 661 bp, Homo sapiens
  misc_feature [331]..[331]: Chromosome 2, SNP identification no. = rs4673855
  misc_feature [331]..[331]: allele = g, in linkage disequilibrium with rs10497857, respectively
  misc_feature [331]..[331]: n is a, t, c or g
ttatttaaaaacttctctgccattatctcaagtatgcctttcctttttcccccagaggaaaccagagaggggacaaatctcccagacctgtgggagggaagaaaagagacaacctgagctggaagtaaccctgggccaatcctaaaaccacgtgcagatccacggaggactaatgtggaactgaatttttctgtgtgttattttagattgtattcttttctaaaatcacagtacaaaatgttttcaaaactgtaagtcccatgctttacaagtttgtcacatacagctaaaaatcgttgtcagggcatagacatttgtagttcctagttgnccaacacagaaataatcaacatataacaacaattctactagataccaatacacagcaataagccagccagctcttttataaatgcaacgtagaaagcattagcagcaggcccacgctgggcttttatttttggttgagcttagctgaccttaaaatagatttgcattgaggaaaatgtaaaacttcctcaaatatagtaccacttaattcagcataagccatagaggggagggttgtgtctctagggagaatttttacattctagtaactataaaagtaaggtctaatactatgctatttctctaaaattttcatattctagtaaagctt

SEQ ID NO: 1535 - DNA, 661 bp, Homo sapiens
  misc_feature [331]..[331]: Chromosome 2, SNP identification no. = rs4145969
  misc_feature [331]..[331]: allele = t, in linkage disequilibrium with rs10497857, respectively
  misc_feature [331]..[331]: n is a, t, c or g
tctgctgagcatgaagcaaaggcaggacaaaggactgcttctcttattcaggcagagaaatgaaacgtgattcattgttttgtcttaagcagttgcacatttattgttccaatatttaggggctaaatattggagcttgcctttcattagaaacttaaggcctatcttgagtatcaaaggtgcttattgagaagcagagatgttcaacatgttttgttctcactgagtacgcaaggccatgtccagcatactacttggcacttagtaggcacttaattaactgcatttctcacccatctttttattaatactgttttaccttccttttagnaaatatgacttataaaagtcagaactatatggcaggtaaatttggacacgaacactataaaatcaaaagactttttcctttaccttgggatgattttaaatctcaagtcccctcactcagggtgtatttgaaatataacaatatatgtacagctgagccatgaaatttttagcatatgaaaaacaggacacacatttgtgcatgctgttttgtccccaccaggatttgcaaagggagggtgagaagaattgactgaaagaacagctgtttagtgaggcaggaagttgaaactatttaacttaaaattaggtttggggattatctgaggtc

SEQ ID NO: 1536 - DNA, 661 bp, Homo sapiens
  misc_feature [331]..[331]: Chromosome 2, SNP identification no. = rs295136
  misc_feature [331]..[331]: allele = g, in linkage disequilibrium with rs10497857, respectively
  misc_feature [331]..[331]: n is a, t, c or g
agcgggtaagttagcctttttggtcttttctggacttaaacttactggatgaggaccactcacatgatgaatggcaatctgctttactcaaagtccaccaatccaaaaacacccttacagaaacatccagattagtgtttgaccacatatctgggcactatggcccactcaagttgacacgtaaaatgaaccatcataaggtcttagagtccaggacttactcaagtctatggagttaattagtcacagaattgtttctaaaattctgggcttctgacattaagttccctatacaagacttactgagcactagaattaagggatagtcttnataaattccgatttagggagcaagaatggaaaggagttagccagaaatgtcagttataattatgtaagtgctaaaagcaagaatcagaccctagataattaggaaccatgaaaaaccttactcctccttagttaatgttatgtgtaattatacaaaatcacaaaaccataaatgaactcaaaataagagaaaagaaactaaaccatctgcctaaatttaaaagatgcctgtgaacgctcaagttcaggcctggagtatttcactacaacatctagttgtagtagatgtgaataacctggcagcatatggggccagggtgggctggcaagg

SEQ ID NO: 1537 - DNA, 661 bp, Homo sapiens
  misc_feature [331]..[331]: Chromosome 2, SNP identification no. = rs295137
  misc_feature [331]..[331]: allele = c, in linkage disequilibrium with rs10497857, respectively
  misc_feature [331]..[331]: n is a, t, c or g
ctttttgtcttctgcttctccagggcagaacaactggattttctatcagagttctagctgctctgcatggtgccaactgcagccaatccctggactaaagccataaaggtgggaagctcaccccataccacctgcttgttccttgtgctacacccttccaaaatctgcctttttttgttcactctctatgccttcggattgtcgtgttattatatttttcctaaattttgtagtttttatctatggtttaacaggagcttattcagccattcctagaagcagaacctcttgattctataaatttttggagttttttctctcacaggacagncaatatctggattcctgctacaagaagtgggtcaccatgaaatttacccacctaatgatgttttgcatattctgtgttgatcttcatcatttcctctcaaagccgtccaagtattctgttactgcttagtaaagccatttcattctccaaggtgtacttcccagtttgcaattttatgggcatcctatttatggctttagagaatgctgttcagtacttattgcctctgaaatctctcaagggatgccattccagtttgccctctgagattttcattctttctcttttacatttcttttgagccccatttgcctttcaaggagcagtaat

SEQ ID NO: 1538 - DNA, 661 bp, Homo sapiens
  misc_feature [331]..[331]: Chromosome 2, SNP identification no. = rs295139
  misc_feature [331]..[331]: allele = t, in linkage disequilibrium with rs10497857, respectively
  misc_feature [331]..[331]: n is a, t, c or g
tgctttgggagactgaggcaggaggatcacttgaggccaggttacaaaaagttaaattaattagttgggtatggtggtgtgcacctctggtcctagccactcaggaggctgaggcaagaggattgcttgcaggacttcgaggctataatgagctgtgattgcagcactacactccagcctgggtgacagagcgagaccctgacaagagagaaagaaagaaagagggagggagagaaagaaaggaaagaatgggaggaagggaggaaggaaggaaggaaggaaggaagggagggagaaaatagaaaccagtgctaaggctggtgttccagtnagaacccatcttggtctctgactactgaggagccattgaacagtctgggactatctactttggatgctttttatgtgacagaaaaacttttatttaaaccactgttatttcctactttggttacaagcagccaattggaattcctgtctgatgtagccaggtaacaaatcaggcactgaggaataggaagcagagaaggggattatgtttcaagaattctagtacaaggcagggagaaagaaagaagcctagttgctaggaccagaacataagatgaaaaccacactagcaacactcctcaaagcctagttcactgaaagagagagctac

SEQ ID NO: 1539 - DNA, 661 bp, Homo sapiens
  DNAPTP6
  misc_feature [331]..[331]: Chromosome 2, SNP identification no. = rs295114
  misc_feature [331]..[331]: allele = c, in linkage disequilibrium with rs10497857, respectively
  misc_feature [331]..[331]: n is a, t, c or g
ggatttatatggcttatgtgtccacatgggacaggcctcttcataattgaattcggacacctcttcagttattgtgggcttcatttaccatcttcctagtctttcataactgctggcaataggattatgctgagggggaaatcattttcaatcactgatgtctgcagtacaagcataaaaagataaaagtaaagcctttgagctgtaattagaaaattcctaaagtgtgctcatgtggcatatggtttagactactaccaactggcaagaccagttacagaagggatgtctaatgtcaccgttctgggataagcagccagtacaagtagcnttccaacacatgattagagtaatcttttgcagggtaaaacattcctgctttccacctctaatatgattagtgacaggcagctggaggcatctcattctcctgacaaaaatatgatcagaattgttttcaattggtacatctttccatcaagctgttgccttccagcagaataatcagagtttctgattatttggtatacgtttcaagaaaacaggaattgattgtgcccttgcttgtctgatgggtagaaggctgccaggatctacatagtaactcttcagctgcctaaccaaaggaaaactaagcagtgtgtgcgcctgtgcatgcaga

SEQ ID NO: 1540 - DNA, 661 bp, Homo sapiens
  DNAPTP6
  misc_feature [331]..[331]: Chromosome 2, SNP identification no. = rs295142
  misc_feature [331]..[331]: allele = a, in linkage disequilibrium with rs10497857, respectively
  misc_feature [331]..[331]: n is a, t, c or g
ttcttaaaagcagctacttccattattctctagtttttaaagctatcccctgagaactaaatgtcaattcaaagattcctgcatttgttatcatttctaccctaacctgtagaagtccaagacataatttgaaactgaaggattcttgcctggagacagtgggctcataaatatgtagcttgatttttctctataagaagaaattaggatttttaacaacactttttcagtatctaagttgaatatgcaaaattgggctgctgtacatgcttgcagatcctgtatttttaattgtagttacattatttttcaattgagtaataattttcantgaagctactgcaaaataacaggttcttgcctaatgaaagattttacaaaccaaagactcatgtgttttaactctatctctaatttagactctgaaatatgccattcttcctttatatatgtcagatagctgtctgttttctaggccgagcatggaaaacacaacccaagtgggccacagaagaggtcactaatttcctacccagtacccattcttttcctcttccttagtaacacattctgattttattcaaagggataatgtccccagccaaaagactgcatttcctagcctcctttgcagtgaggggtagccaacacagagatcact

SEQ ID NO: 1541 - DNA, 661 bp, Homo sapiens
  DNAPTP6
  misc_feature [331]..[331]: Chromosome 2, SNP identification no. = rs17447186
  misc_feature [331]..[331]: allele = a, in linkage disequilibrium with rs10497857, respectively
  misc_feature [331]..[331]: n is a, t, c or g
atgccagtttcttctctgagttattagtctctgataatctggtaaactgcttggtttgcaaagttacgtgaacaacaatttagtcactagattcatttatagtaaacgaagttgaaggctcaaggctgcaccattaatctggattagctatcaaaatatatatcttctaattttcctgagtaatatcttataataagtcatataacttctctttccattatcaccccatatatggcctgctaaaagggtggaatcaaaagcttgccaagaaattttttcaaatcacagcaattgtattttccagtatggcttgctgatatagcagaggacnttgtttctgaacataaagttgtataacaagttacagctaaatgaaatttaaaacgacttgtgataaaccctgaaaaagtggtgctttaaaatagtaatgtcagcaggctgtctattatgtaaccataatactagtgttctgagtttagatggggaagttatagggcagtgacagaaaatgtcgttgtcctgtctttggtatgagagagcatgtaaaagtgattttgaagtgatttactgcagatgcatgttgagacatggtaaacaacgagacagatgattatggccacagttctgaagatgttcagatggacttcaattagctttgggc

SEQ ID NO: 1542 - DNA, 661 bp, Homo sapiens
  DNAPTP6
  misc_feature [331]..[331]: Chromosome 2, SNP identification no. = rs1900706
  misc_feature [331]..[331]: allele = a, in linkage disequilibrium with rs10497857, respectively
  misc_feature [331]..[331]: n is a, t, c or g
cttaggatcttgtcctgtactttcggtgcaaatttgtttaaaacagcccttttttaaaaagaagaatggtgttattgcatcacatctaagaatggcagccacttgctgagagagcagaaggaccctgagaagtcagcaaagtctcaggcctgtagttggcatcacgttagagaccaccagcattccgtctgtcactttagaccttctggaaagagtgttccaacatctcagaatagcaggaccctagggtcataagcctccagtttacaaatgaggaaaccgagatctagaaaggagaaatgactcacaggctacatcaagagtcaaaganacgtaggccgggcatggtggctcacacctgcaatcccagcactttgggaggctgtggcaggtggatcgtttgaggtcaagaatttgagacaagattgaccaacatggtgaaacctcgtctctactaaaagtacaaaaaaattagccgaatgtgatggcacatgcctgtaatctcagctacttggaagtctgaggcatgagaatcccttgaacccaggaggcagaggtggtagtgagctgagatggcgccactgcactccagcctggacaacagagcaagacttcgtctcagaaaagaaaaagagtcaaagacacaggcaagagtgaaatc

SEQ ID NO: 1543 - DNA, 661 bp, Homo sapiens
  DNAPTP6
  misc_feature [331]..[331]: Chromosome 2, SNP identification no. = rs17531631
  misc_feature [331]..[331]: allele = g, in linkage disequilibrium with rs10497857, respectively
  misc_feature [331]..[331]: n is a, t, c or g
tcagtgtgatgaaagccaacttctatcccatttgtgtgataagcctgttcttggaataaagtattcccagagaagtcttatttggcatgcacctcccattttccttctagctctgtaaatcctggccattcagcaactgttagctcagtcctcacctccttccagttcatttcaacacatatacactgagcatcttctgcaaatggaaagtcatcttacagcatgtggcaaggagtgcacggctgtgaaccagggcccttccagtccagctgagtctgtctggactactccagacttctaagtccttctcttctgaacttctacagtactnaaattctagaccagtgggctccaaagtggagtgctcaaaataatcctttgggggtgtaagaatatattggagcttatattaacatctttttccatatcttttcaaatttctattttagaatatttctataaagtatgtgatatattaatacagaagcacatgtttaacctttataaataaataacatatatggtccatgtgcaagcactacaactatggggtgagtgataaaaaatacatagagcctcaagttcagaacaatttcactggggttttagaaggtcagctaactggtccacccaagtccatttattctcttcttcaaaaatt

SEQ ID NO: 1544 - DNA, 661 bp, Homo sapiens
  DNAPTP6
  misc_feature [331]..[331]: Chromosome 2, SNP identification no. = rs10497857
  misc_feature [331]..[331]: allele = g, t
  misc_feature [331]..[331]: n is a, t, c or g
gccagcttctgcttgaacagattctgtgacaggagtctcactacctcccaggacagcttcacctgccctttaatgacaccaaatgtaacaggaataaagggaaaggaacataaggagatagtaagttaaggaatggataagaaagaatgtggcccaggaaagggtattccatggtggtttgtcctcactgggaagtggggagcaaaatttaacgcactgagaaaatgttgttcctcccattgataattttccttccccctttggcatttttgccaagccagctttacatctacgattctaatttttgtgaatactaagatgttgcaactgnaatgaaccctctaaataatttttaagctacatattcccttaatttgtattgaaccaaaacaatggcaccagactagtggaatgaggaccagcttcggagttagtttgagaggtttcagtcccagccttgctgttgactagctctgggacctgggccttaacatataagccttagttccctcatctctaaaatggagataataatacctacatgcagatacattgtgaggtctcagtgaaatagaatcatccagtgtggtgcctaaagagggttttgtttggtttgttcactgctgtatccccagcacctaggatggtacctggcacagag

SEQ ID NO: 1545 - DNA, 661 bp, Homo sapiens
  DNAPTP6
  misc_feature [331]..[331]: Chromosome 2, SNP identification no. = rs3754798
  misc_feature [331]..[331]: allele = g, in linkage disequilibrium with rs10497857, respectively
  misc_feature [331]..[331]: n is a, t, c or g
ctcccagcatacctccaaccttgcaatatcttttagccattatcagagtcaaggtctaatcataagcacccaaaccttctatatcatccttattgggcctcatgtatcccctctttaacctggtaacttgcctaccatcttttactgattttatttcttcttactgtagagccttatacccaggataaagtcactagactatagctctctagttcctctcgatcaaagcctacacttttgtccaaaaaagaaagactgaagttaaccttttctatggagtatgaaaaaaaaattcattttcacccaatgctaaacacatttaaccattagnctcactcctatatacccacgtaactccagcacagagagggattttcattgctgttggcacctacatgcactttacggacgcttcataaaccacctcatggcctgccttggccacactcttagtttgtagcataaaaggatggagtgcagacacacatcctctctactttgcacggagctctagcctgccctatggctcaactcacactgggggaagttcagaaagtaccagatgcttccaatggtgtacaagcattagcaatacatagtttaatctcttccaaatcatttttctaaagattgaatgaaacaaaacttttttagtacagtg

SEQ ID NO: 1546 - DNA, 661 bp, Homo sapiens
  DNAPTP6
  misc_feature [331]..[331]: Chromosome 2, SNP identification no. = rs3769454
  misc_feature [331]..[331]: allele = c, in linkage disequilibrium with rs10497857, respectively
  misc_feature [331]..[331]: n is a, t, c or g
ttcaaaactgagatttggtctaaacttagtactaggtatgttttctgtggcctaactgttaaattgcctaatttctcttccgttttgtcccctcctccttttccctccatcctttgctactccttatctggcatggtaatgactcaggtctcttatatttcaagtgtttttgctctttgtttctgtggtttaatttccatagtttaataaaagttcttgttccttagaggaaagtcgctttaattattaggactgagaaacataaacaatgaaacagggtggtgactgaaatatgaatttcatatgaatatacttagattggcattttttntttaatttggagaaaaaaactcaaggttgcattttcattcaaagacatttcaatgtactcaacccactgttagaacaacttcactgaaaagcattttaagggcaaatgtcagaaaaaaatttcacatttaaaagctctggcttggcctcttttgaaaagcagggttagcctttggtttagaaatgtcactgcctactaagttctttgtggggggaagaaagaaaattgaatgttttatttaaacaggtcattaacagtcaatacttatttgaaaaggcctgctttcagaggcagataaaagcttccaatcacttagaatatcacttgagc

SEQ ID NO: 1547 - DNA, 661 bp, Homo sapiens
  DNAPTP6
  misc_feature [331]..[331]: Chromosome 2, SNP identification no. = rs7598349
  misc_feature [331]..[331]: allele = a, in linkage disequilibrium with rs10497857, respectively
  misc_feature [331]..[331]: n is a, t, c or g
gtggagtggtttcgcactgcagtttgtgcatcctgcaaatgcgcaaggcatatactgtgggcctgtctggcctgagaaggcaggtcccgtggaacggttttattcccctggtggagttcttactgcatttcatagacagtgagccctgtgacttgtttatgatggttttgaggtgctgttagcccaatggccgtgggcttgctgagttggactgccttaggtttgagtcctggccctgccacttaactgtgggaccttgagcagttactagatctctttgtgcttcagtttccacgtatgtaaaaatggggataatcttaatttctattcntagggttgtgacggtaaaatgaaaaaaaatgtatgtcaagcacttagcagagtgtctggtacgttataagttctccagaagtgtgctaattattattaataatatatttttgaaaagattattccttaacgacgtaatttgtaggaaactggctttccccttatctctctaggcttccatgagaatctatttcttgtgtgtagtgtttgggattaaggaagaggctctttctttatgttccaggatggagacactagtagttctcacggttttgctagtgcacgtccgaataccctgcggggcttgttaagcactgactgctgtgctgcc

SEQ ID NO: 1548 - DNA, 661 bp, Homo sapiens
  DNAPTP6
  misc_feature [331]..[331]: Chromosome 2, SNP identification no. = rs1020111
  misc_feature [331]..[331]: allele = a, in linkage disequilibrium with rs10497857, respectively
  misc_feature [331]..[331]: n is a, t, c or g
aaaaatggggataatcttaatttctattcgtagggttgtgacggtaaaatgaaaaaaaatgtatgtcaagcacttagcagagtgtctggtacgttataagttctccagaagtgtgctaattattattaataatatatttttgaaaagattattccttaacgacgtaatttgtaggaaactggctttccccttatctctctaggcttccatgagaatctatttcttgtgtgtagtgtttgggattaaggaagaggctctttctttatgttccaggatggagacactagtagttctcacggttttgctagtgcacgtccgaataccctgcggngcttgttaagcactgactgctgtgctgcccctgccctccagagcttctctttctgtctggtgaggggcagagtatttgcatctttaacaagttcccaggtgatgctgaggccactcatctgggaaccacactttaagaacccctgctctaggacagtactttccagtggaaatataatgtaagccacacataaaatcatacattttctagcagtcacattaaaaaagtgaaaagaagtggatgaaattaattttaatactgtattttatttaatccaatctatcaaatgctatcatttcaacatatagtcgatataaaaagtattaatga

SEQ ID NO: 1549 - DNA, 661 bp, Homo sapiens
  DNAPTP6
  misc_feature [331]..[331]: Chromosome 2, SNP identification no. = rs3739118
  misc_feature [331]..[331]: allele = g, in linkage disequilibrium with rs10497857, respectively
  misc_feature [331]..[331]: n is a, t, c or g
ttccctttctccactgtaattgagtttttacctgctaggaactgcattacctagtttggagtttctgtgagccaacgtataacttgatcttaccttttccttgacattcacatgagtattgagttcagccatcttgcttctagtggaataggccctataaagaaggaaaacaagattaagttttaaaattgatttctcaatgtgttatttttacactctcttccaacacagtaaacaacttcattcggtcataatcataaatatcattttagaatgtaaaaatactttcaagctaagcatctgacttagacatgttctaaaagcatgttanaataactctagaaaacaaagtaaaatcttttattcatactgtattgacatgaaaaacgacaaagacagatgggaatttatctaaattgtgtttcttcctattatgtaaaagaaaggtggtcaaaaatagagagaagggaaaccgtacctattttaactaagtattgtcatcacagtcctcactgtctcaaagcttttatcagctccttggtaatctaacaaacatttattgaatatatctctcctatatgtacataacaataccaagcactatggaaaaaaacaggagaaaactatcccaggtttaaacataagaatccaccccacaact

SEQ ID NO: 1550 - DNA, 661 bp, Homo sapiens
  DNAPTP6
  misc_feature [331]..[331]: Chromosome 2, SNP identification no. = rs842823
  misc_feature [331]..[331]: allele = a, in linkage disequilibrium with rs10497857, respectively
  misc_feature [331]..[331]: n is a, t, c or g
ggtttcccttctctctatttttgaccacctttcttttacataataggaagaaacacaatttagataaattcccatctgtctttgtcgtttttcatgtcaatacagtatgaataaaagattttactttgttttctagagttattgtaacatgcttttagaacatgtctaagtcagatgcttagcttgaaagtatttttacattctaaaatgatatttatgattatgaccgaatgaagttgtttactgtgttggaagagagtgtaaaaataacacattgagaaatcaattttaaaacttaatcttgttttccttctttatagggcctattccnctagaagcaagatggctgaactcaatactcatgtgaatgtcaaggaaaaggtaagatcaagttatacgttggctcacagaaactccaaactaggtaatgcagttcctagcaggtaaaaactcaattacagtggagaaagggaaagtggttttgggggatacgtagtaagtttgccacaacagtaaactgttcagcagaaagaatcataagtaacatttactgaaagcatgttaagcatatgacactcattttttcatttactcttgaccataaccccataaagaagatactgttgttatttccattttacagaggtggaaattgagaaac

SEQ ID NO: 1551 - DNA, 661 bp, Homo sapiens
  misc_feature [331]..[331]: Chromosome 2, SNP identification no. = rs2540053
  misc_feature [331]..[331]: allele = g, a
  misc_feature [331]..[331]: n is a, t, c or g
tcaggaccattgttgtgaaactgaaaagcctcaactaatgaatctctaccttgtgaattacttttctttacctttccatcccattctgtattatgagtttgaaaaaaagaaaatataaatatgttttatatttataattgcttatgtttacaggaacataatggttcaataggtaatatacaaatgtttttggagtctgtttcatcaacacatgtgaattcactcagcagagggagctcatgctttaattttgggaaattggacagaaaaggctcttgtaaaaagaacctgaagtaggctttgtggctctcattttaaataagacttgttnacagtacttcttgaagccgagaccagttgcttaagaatggtttgattttcatttgcataaacagatgcgacattttggggcagagttttcttcaataaggttctgttttgcttaccaaatagaccaacttagaccaggcatcccagctcaggaatctaaggattcatctagaaagaaggtaactgtccctaagttacctacgtctctatggcttttcctattacaccctgaactcagaacatgcacttatttgacctgttttaacatgactgtgatttggcattgaaaacttacaaatagaggtttttgccctttgagattataaaacag

SEQ ID NO: 1552 - DNA, 661 bp, Homo sapiens
  misc_feature [331]..[331]: Chromosome 2, SNP identification no. = rs2348113
  misc_feature [331]..[331]: allele = g, in linkage disequilibrium with rs2540053, respectively
  misc_feature [331]..[331]: n is a, t, c or g
aatttcccaaaattaaagcatgagctccctctgctgagtgaattcacatgtgttgatgaaacagactccaaaaacatttgtatattacctattgaaccattatgttcctgtaaacataagcaattataaatataaaacatatttatattttctttttttcaaactcataatacagaatgggatggaaaggtaaagaaaagtaattcacaaggtagagattcattagttgaggcttttcagtttcacaacaatggtcctgagcaacagctgctggtacggcaatgctttgtaatcaccatgatgagttaccaggggttgcttgcaagcaccngttctcacaatcaacctattacccagctttggttcttcatagcacttatcatatctgaaattacaactgacgtattcaattgtctggttatgactgtcttcccctaagagaatgttgacttcctgacagtggataacatgtctgtgctttcagcccttagaacatgcctgacacacagtaggtgctccgatttgttttatgaattgagggaggcagaaaagcaggcaggcaggtcagcatatacctatagtgtcacttaggattatggttcaactagagaatgattcagtgccaatcacatggaactggatacaaatttagtaggaaatg

SEQ ID NO: 1553 - DNA, 661 bp, Homo sapiens
  misc_feature [331]..[331]: Chromosome 2, SNP identification no. = rs2253612
  misc_feature [331]..[331]: allele = c, in linkage disequilibrium with rs2540053, respectively
  misc_feature [331]..[331]: n is a, t, c or g
actccaaaaacatttgtatattacctattgaaccattatgttcctgtaaacataagcaattataaatataaaacatatttatattttctttttttcaaactcataatacagaatgggatggaaaggtaaagaaaagtaattcacaaggtagagattcattagttgaggcttttcagtttcacaacaatggtcctgagcaacagctgctggtacggcaatgctttgtaatcaccatgatgagttaccaggggttgcttgcaagcaccggttctcacaatcaacctattacccagctttggttcttcatagcacttatcatatctgaaattanaactgacgtattcaattgtctggttatgactgtcttcccctaagagaatgttgacttcctgacagtggataacatgtctgtgctttcagcccttagaacatgcctgacacacagtaggtgctccgatttgttttatgaattgagggaggcagaaaagcaggcaggcaggtcagcatatacctatagtgtcacttaggattatggttcaactagagaatgattcagtgccaatcacatggaactggatacaaatttagtaggaaatgatagagataagagagccaaaggacgtacggtgaaagaggtgtggaattcaagctcaaccataaa

SEQ ID NO: 1554 - DNA, 661 bp, Homo sapiens
  misc_feature [331]..[331]: Chromosome 2, SNP identification no. = rs2540052
  misc_feature [331]..[331]: allele = c, in linkage disequilibrium with rs2540053, respectively
  misc_feature [331]..[331]: n is a, t, c or g
acccctttttaaattattaaataacacatcttcattgtagactaccttgtaaatatagaaaagtgaggaaaagagagtaaacatgattcagaatccctgaaaagcaatcagaaccattacagccatgctttgcgctctgctctaaggatcaagagagattttcctcatcaggtgctgggtagctcctctcccaccatctcccctgctctctgctccagcaacaggcactgcctccagtctcctgcacagtgtgtgtgcagttccaccctccttacctggtaactcccccttcctttcatctcagctgagagaagccttccataactgtccnataagtttgggtcaccctattacctgctcctctaacatcacattccactctttcatagcacttgtcacaattgcagttttgcatttcatttgtttatttctttgatacctgtcttacccatcagattataagcttcatgagagcaaagtccaggcctttttctttaagtcattgtatcctcagtgcttaacaccatgcttgtttccttgtctaacttcaccaagtccttcccatctttatggttgagcttgaattccacacctctttcaccgtacgtcctttggctctcttatctctatcatttcctactaaatttgtatccagttccat

SEQ ID NO: 1555 - DNA, 661 bp, Homo sapiens
  misc_feature [331]..[331]: Chromosome 3, SNP identification no. = rs723247
  misc_feature [331]..[331]: allele = c, in linkage disequilibrium with rs10510444, respectively
  misc_feature [331]..[331]: n is a, t, c or g
aaagctttgtctgtagaataaagaatgattgttttttaaatgcatctagacactgttgttatgaatcaaacacaatttcacttcaaagccctactgaatccgtagtgtctttctgttaccagtgctaaagctgagctctagccaagagcacccagctgaggggcctcacacaagggctggaagcagtcacaactctcctccatgagccatttgtcctgttttggtgctgagtcatccctgagaggaagcactaccattttctaatggatccatataattgatcctcttttacttcatttcataaagccatgcaaatagtagcaaggactcnataggaattatgtatgttcttaatcaacagatattaacaaaacaccaccagagtacaagtgtttttgctatcagaaaaagaggtgttcatgtctaaaaggtttggaaaaccctgggttgagatttttgagtctgtctggactaatatttccaattctcctccaaaatgtgtgtctgtttgtatgtgtgtgtgtgtgtgtttgtgtgtgagagagagagagagacagagagagagagagaggaagagggatctatctatctatctatctatctatctatctatctatctatctatctatctagaatgagattgcaaagctcacccccaata

SEQ ID NO: 1556 - DNA, 661 bp, Homo sapiens
  misc_feature [331]..[331]: Chromosome 3, SNP identification no. = rs1869627
  misc_feature [331]..[331]: allele = a, in linkage disequilibrium with rs10510444, respectively
  misc_feature [331]..[331]: n is a, t, c or g
tgaagaaatggtaaagaaggtaagtcctccactagactaaatatgagcatggcaccctgatacaaataatgtagtcaaattcttatctggacttcattgtctacccccaagcaatttgtcaagttattttcctaaatacagagttttcctgccaagaattctggtgacagttgtcaggcaataaaattgtaatttcctggctataaatgaatggtctttccactgacagatgacatcatattgtatagattcattcctgaagaatctattgcagccctaaagtactactacctttaccttttaaaggggctctgaactttccgaagcttantaactaaaaggatattttaaaaacttcaataatggctattatatcattatttaccatgtaagtattattgtggcacattgcaaagcattggtaatatggccatcgcagagttatcttgcctaatcatttaatcctaaggtttcttttaaaaaaaatggctcatgatccacaaagacagtaagcacataagatttcagaggagaaaacaatcgctgtagcctagaataattgaggtttcagcagtgaaatctgagttggccaggtaggattcagctgggagagaggaagcagaaaggtactcttgtctaagtgaatagcgtggacaaatct

SEQ ID NO: 1557 - DNA, 661 bp, Homo sapiens
  misc_feature [331]..[331]: Chromosome 3, SNP identification no. = rs7639184
  misc_feature [331]..[331]: allele = t, in linkage disequilibrium with rs10510444, respectively
  misc_feature [331]..[331]: n is a, t, c or g
gagattgtttgctaagtgaggcatctccttcctctttcttccttggatgaattagcaagcaagaagagtcagtctgaggctcctcactgtgacggactgaggagctttatttactccctgcggatagtggcctgccaccagagaggccacaggccggagtgatggagctgactcatagggtaaggagaaagtggcctggatcgttgacagaggtaagcagtgtccaattcctcctaggcgggggagggagaggttatggcaaagaaagccgtttctattccactgggcaattaatgccaccatttttcttgaaaaagcgttttttttttcntaagccgttgaggataatttaacccccatcttgacaggacgtactaatgaccgctaatggatacattcttttaataaatgaagaggcacaagaaaattgccagatattaaacagagtcccacatgtcttatctgagactataatggctctatcaagtgacccaagtgaaagaaatgtcactcttcagaggttaaaggagtctattttttcttagtgcgatataaattcatggctagaaagaacagtaattcattggtctaccctaggaaatgtttaaagggggctgtatctcaaatgatgcattttctatcggtagtaaagaaaatatga

SEQ ID NO: 1558 - DNA, 661 bp, Homo sapiens
  misc_feature [331]..[331]: Chromosome 3, SNP identification no. = rs1454776
  misc_feature [331]..[331]: allele = t, in linkage disequilibrium with rs10510444, respectively
  misc_feature [331]..[331]: n is a, t, c or g
cttcctccatgtggcttctctcttcatgtagagtttcatcttttgttccatgttcttttccctccaagaggttagcctggagttctttacaaggagaaatcatccactaatatttgtataactaaaacttgatggcaattaaaatatattaacaaaggtgtgctctgtggtccaatattgttgggaaatgttgcatatggcttctccttgtggagcttccactgcaaacagaacagaaagcttactaaagtctctgagaggtcttgcatggagcaaagaaagacaaaaggcgagatgctacgtcttttttccagggatatataaaggaagngctgggttagataaagcaagaaggctttggcttgccttatgagaacatcatcatcatcttaactctgctattcctgtacccatcagagtcccagtataactgcaggtggctccaattgccaaggcgtctgaacactcctaaaacctgtaggaagtagccactaggccaaagggtcaacagtgcttttccaggagtcaggtcatttatgtttctgcctctctccaccgtcctgccagtgaccttgtcttgaattagttcacctacttaactcctatctcttgtttgctttaacccccatgagctgctttgatcaattaccagcacgtccct

SEQ ID NO: 1559 - DNA, 661 bp, Homo sapiens
  misc_feature [331]..[331]: Chromosome 3, SNP identification no. = rs9811682
  misc_feature [331]..[331]: allele = t, in linkage disequilibrium with rs10510444, respectively
  misc_feature [331]..[331]: n is a, t, c or g
aggaagggctgggttagataaagcaagaaggctttggcttgccttatgagaacatcatcatcatcttaactctgctattcctgtacccatcagagtcccagtataactgcaggtggctccaattgccaaggcgtctgaacactcctaaaacctgtaggaagtagccactaggccaaagggtcaacagtgcttttccaggagtcaggtcatttatgtttctgcctctctccaccgtcctgccagtgaccttgtcttgaattagttcacctacttaactcctatctcttgtttgctttaacccccatgagctgctttgatcaattaccagcangtccctgatgcttgatgaccataagttccttggattctttcctttgaaagttagtccatgttggttgtgacaaattcaaataataccaaaaagcaaaagccttcccttatctatttcaatcccccagtcccaccattaacagttgagcagttcagtttccttctagatgattttccatgtttatgtaaacacatgtgcatatatatttgaacaaaatgggtatcaacatgttcatatagttctgtaatctttttcattaatatatcatgcatattattacatgtcagtacatatagattgatctctttttaatagtgtcagtgggtggac

SEQ ID NO: 1560 - DNA, 661 bp, Homo sapiens
  misc_feature [331]..[331]: Chromosome 3, SNP identification no. = rs4685286
  misc_feature [331]..[331]: allele = g, in linkage disequilibrium with rs10510444, respectively
  misc_feature [331]..[331]: n is a, t, c or g
cttatctatttcaatcccccagtcccaccattaacagttgagcagttcagtttccttctagatgattttccatgtttatgtaaacacatgtgcatatatatttgaacaaaatgggtatcaacatgttcatatagttctgtaatctttttcattaatatatcatgcatattattacatgtcagtacatatagattgatctctttttaatagtgtcagtgggtggactcacgtctataatcccaacagttttggaggctgagcggggaggattgcttgaatccagcagtaagtacaagaccagcctgggaaacatagtgagactcctttctangaaaccataactaaaaaattagctgggcatggtggcacacacctgtagtcccagttactcaggaggctgaagcaggaggatggcttgagcccaggagtttgaagctgcagtgagctgtgattgtgccactgtactctagcctgagcaacagaatgagtgtcaaaaaaaaaaaaagtgtcattacgccgaagtatgggagttcctttgtttattcagctcttttcctccggatcaatgttcatgttgctccttattattattattattttttttttggctattgtaaacaatgtggctgtgaccgcctccccacccactccatgtacctaa

SEQ ID NO: 1561 - DNA, 661 bp, Homo sapiens
  misc_feature [331]..[331]: Chromosome 3, SNP identification no. = rs10510444
  misc_feature [331]..[331]: allele = c, t
  misc_feature [331]..[331]: n is a, t, c or g
ttcatgccagctaatgttctgaggaatacgtttccagacgggcagtgctggatcttaaggcatgcctggcctcctctctctcattatccttttgaccctgatatcctagagacttctgttgttacctgcctgcctgcccagatcagtctgtggttcacttgttccagggctccccagagagtcagtcgcttatacatgctctctgaagctttgtccaggcagcctaggttgctcacatcagttgacagctatgctcaattacagcacttgtcacattgtgttataattgtttttctacttgtctaacttctccactagattggaactttcnaaaggcatcatcagtgtctggcacaggacttagcactcagaccaaattccttagcaaattttattgaactcacactgtgtgctaaacactagcactgtgtacatagagctatggacaaaaccaaattccctgcttcagtgggcagagacacacaatccacaaacaatcataaataatttgttagatggaaagtgctatataaagaaaaataaggcacagtacagccttagagaatgctgctgttcacaggtggcgtatatttgagcatggatctaaatgaggtgaaggattgagatggctgcttggggaagaactttccaggcatgaatg

SEQ ID NO: 1562 - DNA, 661 bp, Homo sapiens
  misc_feature [331]..[331]: Chromosome 3, SNP identification no. = rs13079584
  misc_feature [331]..[331]: allele = t, in linkage disequilibrium with rs10510444, respectively
  misc_feature [331]..[331]: n is a, t, c or g
agttgacagctatgctcaattacagcacttgtcacattgtgttataattgtttttctacttgtctaacttctccactagattggaactttccaaaggcatcatcagtgtctggcacaggacttagcactcagaccaaattccttagcaaattttattgaactcacactgtgtgctaaacactagcactgtgtacatagagctatggacaaaaccaaattccctgcttcagtgggcagagacacacaatccacaaacaatcataaataatttgttagatggaaagtgctatataaagaaaaataaggcacagtacagccttagagaatgctnctgttcacaggtggcgtatatttgagcatggatctaaatgaggtgaaggattgagatggctgcttggggaagaactttccaggcatgaatgaatgcctgaattgagcatctccacttcctgatatgagagaagagacgtaacaaagattcctccagaaccaaaaggatccgagataaggctaacttgattaacgtgcttaatgtgaatgccacaccttgggtttcccaggaagaagactctcagatgaagaccagtgtttaggaagcttattaggaatgcttgcgggatcaacacctgctggggaagaaaggcagcaagattgggcagag

SEQ ID NO: 1563 - DNA, 661 bp, Homo sapiens
  misc_feature [331]..[331]: Chromosome 3, SNP identification no. = rs1563229
  misc_feature [331]..[331]: allele = t, in linkage disequilibrium with rs10510444, respectively
  misc_feature [331]..[331]: n is a, t, c or g
aaccaaaaggatccgagataaggctaacttgattaacgtgcttaatgtgaatgccacaccttgggtttcccaggaagaagactctcagatgaagaccagtgtttaggaagcttattaggaatgcttgcgggatcaacacctgctggggaagaaaggcagcaagattgggcagaggacagagttgggctatggtgcagtctcagtggaggtttccatcggccatcgggagttctgaagctgggctggcccttcggggtggtcccaagttgggggctggatctttatgcctcgccttagtccatcattagatgttggccatcccaggaaggantatgaccttgggtgaggtggctcccctctgccacagtagtccttggcagctgagggctacttaaatgatttcaacttcttccttttgttcccccagcaccaggagtgatggttcctcagcagtggagggagggagtccttccttcctgaaggggatctgggtgggccagttcactgttcatcaccgtgagacaaggtggcacatggtgatggggagcacaacatgctggggtgggtgggggtgggcagtcaatagatgcaggtctaaaccttgctgcattggagagaagataagagaaaaagttgctgagttggtttcctgggcctatgt

SEQ ID NO: 1564 - DNA, 661 bp, Homo sapiens
  misc_feature [331]..[331]: Chromosome 3, SNP identification no. = rs9869915
  misc_feature [331]..[331]: allele = t, in linkage disequilibrium with rs10510444, respectively
  misc_feature [331]..[331]: n is a, t, c or g
gttcatcaccgtgagacaaggtggcacatggtgatggggagcacaacatgctggggtgggtgggggtgggcagtcaatagatgcaggtctaaaccttgctgcattggagagaagataagagaaaaagttgctgagttggtttcctgggcctatgtgctctcagagtcctttccttttcttagcttgcccagtggtgctgacacctgcaggctgcatctctcaaactccccatcagttggtttctggcaggtttgaccaggagaaaccactgatcagacataagcaggaggaaaccagagaaaccagagtatttccatccttcctcttcgcnttgggcaggaactccattagcagcttgtcttctcccttgttctaactctcctatgcaggctcactgtggttccagctcccataaaggaatctctcagtccctggctctggccacaccactgtggtagatgtgaggtactcaggtcctctttaaggaaggacttgctgcccaacggcaggtgctgcagccagcatccagctgtcagcccctacagggtcagccttacttgcagagaaccaccttgctcgaggtcatgcccttcctgaagcagctggcatccggtgagtggaagaggtggggtgttgaatgccctgccattctggcttgttg

SEQ ID NO: 1565 - DNA, 661 bp, Homo sapiens
  misc_feature [331]..[331]: Chromosome 3, SNP identification no. = rs2085149
  misc_feature [331]..[331]: allele = g, in linkage disequilibrium with rs10510444, respectively
  misc_feature [331]..[331]: n is a, t, c or g
ctcagtccctggctctggccacaccactgtggtagatgtgaggtactcaggtcctctttaaggaaggacttgctgcccaacggcaggtgctgcagccagcatccagctgtcagcccctacagggtcagccttacttgcagagaaccaccttgctcgaggtcatgcccttcctgaagcagctggcatccggtgagtggaagaggtggggtgttgaatgccctgccattctggcttgttggaggacacaggtgggctgaggtttcattgggtctgcataactgtgtggcttctgcctctgcccattctgttgcttctccttccccttcccagntgttgacccctcatgaacaccttgcactccagtatatttctaagtgcttctgagagcccggcctgcaacaccacttctcccctctgcctccagcctagagatgggaatggcttcctgctggtgctaatctctaggtggcctcaccatgtcccatttggacactctgctcttgcatcatccatgtaatcaattaactgcattaaatccccatctctttaaataaagtaggttctgacacagccaacattatactgaatggggaaaagttgaaagcgttcctcctgagaactggaacaagacaaggatgttcactttcaccacttctattca

SEQ ID NO: 1566 - DNA, 661 bp, Homo sapiens
  misc_feature [331]..[331]: Chromosome 3, SNP identification no. = rs2085151
  misc_feature [331]..[331]: allele = a, in linkage disequilibrium with rs10510444, respectively
  misc_feature [331]..[331]: n is a, t, c or g
aggaaggacttgctgcccaacggcaggtgctgcagccagcatccagctgtcagcccctacagggtcagccttacttgcagagaaccaccttgctcgaggtcatgcccttcctgaagcagctggcatccggtgagtggaagaggtggggtgttgaatgccctgccattctggcttgttggaggacacaggtgggctgaggtttcattgggtctgcataactgtgtggcttctgcctctgcccattctgttgcttctccttccccttcccagatgttgacccctcatgaacaccttgcactccagtatatttctaagtgcttctgagagcccngcctgcaacaccacttctcccctctgcctccagcctagagatgggaatggcttcctgctggtgctaatctctaggtggcctcaccatgtcccatttggacactctgctcttgcatcatccatgtaatcaattaactgcattaaatccccatctctttaaataaagtaggttctgacacagccaacattatactgaatggggaaaagttgaaagcgttcctcctgagaactggaacaagacaaggatgttcactttcaccacttctattcaacatagtactggaagtcctagccagagcaatcagacaagagaaggcaataaaggacatcc

SEQ ID NO: 1567 - DNA, 661 bp, Homo sapiens
  misc_feature [331]..[331]: Chromosome 3, SNP identification no. = rs1902115
  misc_feature [331]..[331]: allele = a, in linkage disequilibrium with rs10510444, respectively
  misc_feature [331]..[331]: n is a, t, c or g
cctgatatagtgagttttacatctaaacttcagtttatattctcatttcccttgctaatctagtattttataagggggccctcaactcataaatatatattaatatatatatgtttgtgtgtatatattcctcatctgcaaccaaacgcagatcgaaaatacagtattcctggaatgtgacacccacgtgtatcaagggccgacttttcatatatgcatgttcctcagggccaactgcaggacttaagtatgtggaaatctggatatgtgagggggtcctggaaccaataccttgtggataccaagagatgactgtatatatttgctccancagtggagatgcagcatacataagtgttttgccatgactatgcccaatgtcatacttggggtcaggttgaagcccatgctgaggtccaaggggagtgggtggatgggcacatagcggtaagaacacttggagggccgtaagcaggtgaaaagtaggtttattcagcagctctcccatcagcagctctctcaccctgtctgcctttatcttggttgtgtgctgtgactctgtggctcctttcagcagttggctctgcacctctggctgcttccacacacaggtgtatggccagctttcccttccttcagggtcagcagcttaactctttcc

SEQ ID NO: 1568 - DNA, 661 bp, Homo sapiens
  misc_feature [331]..[331]: Chromosome 3, SNP identification no. = rs1902116
  misc_feature [331]..[331]: allele = t, in linkage disequilibrium with rs10510444, respectively
  misc_feature [331]..[331]: n is a, t, c or g
gtgtgtatatattcctcatctgcaaccaaacgcagatcgaaaatacagtattcctggaatgtgacacccacgtgtatcaagggccgacttttcatatatgcatgttcctcagggccaactgcaggacttaagtatgtggaaatctggatatgtgagggggtcctggaaccaataccttgtggataccaagagatgactgtatatatttgctccagcagtggagatgcagcatacataagtgttttgccatgactatgcccaatgtcatacttggggtcaggttgaagcccatgctgaggtccaaggggagtgggtggatgggcacatagcngtaagaacacttggagggccgtaagcaggtgaaaagtaggtttattcagcagctctcccatcagcagctctctcaccctgtctgcctttatcttggttgtgtgctgtgactctgtggctcctttcagcagttggctctgcacctctggctgcttccacacacaggtgtatggccagctttcccttccttcagggtcagcagcttaactctttccctctgggcacaaactggtttctggctcccctctgcccgctttcaaggcgactggctctcccttacagggatcagaagcgttactctccgggcacagtatgcacactgtgttgagcc

SEQ ID NO: 1569 - DNA, 661 bp, Homo sapiens
  misc_feature [331]..[331]: Chromosome 3, SNP identification no. = rs1902117
  misc_feature [331]..[331]: allele = c, in linkage disequilibrium with rs10510444, respectively
  misc_feature [331]..[331]: n is a, t, c or g
agatcgaaaatacagtattcctggaatgtgacacccacgtgtatcaagggccgacttttcatatatgcatgttcctcagggccaactgcaggacttaagtatgtggaaatctggatatgtgagggggtcctggaaccaataccttgtggataccaagagatgactgtatatatttgctccagcagtggagatgcagcatacataagtgttttgccatgactatgcccaatgtcatacttggggtcaggttgaagcccatgctgaggtccaaggggagtgggtggatgggcacatagcggtaagaacacttggagggccgtaagcaggtganaagtaggtttattcagcagctctcccatcagcagctctctcaccctgtctgcctttatcttggttgtgtgctgtgactctgtggctcctttcagcagttggctctgcacctctggctgcttccacacacaggtgtatggccagctttcccttccttcagggtcagcagcttaactctttccctctgggcacaaactggtttctggctcccctctgcccgctttcaaggcgactggctctcccttacagggatcagaagcgttactctccgggcacagtatgcacactgtgttgagccatgtttagccatgccccagagtgcctgtacggt

SEQ ID NO: 1570 - DNA, 661 bp, Homo sapiens
  misc_feature [331]..[331]: Chromosome 3, SNP identification no. = rs6442563
  misc_feature [331]..[331]: allele = c, in linkage disequilibrium with rs10510444, respectively
  misc_feature [331]..[331]: n is a, t, c or g
ggacttaagtatgtggaaatctggatatgtgagggggtcctggaaccaataccttgtggataccaagagatgactgtatatatttgctccagcagtggagatgcagcatacataagtgttttgccatgactatgcccaatgtcatacttggggtcaggttgaagcccatgctgaggtccaaggggagtgggtggatgggcacatagcggtaagaacacttggagggccgtaagcaggtgaaaagtaggtttattcagcagctctcccatcagcagctctctcaccctgtctgcctttatcttggttgtgtgctgtgactctgtggctcctntcagcagttggctctgcacctctggctgcttccacacacaggtgtatggccagctttcccttccttcagggtcagcagcttaactctttccctctgggcacaaactggtttctggctcccctctgcccgctttcaaggcgactggctctcccttacagggatcagaagcgttactctccgggcacagtatgcacactgtgttgagccatgtttagccatgccccagagtgcctgtacggtgtcagcagggcagttataccttttccaaacaatagtggctttgagccaaatatgagcttacacaaacaggttatataacaaataagagta

SEQ ID NO: 1571 - DNA, 661 bp, Homo sapiens
  misc_feature [331]..[331]: Chromosome 3, SNP identification no. = rs11717117
  misc_feature [331]..[331]: allele = t, in linkage disequilibrium with rs10510444, respectively
  misc_feature [331]..[331]: n is a, t, c or g
tgggtggatcacgatgtcaggagatcgagaccatcctggccaacatggtgaaaccccatctctactaaaaatacaaaaattagcttgggtgtggtggcgcatgtctgtaaccccagctactcgggagcctgagtcacgagaattgcttgaatccaggaggcggaggttgcagtgagccgagatcacaccactgcactccagcccagcgacagagcgagagtccgtctcaaaaaaaaaaaaagtaaatatgcaaatcgaggcaagagaacatattagtatttaatgagctccaattctttggaaactgttgttagatcctttcttgtattgntgaggaagaatgagggccagaagagggggaaaggggaaaggaaatcaccaggggcagggatgggatgggacatattggggaactgtgaactagagacctacaaggtagggttgccagataaaatacaggatatccagttaaatttgaatgaccagatttagcaaataaaaaatatgggactcagttaaatttgaattttagatacacagtgaaaaatattttagcataaatatatcccatacaatacttgggacatacttattctaaacattattgttgtgtatctgcaatgcaaattaatcgagagtccagtatttttatgtgctaaag

SEQ ID NO: 1572 - DNA, 661 bp, Homo sapiens
  misc_feature [331]..[331]: Chromosome 3, SNP identification no. = rs4685294
  misc_feature [331]..[331]: allele = c, in linkage disequilibrium with rs10510444, respectively
  misc_feature [331]..[331]: n is a, t, c or g
agtaaatatgcaaatcgaggcaagagaacatattagtatttaatgagctccaattctttggaaactgttgttagatcctttcttgtattgatgaggaagaatgagggccagaagagggggaaaggggaaaggaaatcaccaggggcagggatgggatgggacatattggggaactgtgaactagagacctacaaggtagggttgccagataaaatacaggatatccagttaaatttgaatgaccagatttagcaaataaaaaatatgggactcagttaaatttgaattttagatacacagtgaaaaatattttagcataaatatatcccanacaatacttgggacatacttattctaaacattattgttgtgtatctgcaatgcaaattaatcgagagtccagtatttttatgtgctaaagctggcaacattactacaaggttaacttctcactttcatcctggaacttgttttgtcattatctttgagggtcatggtgctatggggccaaagggacttcatgcccttttggatagccatgggtctgacattcatcctgccctcccctgctgctctctgcctcctgcctctggtccctcaggcctcaaagcccctatgccagcagacacagggcagcatgttgagggagaagattctgcac

SEQ ID NO: 1573 - DNA, 661 bp, Homo sapiens
  misc_feature [331]..[331]: Chromosome 3, SNP identification no. = rs985969
  misc_feature [331]..[331]: allele = t, in linkage disequilibrium with rs10510444, respectively
  misc_feature [331]..[331]: n is a, t, c or g
aaaaaaagtgttttagagcagttttagagtcaggcaaaattgagagggaggtacggagatttcccatatacaccatgctcctccatacacagcctcctctgctatcaacatccaccaccagaagggtaaatttgttacaactgatgaacccacaataacaattgttatcacccaaagtccacagtttacattaggattcactattggtgttgtacattctatgggttttgacaaatgtgtaatgacattatctgtcattatcatatcatacagagtagtttaacaaccctaaaattcctctgtacatcacctattcatccttccctccccntagcccctaggaaccactgatccttttactgtcttcatagttttgacttttccagaatgttacaaatttggaatcatatgatatgcagccttttcagattgggtttctttcacttaactatgctttttagtttcctccatgtttcttcatagcttgatagctcatttcttttttgctctcagtaatagtctattgtctggatgtatcaccatttatttatccattcatttactgtattagtacattctcatgctgctgataaagacatacctgagactgggaagaaaaagaggtttaatggacttacagttcacatggctggggaggcct

SEQ ID NO: 1574 - DNA, 661 bp, Homo sapiens
  misc_feature [331]..[331]: Chromosome 3, SNP identification no. = rs7653290
  misc_feature [331]..[331]: allele = a, in linkage disequilibrium with rs10510444, respectively
  misc_feature [331]..[331]: n is a, t, c or g
cagaatgttacaaatttggaatcatatgatatgcagccttttcagattgggtttctttcacttaactatgctttttagtttcctccatgtttcttcatagcttgatagctcatttcttttttgctctcagtaatagtctattgtctggatgtatcaccatttatttatccattcatttactgtattagtacattctcatgctgctgataaagacatacctgagactgggaagaaaaagaggtttaatggacttacagttcacatggctggggaggcctcccaatcatggtggaaggcaaggaggagcaagtcacatcttacatagatgacnagcaggtaaagagagagcttgtgcagggaaactcctgttttcaaatccatcagatctcgtgagactcattcactatcctgagaacagtgcaagaaagacccacccccataattcagtcaccttccactgggttcctcccacaacatgtaggaattgtgggagttacaattcaagatgagatttaggtgaggacacagccgaactatatcatcccccccttagctcctcccaaatctcatgtccttatatttcaaaaccaatcatgccttcctaacagttccccaaagctttaagtcatttcagcattaattcaaaagtccacagttcatc

SEQ ID NO: 1575 - DNA, 661 bp, Homo sapiens
  misc_feature [331]..[331]: Chromosome 3, SNP identification no. = rs6442570
  misc_feature [331]..[331]: allele = a, in linkage disequilibrium with rs10510444, respectively
  misc_feature [331]..[331]: n is a, t, c or g
gaaatctattacggtaaaccattgatgattatatggaatcttgctaagaatagtgtaaggattggggacaacggggtgggtagtctggactatttggttgatagctctaaggtcctctactagccagtatgacatgtctgatttcttgaccggcagtattggggtattataaggggacatacagggcttgagaagcccatccttaataaggcctttgattataggtttcaaccctatcctaccttctaggggaaaagggtattgcttccttcatactacttctctcggggtttttagcttgagggataggaggaacttggagtttccctcngtttccttctttgaaccagacattagtattaatatatttttcatctgcagtggtgagtaggtttaatgaggtaaggaatcctcttgggctgacttgtacacctatgccgaactttaacattaaatccctccccagtaaattacttcctgcttcagagattaacaagaacagaatatgacctgagcaatcctggtatctaacttctgtgctttgtaaaatttttctctaaatccttccccttttaccctggagactaaaagttcctctgaggaggagacaacattacatggggggaaacaaacagaggagcgagcagcccctgaattgact

SEQ ID NO: 1576 - DNA, 661 bp, Homo sapiens
  misc_feature [331]..[331]: Chromosome 3, SNP identification no. = rs4685304
  misc_feature [331]..[331]: allele = g, in linkage disequilibrium with rs10510444, respectively
  misc_feature [331]..[331]: n is a, t, c or g
ctatcacttgaaacactttgctcctttgctgtcctgagagcaagcacattggtgcttgcgggaagtgtcttggggagttaagcaccagctcacagagatggtgaggtgtatttcagaacccaagcttctgccagggagcatatagattttgttatttcaatattagcagcttactctccatgggttttattgcataaatttcaggagggagtgttttcttgactgacaccttagaagcactctttgtagcaaagtcacaaacatttccagatcttgctgggcatagagatggctgcaccactggaaacaatctattggtgtcacttgacanagtgtgagaggtcaggtaggggtgaacagcattgtctgcacaccaagtgggaacattatctgctctgtggggaggcccatcatgcttggcctgctcaggaggaagactgacacatgtgggtcattccgtggtgccttttctccttcacagtgaaaagaaggcctgacacttccagaggaaaatgacactgaaagcactcaggcagaggaggggaaaacatgaccatgctttctggaaaaccctttcttcatgcactcatgccaatcattgttttatccaacttagctaatccatttctaattttttgttccttaataaaagaaaaacaat

SEQ ID NO: 1577 - DNA, 661 bp, Homo sapiens
  misc_feature [331]..[331]: Chromosome 3, SNP identification no. = rs9815997
  misc_feature [331]..[331]: allele = t, in linkage disequilibrium with rs10510444, respectively
  misc_feature [331]..[331]: n is a, t, c or g
cttgatggagtagatttgtctgggggttccatgtgtttagaggaacaagacgagtcacctggtaatcatatcattcccagtatttgacatgtgtcttgggtgatgcacagtggccaatccttcctgtttcctttataacattcattgaataattccttgaatgtggcaggcactggattttccatgcatcatatgtgagggaagtgacagtggaacatcaaaagcccaggagaacttactctccttccagcccttgcatcctcctgtgtgccctggctgcaggctcctccccacatccttttggagggaactggataccagtcctctagtngggaagtattttcagttttaaaacccagtcattattgactggctggctgagtttcctgttcaaaaagtgcacaatcacccatctccccaaaatatacgtccagccaaggatcagatttccctcagctggccagccacttttctaagatgagcagttgccaacaaacaagcttggaagcaagcaaacagttgtcttttctccctcactacctctctcccgtcagtcataaactccaagaaaggtcagctgggacctgtccagcctccagccacagcctagcacagggtagacatgtcaaacaaaacaggaaaaataatttaccttgccctt

SEQ ID NO: 1578 - DNA, 661 bp, Homo sapiens
  misc_feature [331]..[331]: Chromosome 3, SNP identification no. = rs9874065
  misc_feature [331]..[331]: allele = t, in linkage disequilibrium with rs10510444, respectively
  misc_feature [331]..[331]: n is a, t, c or g
cagttgaagagaaggaatttagaaacattggcttattcatgtgagctgctctattaataaagccagtgccccctttataacagggagccctgggaaaccaaatagaaaactcctgtttttaagagacagactaattgagtcatcgtctctgaattccctctctgctacttctcactcagactgctgatgattttatttttaatttatctaagggggctatgagtcattattgagattagtttccataaggtcctctatcactaaacactgtaacaacctgcagtagttatctattgcataataaattaccccaaacttatttggttaaganaacaaccgtttaatttgcctgcgattccatgggtcaggactttagaatccatttaatcagcttacaattctgtaggtcacaaattcagggcttggctgggtggtctttctgctccaggtgatgtcagctgggatcattcatttggctgcattcagctagtggctgtgctcagctctaagtttggcctcatgcacatctctgctgcttctgcgttcttgggttcctccatatggccttgctttctccagggacttgggctccctcacagcatggtggtcttaaggtgcagccatggaacttgcacagcagtaacatttctaccatatttga

SEQ ID NO: 1579 - DNA, 661 bp, Homo sapiens
  misc_feature [331]..[331]: Chromosome 3, SNP identification no. = rs6550949
  misc_feature [331]..[331]: allele = g, in linkage disequilibrium with rs17516853, respectively
  misc_feature [331]..[331]: n is a, t, c or g
accacaagtagtactgaaccctataaatactgtgttttttcctacacatacatgcctatgataaagcttaatttataaatgaggtgaagtaagagattaacagcaataataataaaataggaaaatggtaataatatgctgtaataaaatgtatcacaaattgtgactaacttctgcagtttgaagtgcaacagcaaaactaacataaattttttctcacaatttcgtggataaaatacttgttcttactgtagatcttagcaacctcagcatataatttttctttccttattaagtagagaactttcttttcatttaaaggaagcacttnatagcttctctgtggcatatctgaattgtcagcatccctacttttgcacattggggacaatattaagtaaaataaggtttacttgaacacaaacactgtgataccttaacagtagatctgatcaccgagctctattaaatgactaatgggtgggtagcatctacagcatggatacactggacaaaggaatgattcatgtctcgggcaagatggcacaagatttccacatactactcagtccacaactgaaaattatagattgcttatttctggaatttttcatttaacattttggacgatggttgatcgtgggtgactgaaaccatggga

SEQ ID NO: 1580 - DNA, 661 bp, Homo sapiens
  misc_feature [331]..[331]: Chromosome 3, SNP identification no. = rs1603983
  misc_feature [331]..[331]: allele = c, in linkage disequilibrium with rs17516853, respectively
  misc_feature [331]..[331]: n is a, t, c or g
tttgaaagataactacctggtgacctcaaccctaacctggactcttctgtatgagacataaacttctattatgactgagccatttcatatttgagtatacagtagtcccctcttatccatgatttttttcccatggtttcagtcacccacgatcaaccatcgtccaaaatgttaaatgaaaaattccagaaataagcaatctataattttcagttgtggactgagtagtatgtggaaatcttgtgccatcttgcccgagacatgaatcattcctttgtccagtgtatccatgctgtagatgctacccacccattagtcatttaatagagcncggtgatcagatctactgttaaggtatcacagtgtttgtgttcaagtaaaccttattttacttaatattgtccccaatgtgcaaaagtagggatgctgacaattcagatatgccacagagaagctataaagtgcttcctttaaatgaaaagaaagttctctacttaataaggaaagaaaaattatatgctgaggttgctaagatctacagtaagaacaagtattttatccacgaaattgtgagaaaaaatttatgttagttttgctgttgcacttcaaactgcagaagttagtcacaatttgtgatacattttattacagcatattatta

SEQ ID NO: 1581 - DNA, 661 bp, Homo sapiens
  misc_feature [331]..[331]: Chromosome 3, SNP identification no. = rs1587426
  misc_feature [331]..[331]: allele = g, in linkage disequilibrium with rs17516853, respectively
  misc_feature [331]..[331]: n is a, t, c or g
tagcttaattataaaaaaatgcagttaattcatatttagttttaattttaaaacgtggtacaatttgaagacagtaaaaaacatcaagaaaaaatagctttggaattgtcaaaagtgtcacaaactctctatacaaaaacaccatagcagagactgataatctatccatcaaatccattcttttttccctggacactgaattagacatttcccaggcttcctggcagttagatgtgaccacgcgactgagtcctaaccaataggattacgagtgatgtatggcacttcctgatctggtccataaaacctcccaccgttatttatctatctntttcttcttcctctgggtggatacagatgacatcaagataccaggtgatagaggaaacccaagatggaaaaagcccggatagctgaatcatcctttgaaagataactacctggtgacctcaaccctaacctggactcttctgtatgagacataaacttctattatgactgagccatttcatatttgagtatacagtagtcccctcttatccatgatttttttcccatggtttcagtcacccacgatcaaccatcgtccaaaatgttaaatgaaaaattccagaaataagcaatctataattttcagttgtggactgagtagtatgtggaa

SEQ ID NO: 1582 - DNA, 661 bp, Homo sapiens
  misc_feature [331]..[331]: Chromosome 3, SNP identification no. = rs17576064
  misc_feature [331]..[331]: allele = c, in linkage disequilibrium with rs17516853, respectively
  misc_feature [331]..[331]: n is a, t, c or g
cattagctatttcttttggcctaggggtactgtggaaagattattgaaactttacagtgccatgaactgaagtttgggaagctctgctctgggacattcttatatgcagaatgcatggttaaggctggcttgtgggtgtgtccatgctcagacttacggcaagggacaggaaagtatgagggggacaagttagctctcttgaaggtccccatctggtactctgatatcactttcctcatgttctagctctattagtgagatcttggttaaatggtcttaagtcacggcaagtaaggctggaaaatgtaatgtggctagccaaccagggacnaggcatgtacagaagacggaggatggattttggtggacatctcaatctcagctgcagtccacccctctaaccacacacagaatattctcacatttcccaagggaagaaacccaaaatgccccaaacggttataacattcaagatctctggtgatgctaaatcctttccatcgggtctggagttggcaccttgtcatcttgacatttatgtcataaaaggcaagttatctaccccacttcgccacagcacatgtacacagtggtgactcaggaatggtataacttcattaaaaactgctgttctgatgaatggcaacaattcaattctcct

SEQ ID NO: 1583 - DNA, 661 bp, Homo sapiens
  misc_feature [331]..[331]: Chromosome 3, SNP identification no. = rs17516853
  misc_feature [331]..[331]: allele = a, g
  misc_feature [331]..[331]: n is a, t, c or g
tacacagtggtgactcaggaatggtataacttcattaaaaactgctgttctgatgaatggcaacaattcaattctcctgcatgagcattgaggtacactttgacttggcacttggggtgtcggcagggaggagtttcataactgttttctgctgtccaggcaaaactccctttccagttatttgctatggcttctggctccattcattgacaggtttgtctgtgcttctcaccttccattactttatgtgtggtctactttgggaagtgtgtttcacagtttcatttctattggcgtcaattttcaggactgagcatctgtttaggggtgnaatagtcatagaattttgtaggctgctcctgtggtttctttggcaatatgatttcctcaaaatcatagtgggcttctcctctatttgtgcccattaacttccttgtgccagtaactacacccagtgttcttcactagacatatttcacctttgtttcttttctacacatgtatctctttcacactgacagtggctatatcaaagccacttgaaatattcccctgtgggagaaaagcaacagttgtatcaccttttctaatcatataacctaacacctaattgctggactatcctcattcccttatgtttctccttgcaaactaaaaactt

SEQ ID NO: 1584 - DNA, 661 bp, Homo sapiens
  misc_feature [331]..[331]: Chromosome 3, SNP identification no. = rs11129181
  misc_feature [331]..[331]: allele = t, in linkage disequilibrium with rs17516853, respectively
  misc_feature [331]..[331]: n is a, t, c or g
tgaattactcagcatgtgttttcttttatctgagaattagtcccaagggcaactaaaaggcaaggtaaaacctttagtcatccttgatattccctctccttcacacactacattcaatgcaacttccatcaaatgcaagttcttcacacactacattcaatgcaagttctatcaaaatccaccccacattcatcctgttctctccatctctgccacaccactccagtcaggtccatcatcatctttcgcctgcatcagtagactcccctaacttacctcctacctgtactattgccctacaggaaccaggtgatcttggaagagtataaantgaactatgtcacactctgcttaaaatcctccaatagcttctcgttttcatagaataaaagccagacccatgactgtggcatacaagagatacctgatctggccctgcaaacctccctcacctcttcccaggacctgtcactactgggccttgccacggcccaccagccttctatcaactccttgaactcagcaggccacgctccttcctgccttggagctttgcattcgtgcttctctctgaaaagcctttcccatgatgctggtgtcttctcattctggcagctcctcaaggccctttgtaaattagctgtgtcccaatttttccgta

SEQ ID NO: 1585 - DNA, 661 bp, Homo sapiens
  misc_feature [331]..[331]: Chromosome 3, SNP identification no. = rs17517019
  misc_feature [331]..[331]: allele = t, in linkage disequilibrium with rs17516853, respectively
  misc_feature [331]..[331]: n is a, t, c or g
tggtgcagagtgatggaggaagaaggtgattagaaattgtttaggagtgtttttggctgattaaaaatttatttttacaggatttcatttcagaagctctcttatataggctttccttcactaaaactgcttcaatcctcataatcaaatctttggatttgaaaactcagcgtggagtatctttaggaagaccctattaaagaccttgttgaagcttgattaccttagtatgggaaactataggcaaaaatgttcttttcatttaaaataagactgtgccataggacaaacaggaacatgacaggcctcttttatgtatgctatgttttgntcatttacaggtaggggaataaagcaactattccttcactagcaccagtctttactgaggacttttacacatggttttcactgtcttggaagtctttcccctctagtggaagctgccaaaaccctacttgtcttttagggctcagctaaaatgtcacctaaacatacagcgttccctgaattctctcagctgaacttcattagaacatatgctgtgttttcccctttgtgactaactctgacaaatagaggctgaagaattgttctaaggagctgtgttcctatataacttttctagcaagactgagcatgttgtcatttttttttaata

SEQ ID NO: 1586 - DNA, 661 bp, Homo sapiens
  misc_feature [331]..[331]: Chromosome 3, SNP identification no. = rs6804869
  misc_feature [331]..[331]: allele = c, in linkage disequilibrium with rs17516853, respectively
  misc_feature [331]..[331]: n is a, t, c or g
gaccaatattcaacttgcatttgccttttactgtttctatttaagctttaaatcagaattctaattagtaacatgagtctctttcttgatagatttgagcatgaatggacatttaaaaacattagtttctaggaaaagaaaatcaaggtggaagttcaagattatgtttattacagttatcagttatctatagaaattgtcatcctaatgtatctgcatggacaattattttttattgaaaccacatataagcaaaagagtgaaactgttagtttcaattttaacttgactaaattaattaacatttaataagaattctgtgcagacatanctcattatattgtgctttgctttattgtactttgcagatattgtatattttacaaattgaaggcttgtggcaaccctgtgttgatcaagtctgttagcactgtttccagcagaatgtgctcacttcctgtctctgtcacaaatattctctgaatatttcaaactttttcattattattttatctgttaagattcagcattctttgatgttactgttgtaattgtttgagggcacaaagaaccatgcccatttaagatggggaacttaattgataaatagtgtgtgtgttctgactgctcaacccaccaagccattccttgtctccctctt

SEQ ID NO: 1587 - DNA, 661 bp, Homo sapiens
  misc_feature [331]..[331]: Chromosome 3, SNP identification no. = rs9812604
  misc_feature [331]..[331]: allele = a, in linkage disequilibrium with rs17516853, respectively
  misc_feature [331]..[331]: n is a, t, c or g
gtagatgacttttttagacacaatgctgatgcacacttaatatactcaagtatattaacctaaatctcatatgccctgggaaaccaaaacatttgtgtgactaactttattacaatattcactttattgcagtggtctggaactaaacatgtaatatctttgaggtataccgatattaaaaaatgtgtctcttttgtcatatcccttataaaatatagttctctaaaagatggttcaataacactatgagatgaaattcttagacccgggaaactcataaacgttcttaaaagatatttgcctgtccttgcatgacttttgacactgacanacatacattctaccactatctaaattcaatatactagatgaataaggatggtacaaatagaattaacttcgggttcctttgatttgtttttagcttaactctatgtcttcagtggtttttgaagaagcacctgacctatttgggctgacccaatttaccactttaggtggccactgataggtagaatgatctgccaatttcagagggtcttaggagaggcagcatccatggaaatcttgcctcccattgcctggagtacctaaaagccttaggaccatgggagatgtagtcattcaaatctacagaaaatgaaagggctatcatttcaat

SEQ ID NO: 1588 - DNA, 661 bp, Homo sapiens
  misc_feature [331]..[331]: Chromosome 3, SNP identification no. = rs13060347
  misc_feature [331]..[331]: allele = g, in linkage disequilibrium with rs17517792, respectively
  misc_feature [331]..[331]: n is a, t, c or g
acaaagaactaaaatgtagtaaactattcttcatttgatataattaaacactgctcccagggaaggaaaaaaatatgttattccatgaaacatacatatattgtgtgtttatatataatacacatttaattataaaattatgtttacgtacacatacatacatacatacacagtaatacaaccagcctggtacattaaactgtttaatatttttaaaggctctacatattagactctacatagttcctatattttggagtctgtaattgtgagtcttggcagctgacattttatgggagtgtattaaaatcatttaagatgctacttagancagtaatgctttgacctatgtgaacatcaaaattcataaacaaaatagggtcaggtggagccactagccagatgatgcttccaagaaaatctaaaacttcggaaaataggtggactgcagtgtttgatacaaacttcttctacacattatttcaagtagaaccatgacaaacagtttgaaggaaaaaaaggaacaaacttcttcaggggaaaaggacagaataattttgaatctattgataagcactcttcattactactttcatggaattcttcattgcttgtccaacattcataatccaaaccaaccaagtaatagaggcagagtgtg

SEQ ID NO: 1589 - DNA, 661 bp, Homo sapiens
  misc_feature [331]..[331]: Chromosome 3, SNP identification no. = rs17517792
  misc_feature [331]..[331]: allele = a, g
  misc_feature [331]..[331]: n is a, t, c or g
atattctgttcacaatattctcaatgagggccaattaaagagccaggcaaattggagctcagatcctgttgacatttactgaggcttctgaagaatatgttgtctctaaagaggtacatgaagaatgcagagaattcacactacattaaagcattttgcattggactttatctttgtatgcttttcacttttattatgctcattccaaatcactctcttctatgattatgtggatttttaagaagccagctatgttgtgttacacaattaaagatatcttattgatttttccttttattctatatgatttgacttgttttcacatcaaccngtgctaatggatatatctgctagtatatatccacaggcatttcaattaactcatccaaaactacgttcatcctttctgaagccttttgctccatccgagttccttagcttgctgaagggtaccgttatttgcttggtttataaaaccagaattctggagtcagccttcattgttgactctcctttaatcccatgtccaatctatgtcttattctatctgtgctaccctcattaatgttctttggattcatcatggcggagaccaaagtcttgggccctctcagtgggacccttgcaatagtctcctggctggttgtccagcctcaaagct

SEQ ID NO: 1590 - DNA, 661 bp, Homo sapiens
  misc_feature [331]..[331]: Chromosome 3, SNP identification no. = rs321519
  misc_feature [331]..[331]: allele = c, in linkage disequilibrium with rs17516853, respectively
  misc_feature [331]..[331]: n is a, t, c or g
taatacagtaaaattttttttaagaagcttagaaagaatgtccctgtatttctttttaggccattttaaaaagaaatatgtaagattccatctgctaaagaaacagagttcaaatatgactttcagaaaaaataataggcagaaatgcacatatattacaatgtataaaacactgagattttacttctataaactatgagagtagtaatgtaaataggggtttttagggagtcaatgctcaacccaaagttgttacatctgctagcaatgcacacacatgctgaagtcaggcttcacctaaggtcttttcatgtatattcccaaacgtaangtataaatgtattggactaaaggtctgcttggaccattgcttgtttttgagaaaagcggtggtaggcaactccttgtacaacagtttccatgctacatattatggaatcctcccaagccaagcgaatgactggcctaggatttggttctcaagggaaattcagctatctacaggatctacaggctggcagatgcctgagagagagcttggaagcagtagtgtgcccagtgggagtctccacattggatgttgacccatctatcctatcagagtcttactgctgattggttttgaatgcctaagacacctagaaagacagagagagaagac

SEQ ID NO: 1591 - DNA, 661 bp, Homo sapiens
  misc_feature [331]..[331]: Chromosome 3, SNP identification no. = rs17517931
  misc_feature [331]..[331]: allele = t, in linkage disequilibrium with rs17517792, respectively
  misc_feature [331]..[331]: n is a, t, c or g
accagctatcctgaaacaaggaagtgatgatggaaaggaaaattggttgttgttgtaagtaagcagaagataaattcactcctctaccaattttatcttgattattgtaacccatccctggtaagaaaggtaaatctactctttgaagaaactaaatcagaggggttactgagttctagacaccaagcatcaatataccatagggtggtagtggtggactgaaaactggaggaagatgtgaaaggccacatatttcatagtaagtccaccagcagccccagccttattcctccattcgaatactagagtctttcataaggtttttttcttnccaccctaccctgggcagatgcttacaggattgctcaatggagttatccaagagtcccaaataaaaagcccattaatctgacatttggggagtcccacaatgaaataaatgtaacagttatataactttttatgaaattcactcatttgacaaggttcagccatggaaacaatttgcaataaacttcctctttataatatgaatggacagactagagaatttggcagacaatacaaatgagaaatacatctaatgttaatggaaataaaacagaaaaagtaaagagaaagagtctataatatagtaagcagaataaaacactgaaaagga

SEQ ID NO: 1592 - DNA, 661 bp, Homo sapiens
  misc_feature [331]..[331]: Chromosome 3, SNP identification no. = rs13068891
  misc_feature [331]..[331]: allele = g, in linkage disequilibrium with rs17517792, respectively
  misc_feature [331]..[331]: n is a, t, c or g
tgtttattttctaattaatttgctacaaactacaaaataaaactattgaatatattggataacgtatgcttttttgaagaaaaagcaccaaaatcatctctgagatgaaaccgattcagaggctgtttactttcttttcatcagagaaacaagttgtagtttgaaagtttgaaaaaggcattgaaattttgggtgggatttttagaattagtgtgttgtataagccaacaggcaatgtcatctcctttgtaagttcagcggagtactagggggcctgggaccatatggtctcactgttgacactgttcgtttttaatattaataggccagngattcaaggccctggggcagatgtcatctaagtgaggacagaagcaaatatcacgactgctcactgagtttttcctctgtagagtacaaccagcataacaggcgttcaaaatatataagcttagcttggcagaggggcaagagcagagaaggtgattcaaattctggcttagcgagggcttactctgtgacattgaggggaattcattgaaactcactgagacctactcttctcatctggaaaataaaaaatatctgccttaaaaagggttagagcttatagtgaggtgcctcacatatggtaaatagtcaatgaaaattatatttgatt

SEQ ID NO: 1593 - DNA, 661 bp, Homo sapiens
  LOC442077
  misc_feature [331]..[331]: Chromosome 3, SNP identification no. = rs13061437
  misc_feature [331]..[331]: allele = c, in linkage disequilibrium with rs17517792, respectively
  misc_feature [331]..[331]: n is a, t, c or g
aacacacatacttgggtggaaaagctgaccaacgtggaataaaaagggagcaaacatgttggagaatgactctgtaaagagattcatgtcattgaactgtaggacttactgatatctcttttgtaatctgtacatgtcttgattctgcagctcactagaaagaataaattctcctgcccctgtagtgagggtctgtcagcaccaagtaattgtaaaggctcaataattctctacctcaaaagcaagtaagaacaatttccatagcagctactgaggttatacctgcttgtcactcttctctcattcccttctaactcttgtcagctttatntcctagacctgaacctgagctctgcatattgaacttctctaagcctacagcacaatggctccattcccacacataaagttgtccttgatgctatatctactttgcagtcatttaacctctctgaatttctattctatcaactataaaatatttttacttacagaacagacttttattatatatctaaatcttttaagaatgaagtcgaagtctaaattagaaaggaaacttgtactttaaaggggtgaaatcagatcatacccaagatcttttcagctctaataggcaatgatttcacgtaactcaggtttctcccggtccacatgccat

SEQ ID NO: 1594 - DNA, 661 bp, Homo sapiens
  LOC442077
  misc_feature [331]..[331]: Chromosome 3, SNP identification no. = rs17578042
  misc_feature [331]..[331]: allele = c, in linkage disequilibrium with rs17517792, respectively
  misc_feature [331]..[331]: n is a, t, c or g
gtatcatctgatatccatgtactctacccatgactaagtcattctgtattttattaggcttcagctaaattataaatgttgttattattactatctataataattataactaccatttgtgtgagaaactatatacatcatcttgttttttacccacaatagataatatgaggtatttcttgaattcatttacttatacataccatgttttatttggaaaaagaaagattttatgaccacttgtgaaaaaattatatgtgtaactttttaaaattgtaaatgaggacatttggggaaagagaaaataagtacagggaaacaggttgaagcncatttgaggccagtgcattaaaatgcatcctatgatatagataataaatgttgctcaaacaaactaaaagtctaacccaagaagaggagtcacaaagtcatatagttgacagagttcataaaatgaagtcatccaggcatgcagagaagcacaaatgactgtaccatgaaccacatcccaactctacctttataataaatatgattctttatgtgtgtttgtgtttttaatatcatccctcaatgtaggctaaattaatcattccaaaggtcagtcagcaaaagcaggtccctgcaggggtccaaaccctgtctccaggtacatcgctct

SEQ ID NO: 1595 - DNA, 661 bp, Homo sapiens
  LOC442077
  misc_feature [331]..[331]: Chromosome 3, SNP identification no. = rs17578259
  misc_feature [331]..[331]: allele = c, in linkage disequilibrium with rs17517792, respectively
  misc_feature [331]..[331]: n is a, t, c or g
tcctccttaggttcacgtttgttttgtaaaaaacaaaaacaactctgtaaacacaaagttattgggaggctgtcagcatgggcatgtattacagactttgatataacttccatgtttctttcatgtattaaaagggcattttagtccatgaaaaaaataggggaaagttttcaaaaccccaagcaaacatatttcttatatagactctgttactcacaatactggcagcaatattgcataaatacttggacattgcttgtgggacaatattattcccttttgaatgaaagctccccttagaatccatctttacttcctctgggcccttaanacatgagttttatatctctaataaagaattttgtttattccaccttataatgtggtcattggtttaaacttttatccctcccatgaaattgtcccgtgctaagagcaagtgccatattatctcctacctcacttagggtgatgcctttgaccagggagattctgagtaactttgttaaatgaaggaaagaatccaaaaatggacagctatgaattttccttccaaagcacatggggaaataagtgaaaagatccatattgagcttttaaatcactttgctggattgtgttacagtaactaagctgggcaataactaagtaacttgcattg

SEQ ID NO: 1596 - DNA, 661 bp, Homo sapiens
  LOC442077
  misc_feature [331]..[331]: Chromosome 3, SNP identification no. = rs13100362
  misc_feature [331]..[331]: allele = g, in linkage disequilibrium with rs17517792, respectively
  misc_feature [331]..[331]: n is a, t, c or g
aatactgtatactgaaaatttgctaaaagaatagactttaggtgcttttaccatatgcacatacacaaaaaggtatctatggaaggtgatggatagcataatttgcttgacagtagtaatcaaatagtatatatatacagtagtgtgtatatatatatatacacacacatagtgatatatatatgttgatatatatatatataatgtatatatcatgttgtacaccttaaatacatacaatttaataaaaagattacccggaagtaaaaggctgtcataggagcttaattagagtcccttgagaacaaggtctttttttttttaatttaantctccaattcccaatgcactgaagttttaaataaatgtttattgaccagaagaatgtacgtatttgtataagcattctggaatcaaataaattaacacaatgctgcttttattaatttttaaaaaagactgtggaattttgttaatttctgtgaaccccagtatcaagtttctatgatggccgctctggtctgtgccactttgaacattcagtgacattctcttcttttcctggctctgcttttcaaagcatgcttgaaagagtatggtggaaaaggacactaattcatactaaagagtaaaggatttatatggcttgctttcttatacc

SEQ ID NO: 1597 - DNA, 661 bp, Homo sapiens
  LOC442077
  misc_feature [331]..[331]: Chromosome 3, SNP identification no. = rs2068130
  misc_feature [331]..[331]: allele = t, in linkage disequilibrium with rs17517792, respectively
  misc_feature [331]..[331]: n is a, t, c or g
ctgagctaaaattcactatcaagttaatttttcaatgcacctttgttctgtaacaagaattttaaactcattgaactttataaggtcctaagaaaatgcttgggaattcagtaaagttggaaagtagttaaaggaataagatgtgatgaattcacctggaataaattcagaagttgaatatattagggatctccaagctgacgtcacgtgctattttttaatgtctgaatcgtcttaagaaatattactttagcatgttactgctgaaattaaccaaccaaatccaatgtcatcaaatatctattctcttagcccatgaataactatacgnaactttctgcaaactgttgtcagaaattgagcatgtatgacactacctattcttaagtgatacaattttaagtctaggcctgggttgatgaggaattggtaggctcccaagaaatggatatcttcaggtgaaactgtttggaaaaaaaaaatttcataacaagacctacagagaggatgggcaatagtttgtatgatgggatttcagcagtatgataaagaccttttgtaccatgaaatgtcttttgccttctaattactgactgatgtcaagcacacacttttagagacacatttgaaacttttttgttaaagcttttgtttctgttaa

SEQ ID NO: 1598 - DNA, 661 bp, Homo sapiens
  LOC442077
  misc_feature [331]..[331]: Chromosome 3, SNP identification no. = rs1561115
  misc_feature [331]..[331]: allele = a, in linkage disequilibrium with rs17517792, respectively
  misc_feature [331]..[331]: n is a, t, c or g
gcaagagaagcaggaagtcatttgctatgaccttaccttgctatagggtttgaccatatctagcaaaagtctttcatgtgccctgctccctgtgatccttatgataatcctggggaaagctatagagagttctattcccatttcaaaaaataggaaatcgaggctcagagaggtgactcaaggcctcagagctgtagagccaggactaacactcgactttgcttactccccatccagtggtctttctgctaccccaccctgggcttccatttatctcagagcagtgtgagtttctaccttcacgcttgccttgctctcctggtgagatggntcttggcctttgcacctggatttccagctgatacaggcacttgaagcttatttcattccctttgtcaacccatcatgtgggatccattcattcaactataagtatttatttagcatctactatgtgttaagctctgtgccctcattcatggggaaccaaagacccttaaactgcttatagtcaagtggaagaaaacattttatatataaaatttaatagataatatctgaagtttcctattaaagtcatttttaatgatcctctctcttgaaaggaaattgataaaggaattacctctaggttaaaaaaaaaaatatgtatccatacacc

SEQ ID NO: 1599 - DNA, 661 bp, Homo sapiens
  LOC442077
  misc_feature [331]..[331]: Chromosome 3, SNP identification no. = rs17015971
  misc_feature [331]..[331]: allele = t, in linkage disequilibrium with rs17517792, respectively
  misc_feature [331]..[331]: n is a, t, c or g
taaaattccctaagcatcatagcagtcaagggaaaaaggaaaaaacatttttgcaaggttctccccgtctaattgagacaactctctgtccttacgctatgtgctaagttagttcataactgagtgctactaaggtagctttatgtcttacataacacaggtttcataaatcattaccactttttaaagaaaccactgtgtcaggcccagtaccttgcctgaagcctgtaactaataataatcgtggtagtgattattcttagaagtttaataaataatcctcctttgtcatcatgtttttctcgctttcctagactgatacaagtactgncaaaattctgcactagcctaagacattggtgggtataagtctaatccccctaaaagtaatctgtcattatgaagatacaacttgtataatataccgtttctggcagtcttaaagagaagtcacttctcctcttccctctcccatctctttttaaccaaatgctgcttctaggagaacttgattgacacaagctctcaaacccgcatctttcagctgtcaatttagagatctacagtggaaagtgtgtgtttttagcttagaaactaagtggattccagagtgtcttctcatcttgagactgtgcatcctgtttgaacatttccaagtgta

SEQ ID NO: 1600 - DNA, 661 bp, Homo sapiens
  LOC442077
  misc_feature [331]..[331]: Chromosome 3, SNP identification no. = rs13096074
  misc_feature [331]..[331]: allele = a, in linkage disequilibrium with rs17517792, respectively
  misc_feature [331]..[331]: n is a, t, c or g
catcgaggggcagatatatgatgactgcaacctaaggcccaggaggcctatataattgagccctatctccttcttactatttaaagttgagctatttttaagctatcaaaaccagtgaccacctgcccctaaactcttctaagtttttctttcttattgctgatgttcttactcgtccaaggatgtttgactttcatttcttcgggtacgtaactgagtcacttggttctttcccaaagatttatattttaagagtcagtttcatagttgtcaaagtgcttgtggatttctatatgattcatagctgatataattctcaaatagattaaanaaacttacacaatgatgccactccaataaatagaagatagaaaaaaagatattaaaaacaaggctaatagagttggtataattgagtattatattcatctctgagaaagcaaaatgaaaaagatgatagatggaaggaatgaacactattctgtttagaaacttcacttctaatattctaattttttatgtagatccttgtataagagatgctaagaacttgatggactttgcctgcaatggtaataatactggaaatacagtaacattcttcatagtgattttttattctcaccttctgacaaagccaaggatcttaaaatattgtctg

SEQ ID NO: 1601 - DNA, 661 bp, Homo sapiens
  LOC442077
  misc_feature [331]..[331]: Chromosome 3, SNP identification no. = rs17015978
  misc_feature [331]..[331]: allele = t, in linkage disequilibrium with rs17517792, respectively
  misc_feature [331]..[331]: n is a, t, c or g
gctttatcgaggtgtaatttacaggcagtaaactttaccctgtgtgaataaattttgataaatctagataactatatataatcatgtaactaccacaattaagatattaagcagttccctcatgtcccttctcagtggatcccaccaactggcccccagccctaggcaaccactcagttcctttctgtcactctaatgttaccttttgtagaatgtcatacatatggaattatacttgtagtcttttgacttctttcatatggcatctgtgttgttgtatgtattcatattatgttcgcttttattgctgaacagtatttcattaggattnatttttatgaggaaaaggcttaatgaatattaagtgtagaggctagaagaaatatccatatgaatttgataacaagcataaaggtggcaatttgtattcttgcttgaatagagaacaaatgccttctattccaatatatttttttaatactttacaatgacaagcttgaaagctgagtgatggctggaaccatgctctctagcttcccattatgtctgcaatatctagcccagtacctgcacttactaggtgcttaataaatcattgttaaattagtgaatgaagacattaatagatgttcatcatccatgtacagtagtcatatgaaga

SEQ ID NO: 1602 - DNA, 661 bp, Homo sapiens
  LOC442077
  misc_feature [331]..[331]: Chromosome 3, SNP identification no. = rs7432016
  misc_feature [331]..[331]: allele = t, in linkage disequilibrium with rs17517792, respectively
  misc_feature [331]..[331]: n is a, t, c or g
ggagacatgcagggctgggacagcatgtttgccatttaagagatgttctttgatgggctcgtgggctcactgaggaggtaaatatgtttgctgaaacgatattgaaaaatgaaaagcttcaaataaattaataaaagtctgaatatttgagttaggaaatgttttcaaaagaatatgttatataataaaataaatcagtttgacatattaactaagtgtagtagatgtgtttatccattcaaaaggggaatttatttgatgttcattatgaaagcactacagaaatttcatactgttcataagtgttaacaggtctctttttttgctaatngtatcttcccccactctgccaaaattcacaattgagactatattacatatatatttccacaactattttttttatttctcgtaatacagatattctctatattggtacataaaattcctctagaaagtaattgttgacagcttgctgtggaagatgaagaaagtagctacaagttacccacttaatacttctccccattcccatcacaactatattatgtttgctgtattattacattggcattatgaatgtttatggcatttatactcttttattatcataattccaatagtggtttatcattaagtctctgctatatttacatgggaa

SEQ ID NO: 1603 - DNA, 661 bp, Homo sapiens
  LOC442077
  misc_feature [331]..[331]: Chromosome 3, SNP identification no. = rs10510558
  misc_feature [331]..[331]: allele = a, in linkage disequilibrium with rs17517792, respectively
  misc_feature [331]..[331]: n is a, t, c or g
ttcttttaaaaaccaatagacattgcctctatgtcttttgggagtcaatgtcgctatgtggaagtttgaggccagcctgagttttatatcttgcaggtgatttgacaattttttgtctcaatactctcacatttctatccctgaagttcaaaaacttcaccagaatatatgattctactgattataactattttttatgaataatagctgagccatttggatgtgcagatacagaacttcctttttcattggaaagttttcatctatggtgactttgagggttttttttttttttttttttggttgttcatttgtacagttctctcttttnaggatactctactctttgtttgccatatcttgtattactttcattgatttttagtttccctttgcatttatgttattttctcatgtctgtccttgtcattgcctctctttttagcagtatccattctactcccgtttctaatgtgttttccttttcttcagtaattttatggctttatcttctcggcatgatcagagtgccttttatctctttaattatctcttctcttctattatctcctgtattgattctttgatattcttcacacctactaaagattccatattttcttccatttttttaatcagagaggagtatttgtctgtagtc

SEQ ID NO: 1604 - DNA, 661 bp, Homo sapiens
  LOC442077
  misc_feature [331]..[331]: Chromosome 3, SNP identification no. = rs10510559
  misc_feature [331]..[331]: allele = t, in linkage disequilibrium with rs17517792, respectively
  misc_feature [331]..[331]: n is a, t, c or g
gattctactgattataactattttttatgaataatagctgagccatttggatgtgcagatacagaacttcctttttcattggaaagttttcatctatggtgactttgagggttttttttttttttttttttggttgttcatttgtacagttctctcttttaaggatactctactctttgtttgccatatcttgtattactttcattgatttttagtttccctttgcatttatgttattttctcatgtctgtccttgtcattgcctctctttttagcagtatccattctactcccgtttctaatgtgttttccttttcttcagtaattttanggctttatcttctcggcatgatcagagtgccttttatctctttaattatctcttctcttctattatctcctgtattgattctttgatattcttcacacctactaaagattccatattttcttccatttttttaatcagagaggagtatttgtctgtagtcctttttatttcccattccctgaaatttactgattgccttaactttttttggtgggagaccaggaaatgccatggtaaccatgtgcaggtggcatatttgatccttgctaagttctctatgtgtgactttttgtgtgctaaccctagtttaagcattaataaaagcacaca

SEQ ID NO: 1605 - DNA, 661 bp, Homo sapiens
  LOC442077
  misc_feature [331]..[331]: Chromosome 3, SNP identification no. = rs10510560
  misc_feature [331]..[331]: allele = g, in linkage disequilibrium with rs17517792, respectively
  misc_feature [331]..[331]: n is a, t, c or g
actttttgtgtgctaaccctagtttaagcattaataaaagcacacatgcaggaagtaagttgagagtagcatggatagtctctcaccagtgtaccttctgctctagatgaatgtttctctcctagaagagcaaatctttgaagtagtccttggagtgactcctagtgaagattcttcaccaagttgcaatttgtttctcttttttccttgtttctttgtttcgcctcctctacaatatgctctccttgttgcaggagccagaactctacaaggatgtttttgtctctgctgtcctatccactaactcagtcttcactcttctaagggatcnactattgtctgagtctttcaagacctgctaacttaccttcagaaagatctatatcctgccagataaatctgcgatgatttattgccagttgtttttacaccccaacttggagcaaatgttgctgtttcaggcaaaccatctttttagtccattatttgtagttgtcattgtttcttagtttgattataggttatattttctattctattttttattccttttattcacttctacgcattttaagaaagataatatacataactttattatcttttaccatatgaatttctttctgaaggtattcaaaaaaacaaatatttctaaattgaa

SEQ ID NO: 1606 - DNA, 661 bp, Homo sapiens
  LOC442077
  misc_feature [331]..[331]: Chromosome 3, SNP identification no. = rs13092896
  misc_feature [331]..[331]: allele = a, in linkage disequilibrium with rs17517792, respectively
  misc_feature [331]..[331]: n is a, t, c or g
agcatgaaacccatataagctataggggtgttgttgttgttgttgtaggtgccctttatttgggtaagagaatttattattactggtttgccaggcgtttttgtttggttgttgtttttttttttttaatcatgaatggatgttgaattttgtctaatagtttttctatatctattgagaagatcatatggttcatcttccttaatctgttaatgccatcattaacttcattgatttttgaatgttgagctatccttgtgtccccagaataaactcccaattttctgatatattattctttttacattcaatttactaatattttgttggngattttgaaggctattcatgacaaatagtggtctgcagctctcttgtaatatctttgtcttgttttgctttagggtaatgttggcgtcattaacagaattgagaaatattactttctccttaattttctgaatgagattatgtggaattgctattaattctttcttaaatattttctagaatttaccagggaaacaatctaggtttggagttttctttgttgaaggtttttaactatgtattcaatttatttaatatatgtagactatccaagttacacatttcttcttgagtgacttttgttagtctgtatctttaaaggaattggtcc

SEQ ID NO: 1607 - DNA, 661 bp, Homo sapiens
  LOC442077
  misc_feature [331]..[331]: Chromosome 3, SNP identification no. = rs7427426
  misc_feature [331]..[331]: allele = c, in linkage disequilibrium with rs17517792, respectively
  misc_feature [331]..[331]: n is a, t, c or g
tggaaatgcagaaatcacccgccttctgcgttggcctggctgggagctgcagatgggagctgttcctatttggccatcttgcccgggaatcattttatgtcttaacatatctattctgaagaatgttccaagtactgattagagggaatgtgtatactgtagctgttgggtgaaatgttctgtaaattaatgttagatccattagtctaaagtgcagtttaaatctagtatttctttgttagttttctgtctagatgatctgcttaatgctgagagtggagtgttgaagtccccaactattattgtattggaattcctcttcctttaaatntaatatttgttttatgtatctggatgctctggtgtcggatgaatatatggttcaggatttttatttcctcttgctggactgatccttttatcatgatataatgactttttgtgtctctttgaactgtttttgattttaatgtctgttttatgaagtatagctactcctgctcatttgtggttttcatattcatccaatatcttttttcatccctttactttcaatctatatgtctttaaggtgaggtgagtttcttgtaagcagcatataggtggatcatgtttttaaaattcatttagccactctatcctttaagtgaaaagtttaatc

SEQ ID NO: 1608 - DNA, 661 bp, Homo sapiens
  LOC442077
  misc_feature [331]..[331]: Chromosome 3, SNP identification no. = rs1601161
  misc_feature [331]..[331]: allele = a, in linkage disequilibrium with rs17517792, respectively
  misc_feature [331]..[331]: n is a, t, c or g
agctactcctgctcatttgtggttttcatattcatccaatatcttttttcatccctttactttcaatctatatgtctttaaggtgaggtgagtttcttgtaagcagcatataggtggatcatgtttttaaaattcatttagccactctatcctttaagtgaaaagtttaatctgtttacattcaagattattattgatatgggagggcttactcctattattttattaattgagctattgttattttgaatattctttgtttctttctctcctgtttatcattgtgttttgttttctgtagttgtaaccattggaccctttcctttccttntggtgtgtttgctctaccagtgttttttatacttttgtgagttttcatgatggtagatagtatctttttgtttccaggtgtaggactcccttaaagcattttttacaggacaatactagtggtgatgaattccttcagcttttgcttgtttgagaaatactttatttgtcctccttttataaaggataattttgctggatccttggctggcaattttttctttcagtatttaaaatgtatcattctgttatctcctggcttgtaagatgtctactgcttatatgtctactgttagtctggttggggttcccttataagtcattagattct

SEQ ID NO: 1609 - DNA, 661 bp, Homo sapiens
  LOC442077
  misc_feature [331]..[331]: Chromosome 3, SNP identification no. = rs1992060
  misc_feature [331]..[331]: allele = a, in linkage disequilibrium with rs17517792, respectively
  misc_feature [331]..[331]: n is a, t, c or g
gaatagtaaaattttcttgttgatgctggttatgtaaaactattcttttaagataggcaaaatacggatgtacaactcagccctcctttccttcaggttttgatagagaatagaataaaaaaacacatgtgtatcaaagtgtcagctttgttagcaattacaagtacctattttccacccaaatccagaactctttggtagtactagtagttgacaggactagaaagcagattaaaaattaggcaaatgggataattaaaccttctatcatctacctcccacatgtaatcaagatttgtgaatcctagtgcctatgaagacagttcagctnaacttacatacttagtcacagacacataaattggtacagagagggagagagtgcatattaccctccccttcatagagactctgctcagttgggctcaacaaatgggacctagaagctgaagagaagggaaagtaaaagccacggtgccagataaaagaagatccataagtcatgactcacactttgtgtgttgggctttcatcaattagactggatgctactgttctcctggagaagagttaaaaggggatatagataaatttgaagcagtccttccacaaaaaaatttattagaagtaataaatatgttcagcaaggtggcagaataca

SEQ ID NO: 1610 - DNA, 661 bp, Homo sapiens
  LOC442077
  misc_feature [331]..[331]: Chromosome 3, SNP identification no. = rs1992059
  misc_feature [331]..[331]: allele = a, in linkage disequilibrium with rs17517792, respectively
  misc_feature [331]..[331]: n is a, t, c or g
ttgatgatgttcaatgagaagacgctgagacagaactccataaactatccttcacgacctctaaaaaatatgctgtgccacctcttatcttcacattcttggatattcttattttttttttccatactttaacatctttcatcattatacacgtttgccaaagaactctatatgtagccaaattggtttcttgagtttcctttatcttttctgctccactgattacgtagaatttcatttatgacacccttccatcctttatgacaagactgtcctttgagttttggtcatacatttctacttatatttgctcaaataaaaattctgaacncatggttatacgtttgattatgggctactttgcagcacagggttttgttttcataagaatttttaaaacaacatggacatcctttaaaggatctctctcttcaatcaatttcttcttatttatttaactacttcttaatgcttatatatgtttcccttattgcttctcttgcattctaggacattatgtcaacaagagtgaaagaataaaggtaaatagattttctagattgagggagcaatatgagaaaaaggagataagtaaaggtaacagtgtgttcttcagattcttcacatatgtatgtttaattcctttctctgatggagatta

SEQ ID NO: 1611 - DNA, 661 bp, Homo sapiens
  LOC442077
  misc_feature [331]..[331]: Chromosome 3, SNP identification no. = rs13082318
  misc_feature [331]..[331]: allele = c, in linkage disequilibrium with rs17517792, respectively
  misc_feature [331]..[331]: n is a, t, c or g
cagaatttttatttgagcaaatataagtagaaatgtatgaccaaaactcaaaggacagtcttgtcataaaggatggaagggtgtcataaatgaaattctacgtaatcagtggagcagaaaagataaaggaaactcaagaaaccaatttggctacatatagagttctttggcaaacgtgtataatgatgaaagatgttaaagtatggaaaaaaaaaataagaatatccaagaatgtgaagataagaggtggcacagcatattttttagaggtcgtgaaggatagtttatggagttctgtctcagcgtcttctcattgaacatcatcaagaanttggaagagaacattagctttgtgcttgacatgcttgcccaaaatatcatacgataaggactatcctaaaagctcctgacagcctcagaaaagggttagattttaccaagggaaatgtaagctcatcaatgtagagttatgcacacatttaaagaacatctgcccctgaatgaaatagggaatgaacttaccagcaacacatatgatggttgacagtaagttcagcatgactcagtaatgtggtatgtctgcttggtgacttaatttgatgcttgaatgcagatcaaagattgtgctgatgaaccacacttggaggagtgtgctccattc

SEQ ID NO: 1612 - DNA, 661 bp, Homo sapiens
  LOC442077
  misc_feature [331]..[331]: Chromosome 3, SNP identification no. = rs13087573
  misc_feature [331]..[331]: allele = a, in linkage disequilibrium with rs17517792, respectively
  misc_feature [331]..[331]: n is a, t, c or g
ttccgggtaccacatcttaaggggcatgttggccaactggactgtgtccagcacagaggagtgagagtagaatgaaaagggaattgcaaacagccttgcagaaaaacacgtatgaacagggcatttagcctagagaagaggagatactcatagagatgtaataattgtcttcagattctggaagggctgatctctggaaaagtgattatgattgatctctgtgtctaggagaagaaaaccaggacagaagagttggaactagggtggggcaggttttggatgaataatgagatataacatctaaaatagtccagatatggagtcagtttcntcaggagatctgtcttgttaatgatgtttaaatggaaagccctgtgtccaagttcgtccaagtcctgcggtctacctgatgcctccgctccttcctaggctctatctgctctctatttacagagtcttccaagacctcccttttccactcaacttctcttcatctattttattccccttctatctcttccaggctccttatttcttcccaaaccttctaagccctctttgttacctagtcctttaaaacaccccaaataccatccgacattctcagcctgaaaaactcaacctttctcatcaaagcacaaatcatgtgtctactcatgaa

SEQ ID NO: 1613 - DNA, 661 bp, Homo sapiens
  LOC442077
  misc_feature [331]..[331]: Chromosome 3, SNP identification no. = rs17016060
  misc_feature [331]..[331]: allele = g, in linkage disequilibrium with rs17517792, respectively
  misc_feature [331]..[331]: n is a, t, c or g
tctaaagatgatttccatatggggagctccaaaaacatttaaaggaatggtaaacttattacacaagtagctaatcaccccaaagtgatgattttgaatggtcagcactcttctgtgatagttgtatgttgttttatggtcgcaattgatattgtaaagtaggcagaatgcaggattcctcagggaaatgttaatcagaatagaagctgctgggaggtttgcttgatgaaatgattctgataacatgatctagcaagggtaaagaattagtcaacaccttgaaattctgactgtttgtggtcctcagcccaggggagtaccaaccctgaantgggcatttggaatgtatagtggttttggttgtcatggtgtcttggtctgttttctgttgctgtaataaaatacttaagactgaataatttataaaggaaagaggttgatttagttcatggttctggaggctgggaagtctaagatgagcagctgcatctcctggcttctggagagggctttatgctacctcataacacaggagaagcagaaggttaagcagcaggcacctgcaaaagacaccaaacaggagcggcagcctcactttaacacaactctctcttgcaataattaattcagtcttaatagaggtccctgaatgtattctcaa

SEQ ID NO: 1614 - DNA, 661 bp, Homo sapiens
  LOC442077
  misc_feature [331]..[331]: Chromosome 3, SNP identification no. = rs13074533
  misc_feature [331]..[331]: allele = a, in linkage disequilibrium with rs17517792, respectively
  misc_feature [331]..[331]: n is a, t, c or g
tagtgctcagatgagagatgtcatctgcagccgcctgtgttcagttgaagattaactttgctaatctcaatattcataccacttaattcagcctgatgtcacccattcagcctgtcactggggctgggtgaccttaggcaagttgattaactttgctgattcttgttttatctgtttaattagtatggtggcagaacgtactcattggctcacgtatggagaaaattaaataaaataggacatgagacagcaaagcttagtagttaggaaaatagcctctggagaatgttggccctaatactcactgagtaattttggacaagtcacttancctatgtttctatttctttatctgtaaaatgaggctaagagtagtatctacctcctagggttgttgtgggaattaaatgagttaaacctttaaaaacactgggtttctggtagggagtacatgttctacatgtgttacttaaataaattgtaatatttagcacataatgaatactcaagaagtgctagttgctattgtcatcattattgtagttagatgatggtcatcatgatcaccaccataattgtcatcacatcatctaattattctctttctggaccctgctacatttgaccctatttatccttcccttcttcttgaaactctcta

SEQ ID NO: 1615 - DNA, 661 bp, Homo sapiens
  LOC442077
  misc_feature [331]..[331]: Chromosome 3, SNP identification no. = rs10510561
  misc_feature [331]..[331]: allele = a, in linkage disequilibrium with rs17517792, respectively
  misc_feature [331]..[331]: n is a, t, c or g
ttccacgttcatggtccccttccttcatcttcaagtccagcaatggctggttgactccttctcacactatatcaatctgatctattgttctgctttcctctttcacttttgaagacgcttgtgtttaccttgtgcccacctgggaaatccaggagaatcttcctatcttaaggtcagccggttagcaagcttaattcctatatcctataatgaagcatgtttatagtttttaggaggtaggacttggacatctttggagaggatgtcattctgcctgtcacaatatctctcagtgttcctataacattctgtgcttacctctatcattccncattagtaaatattgtcataagcatttgtatgttctctctctgacttaattttgactgtcttaaggtctttctcatttttgaatccctgccttaagagtaaatagtagactttctataatataggtaattcaaatgtctagtgataacctgggacccctctagggatcagcacagaagggggattaacctgtgcccagtaatttgagttatgcatgttaatgattccatttctatgaacgtttgtcatccaatgtgatggtagtcatgtaagttgcactggtctgcttgctctagccgataataaaattatatattgtaataaaattaca

SEQ ID NO: 1616 - DNA, 661 bp, Homo sapiens
  LOC442077
  misc_feature [331]..[331]: Chromosome 3, SNP identification no. = rs17016078
  misc_feature [331]..[331]: allele = t, in linkage disequilibrium with rs17517792, respectively
  misc_feature [331]..[331]: n is a, t, c or g
ccgataataaaattatatattgtaataaaattacatattgtatatcacttatcagacctttttcttggtaccttcatgtgttaattcatttagtctttacaacagtcttctgctgtaagaacaattagtattgcccattttatgaatatggaaactgtggcatcgggcattaaataacttgcctagtgtcagacagcttagtatacagtaactctgagttaactagtctattttgccaacccaaacaatcccttctgtgaccagtctacttaaatgagaggccactatagttaatttgaaatgttgtttatttctcatgaaactcaatagnctttagcctcatgggtttaagaagagaactgagtgaattagctgactccatctgagatttttcagccagccaacctctaacacacacaggctatgggcctcaagtgtaaaaaatgagccatgtattgtctttcaaagccaccttggtctttgggaaaatccttggtcctaaccatgagtccatggatgatcattttgtcagtttgatgagagtcagtgctaggggaaggccagtgtgccagggaggaaagatggagggacgaagcacattaaatctgcagttgcttacagcatctgcctttgatgctgtctctgggggacacactgatcg

SEQ ID NO: 1617 - DNA, 661 bp, Homo sapiens
  LOC442077
  misc_feature [331]..[331]: Chromosome 3, SNP identification no. = rs13093059
  misc_feature [331]..[331]: allele = c, in linkage disequilibrium with rs17517792, respectively
  misc_feature [331]..[331]: n is a, t, c or g
gccagtgtgccagggaggaaagatggagggacgaagcacattaaatctgcagttgcttacagcatctgcctttgatgctgtctctgggggacacactgatcgcctcctcccagtcaacaaattctgtgtcttctcagcagttctgaagggggagagccctttaaggcattttgtactgacaagcgtatttctcttagagctctagaatgtaatagaagccatcaaaggcaagggatatcaggaggttgttttgcacaatggcaacagaattcatacgttttcagacgactcccatgctcatatcagcagttcaattagtggcagggtaaantaataatatatatttcccacttggggcattgttgatttttttttttaaaaaaaggttgattctgttttatcacaaacaactttgtttagaaagccaatgatatttttcactgaattcaaagctcttgctaaactgtaacctgaatggtttgtaatctaaggaggagaggaagaaagtgtgaacaacgttaaatggataccgtcatcccagtatgccttcaagaaccctggggtgaaaagggaaactggtttttctccacttaatagacatgatgggcaagatctactatttttttttatataaggcaaaggctaagacccagtctccagc

SEQ ID NO: 1618 - DNA, 661 bp, Homo sapiens
  LOC442077
  misc_feature [331]..[331]: Chromosome 3, SNP identification no. = rs13068143
  misc_feature [331]..[331]: allele = c, in linkage disequilibrium with rs17517792, respectively
  misc_feature [331]..[331]: n is a, t, c or g
actgaattggaaatacggactttaagaaggtgattaaggttgagtgaggtcataaggctggagacttatctgatagaactggtgtccttttaaaagagacagagacaccagaacttgctttctctccctgccatataaggaaacagtgagcaggcagccctctgcaagccaggagaagagcctcaccagaatctgaccatgctggtctccgattgcagaattctagcctcctgaaaaatgagaaatacatttctattgtttaagcccccaggctatgctatcttgatgtggcagcccaagcagactaacacaatcaccaacttggaaatantgagcaaccacaaagctgcctgtagttcaattttccccctttctaaatgctctgtgattctgaccccttccctgaagctctttaggcataaatatgtaagaaaacttcccacaagtgatctgatacaacagaggccttagctagctacagcagattgtaccgagtgttctacagggagatattctgaagacagaagactaagtggactttgcttctgtgtttactaagcaccttcattttaaccagactttatttagagagtatatcattttgagcagctagtatacaaggcattgtaaggaaatggtgggaacacagcagacaatggaa

SEQ ID NO: 1619 - DNA, 661 bp, Homo sapiens
  LOC442077
  misc_feature [331]..[331]: Chromosome 3, SNP identification no. = rs13091754
  misc_feature [331]..[331]: allele = t, in linkage disequilibrium with rs17517792, respectively
  misc_feature [331]..[331]: n is a, t, c or g
agcagattgtaccgagtgttctacagggagatattctgaagacagaagactaagtggactttgcttctgtgtttactaagcaccttcattttaaccagactttatttagagagtatatcattttgagcagctagtatacaaggcattgtaaggaaatggtgggaacacagcagacaatggaaagcctttaaatgttaaagcagtgaaggcctctcttagaggccaaataatgcccccagctccactctggccttccgcaacccccgtctttcacctcacattaccgctgcctattccttatccagatgtcctgaagtctctattttttagncttttctgagtttaaattgttttcctaactctaccacttacttctttgatctgtctttatcacctcttgttcagtgtcctcttgtttttagaataactttctggcttgagagtggtgtttggatgctggaatcctacagaaccttctcttccccatgcttgagtgaggttatttttattctgtagcaaatgtgccaagtatttttagtgtttggatattattctgaaatagtcatttaagttactcaaatttgggagctatctggaagttcattttatgtgactggagggctataatttatggttactccagtatttggttaaatataca

SEQ ID NO: 1620 - DNA, 661 bp, Homo sapiens
  LOC442077
  misc_feature [331]..[331]: Chromosome 3, SNP identification no. = rs17016117
  misc_feature [331]..[331]: allele = g, in linkage disequilibrium with rs17517792, respectively
  misc_feature [331]..[331]: n is a, t, c or g
taggaggagagttatatatttcttaagtcatcagtggttatagtgtcaaatttcttggaacgtagaatagtagagatttgtaaataaaattttataatcttcccaaacaaaaaaagtgcttgaggtcacagtctaacatgaacgacatcaaccttcctcttttaatcttttaacagctctcagcggtagatttctccatctccattagagagcatttggtgactaccactgatactttttttctttttttaggaccaggtagatccaccattgaagggctggttcattatttgatgtagaagaaatgaatgttaatgttggacctattcangtgtggctaaatgcacatctgtaatctattttgtgttcatggcacttctgattcacagtcccccagaaaatagaaaaaaaaaaaaagtcaagatgccatgtggcctacaaaagtggatctgtgtttttcatattattttctccaactcagattttagatatggtgtatttcgaccctggtcctcaccagagtttagcatttgatacattccattgttatcatggagaattcaaggaatggaagaatttattaatgttagcccctcttttactctgttccactcactctgccttccttgttgtacaaacattcctgggaggctcctgcctc

SEQ ID NO: 1621 - DNA, 661 bp, Homo sapiens
  LOC442077
  misc_feature [331]..[331]: Chromosome 3, SNP identification no. = rs17016120
  misc_feature [331]..[331]: allele = g, in linkage disequilibrium with rs17517792, respectively
  misc_feature [331]..[331]: n is a, t, c or g
caggtagatccaccattgaagggctggttcattatttgatgtagaagaaatgaatgttaatgttggacctattcaggtgtggctaaatgcacatctgtaatctattttgtgttcatggcacttctgattcacagtcccccagaaaatagaaaaaaaaaaaaagtcaagatgccatgtggcctacaaaagtggatctgtgtttttcatattattttctccaactcagattttagatatggtgtatttcgaccctggtcctcaccagagtttagcatttgatacattccattgttatcatggagaattcaaggaatggaagaatttattaatnttagcccctcttttactctgttccactcactctgccttccttgttgtacaaacattcctgggaggctcctgcctcagcacctttgcactggttgttcccttagtctgagatccacttttacccattgttcactttctcatttcattttggtttctctcaaacattgtctcattatagaaaccttgcctgacaactctaacatgtcagcctctctgcgcttcttaggacctttctctcctcttacctgctttttcttcttccccactatgatttggtatcaaaatatttgtgcattttgcaattcagtgtttacagcctgtcaaaccaccc

SEQ ID NO: 1622 - DNA, 661 bp, Homo sapiens
  LOC442077
  misc_feature [331]..[331]: Chromosome 3, SNP identification no. = rs13059799
  misc_feature [331]..[331]: allele = c, in linkage disequilibrium with rs17517792, respectively
  misc_feature [331]..[331]: n is a, t, c or g
gtatgtacaacagaatattattttgctttaaaaaggaatgaaattcagcgacatactacaatatggttgaaccttaaggacattaagtgaaattaagccagacacaaaaagacaaatagtatgtaattccacttatatgaggtacctaaagtagtcaaattcatagagatctgtacacctaaaaattgttaaaatggtaaaaatgttatgcatattttaccacaataaaaaagatatatttttaaaacctgtcacattcgaagcaaatggaatgtgtacatgtttgtttaaattccctgtagacctaaaaaagaaggtttatatgcaaaanttaatggggagagaataagccgtgttatcccagcctatcactgataattaatacctgggtaatattatttgtttacaaagcacacatatcaccttatgatgttctcacggtatcccttgaagtagtgctatttttatccctctagtgcagatgaggaaaatggatctcagaaaaattaagtggtgtggtgtttaaggttgtaacaggttggtgcaaaggtaattgcggtttttgccattaaaagcaatgggcattacaagcaatggcaaaaaccgcaaatactttcgccccaatctaatattactggtaagttttgtgtcggggcttaag

SEQ ID NO: 1623 - DNA, 661 bp, Homo sapiens
  LOC442077
  misc_feature [331]..[331]: Chromosome 3, SNP identification no. = rs13082440
  misc_feature [331]..[331]: allele = t, in linkage disequilibrium with rs17517792, respectively
  misc_feature [331]..[331]: n is a, t, c or g
tggttgaaccttaaggacattaagtgaaattaagccagacacaaaaagacaaatagtatgtaattccacttatatgaggtacctaaagtagtcaaattcatagagatctgtacacctaaaaattgttaaaatggtaaaaatgttatgcatattttaccacaataaaaaagatatatttttaaaacctgtcacattcgaagcaaatggaatgtgtacatgtttgtttaaattccctgtagacctaaaaaagaaggtttatatgcaaaacttaatggggagagaataagccgtgttatcccagcctatcactgataattaatacctgggtaanattatttgtttacaaagcacacatatcaccttatgatgttctcacggtatcccttgaagtagtgctatttttatccctctagtgcagatgaggaaaatggatctcagaaaaattaagtggtgtggtgtttaaggttgtaacaggttggtgcaaaggtaattgcggtttttgccattaaaagcaatgggcattacaagcaatggcaaaaaccgcaaatactttcgccccaatctaatattactggtaagttttgtgtcggggcttaagcccccagtcttcaggcatttattcctgtgttctctccttgaaatcataccatcccttgaccag

SEQ ID NO: 1624 - DNA, 661 bp, Homo sapiens
  LOC442077
  misc_feature [331]..[331]: Chromosome 3, SNP identification no. = rs17016133
  misc_feature [331]..[331]: allele = t, in linkage disequilibrium with rs17517792, respectively
  misc_feature [331]..[331]: n is a, t, c or g
ccatataggataagcataccaatgtctcaagaatcgcgtctcaaatgcaaggcctacacaagagtatttgtttcttgagctgaaagaagtgaccagaaaatttagtcacgttccttggccaaaggcatctacattaggaaaattaggtgctttctgcgtttctgggagaatgagttgatattggcatacaactaactttcttttggaagagtttccatggaaaggtggtcattagatgaaatggtagttccgtctttcctgcaacataactcttgggagcatctgagaggaaggttaggagatacttgctattcccaaaactcattctcancagaaactttaatattccaaggtaagaattttcttattcagtaatcttgtttataaaagaaaaccaaatacactaaagcactttaaaaaaatcaatgctatctgtacctttattgtcaaaaaccattttctagtaaggcttttttaaaatgttcaatcttgctgaataagctaaaggcatgtatagagtaagtaggcaacagcatagtttaaaattaaaatacttatctttgtcctttacaaattctttgtctcctgcctggttgggagagttctgagaacttccttgcattgtgtgatacagcggtcagtaatcacatgtggttattta

SEQ ID NO: 1625 - DNA, 661 bp, Homo sapiens
  LOC442077
  misc_feature [331]..[331]: Chromosome 3, SNP identification no. = rs13084418
  misc_feature [331]..[331]: allele = g, in linkage disequilibrium with rs17517792, respectively
  misc_feature [331]..[331]: n is a, t, c or g
tcgggactgctgagtaaaaagatgggaaaactagtacaaatttctggagcctggctccctggaaaggggacctaagacacatctcatgtgtatttgctgtaataatgctgtgaaacaacccccaaatctcattagtttataataacaactattttttttgtaggtcagcctggctctgcagggctttggagggcttagtgggaatcagctggacttgactttcttccgcatgtccccttattctgggaccagcagctgcctctttatatagtcttttcattatagcggcaaaaatacaggaaggggagaggaaatacataaggcatcttanggctcagggtcgggactggcagactgacatttctacccatgttcctttggccaaaggaagtcacatcaccaagctcaacagcaatggggtagggaaatatccttgcccacagtggagggaaggaaatggtgtgagccagtaatcaactgtttatgctatgtaaggatacttagctgatcagcatttgcttggaagctcaaaaatactgttttttaaaaaagatcttcgtcttctcttggccccatgctcttatgtgctgccccatcatgctatcagaggtcactgcacagtctcagtcatagtggtgaccacatcatacccacagactct

SEQ ID NO: 1626 - DNA, 661 bp, Homo sapiens
  LOC442077
  misc_feature [331]..[331]: Chromosome 3, SNP identification no. = rs13084608
  misc_feature [331]..[331]: allele = g, in linkage disequilibrium with rs17517792, respectively
  misc_feature [331]..[331]: n is a, t, c or g
tttgctgtaataatgctgtgaaacaacccccaaatctcattagtttataataacaactattttttttgtaggtcagcctggctctgcagggctttggagggcttagtgggaatcagctggacttgactttcttccgcatgtccccttattctgggaccagcagctgcctctttatatagtcttttcattatagcggcaaaaatacaggaaggggagaggaaatacataaggcatcttagggctcagggtcgggactggcagactgacatttctacccatgttcctttggccaaaggaagtcacatcaccaagctcaacagcaatggggtanggaaatatccttgcccacagtggagggaaggaaatggtgtgagccagtaatcaactgtttatgctatgtaaggatacttagctgatcagcatttgcttggaagctcaaaaatactgttttttaaaaaagatcttcgtcttctcttggccccatgctcttatgtgctgccccatcatgctatcagaggtcactgcacagtctcagtcatagtggtgaccacatcatacccacagactctccgtgagcacctcttaacccaagtctggctaggcgcggtggctcacgcctttaatcccaacactttgggaggtcaaggcagaaggattgctt

SEQ ID NO: 1627 - DNA, 661 bp, Homo sapiens
  LOC442077
  misc_feature [331]..[331]: Chromosome 3, SNP identification no. = rs17016141
  misc_feature [331]..[331]: allele = t, in linkage disequilibrium with rs17517792, respectively
  misc_feature [331]..[331]: n is a, t, c or g
caagtaatggaatattcacaacatcaaaatgcagaaggttacttgtcttgtccagggacatattattgtaaaatcaacactgaaacttggatcttctgccttcaaacttccttctactcaccacacagcttcttgggtgcatggccacttcccccactgcatcataaatgccttgagaacaaaggatacctcttgtcctgttttctttttctctcttgcacccactgctgcatcttaagcataatgggtgcttaatgtagttgagataattgtgtttctttatcatttggttacaattttaataggttgttctaggagttcagatgcttcnagggaaagaaagggactcttgattgagaaaagttcttaagggatcttttaattgtacaaaaatagattccaaagcaaatctagggaagagatagttactactgatctattaaaaaaaaaaaaagttaaatgtttttctctgacagcttgggagaaagattgggaccaaaagggagaaaatggtaaagaaagttagagtggttttgagaaatatggtggatggccagagccaatgaagaatgagaaggtcttggtggtgaggatggttgaggactagtgatatattagcttttaggcatttcctcctctgctctgtgttgtaatatcactg

SEQ ID NO: 1628 - DNA, 661 bp, Homo sapiens
  LOC442077
  misc_feature [331]..[331]: Chromosome 3, SNP identification no. = rs1436239
  misc_feature [331]..[331]: allele = g, in linkage disequilibrium with rs17517792, respectively
  misc_feature [331]..[331]: n is a, t, c or g
ttaactggcccttaccttcagggtctcttacaggttgtagtcaggtattgattaggtttagtcatctacaggcctgagtggggaaggtccactttcaagtccaagctgtttctttgcaggattcagttcctcatgagctgttagatggagggtcttagttcctctactggtgttggccaaaggccaaactcatttccatgtgggcttctccagcatggcagtttacttcatcaatgcagcaaaatgagaaggagggaggaatgaagggaaggagagagattgccagcaggagaaaagtcatagtcttttataacctatgcttggaaatganctaccatcacttttgccttatgctatttgttaggagaaagtcactaggtccactccatgtgtacaaagggaagagattattcaagggagtgaatgccaggaggtggggatcactgagcgctactagagaaggctgcctgccccactcatccaaatgcccaaaagtagagttgcttagcgacatgtctgtaatcctgtctgggccctaactgaatgccattcacaaactgcccccttagaagggcctgtggctgttcctgatgatggaataatccagctcagtacagcagccccacagcagatgaccgtattgatctgcagcttaaaattt

SEQ ID NO: 1629 - DNA, 661 bp, Homo sapiens
  misc_feature [331]..[331]: Chromosome 3, SNP identification no. = rs4955238
  misc_feature [331]..[331]: allele = a, in linkage disequilibrium with rs6762236, respectively
  misc_feature [331]..[331]: n is a, t, c or g
tagtcaatgaaataatgtcttcattgtttggtgggtaaaagacacttaccctagaatgccattttagtctgttatcaaaagtgagtttcagtaaggcaataagacataaacagagagttttctgaaaattactgaatggtgtgctctaattaaacacagagtaatccaagaaagaggagtacagcgggtctaagaaggaggcctggagggcaaatagtgcaggctgacagatggatggctctgggaaggaagtctccaggaaaaaatgaaatcaataaattacctaataaatttgtatttgatcatttgtgaacaactactagcagacatntactagatccagtgaaaacaagtagggaaaaataacctgtaaggataaaaagatgaatagtatatgggtaaaaaatgcaaaggcaatcatcaagtcggcgggggtgtggggagagcacactagagaaaatttaattatagaacatgatctggcactatagctaaatatattttctttctttttttccttttttttttttttttttttttagttggagtcttgctctgtcacccaggctggagtgtaatggtgcaatcttggctcactgcaacctctgcctcctgggttcaagtgattctcctgcctcagcctcccaagtagctggaacta

SEQ ID NO: 1630 - DNA, 661 bp, Homo sapiens
  misc_feature [331]..[331]: Chromosome 3, SNP identification no. = rs7632997
  misc_feature [331]..[331]: allele = g, in linkage disequilibrium with rs6762236, respectively
  misc_feature [331]..[331]: n is a, t, c or g
gaaaccctgcgcctggggcatgactgtcctcagcgtttcttctgggcagcagatgcagtttgtcagtttgccaacatcctgctttcatgagaagagtttgctgtttactcatatagcctccagtggtaaactgagtttatcacgaccctcattcttttggcctccaacatctccctctttttgtttttgcattaactgaataagatctgtccctatgttatgggggttgatgtcagcgtgactccggtcagtccttgctctgtcttctcgcattcagattcaactggctcatggctcatactgggggaaccaggcctgtgcttgggatccntaggtccctccagtctaccgttccatggtcgcacacaccttgagggtacccacaaggtttgtccgtctcctataaaaactcaagcatacccttgtccccatgttagtaaatccactgaaaactttccactgataatgagagacaggctctttctgattaacagaaggcgcagagaaagcaaatcgaggcctatccttcttgtgcaatagtataacaacaacaaaaaaaaatccttaaaatctatcactatgagaagcctgtccctcggaatggccgcgggggatggcagaccctgctgcaatgcacccactggtttaatctgtgcattaa

SEQ ID NO: 1631 - DNA, 661 bp, Homo sapiens
  misc_feature [331]..[331]: Chromosome 3, SNP identification no. = rs6798586
  misc_feature [331]..[331]: allele = t, in linkage disequilibrium with rs6762236, respectively
  misc_feature [331]..[331]: n is a, t, c or g
tacaaaacttagtcaggcgtggtgatgcccacctgtaatcccagctactagcgaggctgaggcaggagaaatgcttggacctgggaggtggaggttgcagtgagccaagattgcgccactgcactccagcctaggtgataaagcaagactccttctcaaaaaaaaaaaaaaaaaaaaaagaaaagaaaagagaaagaaagtgcagctcgctgccagtgctcatttaattttacataaacatgctcttagagactgaagcaaatctgactgattttcaatgcgaatataaaatatgaaaactgttcttggagttatttctaaacagagctancatcagagttgtctgaatcaccagaatcatctatttcagaaaaattgaattcatcaaatgaatcttcagccaacaactctttgagaacaatgttaacatcacgtataggaatgctacattttttaggatttgccaccttcagtgattgagaaatattatattttgtaaatggaaataccactactaaaaacgtaatgctataaatattagaattatgtcttttgtttccaaagttgatatactagagcaatgcaaaaataataatacaagcaagatattttgtggcatagttatcttagggcaaatgctgcagtggcaagcactactagc

SEQ ID NO: 1632 - DNA, 661 bp, Homo sapiens
  misc_feature [331]..[331]: Chromosome 3, SNP identification no. = rs4955240
  misc_feature [331]..[331]: allele = c, in linkage disequilibrium with rs6762236, respectively
  misc_feature [331]..[331]: n is a, t, c or g
cactactagcaagtattcttggggcaaacgggaaaaggactaaatgtataatggtattttctcatatgcaggcatacacaaaaaacaaataatagtggttacctgagaaatggagttgggtaggaattggatagaggacaagaggaagagaactgctctttactgtacatctttttatatgttccattttagaacaatgtgatttcattacttattcagacactttaatttaaaaaaataaatagaagcataaggacattatgtagaaatatggaagtaaataccagaagaaatattgaaagtggttgtttctaaggagtagaatctgganagagggttgctgctttccatttagtatttactatttccacttagatttagtagttggtactagatcattttaaaaaccacgtgcatgtactagatttttgatttttaaaaattaagagaaaaaaccccagagagtgaccaaccaaacgtcatgtgaagcaatattgcaagggctaaattttatccacgtctcatatgttgagaagtgacataagaatataaatttttgaactgctccaaaatgccaatcttttacaaattaaatcacatctcttatacttgcaggtcattcatggaaaactgcaatcagtcttgaatgctgtctggcata

SEQ ID NO: 1633 - DNA, 661 bp, Homo sapiens
  misc_feature [331]..[331]: Chromosome 3, SNP identification no. = rs9874619
  misc_feature [331]..[331]: allele = c, in linkage disequilibrium with rs6762236, respectively
  misc_feature [331]..[331]: n is a, t, c or g
tccgcccacctcagcctcccaaagtactgggattacaggtgtgagccacctcatccagcttttgtttaatatttaattcttgggacccagcacagtgaccagcacatagtaggtgctcagtaagtacatgtagaataaatgaacagttgataagtgcaggatatgaatccaaaaattctggtcctgactcaccactggacccttggaaagtgtttattagtgttgctgtaccttagtgtcctcacttgtaatacgaatatataatatagagcatggcaatggcaattttaaaacataatccccaaattctttgacacttcttttaacgagnggtagagcctatgtcccttcctttagaatttgggctctgtaatttcttgaccaaaagatcacaacaaaagtgatgtcatggccatttctggactcaagtcttaagaaatcggcaatttccattttgtttttcttgggatgcttccttgcggaacgcaggcactatgccatggagaagcagctccagagaggcccacgtagaggactccagcctccagccctcagcttctgccaagctcccaggcagcaacacccacaatttggcagccattttggcctccatcttgctccatccaagcaaatcatcttggaagtggaccttccagcccca

SEQ ID NO: 1634 - DNA, 661 bp, Homo sapiens
  KIAA0089
  misc_feature [331]..[331]: Chromosome 3, SNP identification no. = rs748607
  misc_feature [331]..[331]: allele = g, in linkage disequilibrium with rs6762236, respectively
  misc_feature [331]..[331]: n is a, t, c or g
tggaaacaccagatgctacactttgcttccttcccccttcacacccccacctctacattcacccaaacacaccagagaatcccacagtgtacgtttgattaagggtactagaagaactgacatttctaatgtgctctataaaatgttaaagtcaaataaggccccaaagagacgcaaagcttcgcaaacatctcggcaagggagaattctcaacgcctcagggagagcggcctgttgaaacttggattttcttcctgatacgacgcgcctaagatagtggacctatcagaagcgggggcgagacgggcaccttgaagggcagagcatgccncgcccgtgacctgggcagcaagagccctttagccctctccgcctcggtttcctcaacaccgaaactgcagtaagaatgctcgagcctccaccaagtccttgacccaggagatccgccgtggagaacggaatacgcccttaggatattgtgcaaaacacccaggcgtggcaagcaggtggcttctgtgcgctcagtaacgggggcgcagacaggtgcccgcgtgctcggggtgccctctctccgcgctgtcccccgcacgcacgcgagcccagcgcctcccgagcgagtgccccggtgcggcctcctcgggcgcacggtgcccagcccagc

SEQ ID NO: 1635 - DNA, 661 bp, Homo sapiens
  KIAA0089
  misc_feature [331]..[331]: Chromosome 3, SNP identification no. = rs901092
  misc_feature [331]..[331]: allele = g, in linkage disequilibrium with rs6762236, respectively
  misc_feature [331]..[331]: n is a, t, c or g
aaatgagcttcaccaaaggacaggacaagggcatgttatacaacacgtctactttcctgcccaggaccttcctggctgaagctccctggcaagccagctagattcaatattctgataactgtattgcaactgatgacaattgacttgggagaggcactccatgtgagagttctcaaatgtgacaaacacctttatttacacaaacaggctaagctgccctaaagttccaagtataaacattgcttaagcaacttgacattcctgaggtaagaaccagatctggaagggtaggtctatctcttggtgatctgtattaaaattggcaaaaggntaaagttccttcagaaaaaaaaatctcattctcaggggatatgattaagcaagtctagtttcagtggtaattctgacacaagtggtcttgggaccacaatttaagaaacacgatttaggccgggcgcagtggcttacgcctgtaatcccagcactttgggaggccgaggcaggcagatcacgacgtcaggagattgagaccatcctagctaacacagtgaaacctcgtctctactaaaaaacacaaaaaattagctgggcgtggtggcgggtgcctgtagtcccagctacctgggaggctgaggcaggagaatggcgtgaacccgcgagg

SEQ ID NO: 1636 - DNA, 661 bp, Homo sapiens
  KIAA0089
  misc_feature [331]..[331]: Chromosome 3, SNP identification no. = rs936787
  misc_feature [331]..[331]: allele = c, in linkage disequilibrium with rs6762236, respectively
  misc_feature [331]..[331]: n is a, t, c or g
taatgacaggtccatcaaggatgatgaaactaataatactaatagcaactgtcatttactgagtgctagtcaccatgcactctccccagatcatttcatttaatcctaaccataatcccagacagcaggtatcaatacatgattcttagagagaagcgcttttcccaaggcctcagagctgccaagtgggagacccaggcagaaacgtaggcagtcagattcccaagctctttcttataccactgcactaccctgcctccaaaggagatttaggatgtgtttctggacatatgcttcctatcacaagggtttggctgtaaatacagccctnaggttttaactctagaactttattttgcactttgtctgggtgatcttcccaaggtgctggttaaaagaaagaaactttgggccaggcactgtggctgatgcctataatcccagcactttgggaggccaaggcgggcagactatttgaggccaggagttcaagaccaacctggccaacacggcaaaaccctgtctgtactaaaaatataaaacttagccgggcatggtggtgcccacctgtaatcccagctactcagaaggcggaggcatgagaatcgctagaacccagcagatggaggttgcagtgagccaagatggtgccattgcactc

SEQ ID NO: 1637 - DNA, 661 bp, Homo sapiens
  KIAA0089
  misc_feature [331]..[331]: Chromosome 3, SNP identification no. = rs2035548
  misc_feature [331]..[331]: allele = g, in linkage disequilibrium with rs6762236, respectively
  misc_feature [331]..[331]: n is a, t, c or g
gttgtctaggctggtcttgaactcctaggctcaaccagtccacctacctcagcctcccaaagtgttgggattacaggcatgagccactgcgcccggccatgagttttatttatattttatttatttattttttagatttagagacagggtcttgctatgtttctcaggctggactcaaattgtggggctcaaatgattctccacctcagcctcccaaagtattgaggttataggcatgagccactgcacccagccccactcatgatttgtataccaaacaggtgggggagatgaaggaaacaggtgattaaatattactttttaaaaagcngtacaaactttctcatcttagcccacaagggaactctaagtctcttcccagttcatctccagtccatcctatcaactctcactccaacttccaaggcagaagtgtgtccgtgcgcctgtcctcagggaaggattatttctgaccataaaggagctaacttatagtcactcaaattgtttctgagctctctgtgtggtgagaatcacaacagaaactgagtagcacagacaaaagggtgcccagggcggatgaacagccaggatgctgcacccagccagttccagcagaccaaaaaaaaaaaaaagacagagtcacaggtccagcttcagt

SEQ ID NO: 1638 - DNA, 661 bp, Homo sapiens
  KIAA0089
  misc_feature [331]..[331]: Chromosome 3, SNP identification no. = rs13061945
  misc_feature [331]..[331]: allele = g, in linkage disequilibrium with rs6762236, respectively
  misc_feature [331]..[331]: n is a, t, c or g
gcactccagcctgggtgacaggagggaaaccctatctcaaaaaaatatatataatataataatgactactattctaggaatgagtcgagagctcccagtgtcttaccttaacctttcatttcttaacctttacctcttgcttcattcttccattctatctccttctcttccttaagaggcataaatataataatttatcattttctgtgtgtcatgtacatgatgttatttcgtttaaacatgtgacaggcctgtggggtactattattataaccctatgttagatgacataactaagatttagagaaaacttgcttaagtcaacagttantaggtggacttgaaacccagatccttttaaccccaaagaccatgtttccataaattcttaccattttcagtgtgaagcatactttcacatgaggataaatatcattttcataaaaatgttgagtatcctcccaacaaaatccaattttatattctccttctgagaaataaaatggaagcaaggccttaaaaatcatctcattcagtttcccaccaatgtagtcatcccttctcctatagatatgacagatgattatagtttactattttcaaggcaattgatcttaaaattaattagaggattaattgttgaaaaaatcttatctttttt

SEQ ID NO: 1639 - DNA, 661 bp, Homo sapiens
  KIAA0089
  misc_feature [331]..[331]: Chromosome 3, SNP identification no. = rs12634660
  misc_feature [331]..[331]: allele = c, in linkage disequilibrium with rs6762236, respectively
  misc_feature [331]..[331]: n is a, t, c or g
gagagctcccagtgtcttaccttaacctttcatttcttaacctttacctcttgcttcattcttccattctatctccttctcttccttaagaggcataaatataataatttatcattttctgtgtgtcatgtacatgatgttatttcgtttaaacatgtgacaggcctgtggggtactattattataaccctatgttagatgacataactaagatttagagaaaacttgcttaagtcaacagttagtaggtggacttgaaacccagatccttttaaccccaaagaccatgtttccataaattcttaccattttcagtgtgaagcatactttnacatgaggataaatatcattttcataaaaatgttgagtatcctcccaacaaaatccaattttatattctccttctgagaaataaaatggaagcaaggccttaaaaatcatctcattcagtttcccaccaatgtagtcatcccttctcctatagatatgacagatgattatagtttactattttcaaggcaattgatcttaaaattaattagaggattaattgttgaaaaaatcttatctttttttttctttgtatgtgaagaaaaatcttaggaaaatctaagctaaaaatctatcacctctaacttttacctgttaatcccagagcaac

SEQ ID NO: 1640 - DNA, 661 bp, Homo sapiens
  KIAA0089
  misc_feature [331]..[331]: Chromosome 3, SNP identification no. = rs9854295
  misc_feature [331]..[331]: allele = c, in linkage disequilibrium with rs6762236, respectively
  misc_feature [331]..[331]: n is a, t, c or g
ctcctccccaactgggtgatgtcaggaactaagctcactgtgccagaagtgtcctgggctcccataaggttatactggtgacactttgtagttattctgctttgaggctcagtctcttccacaattggaagaggagaactgaatcagtcatctctcactgcctaacagtctacccccaaacttagtggcttcagacagcaatcatttattagctcatgattctggggtttaacaatgtgggctgactaacctggcagattttctgctgatctagcctaggctcactcatatggctgtggttggctggtgacttggttggacactctcaccnaccttttttttgttgttattttttgggagtctcactctgtcacccaggctggagtacagtggcatgatcacaatgcattgcagcctcaacctccaaggctcaagcaatcctcccaccttaacctcccgagtagctgggactagaggcacacaccaccatgcctggctaatcttcagatttcatcatagaggtggggtctcactatgttgcccaagctgatttcgaacacctgggctcaagtgatcctcctgccttggcctcccaaagtactgggattacaggcatgggccaccacacccagcctggctgggactcttggtcctagatgac

SEQ ID NO: 1641 - DNA, 661 bp, Homo sapiens
  KIAA0089
  misc_feature [331]..[331]: Chromosome 3, SNP identification no. = rs9874858
  misc_feature [331]..[331]: allele = t, in linkage disequilibrium with rs6762236, respectively
  misc_feature [331]..[331]: n is a, t, c or g
gatcacaatgcattgcagcctcaacctccaaggctcaagcaatcctcccaccttaacctcccgagtagctgggactagaggcacacaccaccatgcctggctaatcttcagatttcatcatagaggtggggtctcactatgttgcccaagctgatttcgaacacctgggctcaagtgatcctcctgccttggcctcccaaagtactgggattacaggcatgggccaccacacccagcctggctgggactcttggtcctagatgacctccttcatgtctggcagtgggcaggcttcagccagcgtgacaggggtgaccagcccacatgtctntcatccttcagcaggctagcttaggcttctccatatggtggttgggttctaacaagagtaagagaaggcaaaccttcatgaacttaataggcacttttcaagctgtagcacgaattgggccagatgcttttctagtccatgtgttcagaagagtcatagtttcctaaatctgtggctttaaattttttgacttgcaactagctgacatacaattttatattatgatggaggatacttcatatccaaccagaaacaaatgtttcacagtaacaaatgttactatgggtgattaactgtgatctcttctccttatatttattttgtgcctgc

SEQ ID NO: 1642 - DNA, 661 bp, Homo sapiens
  KIAA0089
  misc_feature [331]..[331]: Chromosome 3, SNP identification no. = rs9860131
  misc_feature [331]..[331]: allele = g, in linkage disequilibrium with rs6762236, respectively
  misc_feature [331]..[331]: n is a, t, c or g
cacggtgagtgttacagttcttaaagatggtgtgttcagagtttgttccttcagatgttcagatgtgttcggagtttcttccttccagtgggttcgtggtctcgctgacttcaggagtgaagccacagaccttcccagtgagtgttacagctcttaaaggtggcgcgttcagagttgtttgttcctccaggtgggtttgtggtctcgcttacttcaggagtgaagccgcagacctctgtagtgagtgttacagctcataaaggtagtacagacccaaagagtgagcagcagcaagatttattgtgaagagcgaaagaacaaagcatccacngagtagaaggagacctgagccggttgccaccactggctggggtggccagcttctattcctttatttggccctgcccacaacctgctgattggtccgttttacagagtgctgattggtccattttacagagtgctgattgatgcattttatagagtgctgattggtgcatttacaatcctttagctagacacagagtgctgattggtgcatttacaatcctttagctagacacagagtgctgactggtgtgtttttccagagtactgattggtgcatttataatcctttagctagacacagagtgctgattggtgcatttttacagagtgc

SEQ ID NO: 1643 - DNA, 661 bp, Homo sapiens
  KIAA0089
  misc_feature [331]..[331]: Chromosome 3, SNP identification no. = rs11925962
  misc_feature [331]..[331]: allele = g, in linkage disequilibrium with rs6762236, respectively
  misc_feature [331]..[331]: n is a, t, c or g
ttgagacggagtctcgctctgttgcacaggttggagtgcagtggcacgatcttggctcactgcaacctccacctcccgggttcaagcaattctcctgcctcagcctccgagtagctgggactgcaggcatgtgccaccacgccaggctaatttttttgtatttttagtagagacggggtttcaccgtgttagccaggatggtctcgatctcctgacctcgtgatgtgcccgcctcggcctctcaaagtgctgggtttacagatgtgagccaccgtgcccggccaggttgaactttttaagttgggtttcttgagtggatccacccagtganaggaagtgccttttgtagactgtactccatggttctccattgtgtgggtcgtctgttgaaattctgcatgtgcaaacactttgacaactgtaatatgttatataaatgttagaaatgattatggataaatttgcattatcacatataattaagtgaccatgcattcacatttgtcttcaactgtggtttatacttgtcccagtctaatttcagagcattctcaaaaggatcttgttttaaacaacaaatcttatggtaacctgcttaaaaggaactcttgtgagtttgagtaacatgattctgatcctcacaaccaggaccagcaatgat

SEQ ID NO: 1644 - DNA, 661 bp, Homo sapiens
  KIAA0089
  misc_feature [331]..[331]: Chromosome 3, SNP identification no. = rs11129490
  misc_feature [331]..[331]: allele = g, in linkage disequilibrium with rs6762236, respectively
  misc_feature [331]..[331]: n is a, t, c or g
ttttagtagagacggggtttcaccgtgttagccaggatggtctcgatctcctgacctcgtgatgtgcccgcctcggcctctcaaagtgctgggtttacagatgtgagccaccgtgcccggccaggttgaactttttaagttgggtttcttgagtggatccacccagtgagaggaagtgccttttgtagactgtactccatggttctccattgtgtgggtcgtctgttgaaattctgcatgtgcaaacactttgacaactgtaatatgttatataaatgttagaaatgattatggataaatttgcattatcacatataattaagtgaccatncattcacatttgtcttcaactgtggtttatacttgtcccagtctaatttcagagcattctcaaaaggatcttgttttaaacaacaaatcttatggtaacctgcttaaaaggaactcttgtgagtttgagtaacatgattctgatcctcacaaccaggaccagcaatgatggcagataaatttcatctcaggcactgactctagttgattaatggtggctgcagagagttttgtgttgagaaggattctggggaagagagtagctttgccaggaaagggtgctgtgacctacgatagcaagctggggtggggattggggtggggactgaca

SEQ ID NO: 1645 - DNA, 661 bp, Homo sapiens
  KIAA0089
  misc_feature [331]..[331]: Chromosome 3, SNP identification no. = rs9870851
  misc_feature [331]..[331]: allele = g, in linkage disequilibrium with rs6762236, respectively
  misc_feature [331]..[331]: n is a, t, c or g
gaggccttgactgacacagccagctcatgctcagctttggcccacagctgcacaaatgttagattcagtagtaaggactatcccggttaaccccttaagcactttatgtgttatctgagttaatcctcacagtatgaggtactgtattgtcatcatccttattttataataagtctgagcttacagaagttatgtaatgtgttctaagttacacagatactatgcagtagagtggttgaagttctctgccttcctgcccacttgaaatgtggctattcggactacatttaaatgttaactaattaaaatgtaaatactatgtgtagctacntatgcagtggagctctacatacttattttctccttgctttttcatgtaactgtgtcttgaagccctttccatatctatacataaagaacatcttcattcttttttatacttgtataatattgctgggtataggtatgcttttgtttaatcagtttcctcttgatggatattctaagagttctgcagtgaatagccttatactgaaccatctgcatatatgttggtggaagccagaacaatacatgagaaataatttagtcatgatttcttatttcatttttcactttgtaataagcaagtatgaggaaggtggacagtaacattccagct

SEQ ID NO: 1646 - DNA, 661 bp, Homo sapiens
  KIAA0089
  misc_feature [331]..[331]: Chromosome 3, SNP identification no. = rs6762236
  misc_feature [331]..[331]: allele = c, t
  misc_feature [331]..[331]: n is a, t, c or g
tttcactttgtaataagcaagtatgaggaaggtggacagtaacattccagctgtagagggcctagaaacataagcagaaaagagatttgtttgttctggattacctagcatgtctggtgtagagctcaggtttgaaagctgagattttgcattgttgagactctggtggatgtttggaaatggttttcagtaattctcattatccaggaatgcgggcaggggtgtatagtctttcagttgttatgtcaacagagaccaagtgccaggtggctgttagaatttgcactgcatggttctttccattatcaatagatgggcttgcagaatgtanttatctaaaaagtttgtgctaggatgtagaatatgcttgtttgaagcaccatggacagtttggttctctgccatccttgcttaagactggtggtccttaaaggcaatttgagactgtgacttagacattctccaggaccctgtgtgttgttctcctgagtgggcaggtagattctcctgctacctatgtctttgattccgatctgaattaatcactgaccattcctccattcactcagatgaacattgttcccatggtgtgtggggttgatagcatggctgaccaggtcatggatagccatttttgtacaggctgacagaggtgtggtcc

SEQ ID NO: 1647 - DNA, 661 bp, Homo sapiens
  KIAA0089
  misc_feature [331]..[331]: Chromosome 3, SNP identification no. = rs9820854
  misc_feature [331]..[331]: allele = t, in linkage disequilibrium with rs6762236, respectively
  misc_feature [331]..[331]: n is a, t, c or g
ctgctcctacttggctgctctgaaaacatattgaagtaagtatcaactaaaatgagacttagggggcatctgtggatttcagttaaacctccatagcttctattttctggttggctaacaggccttgggacttgctgaaacttgtctgctttggattcggggtctgttaaaatatctaaatgggaatgatttaaaatcagaataaaaaaataaactaacacatgcctgtttgggaaaatttggaaaagataggcaagtatgaagaacacaataacatttgcttgtaaacttaccaacaagaaaggatgtattcatgcaacaaatgtttgtngtgcatctactatgtcaacacttcaatgtgcatgtgaatctcttggggattgtgttacagagcagattctgattcagcaggtctggggtagggcctgaggttcagcatttctaacacgctctcagggatatattcactgctggtccacgaactgcacttttaataggatctgaccataggctgggtcttatgcttgttcttgtgtgttttcttgccatcctttttaagtgtgtatgtttttttaattgtgacaaaatacacataacataaaatttaccaccttaaccatttttaagcatacggtttagtagggttaagaatgttcacatt

SEQ ID NO: 1648 - DNA, 661 bp, Homo sapiens
  KIAA0089
  misc_feature [331]..[331]: Chromosome 3, SNP identification no. = rs12633891
  misc_feature [331]..[331]: allele = a, in linkage disequilibrium with rs6762236, respectively
  misc_feature [331]..[331]: n is a, t, c or g
tctttgagaccctgctttcaattctttggggtatatacccagaaacagaattgcttgatcatatgttagttctatttttaattctttgagggactgccatttggttttccacagtggctgcagtattttacaaatctacaaacagtatacaagggtcctgatttctctgcatccttaccaacacttattattttctgtgtttttgatagtagccatctaagtggatctgaggtggtattatttattaattgcacacttgcaatcatatggtatgtacaattttacatcctttttgttaaatgtaacattctatcataagcattttcccctncagtttgaattttgatagaaagccttttcagtctccttcctctttgaagtgaagttgttcatattgatcttttttcctttgtggtttctttctttgattttaagcttagaaagcttccctatgtagagatcaaataacattcgccaagttgaatctatttttaaaatacttcatttttaacatttgcatctaatactctggcatttggttgttctttaaaagccctttgactgcaaagaattacgcaaaatgttaatagtggttctccctgggtggtgagattattcataatttttttcatgtattgctcttatgagtgaaaaagtacat

SEQ ID NO: 1649 - DNA, 661 bp, Homo sapiens
  KIAA0089
  misc_feature [331]..[331]: Chromosome 3, SNP identification no. = rs11129494
  misc_feature [331]..[331]: allele = g, in linkage disequilibrium with rs6762236, respectively
  misc_feature [331]..[331]: n is a, t, c or g
tgctgagattccaggtggaagccactgtgtccagcctaaatgtttactttaaaagacaacttcataccactatagtaaatatcacaagtagaaggtaacaacaacaaaacccagtagaatgaaaacaagacagtgttataaaattcttgccagatattactacctgccaaggctcagagtctgaggcctcttcagactttgtgaagaagggaaattagcacatgctggagagatggtaaccacttaatggcactgcagcgagacattctgcactcgctcaggaccatgagagttgaaaagggcatgagtgattcagtgtcatttggtttcntgtgtatccctagtacccatttctcactttgggaagcactggattcgatcatagacctggaaggaaccttaaagattacctgacccccccatcattttgtagatggatgagctgagcctgatgtggaggtggctgctcgtgcccttgacccagccatgtgaagacctgtgccctcgattctcaaaatgcgggagtcgaaagacagacagacagatagatagatagatagatatgcaggagttgaaaaataggcaggcaggtagatagacagagagatagatatgcaggaattgaaagatagatagatagatagatagatagatagataga

SEQ ID NO: 1650 - DNA, 661 bp, Homo sapiens
  KIAA0089
  misc_feature [331]..[331]: Chromosome 3, SNP identification no. = rs9880900
  misc_feature [331]..[331]: allele = c, in linkage disequilibrium with rs6762236, respectively
  misc_feature [331]..[331]: n is a, t, c or g
gggtgctggggacagaaagaggaataagacagtgttgctttcctcaaggaactgagcgggggagaccgatctctaaatcaataaatgtggggaagttttagttacagtgttcgttagtgtcaagcactgtgctaagcaatacatttagtctcatttaatcctctcaataaccctcttaggctgatactactggttttcctattagggtgattattttgattatatagtggaggaaaccaagactcaaagaggctaatgaacttgtccagggtcacacagctgagggctacggttcagattgattcctggtggacgcatccctgagcatgcngaatctgttgccttctagacagtgatgactttctgctctggacttgggtgagccagcatttccctacagttattcttggtgtagttggtgggggaagaagaacctttagagttgtgagcttagaagttaagttgtccaaatatctgctggagagaataaaagaggtagctcttccccctgcaatggaaggcctgtggggtcatctctaatccattcttggggcagatcattcttttgagcttcacttttctcatttttatcagaattggttgccccttccctttggtaaactacatgcttcattgttacattcctcccaccctgcctggc

SEQ ID NO: 1651 - DNA, 661 bp, Homo sapiens
  KIAA0089
  misc_feature [331]..[331]: Chromosome 3, SNP identification no. = rs11129496
  misc_feature [331]..[331]: allele = a, in linkage disequilibrium with rs6762236, respectively
  misc_feature [331]..[331]: n is a, t, c or g
tgggaaggccaaggcaggtggattgctggaggtcaggagttcgagaccagcctggccaacatggcgaaaccccatctttactaaaaatacaaaacttagccgagtatggtggcgcatgcctatagttgcagctactcaggaggctgaggcgggagaatcgcttgagcttgggaggtggaggttgcagtgagctgagatagtgccactgcactctagcctgggcaacacagcaactctgtctcataaataaataaataaagttactacctattatccatgatttaaggtaataaattttaaaaggtacctttgagaaaatatgagattgctntaaatcaagcccacctcttggatgggcattgcgttatttgcagccacaaaggaacccatagaccctaccttgtatctatggcaagccaagagtgtgccttcccctgcccattcctcagtttgttcaccagcaacccaagtttccagctgcagatggctggattaaagtgacttgagggaggggctggtctgcaatgttcaggagcatgcttcatgttggaggcactgagcagtgggaggagacacgatgaggctgtaatatgatgtaggggccaggggctggtttacccaacccagatgatgcaacagtgttgcacagagtcacctagac

SEQ ID NO: 1652 - DNA, 661 bp, Homo sapiens
  KIAA0089
  misc_feature [331]..[331]: Chromosome 3, SNP identification no. = rs9876851
  misc_feature [331]..[331]: allele = a, in linkage disequilibrium with rs6762236, respectively
  misc_feature [331]..[331]: n is a, t, c or g
tacttgttgacaatcatgcttttttctttttttttttttttttttttgagacagagtctcgctctgttgcccaggatggagtgcagtggtgagatctcagctcactacagcctccacctcctgggttcaagcgatgctcctgcctcaacctcctgagtagctgggaccacaggtacgtgccaccacgcccagctaattttttgtatttttagtagagatggggtttcaccatgttagccaggatggcttcaatctcttgacctcgtgatctgcccgcctcagcctcccaaagtgctgggattacaggtgtgagtcatcgtgtctggccaanaaaaactttagattcacattcggtcagttaaaaatgtatgtcaaattgtaaatgatcacctcgattggaaacgggatatttttactttatttctgctcctatgtgttttctaaatatcctatcatgaacatgttacttttatagtaagtagaaacttattttaaagtgtattaggtgtgaaaattaagattagaggctgttattaatatccttgttgtctaacctttcaacaggcagcaaagtaatggagaacggccttctcttcaaagaacttctgcagactccaaattttcgaattaccgtggttgatgatgcagacactgttgaact

SEQ ID NO: 1653 - DNA, 661 bp, Homo sapiens
  KIAA0089
  misc_feature [331]..[331]: Chromosome 3, SNP identification no. = rs9839669
  misc_feature [331]..[331]: allele = g, in linkage disequilibrium with rs6762236, respectively
  misc_feature [331]..[331]: n is a, t, c or g
ctgttgcccaggatggagtgcagtggtgagatctcagctcactacagcctccacctcctgggttcaagcgatgctcctgcctcaacctcctgagtagctgggaccacaggtacgtgccaccacgcccagctaattttttgtatttttagtagagatggggtttcaccatgttagccaggatggcttcaatctcttgacctcgtgatctgcccgcctcagcctcccaaagtgctgggattacaggtgtgagtcatcgtgtctggccaaaaaaaactttagattcacattcggtcagttaaaaatgtatgtcaaattgtaaatgatcacctcnattggaaacgggatatttttactttatttctgctcctatgtgttttctaaatatcctatcatgaacatgttacttttatagtaagtagaaacttattttaaagtgtattaggtgtgaaaattaagattagaggctgttattaatatccttgttgtctaacctttcaacaggcagcaaagtaatggagaacggccttctcttcaaagaacttctgcagactccaaattttcgaattaccgtggttgatgatgcagacactgttgaactctgtggtgcgcttaaggtaaagtcagcctcaggggaggagttcatcaagcaaggcaaatgtta

SEQ ID NO: 1654 - DNA, 661 bp, Homo sapiens
  KIAA0089
  misc_feature [331]..[331]: Chromosome 3, SNP identification no. = rs9839702
  misc_feature [331]..[331]: allele = g, in linkage disequilibrium with rs6762236, respectively
  misc_feature [331]..[331]: n is a, t, c or g
tcaagcgatgctcctgcctcaacctcctgagtagctgggaccacaggtacgtgccaccacgcccagctaattttttgtatttttagtagagatggggtttcaccatgttagccaggatggcttcaatctcttgacctcgtgatctgcccgcctcagcctcccaaagtgctgggattacaggtgtgagtcatcgtgtctggccaaaaaaaactttagattcacattcggtcagttaaaaatgtatgtcaaattgtaaatgatcacctcgattggaaacgggatatttttactttatttctgctcctatgtgttttctaaatatcctatcatnaacatgttacttttatagtaagtagaaacttattttaaagtgtattaggtgtgaaaattaagattagaggctgttattaatatccttgttgtctaacctttcaacaggcagcaaagtaatggagaacggccttctcttcaaagaacttctgcagactccaaattttcgaattaccgtggttgatgatgcagacactgttgaactctgtggtgcgcttaaggtaaagtcagcctcaggggaggagttcatcaagcaaggcaaatgttagcatcattgagtctaatcctcaagaatgggctctgtgttctgtgcacccacatcagcgaagaa

SEQ ID NO: 1655 - DNA, 661 bp, Homo sapiens
  STAC
  misc_feature [331]..[331]: Chromosome 3, SNP identification no. = rs11710098
  misc_feature [331]..[331]: allele = c, in linkage disequilibrium with rs6781630, respectively
  misc_feature [331]..[331]: n is a, t, c or g
agatttgtctcaggtaggtggagggatgctttctagtcttgtctttgtcctgtacctgtgaggaaaagctgttaacttatattgtcagggtgagattcaacagaactctgttttagggtagagtttggggcccacaaggaatttccttgtgagcaatttgagggagcccacctggggagatatgtggccttctatctttgcaactatccgtttaggaacaaaaaggaaggcagttgttgcgtgactcagatcccaagcttaacagtttttcatttttctcctttttttttttttttttttttttttgagacagagtttcactcatgttgcnctagccagagagcagtggcgcaatcttggctcactgcaacctccacctcccaggttcaagtgattctcctgcctcaggctcccaagtagctgggattacaggcacctgccaccacgccccactaatttttgcatttttagtagaaacggggtttcatcatgttggccaggctggtctcaaactcctgacctcgtgatcctcccgtctcagcctcctaaagtgctggtattacaggcgcgaaccaccgtgcccagccctcatattttccctttgacatagtgagcttagagtcctgagattttattttcctttcacaagaggaagagctgg

SEQ ID NO: 1656 - DNA, 661 bp, Homo sapiens
  STAC
  misc_feature [331]..[331]: Chromosome 3, SNP identification no. = rs11711958
  misc_feature [331]..[331]: allele = c, in linkage disequilibrium with rs6781630, respectively
  misc_feature [331]..[331]: n is a, t, c or g
gggtgtcgtgtctcctctcctaggaatttgtgctctacttggggattggagagaggctgggctgggcgggggatgcctcagggcaactcatactccttcctccaagaccccaccctggaagatcaaaccatctttctaacatcttgcagaatagttccatgtagctggccaagctcagctcatatcattcataccctttgtgtacactgagtccctgcagacagtttacctggtggtggaagagatggttccaatgcccatatgaaaaactgagaaataagagagacaggactgctgagaatgaacccagaaagcaaccattggttctcangcacatgtgtgcaagtacacacacactcaaaattaaaccctgtcctcctcactggtaagccataattctgtagttgcttttgttattttattctaattcttgtgagctcacagccctttcaccatttcaagagttcctataaatcattatataactaacttgcaaatcttcctctgggcctatggcaaattttactgagcaaacaaaagcaaaaggccagctgtggtgctctgacctcttttcactaaaggaaactgatgcttgaattgtttatgaattgcattatactttacatcatggtatacaattgtggattacaatgtaagcaaa

SEQ ID NO: 1657 - DNA, 661 bp, Homo sapiens
  STAC
  misc_feature [331]..[331]: Chromosome 3, SNP identification no. = rs11714333
  misc_feature [331]..[331]: allele = c, in linkage disequilibrium with rs6781630, respectively
  misc_feature [331]..[331]: n is a, t, c or g
atcactcaccaagcaattttctgatcctggtggagctcttttttaggaaaggacagaaccctcatcacacttccagaagtatgtctggtatttctcataagattatagcctgttatcccagtgagtgccttattctaatgtgtaattcagttaatgagggtcaagtgctggggactgtccacctctaggcacagccaagagtgagtctctcagtagactataaaaatagaggtcggattgaggcagcaccctctttcacccttagggaaaggtacctcccacagtctgcctctttcactcttagggaaaggtacctcccccagctttattncctatttacagtttctgccagagcagcagcaaagtcattgtgtttgatactgactcatggtttcttaggttactggtttaaataaaatctgctggggcttagaagatttttctacattgactttcatccttgctgcttaattaaatccctgacctgggaaagagtgattttcagccacctcgctttctgcggcatcagcatgaaactgtgactgttgaaataccaaaatgccagttgtgcttaatgctgcagatgtgacaagcctgttatatttggaatccctgatgaagatagatattaactgagaattgaaaatgacagcaaaggaga

SEQ ID NO: 1658 - DNA, 661 bp, Homo sapiens
  STAC
  misc_feature [331]..[331]: Chromosome 3, SNP identification no. = rs7644206
  misc_feature [331]..[331]: allele = g, in linkage disequilibrium with rs6781630, respectively
  misc_feature [331]..[331]: n is a, t, c or g
atacaaaaattagctgggcgtggtggcacacatctgtaatcccagctacttaggaggctgaggcaggagaatctcttgaaccagggaggtggaggctgcagtgagccgagatcgtgccactgcactccagcctggtttgttcttgatatattagtggaggatttggggaattaaaaatttatttcctctcctaataaagtctcacagaggactttaattttcaactttggaagtcaaaaatctttcctctgtttctttctgcattcttggtataagaattttattatttcccaaggtaatgaatgcctgaagttgaaattgataaggctcnccctacaaggaagttcacaatgaaaaaggcattaataattttaatacatctctgttcaacagagttgccgaaaacacatcttgaatgccttttttaggattgcctcaaagatagtttctaagtcacacaagaaaatcagtcattaccttaaaattatagctatttgtaattttaaaaattgttttgtcccacttaatcaaccattgtatagtccacatgtagctttaactgactttatcattttcaaactaacaaatatatcctcaaagaataataattcaccttttcttttttttttttctttttttttttttttttttgagacggagt

SEQ ID NO: 1659 - DNA, 661 bp, Homo sapiens
  STAC
  misc_feature [331]..[331]: Chromosome 3, SNP identification no. = rs6777327
  misc_feature [331]..[331]: allele = t, in linkage disequilibrium with rs6781630, respectively
  misc_feature [331]..[331]: n is a, t, c or g
cacccttcaccccctaaaaggtcccagtgtgtgttattcccctttgtgtgtccatgtgtcctcatcatttagctccaacttacaagtgagaacatgcagtatttttttggttttctgttcctgtgttagtttgctaaggacaatggcctccagctccatccatatccctgcaaaggacatgatcttgttgttttatggctgcttagtattccatggtgtatatgtaccccagatttggggtacatatattttctttatccagtctaccattgatgggcatttaggttgaatctatgcctttgctatacagcatgttttctttgtgtctcantgcatcatctctttacctcgagatattttctccttataacactgaggccaagtcttccttcaacctactgcattcagtatgtctgaaaggagaactctgagacatacatgcatattttctgtaatttttaaaatgttttattgtaatagtcttggtccttttatcctgtggtaggcagaataacaactccccaaagatgcccgggtcctaacctccaaaacttggaatatgttactttatatgacaaaaggaattttgtagatgtgattaagttaaagattttgtgaccagtagattatctggattatcagggtgagcccagtgtaatca

SEQ ID NO: 1660 - DNA, 661 bp, Homo sapiens
  STAC
  misc_feature [331]..[331]: Chromosome 3, SNP identification no. = rs6781630
  misc_feature [331]..[331]: allele = g, t
  misc_feature [331]..[331]: n is a, t, c or g
cagctttgccacccaggctggagtgccctgatgtgatctcggctcactgcaacctctgcctccaaggttcaagccattctcctgcctcggcctcctgagtagctgggattacaggcatgcaccatcacacccagctaatttttgtattttttgtagagatggggtttcacgacattggcccggctggtcatgaactcctgaccccaagtgatccacccatctcggcctcccaaagtgctgggattacaggcatgagccaccgcacccggccaggtgtctgcatttatttatttatttatttgtttatttatttattttgtggaggtacaanttttcattctgattagaccctattattctgagggcaaaaactatgttttgtgctccctttgtatcacctaggtcatctggtactatgttgggcatgtatttatttatttattttatactctaagttctgggatgcgcttgcagaacgtgcacgtttgttaacaaacatatgaaaaaagttgtaggtctcagcttttgaaaatcaagtattccatcccttttgaagtcatgtcaagggacctaacatgacccatcagctacttctctcacaagtgacccacatctgctcttcatgaaacagtcaacacatccactactcttacaaattatc

SEQ ID NO: 1661 - DNA, 661 bp, Homo sapiens
  STAC
  misc_feature [331]..[331]: Chromosome 3, SNP identification no. = rs6781771
  misc_feature [331]..[331]: allele = c, in linkage disequilibrium with rs6781630, respectively
  misc_feature [331]..[331]: n is a, t, c or g
atgagccaccgcacccggccaggtgtctgcatttatttatttatttatttgtttatttatttattttgtggaggtacaagttttcattctgattagaccctattattctgagggcaaaaactatgttttgtgctccctttgtatcacctaggtcatctggtactatgttgggcatgtatttatttatttattttatactctaagttctgggatgcgcttgcagaacgtgcacgtttgttaacaaacatatgaaaaaagttgtaggtctcagcttttgaaaatcaagtattccatcccttttgaagtcatgtcaagggacctaacatgaccnatcagctacttctctcacaagtgacccacatctgctcttcatgaaacagtcaacacatccactactcttacaaattatcttctcttcacttcactgtctgagcctctatctagtcaagtttctcacacagtagatctctgaagcacgagtcagataccagtccattgtatgtcccaagctccaggagtcacaaatcaagctctttgagtgtcctattcaagccccttcttctacatgatggaagagcccactgtggtggcttctgttggagccttgctcagatccctttcaccaggtgggtgcactcatctcccagttgctatgttggcc

SEQ ID NO: 1662 - DNA, 661 bp, Homo sapiens
  STAC
  misc_feature [331]..[331]: Chromosome 3, SNP identification no. = rs6808581
  misc_feature [331]..[331]: allele = a, in linkage disequilibrium with rs6781630, respectively
  misc_feature [331]..[331]: n is a, t, c or g
tcttctcttcacttcactgtctgagcctctatctagtcaagtttctcacacagtagatctctgaagcacgagtcagataccagtccattgtatgtcccaagctccaggagtcacaaatcaagctctttgagtgtcctattcaagccccttcttctacatgatggaagagcccactgtggtggcttctgttggagccttgctcagatccctttcaccaggtgggtgcactcatctcccagttgctatgttggccacgaacaactcacagctgcccttctcagggagggccttatgagacagcaggaccctctctcctggaaggttatgcccntcacactacaggccagccaatggccaatgactgactgacatggggttcaaaagtctgaaaccctagcttcaaagtgagacaattctgtgatgcaattcatgctccagagctcccaggcgaaccaagctagactgctttccagctgaaaacctctcattgctgggctccttcccctgccccatcctgcatccctcacttcccacctcctgagagcacccactcaataagtcacttgtacaaggaaccctgtgtcaggttctgtttctggggaatccaacctaagacaaggcctgtcatccatggaagcaggtgaggcaagagaaactcaca

SEQ ID NO: 1663 - DNA, 661 bp, Homo sapiens
  STAC
  misc_feature [331]..[331]: Chromosome 3, SNP identification no. = rs17188371
  misc_feature [331]..[331]: allele = t, in linkage disequilibrium with rs6781630, respectively
  misc_feature [331]..[331]: n is a, t, c or g
atctcacactgcgtcaacccaaaggagctgccgcactgacccagccccccaggaaacagtgagacaagaatcaagtatctgagactgtggagtaatagccacaaaacagagggcccactgcacagcatatccaggctgccacaggtggggacgaggctgagagagtcagcaggcagagccagatgccatgcttggcagcagcagtaggactataaaccacagctgtcccccaggatcccactcctttcctgtctgtgtggtgtaagttaacacactggagtgtgctccagtttgcagggtagcccagtgcaaggttcagatccatgtagcnaagtattatcctgcttccagacctatgtcaccagtaccaatcagtcagtgtcatcacatttcaggccccaagcaatctctgtgcaaagcatcagaaagacctgcttcccagcccccagcattccagtgctctccaggcttcctctctttgtgattgtgctgtccagagtgtccagcttgttctttctttctcttcagtcctctgagtacatctggtggtgtgcattagatgtgagggctatgttgacatggcatcacctccaaagacctgacctgcctaaagactgatgacaggccatccttcctgctgttctaggtactggcctgggtg

SEQ ID NO: 1664 - DNA, 661 bp, Homo sapiens
  STAC
  misc_feature [331]..[331]: Chromosome 3, SNP identification no. = rs2176995
  misc_feature [331]..[331]: allele = a, in linkage disequilibrium with rs6781630, respectively
  misc_feature [331]..[331]: n is a, t, c or g
agagagttcttacttattgaagattatacagccctttcggttatgaagtccctgcttgaaggcaatggacctggggaagagactatcacaaaaagtctccattttcattttacatcctctctattggaggcagcacttttccctcatgctgtcctataggactccactttgaaggttgtgcctacgttgcagggaactaggaacatggaggggaaccaacaacagcatcttagaagaaatgtagccaaattggagtccattcttctttagggcagtatatgaaatcctagcagatgtaaaatggaaaagaatcctaatgcttcttccttcngaaagtagaggaactaggggcccaattagcatcatctaggggaatctctattactctgtacttatactaatgtttacaagaatgcaatatactgtgatgccttcctactcaagcctcctagcattcaaacttccatcctattagtcattaacatggttaaacttcaattcacaatcaccttggaatcaatgtcagtttgatttattttgttacagagcaataaaatcattagaacaatggtttttaaaagacttaagtggatgcatcctatgcatgtaagcattatttcccaaaccaaagcatcattcatctccatttatttcttttgtt

SEQ ID NO: 1665 - DNA, 661 bp, Homo sapiens
  misc_feature [331]..[331]: Chromosome 3, SNP identification no. = rs11716761
  misc_feature [331]..[331]: allele = a, in linkage disequilibrium with rs6781630, respectively
  misc_feature [331]..[331]: n is a, t, c or g
atatgccctatacttcatcactagtgccataagactttacttctattatagtaaatttgaaatgaagaactgagtgaaccttcctcagggctccagaaggtggagaatagaactccctttacttcccatcactagcagacatctacagcacctctcacatgggcagcagggtggcaaagagagcccatgtgtagatatccagattgctagatttcacagacagatacccacatggctagatttcacagatggttgatttcacagaccacttttccttcccaaatacacaacaaacaccaccaccaccacgaccacccatacacacacactnattcactcccattaagaggaagggtccagcatttgggttgcatatttagagcaggtagtggagagaatatggcaggatctattagagttagtgttctttgctattaaagagagaaaaaaccagtgggaagatcacaacaccttggtgccaagtactgttaaaagacaaaagagccagttgtccaggaaattggctactccaaggaggagagagccaagaaggaaatctactggccagcctaagcctagagccaggtccagtcagaaatgcagctgtgaaaaagtggtgtgtgggagaaaaaagctgagatttaaataaagtgaacttgac

SEQ ID NO: 1666 - DNA, 661 bp, Homo sapiens
  misc_feature [331]..[331]: Chromosome 3, SNP identification no. = rs11716822
  misc_feature [331]..[331]: allele = a, in linkage disequilibrium with rs6781630, respectively
  misc_feature [331]..[331]: n is a, t, c or g
cacttttccttcccaaatacacaacaaacaccaccaccaccacgaccacccatacacacacactaattcactcccattaagaggaagggtccagcatttgggttgcatatttagagcaggtagtggagagaatatggcaggatctattagagttagtgttctttgctattaaagagagaaaaaaccagtgggaagatcacaacaccttggtgccaagtactgttaaaagacaaaagagccagttgtccaggaaattggctactccaaggaggagagagccaagaaggaaatctactggccagcctaagcctagagccaggtccagtcaganatgcagctgtgaaaaagtggtgtgtgggagaaaaaagctgagatttaaataaagtgaacttgacttctttactcaggacttctcagagcctttaatttgctaattctcatagtaaatctccaaaaaggagatttaaaactgtggatcacctataagactctcctaaaacaacattccaaggaacatactttgggaaattctgcagtaaagcattctcatatcagatcacccaatagcccctatgcttctactatcccctctcttcctacatctcactgaaatacttacaaagggcaaaagcactcaatcctaatgataagaatgaagaca

SEQ ID NO: 1667 - DNA, 661 bp, Homo sapiens
  misc_feature [331]..[331]: Chromosome 3, SNP identification no. = rs1357069
  misc_feature [331]..[331]: allele = a, in linkage disequilibrium with rs6781630, respectively
  misc_feature [331]..[331]: n is a, t, c or g
tgagatttaaataaagtgaacttgacttctttactcaggacttctcagagcctttaatttgctaattctcatagtaaatctccaaaaaggagatttaaaactgtggatcacctataagactctcctaaaacaacattccaaggaacatactttgggaaattctgcagtaaagcattctcatatcagatcacccaatagcccctatgcttctactatcccctctcttcctacatctcactgaaatacttacaaagggcaaaagcactcaatcctaatgataagaatgaagacaatctattctgggatctgagttggtaggagaataagctanagtatgaatctgtatactccaagagtgaaaaactccagagaaagattagttttatcacactgatagctgtagcaaacaccagcatggagtaggctgtataaatctgggaataaaagaaaattcatcattgcccaaaatagcatccccaggaaactgagtgagcaggtgtgctccacagatttatcacaaaacagaaattattaaaaataactcagacagaaaattaaaactagtttaatgacatcctgtaactatctcctagattttgctaagttgccactctgttgtgtgtttcatacaacacctggtgttttgacccttagagcatgt

SEQ ID NO: 1668 - DNA, 661 bp, Homo sapiens
  misc_feature [331]..[331]: Chromosome 3, SNP identification no. = rs1357070
  misc_feature [331]..[331]: allele = c, in linkage disequilibrium with rs6781630, respectively
  misc_feature [331]..[331]: n is a, t, c or g
ttaaaactgtggatcacctataagactctcctaaaacaacattccaaggaacatactttgggaaattctgcagtaaagcattctcatatcagatcacccaatagcccctatgcttctactatcccctctcttcctacatctcactgaaatacttacaaagggcaaaagcactcaatcctaatgataagaatgaagacaatctattctgggatctgagttggtaggagaataagctaaagtatgaatctgtatactccaagagtgaaaaactccagagaaagattagttttatcacactgatagctgtagcaaacaccagcatggagtaggntgtataaatctgggaataaaagaaaattcatcattgcccaaaatagcatccccaggaaactgagtgagcaggtgtgctccacagatttatcacaaaacagaaattattaaaaataactcagacagaaaattaaaactagtttaatgacatcctgtaactatctcctagattttgctaagttgccactctgttgtgtgtttcatacaacacctggtgttttgacccttagagcatgttttttcttagatttcaatgagaagttttaaatagtctttaatcttcctgtggataatacaaatttatccataccttgaaattttaacaagataa

SEQ ID NO: 1669 - DNA, 661 bp, Homo sapiens
  misc_feature [331]..[331]: Chromosome 3, SNP identification no. = rs1357071
  misc_feature [331]..[331]: allele = t, in linkage disequilibrium with rs6781630, respectively
  misc_feature [331]..[331]: n is a, t, c or g
atgaatctgtatactccaagagtgaaaaactccagagaaagattagttttatcacactgatagctgtagcaaacaccagcatggagtaggctgtataaatctgggaataaaagaaaattcatcattgcccaaaatagcatccccaggaaactgagtgagcaggtgtgctccacagatttatcacaaaacagaaattattaaaaataactcagacagaaaattaaaactagtttaatgacatcctgtaactatctcctagattttgctaagttgccactctgttgtgtgtttcatacaacacctggtgttttgacccttagagcatgttttntcttagatttcaatgagaagttttaaatagtctttaatcttcctgtggataatacaaatttatccataccttgaaattttaacaagataatagccatttattttaacagtccccttttgcaaatgaaaagatggcagggttttttttgtcagctcattgtcaagcttacacaattattgaacatcctccgtgtcttcatggaagtaaggacataccaaagtcctggaaacacacctaggaaaagtacaagacctatttccaagatcatggatcatctttagaattcctccactggcattatttactcaggttttcaggttattgcctgaa

SEQ ID NO: 1670 - DNA, 661 bp, Homo sapiens
  misc_feature [331]..[331]: Chromosome 3, SNP identification no. = rs11710283
  misc_feature [331]..[331]: allele = g, in linkage disequilibrium with rs6781630, respectively
  misc_feature [331]..[331]: n is a, t, c or g
acagtccccttttgcaaatgaaaagatggcagggttttttttgtcagctcattgtcaagcttacacaattattgaacatcctccgtgtcttcatggaagtaaggacataccaaagtcctggaaacacacctaggaaaagtacaagacctatttccaagatcatggatcatctttagaattcctccactggcattatttactcaggttttcaggttattgcctgaatccatctttttctatacatggcaaaatttttctttgtctttatcagctatttgaaaattatgtgcttagtttatttacttttactccttctttaggtaagaaaaancatccaaggttataaattttcctctgagttcagcttcgaccacattagatagctgtttctattttcattcacttataaattatctttaactgtagtttttattttttatttgatttttagtgtgtgttaattaaaacattgtgcactatagtcggaaaatatggtacatatgatttctgctttgaggaatttattggcatgttgttttgtgctctaatatattattcatctttataaatgttcaatggatgctgagggaaaagtcatatctttaatatacagagttcaacatgtatctattaaacaaatcctttaagtattcatattctt

SEQ ID NO: 1671 - DNA, 661 bp, Homo sapiens
  misc_feature [331]..[331]: Chromosome 3, SNP identification no. = rs17188722
  misc_feature [331]..[331]: allele = g, in linkage disequilibrium with rs6781630, respectively
  misc_feature [331]..[331]: n is a, t, c or g
cagtctccctttctataatacatgtaggatgaatcgctcaggtcatttcctaagtaaatattctctttagctccctggagcaaactgtaaaggaaccacttttaaatgaagatgttccaaagatattcttagaaaacttcaatttcaaatgaagagtatttgggtcatggaatctttacagaaagataaattacaatgaaacccaccatcactattgaaaagctgttaagggtttttctgataaactcaaagaaacttacaagttcctaattttaaggtattggggtgcttttctttccttcatgttaggcatataacaaatgaagtaccnaaatatatcttctactggagtggtattcctagaagcacatagctaaagagtgcataaagtaggtttgggataatcaatcttatcctaatataaatacttgctgcatcgtaagaattcatttattcctgacaataatcctgatagctgagttttattgtctccatttttcagatggagaaactgagactcataaatattagatcccttgcccaaggtcacacaactgataaaagttggaatgaggttttgcacctgtaacagcatccctagtgctcctaagtggctggcttctgagagcatttggttgcaaaattaaatgttggagttgca

SEQ ID NO: 1672 - DNA, 661 bp, Homo sapiens
  misc_feature [331]..[331]: Chromosome 3, SNP identification no. = rs12152364
  misc_feature [331]..[331]: allele = t, in linkage disequilibrium with rs6781630, respectively
  misc_feature [331]..[331]: n is a, t, c or g
catgctggagtgtttgagtatttgagcaatattagcagtattaccagaagattgggagagggatagaggagctggtgaggaagaggggatgggattaggtagaggcatgatggaggccacaggagaaagaggctgctgacttatgcaacatataattccaaagagggtttaggttcatgtctcatctctagagaaatgtcctaagaagaataatccatccaggtaaggccccatccttcccacatctgtcctgatgtttaggaccccagaagaaaattatttatagaataataagggttaaaacatcaccaaaatggaaacaaatatatangcttcttcacaaccaagggaaccaggtttgtctgtttttttaaatcacaggcatcttgtgatttgggccaaattcctgtcattcatgatggatctcacaagagccttcgtggtatagagagatcccaaacatgaaactgctcacccctagtgctgccaaagttgtttttctccctttcaatcacaggcagctgggggatggggggagagccaagacattaaatactaagaaattagtttacaacttttgcagatgtgatattaaaaacataaaattcaatgcaatgaagcagtgcagggcaaattgtgttgatccagtgctgggaataaa

SEQ ID NO: 1673 - DNA, 661 bp, Homo sapiens
  misc_feature [331]..[331]: Chromosome 3, SNP identification no. = rs11129723
  misc_feature [331]..[331]: allele = a, in linkage disequilibrium with rs6781630, respectively
  misc_feature [331]..[331]: n is a, t, c or g
agctaaggagaatggaaaaaatccaatagcatggtggtaatgtgtaaccagtgtaggaaagttatcatctccttggccaaggtagcctcggatgagagaagtggggaaagattcctcagtttggccactaggactatatccaagggcacactgtccctgccaccttggagcctacactgaggatgctactgcagtgcatgttctaatcagaaggcaaggaattccagcatgtgtgtctacacacatacatgcacacacgcgtacacgcacgcgcacacacacacactcagatggaatttatactgcactctgataaagatttaagcagttntttcttctttgagtcagttgattgatttcaaagccagtccctacctgttttttacacaagaagcagtctcagtgcctaggcctctcttttcttacctctctctttaacccttctgtccccacctccaccaccatccagagactaccacactcagaaatattccacctccttgaggaaataatacctttcttatgtcttgtaaacttcatagcctccagagatgaatattaaaaatctgtttttctcctcccagttcttgtttttctcagcagggaaggcgtaaattttggtcgcagtgaccgctggctttgtgtgacctgggaaagcaaa

SEQ ID NO: 1674 - DNA, 661 bp, Homo sapiens
  misc_feature [331]..[331]: Chromosome 3, SNP identification no. = rs12152348
  misc_feature [331]..[331]: allele = c, in linkage disequilibrium with rs6781630, respectively
  misc_feature [331]..[331]: n is a, t, c or g
tctgcagaagaacttagattacagttaaaattatacaaataccatgtttaattaccaaggaaagcctccatttaaaactgacttagaggagctccaagggtttctcccatccagaccccttccctggttcctgccctagaggacacatctccatgccgagcatctcagtatacttcttcatacactatcaatctctgtgacatggcaaaacaactgggattgtctttcactgtatccatgtcatgtttctgacacctacttctgaaagtttcactatttcaactcagctgtctgctcacgtgaatacaatgtgtgcttatttatttatgcnttcccttcatgctgaacacaaaatgatttttattgggctcatggtttgagatttggataattaaagcaaatagatttcttttggaaagtcacttttccaacacatcacagacgagaaacaatgagggattcttagtgattgttcactcttggaaaaatagaaatcataccccacaccaaacagcagaaacagaatgacccaaaatgccatgatttcactgcactagtcagtagttttttaataatgcttctgctttctctgaaatattcacctgcttcggttccctagagcttcccagcactgaatgcatttggccttcccttcgcatga

SEQ ID NO: 1675 - DNA, 661 bp, Homo sapiens
  misc_feature [331]..[331]: Chromosome 3, SNP identification no. = rs11716101
  misc_feature [331]..[331]: allele = c, in linkage disequilibrium with rs6781630, respectively
  misc_feature [331]..[331]: n is a, t, c or g
atatttgaaccataccttggaaggatggaagacacaagcacttccatccttggaaggagggaagacacaaatttctaatatcaggaaaaaaacaagggatatcattatagacctggcagacatcaaaaggatatgataacattacaaataactctatacacataactctatacacagaaggataagagaacattacaaataaccctatacacataagtttgacaaattagataaaatgaaccaattcctcaaaaagcacaaactaccatcaaagatttatagccaattctacacaatctctttcagaatatggaagcagagagagcacttnccaattcattttattaagctagtattaacacattatctatttcaagttgagtgagttgtaggagcttgtgcttttagaggaattggctcattgtgtattccctccttttctctgtcaatctttccagaatttcatcaattgtattaatcttctcaaaaaatcaactctttattttatttattttctttattattattattattattatactttaagttctggggtacatgtgcagaacgtgcaggtttgttacataggtatacatgtgccatggtggtttgctacactcatcaacccgtcatctacattaggtatttctcataatgctat

SEQ ID NO: 1676 - DNA, 661 bp, Homo sapiens
  misc_feature [331]..[331]: Chromosome 3, SNP identification no. = rs11712850
  misc_feature [331]..[331]: allele = a, in linkage disequilibrium with rs6781630, respectively
  misc_feature [331]..[331]: n is a, t, c or g
accctggcaggggaaaatagagcatcacctcattgctgacaaatgaaagtagaaagctgggttccccactcagcttccattggctccttgttatttcttggcaaggctaagtattccaactccccacttgatccactgatgccacagtgcttgtggtgtctctttctgggtgatagttaaagtcctgactcttcactaggcttcctctaacaccatcccagcaggaaaaggaaaagacaagtcatcatggccaggttagggtggaagtccaggatccccaattagtcttaactgatattgtgattgaaggaatgggcctcattacaggctngaaggaatgaaagtcccacctccatacttggtcttctcttacactacccagacaggggtattggagttctttattacaggctcacatatggaaaagtatagcctacccactcagcctttgctggtggaaatggaggttgagccacagttttttctgtgaaatttggctggagtataacagttattatctaaaaagtgctctatcttgctgggatgcctcttgtcttttggatatagagagaagacattcatttgggtaaatatgaacccattggtgtttccaggttgccagattcttcatctccaagttatagatatgtgaggcaaaaat

SEQ ID NO: 1677 - DNA, 661 bp, Homo sapiens
  misc_feature [331]..[331]: Chromosome 3, SNP identification no. = rs11714226
  misc_feature [331]..[331]: allele = t, in linkage disequilibrium with rs6781630, respectively
  misc_feature [331]..[331]: n is a, t, c or g
aggacactgcttcttttcctgtcctctcatgagactgctgtttttatcccacagcttaagtgactctgtatgagcagaatgaggttgacacatgtccttccagatcctcattgctatttccagaactttttcctctcttcacttccaaaaacctcagctcctttgagatgcatgctcaaagcctatgtcatctgctgttcccacatcctacagccacctcctaactcctcagacatcgttcttatttcattgttttcctctcaattcttgtcattgttcttggttatttcaacatgactgaaaatccggtcaatgtcatagacacactgtnccttgccttactttcaattatcttttcctctaccactttacctccctcagcaacttatttttgctcatctccaaaatatcagtgtcaaccttctcattctttatgcaccctctcactaattcttattgaaaatgaccacctaagattgctggcctaaccagattataacacaagaatgccctcaataagaaggcatgtattagagtcctggaagtgaagaagaatgaaagatagtagtggcaatcagaagttatttcaaaataaaaagagaaaaccctaagaggaaaaaacaaagatggcaaatgctactaaaaaaaaatcagattccct

SEQ ID NO: 1678 - DNA, 661 bp, Homo sapiens
  misc_feature [331]..[331]: Chromosome 3, SNP identification no. = rs4491850
  misc_feature [331]..[331]: allele = c, in linkage disequilibrium with rs6781630, respectively
  misc_feature [331]..[331]: n is a, t, c or g
taagccacaaggacgaaaattcctatgcaagtctttgtgctgtgctgggctcagacccagtggacttggagggcacatgaccttctgagataccagccagatggctaatggagtgcttgtgccacctcgctcccaataccagggagtgcaatttgcagcaataaaaaaagcaactccttacttctgctcgaagagaggagagaaaagagtaaagtggactttgccttgcatcttggatatagggcactagacagagttgtgaggccctcattccaggcccaagttcctggattacacatgtaaacacaccctaggccaaaaggaaacagangtcttaaagggaggacctagtccttgcaggattcaccacctgctgactaaagaaaccttggataaccagcagcaatacccaggtagtatgccataggccttggatgagactgagaagacctgacttcatgtgagaaccagcacactcccagctatggttgctgcagggagagactccttctgtttgacaaaagtggaaggaaaagtaaataggactttgttttgtaccttaagtaccagctcaatcatagagcaaccattgggctcttgaggtccccaaatcaaagcctagggtcttgaatgctatttctggacttgtcctggaccagag

SEQ ID NO: 1679 - DNA, 661 bp, Homo sapiens
  misc_feature [331]..[331]: Chromosome 3, SNP identification no. = rs7430395
  misc_feature [331]..[331]: allele = t, in linkage disequilibrium with rs6781630, respectively
  misc_feature [331]..[331]: n is a, t, c or g
tgaggccctcattccaggcccaagttcctggattacacatgtaaacacaccctaggccaaaaggaaacagacgtcttaaagggaggacctagtccttgcaggattcaccacctgctgactaaagaaaccttggataaccagcagcaatacccaggtagtatgccataggccttggatgagactgagaagacctgacttcatgtgagaaccagcacactcccagctatggttgctgcagggagagactccttctgtttgacaaaagtggaaggaaaagtaaataggactttgttttgtaccttaagtaccagctcaatcatagagcaaccantgggctcttgaggtccccaaatcaaagcctagggtcttgaatgctatttctggacttgtcctggaccagaggagcagacttcctgaagggtgactcccaggccagggagcattcaccacaagctgacttaagaggtattgggcctgaagataacatcagctgtagtctggcagtactccccatgggcctgtggtggtggcggccatgggttgaggctcctctgcctatggaaaaggaagggaatagtggaaaggactttgtcccatggttacagtgccagcttagccacaatataatagaacatcaggaatatttttaaggtttttgact

SEQ ID NO: 1680 - DNA, 661 bp, Homo sapiens
  misc_feature [331]..[331]: Chromosome 3, SNP identification no. = rs11706476
  misc_feature [331]..[331]: allele = c, in linkage disequilibrium with rs6781630, respectively
  misc_feature [331]..[331]: n is a, t, c or g
tcttgaggtccccaaatcaaagcctagggtcttgaatgctatttctggacttgtcctggaccagaggagcagacttcctgaagggtgactcccaggccagggagcattcaccacaagctgacttaagaggtattgggcctgaagataacatcagctgtagtctggcagtactccccatgggcctgtggtggtggcggccatgggttgaggctcctctgcctatggaaaaggaagggaatagtggaaaggactttgtcccatggttacagtgccagcttagccacaatataatagaacatcaggaatatttttaaggtttttgactccagtngctggttcccagatggcagctctgaacccacctagaggctgggaaaacttgctgccctgaagggaagtgcaaaaatctgactggctttgccacctcctgattgtagagccttagagccttaaccaaacaaaggttacagtcagatagttgttacactgggccttgggcaaaaccaaatgatgtgctggcctcaggtctgaaccactgaggtcccagtggtggtgaccaaaggagtgcttgggtccccatgacctcagctccaggcagctcagcacagagagagagagactccatttgtttgagagaaagtaggggaagagaacaagagtc

SEQ ID NO: 1681 - DNA, 661 bp, Homo sapiens
  misc_feature [331]..[331]: Chromosome 3, SNP identification no. = rs7619047
  misc_feature [331]..[331]: allele = c, in linkage disequilibrium with rs6781630, respectively
  misc_feature [331]..[331]: n is a, t, c or g
atggcttcactgctgaattctattaaacatttaaagaagtactaacaccaatcctactcaaactattcagaaaaatatcgtgaggagggaatacttccaaactcatcctacaaggccagtgttaccctaccaccaaaaccagacaaagacccatcaaaaaaagaaaaccacattccaatatccctgatgaatgttggtgcaaaaatcctcaacaaaatattcacaaaccaaattcaacaatacatttaaaaaaccattcatcacaatcaagtgaaatttatccctgggatgcaaggatggttcaacatacacaaatcaatcaatgtgatanattatatcaacagaatgaaagaccaaaaaaagattatctcaattgatgctgagaaaacatttgaaaatattcaacatcccttcatgataaaaccctcaaaacctgagtatagaaggaatatacctcaacacaataaaagctgcatatgacctactcacagctagtatcatattaaatggggaaaaagctgaaagcctttcctctaagatctggagcatgacaaggattcccattttcaccactgttattcaatataatacttgaagtcctagctagagcaatcagaaaagataaagataaaaagagcatccaaactggaaaagaagaagt

SEQ ID NO: 1682 - DNA, 661 bp, Homo sapiens
  misc_feature [331]..[331]: Chromosome 3, SNP identification no. = rs1521268
  misc_feature [331]..[331]: allele = a, in linkage disequilibrium with rs6781630, respectively
  misc_feature [331]..[331]: n is a, t, c or g
ctggtcaagggggaaaatctatctagtcaagggggaaaaggtcagaaattagtacacggacccattacatggtatccatagttgttggattacttatgtttgagtcaactttcttgaaaagtctatacggttgttactttataagtgggttcagttgttctcaaatagcctttttagtgtctccaaaatctattaaataactccttcaaatacaattagggatagctgttggaaataaaatagatcttgcttagctatcaaattcaagattctgtgctgagagtagaccagactgatatcagcagcctattttaggtcaacatctctagangcagagcctgagacaagaatcaagtacatgtggtttgctgggaaagcactcttatgagaaacctgtgaaggaaggatggtaggaagagcaagaggaagatgctgagcaagaatgtggtctcaggcatagtctggtctagccctgatatatagaggggtctggagagaaatccacacctcagaggcatcccttctgaaggaaaagaagcttataccccataactttgcaggccagatagtttccctcattccagggtaactttccagaaaagatgggtgtctgtgaaacatgagcagctgacgttcacagaagctgagaagatgggtgcac

SEQ ID NO: 1683 - DNA, 661 bp, Homo sapiens
  misc_feature [331]..[331]: Chromosome 3, SNP identification no. = rs1521269
  misc_feature [331]..[331]: allele = t, in linkage disequilibrium with rs6781630, respectively
  misc_feature [331]..[331]: n is a, t, c or g
tctcaaatagcctttttagtgtctccaaaatctattaaataactccttcaaatacaattagggatagctgttggaaataaaatagatcttgcttagctatcaaattcaagattctgtgctgagagtagaccagactgatatcagcagcctattttaggtcaacatctctagaagcagagcctgagacaagaatcaagtacatgtggtttgctgggaaagcactcttatgagaaacctgtgaaggaaggatggtaggaagagcaagaggaagatgctgagcaagaatgtggtctcaggcatagtctggtctagccctgatatatagaggggnctggagagaaatccacacctcagaggcatcccttctgaaggaaaagaagcttataccccataactttgcaggccagatagtttccctcattccagggtaactttccagaaaagatgggtgtctgtgaaacatgagcagctgacgttcacagaagctgagaagatgggtgcacaacacaggggaactgggggaggcactaaagtgtctactacgcagtctctttgcagagtattgtcttacttggcctaatttttgtctagcaaaactgtataagaaccaatgctagaaaaatcttattccagcacctccagacccttgcaaggctctttg

SEQ ID NO: 1684 - DNA, 661 bp, Homo sapiens
  misc_feature [331]..[331]: Chromosome 3, SNP identification no. = rs1402563
  misc_feature [331]..[331]: allele = t, in linkage disequilibrium with rs6781630, respectively
  misc_feature [331]..[331]: n is a, t, c or g
ttaaaatggaatagtaatatgcatctttcctatttgttggaggagaaaatgtttgaagagtcacttatgcagtgtttggctcattgtgtgcacagctcaataaatagtatgttattgcagtggcatatatttctaagaattaatctatgccgcctacttgcagccactgaacttcattccccaagtccaaacaactggattgggcctacgcactacagaacttcccccaaaaaaactataaatactcacatgttagccaaaaaatccatgcaccagagcacaggtcagaaaagtggggttgcattcttatagagggcaacattctcttccnaaaagacaattttaaaagacacacagcattggggaaaggaggaggaagaaaacttttggaatagagaggataaaatggagaatttgtaaaccacagcaagctattgcttgcattaccagcaaagaagagctttgagtaaaccaagatggtgctaagttgttatccttcccattgccttctgatgaggaccacaaattacctacagccaatccattactctttgtcatctgtgtggagtaatacttgtcagatcttggaaattctgtccagcctccatccaaacaattctatgtggactaccacaatctgatagcctgggttccttataag

SEQ ID NO: 1685 - DNA, 661 bp, Homo sapiens
  misc_feature [331]..[331]: Chromosome 3, SNP identification no. = rs11714086
  misc_feature [331]..[331]: allele = g, in linkage disequilibrium with rs6781630, respectively
  misc_feature [331]..[331]: n is a, t, c or g
tttctttatttgtgtagaatgtggtgtccccttccctttctccttctcctttcaccccagctccaattagaaaattttattgtacaaaattccactccagaggaatctatttcaaatttaggaagccattggtgcgtaaagaacacttattctaagagggcaggacagagtgtgccatgtaatcaaaggcaattaaagacattcatgcaattgtgaatatacatcctctgcatatacaattgttcaaaaagcctacatactgtggcactggatggttttcaaaagacatttaaggcacaataagcatttatttggggcttgggaacatganttttgtttgtgttcttatgcatgtttggcaaatacaatgcaagctctgctttcagaacatttggccctaaataaaaagaaatgtgtcagcaaatccaccaaggagtacagtaaacccaaaacttcttctgttggatccagagagagaccgaggtaaattttgtttgttttctagctaaaagcaacatctggatgcaattgctaggagttctggctgctttggccacatctagccaagaagcagaaaaatcctaccaaaggtccagtattcactgcaacatttgtagcacacccaaagcacaggttcaaggcaaatgtttatgtgagctga

SEQ ID NO: 1686 - DNA, 661 bp, Homo sapiens
  misc_feature [331]..[331]: Chromosome 3, SNP identification no. = rs17248831
  misc_feature [331]..[331]: allele = g, in linkage disequilibrium with rs6781630, respectively
  misc_feature [331]..[331]: n is a, t, c or g
gcagcactgaatccatcttattgaaaagggagagagagcttggaagagaaaaagtaagctttcagaatccggaatgctgggggatttcgaagccatgtaggtcactgtgctcagtgaaaactatggggcgtgtgcccatcatcacagaaattgtgcctgaaggagtcctagaaaataccattttggtttttcttcctatttatcccccaagcctgattctctgagcattcaataactttcttttctctaaactagcttaaagcatgagccatacattgttcaagagtagaagttgtttggacacaatataaagtcttttaaatccttatcncaactgctctacccttcagtccaaaaacatgatgctgcctgttctcacaggatgaatgacgaattctggaaataaggcaggttaatttttttcctgctattccaacatcaactagatggctgttcactttattccagcaagcttatgttcaattttatatgtggctcagtgaatttgacttactctagcaaatctatattatctaaatggctaatttaatgatacacctaaatgaataagagtagcctttaacagaaacctattatagaatctttttcagattccttgaatctttggaaaatcctttcttggattctgtaatatatcatc

SEQ ID NO: 1687 - DNA, 661 bp, Homo sapiens
  misc_feature [331]..[331]: Chromosome 3, SNP identification no. = rs17248873
  misc_feature [331]..[331]: allele = c, in linkage disequilibrium with rs6781630, respectively
  misc_feature [331]..[331]: n is a, t, c or g
gaaaagggagagagagcttggaagagaaaaagtaagctttcagaatccggaatgctgggggatttcgaagccatgtaggtcactgtgctcagtgaaaactatggggcgtgtgcccatcatcacagaaattgtgcctgaaggagtcctagaaaataccattttggtttttcttcctatttatcccccaagcctgattctctgagcattcaataactttcttttctctaaactagcttaaagcatgagccatacattgttcaagagtagaagttgtttggacacaatataaagtcttttaaatccttatcgcaactgctctacccttcagtcnaaaaacatgatgctgcctgttctcacaggatgaatgacgaattctggaaataaggcaggttaatttttttcctgctattccaacatcaactagatggctgttcactttattccagcaagcttatgttcaattttatatgtggctcagtgaatttgacttactctagcaaatctatattatctaaatggctaatttaatgatacacctaaatgaataagagtagcctttaacagaaacctattatagaatctttttcagattccttgaatctttggaaaatcctttcttggattctgtaatatatcatctcctcattttcttcctacatta

SEQ ID NO: 1688 - DNA, 661 bp, Homo sapiens
  misc_feature [331]..[331]: Chromosome 3, SNP identification no. = rs17248901
  misc_feature [331]..[331]: allele = t, in linkage disequilibrium with rs6781630, respectively
  misc_feature [331]..[331]: n is a, t, c or g
tatatatgtatatgaatgtgtgtgtatactttgtgtgtgtgtttacatatacatactttatttgtttcagaatatatatttataatatatgtttatatgtgtacatacatatgtatatcctctgtgtgtgagtgcgtatgtgtatgtgtatttatatcttgaaacaaataaagccctcacctcattctgccaacactgaagtgtatcacctggcattccatagattctgtggattgaactgaattaaagacagccctggagctgaaactcagcttcccagctcttgagcacagggcagcaggtgggatgatttgaagatcatgatgcagtngcctccgatttacccttgcttataagagcttatatcagaagccgggtgagcctctggaattacatacaagagtgagtgtccattgggaacaggaaacaagattgggaatgggagatgaagggacaataaataaaataatacaagagagactgtgcagtaaataaggataaccatgtactacaaactgaggaatggggatgatcattcccattctccatacctaggtagaaaaaatattcttcactgaaagccaggatattatctcttttaatccttacaagactgagatatacattatcctcattttattagggagcagaaaaggtgaac

SEQ ID NO: 1689 - DNA, 661 bp, Homo sapiens
  misc_feature [331]..[331]: Chromosome 3, SNP identification no. = rs17195706
  misc_feature [331]..[331]: allele = t, in linkage disequilibrium with rs6781630, respectively
  misc_feature [331]..[331]: n is a, t, c or g
acagggcagcaggtgggatgatttgaagatcatgatgcagttgcctccgatttacccttgcttataagagcttatatcagaagccgggtgagcctctggaattacatacaagagtgagtgtccattgggaacaggaaacaagattgggaatgggagatgaagggacaataaataaaataatacaagagagactgtgcagtaaataaggataaccatgtactacaaactgaggaatggggatgatcattcccattctccatacctaggtagaaaaaatattcttcactgaaagccaggatattatctcttttaatccttacaagactgaganatacattatcctcattttattagggagcagaaaaggtgaactcaagataggtacttgtgtaagttcactccattgacaaatagggatgaaaacccatccctattggctccacagcctgtgtttccaccataatacaactttcttttctgaagtttatgctgcatgtggttttctattgatgtgcaatattatggttatgttgtagtaaagcgctcttcccatgggccacatacatttcattttttctctgaatcttacttgagttttcttcattctagaggcagactgcaaacatgtggcttttgaagctggaaagaggctacttttggt

SEQ ID NO: 1690 - DNA, 661 bp, Homo sapiens
  misc_feature [331]..[331]: Chromosome 3, SNP identification no. = rs17195741
  misc_feature [331]..[331]: allele = c, in linkage disequilibrium with rs6781630, respectively
  misc_feature [331]..[331]: n is a, t, c or g
gcaaacatgtggcttttgaagctggaaagaggctacttttggtggtgtctatgtaaacatatagaaaaaatatataactaacattcatatccttcaaaaagaatatctggataattcaagtgactgtaataaaactttcacattctaccaccattttgatacataaaaagagctgcaaaaactccaatcacagagtctttgtcaaatatccttactatgtctacaactcaccagcgttctttaaaaaaaaaaaaagacatttgaaaagtctccaggtaagccacaatgaacgagccccactccttcttcataaatcactctattgtgtagngatgcaccatcaagacaggccacatttatctccccaaagcaagcctggcaagaatgtgttcagaaaatattggtcatgttatctttacaaaggttaagagaaggatttgcttatctataatgatttatggaactgacaagtgggtgtacaaatgtggccaggaaatgcacaagagtagacagaatggcttagaacaaaattacagtgtcagggcacaaagcagatagctccatcctataatgggacaagagatctgggattcataaatcacgtttgtcaagaataaataaaaagagaaccagatgaggccagtagcccttgttgttttct

SEQ ID NO: 1691 - DNA, 661 bp, Homo sapiens
  misc_feature [331]..[331]: Chromosome 3, SNP identification no. = rs11705862
  misc_feature [331]..[331]: allele = c, in linkage disequilibrium with rs6781630, respectively
  misc_feature [331]..[331]: n is a, t, c or g
tggcttctgtttgtgtgtcctgtccagattggactttccttgtgactgttaaatgcttttctgtgacttgacaatttaagcagtgaacaggtgtatctgtgcaagaccccgtgtcaaacccatccaatgaataaatcctcagtggctacaacaggaatgcctgaattctagttctagttctgccaatatctatctgagtgactttggacaagtttcttgttttcatttcttccgttttgcaacaccatttaaaaaagaaacatcatccatcaggtagaaaagctgagataataatacagtcaggccaagaaaaactaaatgaagtaattcncatgccctagccccatggctatttcattaccaagtatgttggagggtttggaggatgaggggggaggacaagtggcaaatatttattaaatagacttaaagacaagtctcatatatttagatgaagaaatggaatagatgtgtgctcaatttgtcagccttttaattctgaaattacataattgaccttagaaaggatagctaaccatctgctgatttaattgacattttaacaccaactgaactgttctggaataaaaatactttctgacttcctggtttttgcaaaacattctcttgcgttttattctgaccctaacaaaattcaaag

SEQ ID NO: 1692 - DNA, 661 bp, Homo sapiens
  misc_feature [331]..[331]: Chromosome 3, SNP identification no. = rs7621934
  misc_feature [331]..[331]: allele = t, in linkage disequilibrium with rs6781630, respectively
  misc_feature [331]..[331]: n is a, t, c or g
agccctccactttctcagttccttaagcagaaaacacaagagagtaagagtcaaaagagttgcaaaagaaggctgatcttcccaggacagggaaaatccaacagatatgggagcccaggattttttcaaatgttctttttgttgaactatagcatatgtatagaagagttcaaaattacacacgtacaggttgatggctcatcacagaaaaacacacccatctatcaaccacccagattcagaaatacaacattaccagcattccagaaatccccctcaagtgcccccaattagcagcctttcctcctcctcgaaagaaacctgacttctntccccaggcattagtttgtctatgtttgaattctatataaataaaattacacagaacatattattttgggtcacatttctctagctcaacattgtgagacttttccatattgtcacatgtatctcattcatttttatttctgtatagtattccatttaatgaatgaattaataaatgagtattccataatttatttattcattctaatgccgatggatttttggtgtatttgcagtttggaactactatgaacaaaaatgctacaaatattattgtactgacttttagcacatatatgtatacagttctgttgggtagatacctagagtt

SEQ ID NO: 1693 - DNA, 661 bp, Homo sapiens
  misc_feature [331]..[331]: Chromosome 3, SNP identification no. = rs6780039
  misc_feature [331]..[331]: allele = c, in linkage disequilibrium with rs6781630, respectively
  misc_feature [331]..[331]: n is a, t, c or g
ggaagagagaggagatgcttcaatctagaggtctcaacagtcattagagcctgttgggtgaccttggctaagacaggaataaggtttaacaaagaaatattgtaagtgttattccaaaggggacaaggaaagaaaggaaaaagtagagactcaaagtggaattaacaaagagagagagcaggtattgtaaccaaggcccaacttattttccctaattctgggaaactgattccacacctacttacaccttaagacatttctagaaatattctcaatatttagaccaatgaatttcaaaagcagaaattgaaaaggattatatttttactangttcgccttcccctcccagtcttttttttcccaatgtacttttttgggaaagatttctttttagtattttatgccagtttcaagagtggcataaggaagtacatatatacaatcacttcctgagtttcagtttggatttattattatactctcttcaggggaataagacttaagagttctctttaaggattttactgaattacaataattgaccaaaataaagttttcatattgtagtgctagaccaattagtggactgtgaaatcaatgtggggaaatataaactgcaagttttattttacaagttaaaaggaaaatactaagtttcat

SEQ ID NO: 1694 - DNA, 661 bp, Homo sapiens
  misc_feature [331]..[331]: Chromosome 3, SNP identification no. = rs3895901
  misc_feature [331]..[331]: allele = a, in linkage disequilibrium with rs1907645, respectively
  misc_feature [331]..[331]: n is a, t, c or g
atctattttgtttatgctgaaaatgtcttctgaaaggccgtattaatatttactttattttatacgtctaaattttttttaattctggggttatggaatttgaaaattgtttgattctaattaatcagaattttcttttatttagttctggaaacccataaaaagttattagctgtcagcagctttaatgccagtttattagaggccctgattcagtgcctgctgatagttattgtgaaggctgaaaggttaacaagaatgggctgctaccaaccgccttgccaggtgtttttccctgcagttaatggacttgagccaattgaaattattnctctagaacaagttgcagacactcttaatcttcccatagaaacattgctaggggaaaaaaaatctgggatttgtattgttgcttttcaccattgtaaaatttggaacaattaaaataaactatagctaatcttctatttgtaaatgaaggcttgacaactctaaaaagaaagaaagaaatctttaaaaataatgtgcatgtgtagcatgtttcattaaactaataacagtcccttcaatgaaacaatgtgttgtaaaacctttcccaatttttcttttgaggcatggtggttaagggctacataagtattaacatgtctaagttctttta

SEQ ID NO: 1695 - DNA, 661 bp, Homo sapiens
  misc_feature [331]..[331]: Chromosome 3, SNP identification no. = rs6796852
  misc_feature [331]..[331]: allele = a, in linkage disequilibrium with rs1907645, respectively
  misc_feature [331]..[331]: n is a, t, c or g
atctgtaacctgttcaccactggttaggtggaaactaaggtggtcttgaggagttgcaggaggaaaccagagtcgaaaagttacggaaacactatggttctttaaggaaatagacataatttattttctttcttgagccagatagctgatgttcagttgctagatgcaactctggtagaaagaaggcatgggtagagattgagtagggagtcagtttatatcactgacgactttagacaaaaacaattgagaaccatcattgtaccagaatggaatgtgcgaggtttcttaggggctagattcaggtaactatggtgataggaggataganaagctctacctatacccatggctcagctcctgtagatggaaggaaataaagttgtttctgagaatggagagacacctgagacagtgagtgaagacgcaatacagtgaggtgaaaacttctcctaacttctaagcttataacacaaccttgtagggtgtggcgaaaaccatagatgctatggtttgaatgtttgtctccttccaaactcatgttgaaatttaattgccattgtaacagtattaaatgatgggactcttaaaaggtgattaggctatgaaggctctaccgtaaagaatggattcatgctgttatggaagtgggctcattatt

SEQ ID NO: 1696 - DNA, 661 bp, Homo sapiens
  misc_feature [331]..[331]: Chromosome 3, SNP identification no. = rs4143023
  misc_feature [331]..[331]: allele = t, in linkage disequilibrium with rs1907645, respectively
  misc_feature [331]..[331]: n is a, t, c or g
ggaataagggtttttgttaaagaatgcaagtatttgccagtgggagaaatgtagtaggataatactttgagatatggactgtagttctttataatctttcttctagagaaggtagctaaaatattccacatttatgtttcatggaataaatatgaccagaatcagaaacagagagagagagaaaaaaaaaaacccaacttttgaaaggccatttgaaaagacttttaaaactcctagttgggtgaaagactttggaatttctaaagcttaaagttaaaataaacaatcaagttggaaaaactcatgatcagagagaattagtatttcccanccctagtgactcaataaaatttgcttggactgagaagaaagaagtaatcagaagataagtaagagcgtttatgtatggtagagctgctatgctctgcccctccatacttgcttgaaaactggaaaggcacagacaaatcccagatttgaaagcaagatccattctcttcttcccagtgaataaccaagaaaatcccaagaccagacctccccctggtgcccagtatcatgtgagagcaaaaggaaggcttcagtgtcatgtctgaaatgagagagcgtagagcagcctcacagaatttctcacaacttacagcagcaatggaaagcagct

SEQ ID NO: 1697 - DNA, 661 bp, Homo sapiens
  misc_feature [331]..[331]: Chromosome 3, SNP identification no. = rs6439850
  misc_feature [331]..[331]: allele = t, in linkage disequilibrium with rs1907645, respectively
  misc_feature [331]..[331]: n is a, t, c or g
ttatcttgacttaagatttcattttgatcaaatgggaaccaaaaatacaaaattaacttaagatataggaaaacaaacaaattaacactttttgcccacctgagttttgtggaatgacattcatacccattacagtttatgtcttagtccattttctgctgctataacagaataccacacactcagtaatttataaataaaagagacttatttggcttatggtttttgggactgggaagtccaagatcaaggggctgcatctggtgagggcctccttgctgtttcataacatgatgaaagatatcacatggtgagaaagggctagagaggnaaaagtacttgagacagatagaggaaaaggagggcaaacttctgagataatggcattaatccatttatgagggcagaggtttcatgatctaatcactccctaaaagttttacctattaataccatcacaatggcaattaaagttcagtgttggttttggaggagccatttaaaccctatcaatttgtatttaagttatttgtgtgccagctttaataaatccttttagatggtgaatttctataggacattggttgcctctctttttctgatttccaggcatcttaaaaatagtaggaacttaatatatatttgttcaattgtattgaat

SEQ ID NO: 1698 - DNA, 661 bp, Homo sapiens
  misc_feature [331]..[331]: Chromosome 3, SNP identification no. = rs4857377
  misc_feature [331]..[331]: allele = t, in linkage disequilibrium with rs1907645, respectively
  misc_feature [331]..[331]: n is a, t, c or g
ttatatattttacttatttattttgcttattgtctgtatggtgcttgatagtgtcttgttcactgtattatatctggtcctacaatagtggttgacatatggtaagtcctcgacaaatatttgttgaatggtcattgagcaagtaaatgagtatttactaaactatcagcagattattttctagttttatttaataatttatggtcatatgaaataaaactattcattaacaaaaagtttagaatgtattctattctttttcagtaccaaatctagtatttctcatccatcatcctgcagatggaaaaaaaatccattattaaattgcttntgtaatacaagtttgcatacaataaaagtataaaatatttttcaacccagagtacaagataaagtacttttctcctagtaaatacactttctaaacacaatgctatctgtgaaaagtcctgttagtaattagcataaagtttattttgcctcactgtaaatggtttcttaatcttagaatggtttctgaaccaaattacagaataagcattatgcttttgagtgaaagcaatgtgtctgtagacaatcttatgtttactttcttctttggttataatgttctttttcgccagaatttttaaccttcttatttctgcccatgaaaacccaa

SEQ ID NO: 1699 - DNA, 661 bp, Homo sapiens
  misc_feature [331]..[331]: Chromosome 3, SNP identification no. = rs4857378
  misc_feature [331]..[331]: allele = t, in linkage disequilibrium with rs1907645, respectively
  misc_feature [331]..[331]: n is a, t, c or g
catcctgcagatggaaaaaaaatccattattaaattgcttctgtaatacaagtttgcatacaataaaagtataaaatatttttcaacccagagtacaagataaagtacttttctcctagtaaatacactttctaaacacaatgctatctgtgaaaagtcctgttagtaattagcataaagtttattttgcctcactgtaaatggtttcttaatcttagaatggtttctgaaccaaattacagaataagcattatgcttttgagtgaaagcaatgtgtctgtagacaatcttatgtttactttcttctttggttataatgttctttttcgcnagaatttttaaccttcttatttctgcccatgaaaacccaatatattagctcagtcattttcaggttatagctccgaaagttactacaccctatatattaagggtgtagtaattttaatacttactaaagtatttgcttatcagttagctttccacaattttggcatcaagaaagggaaaatgacaatgttcttcctgaagagaggagaatatgatgttggtgaatactgtaatagaatttgtaatctaccttctaatgtttcaaagccccagagtgaggaggaagttccttgcacatgtagatataaaactaaggcagagggcctgcagc

SEQ ID NO: 1700 - DNA, 661 bp, Homo sapiens
  misc_feature [331]..[331]: Chromosome 3, SNP identification no. = rs1907645
  misc_feature [331]..[331]: allele = c, t
  misc_feature [331]..[331]: n is a, t, c or g
aatatttttcaacccagagtacaagataaagtacttttctcctagtaaatacactttctaaacacaatgctatctgtgaaaagtcctgttagtaattagcataaagtttattttgcctcactgtaaatggtttcttaatcttagaatggtttctgaaccaaattacagaataagcattatgcttttgagtgaaagcaatgtgtctgtagacaatcttatgtttactttcttctttggttataatgttctttttcgccagaatttttaaccttcttatttctgcccatgaaaacccaatatattagctcagtcattttcaggttatagctcngaaagttactacaccctatatattaagggtgtagtaattttaatacttactaaagtatttgcttatcagttagctttccacaattttggcatcaagaaagggaaaatgacaatgttcttcctgaagagaggagaatatgatgttggtgaatactgtaatagaatttgtaatctaccttctaatgtttcaaagccccagagtgaggaggaagttccttgcacatgtagatataaaactaaggcagagggcctgcagccttgctcagcatttggttctccagtaggaaagtgatgttcagagcttgtctggccaacctgcagcagcagacca

SEQ ID NO: 1701 - DNA, 661 bp, Homo sapiens
  misc_feature [331]..[331]: Chromosome 3, SNP identification no. = rs2055024
  misc_feature [331]..[331]: allele = a, in linkage disequilibrium with rs1907645, respectively
  misc_feature [331]..[331]: n is a, t, c or g
aagtgatgttcagagcttgtctggccaacctgcagcagcagaccagcacaattaagagagcaactggtttggtctgatggagagcagatctcatttacaactgcatgtttctttcaattccagagtacatggacattggacatggacattagtttaaggacattggtatggtgggaacaacctgagaataaagatgagatggaaggtgtggcatagactcagggtctgcagaagcagggagcggagaggaagatgcattggcttggaagggtaaggggatggaccaagctaagaaattttggatcacagggtatgaccacacaataaatcngctaacaatggctgaatgatcaccagctaacacacccaaagattagcttgaagctacagagtctccctcttgcaggtcccgagatcattcaaatatccacaccaagaacacaatatacccaagggtcagcaaattgcagtccacaagctgaatagtgcctgctgcctctttttgtgtgtcttggaagctaaaatgtgtgggttttttttttttttacatttttaaatgattgaaaaacaataaaaatattttgtaacacttgaatgttgtgtgaaaatcaaactatatatgaggtatccataaataaagtttcattaaatcatagctaca

SEQ ID NO: 1702 - DNA, 661 bp, Homo sapiens
  misc_feature [331]..[331]: Chromosome 3, SNP identification no. = rs2055025
  misc_feature [331]..[331]: allele = a, in linkage disequilibrium with rs1907645, respectively
  misc_feature [331]..[331]: n is a, t, c or g
gagcagatctcatttacaactgcatgtttctttcaattccagagtacatggacattggacatggacattagtttaaggacattggtatggtgggaacaacctgagaataaagatgagatggaaggtgtggcatagactcagggtctgcagaagcagggagcggagaggaagatgcattggcttggaagggtaaggggatggaccaagctaagaaattttggatcacagggtatgaccacacaataaatcggctaacaatggctgaatgatcaccagctaacacacccaaagattagcttgaagctacagagtctccctcttgcaggtcccnagatcattcaaatatccacaccaagaacacaatatacccaagggtcagcaaattgcagtccacaagctgaatagtgcctgctgcctctttttgtgtgtcttggaagctaaaatgtgtgggttttttttttttttacatttttaaatgattgaaaaacaataaaaatattttgtaacacttgaatgttgtgtgaaaatcaaactatatatgaggtatccataaataaagtttcattaaatcatagctacacccattcatttacatctttacatcttacctatgattgttttcctgcttcaacggcagaattgaatagttgcaatagagact

SEQ ID NO: 1703 - DNA, 661 bp, Homo sapiens
  misc_feature [331]..[331]: Chromosome 3, SNP identification no. = rs1551423
  misc_feature [331]..[331]: allele = a, in linkage disequilibrium with rs1907645, respectively
  misc_feature [331]..[331]: n is a, t, c or g
tgcatgtcctttggtcaattacatatcctttgctcaacaatggattatgtaatttgttgcttcttatctgtaacattaatcacaacttttctttcattttgatatttataattgttattttttataattaaagaaaaataactttgaagtattatcaacaaaacttaaaaacaatttacaagaaaaaaatcctatatataggacatttgagaaagtgggcttaaatatttaatagtaactagtgaattgcaactaaatgtcagaaaaacaaacaaggaaacatgtatctcttctatttggtgacttctttgaattgatgatattcccaatnttgcttaaagaactaaagtaaaatttagcatagctcctcctaattttggcacagctggtcttctctactctcggaaaagtaagtagagtaaaaaaactccttccttagacagtgttctccattcttttcctgtctctttgagctcttctctgtctttgtctttgccttctgcatgcataacaatcataacaggattcctatttaaataaacacaatttttttgtcagactgagggcaggcctcttaaagtgaagtctcttagtgaggaacccaagaatattccttgcagcaaattttctctgagtgagccttatgcacagtaaagtttga

SEQ ID NO: 1704 - DNA, 661 bp, Homo sapiens
  misc_feature [331]..[331]: Chromosome 3, SNP identification no. = rs1979676
  misc_feature [331]..[331]: allele = c, in linkage disequilibrium with rs1907645, respectively
  misc_feature [331]..[331]: n is a, t, c or g
aaactctggacatatctgaacatctgaaagaacaaactccggacacaccatctttaagagctgtaagagtcacctcgagggtccgcggcttcattcttgaagtcagagagaccaagaacctaccagaaggaataaattccggacacataatcattatctctctaatttgtttcttaccactcctagcctcatactttataatggtcttattaaatgttttataagtttccatgctgtttcttgcctgggtttttatgtagcgtactttttcttcttggagccctatttaccatcctctttaacctgatcatttctccatatttaggtctcncttcctctggaagtgagcctttcttcccacctctgggttgtgggcacagcatcacagcagtgtccgaaacaagaaggaagaaggagtggtgtcagccagcactattctaacatattatttctttcacagtgtttttcagaattggcgtcaaatagccacctgtagaggcaagggaggctaggaataaaagcagctttcaaaggaaatgagatagcaacatcagttcaaacagatcatgattcatcactcggaccaaacaaattatagttgagaacatagctgggatcctgttatcaagaaagaagggaaaacggcgtaaggggaggcaat

SEQ ID NO: 1705 - DNA, 661 bp, Homo sapiens
  misc_feature [331]..[331]: Chromosome 3, SNP identification no. = rs9876599
  misc_feature [331]..[331]: allele = c, in linkage disequilibrium with rs1907645, respectively
  misc_feature [331]..[331]: n is a, t, c or g
cttttgaaaatgtaaagggattaatacatatcttgaaaaatagtatgcaacgagaaagaataggcctttatgttgccttcttgtataaactgtactcttgggtgaccaaatggtagataagagaagtatctgtgtagaacgttatttcagctaattaaaaaatataaaattagaatatcagcattttataccataaaatatgctccagcatgaatgatttttacccagaatgtgaagtgaactggtagcttctctcatagcttaccaaacaggactttcttctctgtcagtctgcatgtatgaaatacatacatgctggaataagactctnatactgtcttcttatcttttaaaaaaattagtgtatcatgaacattttccctcttttagcatccatttagcagacattacaacatttacaatgactatataatagtctagtgtatgagtatatcagtttcataatttaaataacatgctattttcattcaaaatttactttgttgtcttatgtatttgttttctattatgtatatggcttccacagctccttttgcagtaaaattttttttgtaaccatagtttttttttagtcaagtataattattagttaaacatatttttaccaatttggacacaaattgtcaaattgtccttcaga

SEQ ID NO: 1706 - DNA, 661 bp, Homo sapiens
  misc_feature [331]..[331]: Chromosome 3, SNP identification no. = rs9809636
  misc_feature [331]..[331]: allele = a, in linkage disequilibrium with rs1907645, respectively
  misc_feature [331]..[331]: n is a, t, c or g
tcagtttcataatttaaataacatgctattttcattcaaaatttactttgttgtcttatgtatttgttttctattatgtatatggcttccacagctccttttgcagtaaaattttttttgtaaccatagtttttttttagtcaagtataattattagttaaacatatttttaccaatttggacacaaattgtcaaattgtccttcagaaaagttattagcctacatgtccatcagtagagtgcagtcctccatatgcctgctgtttttttaaggacaggtggccctctgtatttgtgggttccaaattgggttcaattaaccacatattgnaaatattacacacatatgcacacacacacacacacacacacacagacacacacacattcaagaactgagttaaagattaaatattagaacaaaaagatcctcctagtgcccttatccacgagggtttaggagctcttatctgaggacctggggcgggggagagatcaatatatatgtttcttattatatcagaatatcacacgtttattatttctctttaagtctttagtgtttgtgtttgtatgcctttaatgaaaccttaatgaaactttccactattttaaatagtgcaaaagctggtaaaataaaaacttaaaaaatgaatatgga

SEQ ID NO: 1707 - DNA, 661 bp, Homo sapiens
  misc_feature [331]..[331]: Chromosome 3, SNP identification no. = rs4857398
  misc_feature [331]..[331]: allele = t, in linkage disequilibrium with rs1907645, respectively
  misc_feature [331]..[331]: n is a, t, c or g
ctttttaatctttggggtattctctggtagaagagctcagtttttgcctaatatttttcttaaaacaacagtccttgctattttaatctgtcactccctggagcaaaagagcatggctgagcatccaagattacatttcctgtctcttatcatataactgaagcttctcttcaatgtagtattttgaacctaatacaactttctttctgtgtatggaaggccttcatattcttcatattcttctcttttatcttcctgttttcattcctttcatcagatccagcattatatattaaacaagctaattagttaaaaggcatttcaggaatanattagaaaatgtagaaagtgaggaaggtgcattggagatttattcagcacctacagtttatatgaaggaagagagaatggagatcagtgaagttaggacttttcaaggttccaaagcaagttcacagctgatattttttgtaactctactcaggttgtggattagtttacactgtgattcttgtgacaacaatgaaaataattccttagtttattaatggcttcaaaaagactaagttagcaatacaaatcctctaaagttgtatgcagaaaatacatattgctgtttgcataattggttttctagaagcatggatataatgctaaataa

SEQ ID NO: 1708 - DNA, 661 bp, Homo sapiens
  misc_feature [331]..[331]: Chromosome 3, SNP identification no. = rs9872499
  misc_feature [331]..[331]: allele = a, in linkage disequilibrium with rs1907645, respectively
  misc_feature [331]..[331]: n is a, t, c or g
aaaattcctatattgaaacctaatctccaaggtgatggtattaagaggtggtgcctttgggaggtgattatttcatgagggtagattccttacgaatgggattagtgcccttatgaaaaaaaaaaaaaacaactgaggagctggtttccaccatgtgaggatacatagaaggtgccatctatgagaaacaggccctcaccagacatgaaacctgccaacaccttgatcctggacttcccagcctccagaactgtgagcaatagatttctgttgtttacaaattacttactcaaaggtatgttatcgtaacagactgcacggactaagacanttttcatcttggcagattttactactgaaatgttctctcatttatcctcagtcttgtattgctctcttaaatcttcatttatgtcttcattaactctttacagacttccgaaagagttacctgttggtttccctgcttttgaaagtcttagcaaattaccctgtaaacatatgtgatgttaatctgcttaaaacatagcctcagatcacatgctcaaaggcttccaatggtccctactgacttataaaggttttcatcaaaacgtactagattttgtgggaaatggcttcaaactacattgccattgttttttctttcacttttcaacaa

SEQ ID NO: 1709 - DNA, 661 bp, Homo sapiens
  misc_feature [331]..[331]: Chromosome 3, SNP identification no. = rs9877810
  misc_feature [331]..[331]: allele = a, in linkage disequilibrium with rs1907645, respectively
  misc_feature [331]..[331]: n is a, t, c or g
cccaggctggagtgcagtggcacgatatcggctcactgcaatctccacctcctgggtttaagcgattctcctgcctcagcctcccgagtggctgggattacaggcgcctgccaccacacctggctaatttttgtatatttagtagagacgggggtttcaccatttggaccaggctggtcttgaactcctgaccttgtgatccacccacctcagcctcccaaagtgctgggattacaggcgtgaatcaccacgcctggccatctatagtatattctttatgacacttaactatattacctggcatgatagtttctcaaatagaatataaaanttttgaagacaagaactatacttcttttccctctgtatctcccatagatcttgcacaacacttcacatgcagtaggtgggtgcttaataactattgtttaaattattctacacagttgagccacactgataaaacaaaccactagtaaacagatttcagttcataattaatgtttgtgatatttcctgtaaactggaaaagctaagattctcttagcagtggtcttttcagaaatgtttgtgtaaattccaaatatcaaactctgcactactgtgaaactatttcagacgtcaagtcaacttagtgtttgaaactaaacaggaaaatgct

SEQ ID NO: 1710 - DNA, 661 bp, Homo sapiens
  misc_feature [331]..[331]: Chromosome 3, SNP identification no. = rs9870816
  misc_feature [331]..[331]: allele = c, in linkage disequilibrium with rs1907645, respectively
  misc_feature [331]..[331]: n is a, t, c or g
agaatataaaaattttgaagacaagaactatacttcttttccctctgtatctcccatagatcttgcacaacacttcacatgcagtaggtgggtgcttaataactattgtttaaattattctacacagttgagccacactgataaaacaaaccactagtaaacagatttcagttcataattaatgtttgtgatatttcctgtaaactggaaaagctaagattctcttagcagtggtcttttcagaaatgtttgtgtaaattccaaatatcaaactctgcactactgtgaaactatttcagacgtcaagtcaacttagtgtttgaaactaaanaggaaaatgctaagtgttaatgaatataaagaaggttaaatatttttacttgttattattttttttacaggaaaacctaaactgataaaaataaggaggaggaggatgttactgcagtgaactgggttcttttaacaatttattccacgtattgtttgagaaaggccatgtgttctcaatgaagtgagatcgccacatgttgtctcagtgtgtcaccactcaagcagagggagaattgtgtccattgttaagaagtggaaattgccagagatgaagacttaaaagaaaaaatgcccctggggttctcattcagccattcagatttcttgt

SEQ ID NO: 1711 - DNA, 661 bp, Homo sapiens
  misc_feature [331]..[331]: Chromosome 3, SNP identification no. = rs9856020
  misc_feature [331]..[331]: allele = g, in linkage disequilibrium with rs1907645, respectively
  misc_feature [331]..[331]: n is a, t, c or g
gaagacaagaactatacttcttttccctctgtatctcccatagatcttgcacaacacttcacatgcagtaggtgggtgcttaataactattgtttaaattattctacacagttgagccacactgataaaacaaaccactagtaaacagatttcagttcataattaatgtttgtgatatttcctgtaaactggaaaagctaagattctcttagcagtggtcttttcagaaatgtttgtgtaaattccaaatatcaaactctgcactactgtgaaactatttcagacgtcaagtcaacttagtgtttgaaactaaacaggaaaatgctaagtnttaatgaatataaagaaggttaaatatttttacttgttattattttttttacaggaaaacctaaactgataaaaataaggaggaggaggatgttactgcagtgaactgggttcttttaacaatttattccacgtattgtttgagaaaggccatgtgttctcaatgaagtgagatcgccacatgttgtctcagtgtgtcaccactcaagcagagggagaattgtgtccattgttaagaagtggaaattgccagagatgaagacttaaaagaaaaaatgcccctggggttctcattcagccattcagatttcttgtgctgttaatacatgcc

SEQ ID NO: 1712 - DNA, 661 bp, Homo sapiens
  misc_feature [331]..[331]: Chromosome 3, SNP identification no. = rs9874681
  misc_feature [331]..[331]: allele = c, in linkage disequilibrium with rs1907645, respectively
  misc_feature [331]..[331]: n is a, t, c or g
agtaggtgggtgcttaataactattgtttaaattattctacacagttgagccacactgataaaacaaaccactagtaaacagatttcagttcataattaatgtttgtgatatttcctgtaaactggaaaagctaagattctcttagcagtggtcttttcagaaatgtttgtgtaaattccaaatatcaaactctgcactactgtgaaactatttcagacgtcaagtcaacttagtgtttgaaactaaacaggaaaatgctaagtgttaatgaatataaagaaggttaaatatttttacttgttattattttttttacaggaaaacctaaantgataaaaataaggaggaggaggatgttactgcagtgaactgggttcttttaacaatttattccacgtattgtttgagaaaggccatgtgttctcaatgaagtgagatcgccacatgttgtctcagtgtgtcaccactcaagcagagggagaattgtgtccattgttaagaagtggaaattgccagagatgaagacttaaaagaaaaaatgcccctggggttctcattcagccattcagatttcttgtgctgttaatacatgccaagcaatgtgttatggattcagaactgaaagccataatctttttcttataatcagctaaaaaatct

SEQ ID NO: 1713 - DNA, 661 bp, Homo sapiens
  misc_feature [331]..[331]: Chromosome 3, SNP identification no. = rs9883602
  misc_feature [331]..[331]: allele = a, in linkage disequilibrium with rs1907645, respectively
  misc_feature [331]..[331]: n is a, t, c or g
cctaaggaaatttttcagagccttgttctaaacactagcacttgctcccaataaaatgtcaataccacagatatattgaatgtccctatatgtatggtggtctgttgaagagctacaaacctctgtaatatctacagctttttcatcctctaacaaacaatttttatctgtttgtggcaatatgacccccactgagaatgcctgacattgtagtactagcatgcctagatcttgtcaagtaacttcatttccctagggtcaattttggcaaactttttgtgccagagtggcctcacattgttttcccttccttgatttcagctattttttnaaatctgattatggcttaaagattgcaactaactggcatttggggttatacctctgcatttagtaggctgagttacttctgcaagtaagagaaaagtaaaaacagtggtttccacaagtttgttgctcactctgggagtatgactcctctgttcagtgctgtctggaaggatcccagactactttcagttacactgctttgccaactctaggaagtggcccttgtccaagttggcttctacagcctacatagcaggaggaaggaacatagaagtagggagatgatcatgtgacagctgcctcttaagggaggtatctagaaagctgccac

SEQ ID NO: 1714 - DNA, 661 bp, Homo sapiens
  misc_feature [331]..[331]: Chromosome 3, SNP identification no. = rs9813037
  misc_feature [331]..[331]: allele = t, in linkage disequilibrium with rs1907645, respectively
  misc_feature [331]..[331]: n is a, t, c or g
attgaatgtccctatatgtatggtggtctgttgaagagctacaaacctctgtaatatctacagctttttcatcctctaacaaacaatttttatctgtttgtggcaatatgacccccactgagaatgcctgacattgtagtactagcatgcctagatcttgtcaagtaacttcatttccctagggtcaattttggcaaactttttgtgccagagtggcctcacattgttttcccttccttgatttcagctattttttaaaatctgattatggcttaaagattgcaactaactggcatttggggttatacctctgcatttagtaggctgagtnacttctgcaagtaagagaaaagtaaaaacagtggtttccacaagtttgttgctcactctgggagtatgactcctctgttcagtgctgtctggaaggatcccagactactttcagttacactgctttgccaactctaggaagtggcccttgtccaagttggcttctacagcctacatagcaggaggaaggaacatagaagtagggagatgatcatgtgacagctgcctcttaagggaggtatctagaaagctgccacattgcactctgacttatagcccatttggccagggtttagtcacatgcccacacctggctatgcaggagattgga

SEQ ID NO: 1715 - DNA, 661 bp, Homo sapiens
  misc_feature [331]..[331]: Chromosome 3, SNP identification no. = rs9816795
  misc_feature [331]..[331]: allele = t, in linkage disequilibrium with rs1907645, respectively
  misc_feature [331]..[331]: n is a, t, c or g
gtaatatctacagctttttcatcctctaacaaacaatttttatctgtttgtggcaatatgacccccactgagaatgcctgacattgtagtactagcatgcctagatcttgtcaagtaacttcatttccctagggtcaattttggcaaactttttgtgccagagtggcctcacattgttttcccttccttgatttcagctattttttaaaatctgattatggcttaaagattgcaactaactggcatttggggttatacctctgcatttagtaggctgagttacttctgcaagtaagagaaaagtaaaaacagtggtttccacaagtttgtngctcactctgggagtatgactcctctgttcagtgctgtctggaaggatcccagactactttcagttacactgctttgccaactctaggaagtggcccttgtccaagttggcttctacagcctacatagcaggaggaaggaacatagaagtagggagatgatcatgtgacagctgcctcttaagggaggtatctagaaagctgccacattgcactctgacttatagcccatttggccagggtttagtcacatgcccacacctggctatgcaggagattggatattgtcatctttattctggtggccatgtgcccagctgaaatggaagaat

SEQ ID NO: 1716 - DNA, 661 bp, Homo sapiens
  misc_feature [331]..[331]: Chromosome 3, SNP identification no. = rs6440046
  misc_feature [331]..[331]: allele = c, in linkage disequilibrium with rs1907645, respectively
  misc_feature [331]..[331]: n is a, t, c or g
tttttcagtttgtgttataagtagtattctaggttgttatataatcctcataattttaagggctttagagatgctgcaataaacattttcatgtatattaacttttccttgtgtaggataattttctttatctatgtgtctaccaaaagtagggtaattggatcaaaggctatgataattttgcatgtcttgaaacacaagaaaaaaatatttttccaaaaagaatcttccaattttgtcattttgtttcattagtgattgtttatttttcatcacttttattagttagatatgacactgtctgcttgattaccaaatattcttattttangcatttaaaaagccacattactcttatttcaatgtgttcttttgataactggcagagttgaacatttatacatatatattaaatattatcttaccaactttaattccaattactcatatactttcttcaaatgttagtattattttaaataccaatttgtacaagatttctatgcaatatagatatggtctttggaatgtaaaatttgctgtagatatgtgtctaaatctgttttctagttattataaaatcattattattatcattccactgatctttcttccctcatattctctgtcaaaatgcattcttcaggaaataaaaaattaa

SEQ ID NO: 1717 - DNA, 661 bp, Homo sapiens
  misc_feature [331]..[331]: Chromosome 3, SNP identification no. = rs9816169
  misc_feature [331]..[331]: allele = c, in linkage disequilibrium with rs1907645, respectively
  misc_feature [331]..[331]: n is a, t, c or g
tttctaccagagacaatatgatatatgagaaaatgatctggctttcggctcagctaaatttggggacaaattgcagctcattcactcccttcagtgtccctgggtaagtttactaacctttctgtctctccctattgtacgatttctaaaaggtgatatagataccttgcaaggtaggtgtgaagatctgtgataatctatatagaatatccactgtaatggctataatgaagtgggaattcaatagctgatagttgctactcttctccctaatccagtttatcctacatttttttttttcttggaaatgtatggcaaatatttcttaatnttgtttgcacctctatggccattttttttctatgcccatggaagacacagttaattgattgtagtgctgtattctaccgtgtttagatagtctttgaatctgattatcttataaatttgctgaggaagatactatattttttctttttttgtaagtattataatttccagtatacattgcatacaagaaaagacacattcattgaattatttctccatttgggcatttgaatcatattatagtttaattttgtacaatactggaaaaatgaaagcagtagaaattaatttgtgccataatattgaaaaaaatatatatttccccaggtta

SEQ ID NO: 1718 - DNA, 661 bp, Homo sapiens
  misc_feature [331]..[331]: Chromosome 3, SNP identification no. = rs6804969
  misc_feature [331]..[331]: allele = a, in linkage disequilibrium with rs1907645, respectively
  misc_feature [331]..[331]: n is a, t, c or g
agatactatattttttctttttttgtaagtattataatttccagtatacattgcatacaagaaaagacacattcattgaattatttctccatttgggcatttgaatcatattatagtttaattttgtacaatactggaaaaatgaaagcagtagaaattaatttgtgccataatattgaaaaaaatatatatttccccaggttagtctagaactcctggcctcaaatgatcctcttgcctcaaccttcctagtagctgggattacaggtgtctgctaccaaaagcaaaatgaattttcttttgagagctgatactgagtagaagcagtttntattataaatagattcataactctagcctgactaggttaactttcacctgattgatctctgctagtttcaggaagagatccagaatttaaagggcaaagagtccctagcactttgttgtttcttttctgtgatagtgctgaacgctctgagaacgttcagaagcaagtgagcttatacaaaccataccattagggaaaggtaaaagtactgcctcaagcactaggcctgcactgcccaaaagtgggacagcagttggtgtcaatctgaagcaaaagttcccaaagactatttcttcaaggaaggtggggagagttgtcatagacagtgct

SEQ ID NO: 1719 - DNA, 661 bp, Homo sapiens
  misc_feature [331]..[331]: Chromosome 3, SNP identification no. = rs6810367
  misc_feature [331]..[331]: allele = t, in linkage disequilibrium with rs1907645, respectively
  misc_feature [331]..[331]: n is a, t, c or g
gtatacattgcatacaagaaaagacacattcattgaattatttctccatttgggcatttgaatcatattatagtttaattttgtacaatactggaaaaatgaaagcagtagaaattaatttgtgccataatattgaaaaaaatatatatttccccaggttagtctagaactcctggcctcaaatgatcctcttgcctcaaccttcctagtagctgggattacaggtgtctgctaccaaaagcaaaatgaattttcttttgagagctgatactgagtagaagcagtttatattataaatagattcataactctagcctgactaggttaactntcacctgattgatctctgctagtttcaggaagagatccagaatttaaagggcaaagagtccctagcactttgttgtttcttttctgtgatagtgctgaacgctctgagaacgttcagaagcaagtgagcttatacaaaccataccattagggaaaggtaaaagtactgcctcaagcactaggcctgcactgcccaaaagtgggacagcagttggtgtcaatctgaagcaaaagttcccaaagactatttcttcaaggaaggtggggagagttgtcatagacagtgctatggtttaaatgtgtccctccaaaaccatgtgttggaaactta

SEQ ID NO: 1720 - DNA, 661 bp, Homo sapiens
  misc_feature [331]..[331]: Chromosome 3, SNP identification no. = rs2884903
  misc_feature [331]..[331]: allele = t, in linkage disequilibrium with rs1907645, respectively
  misc_feature [331]..[331]: n is a, t, c or g
catattatagtttaattttgtacaatactggaaaaatgaaagcagtagaaattaatttgtgccataatattgaaaaaaatatatatttccccaggttagtctagaactcctggcctcaaatgatcctcttgcctcaaccttcctagtagctgggattacaggtgtctgctaccaaaagcaaaatgaattttcttttgagagctgatactgagtagaagcagtttatattataaatagattcataactctagcctgactaggttaactttcacctgattgatctctgctagtttcaggaagagatccagaatttaaagggcaaagagtcccnagcactttgttgtttcttttctgtgatagtgctgaacgctctgagaacgttcagaagcaagtgagcttatacaaaccataccattagggaaaggtaaaagtactgcctcaagcactaggcctgcactgcccaaaagtgggacagcagttggtgtcaatctgaagcaaaagttcccaaagactatttcttcaaggaaggtggggagagttgtcatagacagtgctatggtttaaatgtgtccctccaaaaccatgtgttggaaacttaatcctcaatgcaacagtgttgggaggtggactaatgggaggtgtttaggccatgaggtctcca

SEQ ID NO: 1721 - DNA, 661 bp, Homo sapiens
  misc_feature [331]..[331]: Chromosome 3, SNP identification no. = rs921725
  misc_feature [331]..[331]: allele = g, in linkage disequilibrium with rs1907645, respectively
  misc_feature [331]..[331]: n is a, t, c or g
gtactgcctcaagcactaggcctgcactgcccaaaagtgggacagcagttggtgtcaatctgaagcaaaagttcccaaagactatttcttcaaggaaggtggggagagttgtcatagacagtgctatggtttaaatgtgtccctccaaaaccatgtgttggaaacttaatcctcaatgcaacagtgttgggaggtggactaatgggaggtgtttaggccatgaggtctccactctcatgaatggattaatgctaattataaaagggtttgagactgcgagtgtaatctcttgctctctccctctcacgtgcccttctaccttctttcatgngatgatgcagcaagaagatcttcatcagacatggccacttgatcttcgacctcctagcctccaggaccatgagtcaactaagtttctttttttataaattacctggtgtctggtattttgttatagcaacacaaaatggactaagagagtttaaataattgtcttttttctgttattctttgagagatggaacccacatattgagtgaatagtaaacaaatctccctttaggaatgaaaagaaaaacatttaaattcaggacactctctctattgatgtggtaggcagaattctgatatgaccctcaaaattcccccataccctagagta

SEQ ID NO: 1722 - DNA, 661 bp, Homo sapiens
  misc_feature [331]..[331]: Chromosome 3, SNP identification no. = rs9826212
  misc_feature [331]..[331]: allele = c, in linkage disequilibrium with rs1907645, respectively
  misc_feature [331]..[331]: n is a, t, c or g
gcagaattctgatatgaccctcaaaattcccccataccctagagtacacgtcctgtattattcactcctcttgagtgataatagaaagaatgtcactcctgtgattatgttccattagatgagaaaggtgaggaaattttgctggtagaattaagcctgcaaataaggtgattttgagataatcacatgaaaattatcctgggtaggcttgatctaatcagtcaagccattagaagagactgaggtcttcctgatgttggatggatttgaagcaacagtgatgttctcttcttggccttaaagaagcaaattgtcattgtgtggagagggngctatggaaggaacagtaggtggcttttagaggctagaacaatacatggctgacggccggcaataaagcagcaatctcagttttatagctgcaaggaaatgaattttgacaataaccagtgagcttgaaagaggaccctgagtctcagataagaacatagtcccagccaacactttgatttcacttggttagaccctgagatgatgatgcaattaaccagtgtccagattcatcaaatctgtgagataatacatttgcatgattctgaacctctatgtttgtaatgatttgttatatagcaatggaaaactaatactcttggctaagaaa

SEQ ID NO: 1723 - DNA, 661 bp, Homo sapiens
  misc_feature [331]..[331]: Chromosome 3, SNP identification no. = rs6440070
  misc_feature [331]..[331]: allele = a, in linkage disequilibrium with rs1907645, respectively
  misc_feature [331]..[331]: n is a, t, c or g
tgcaaataaggtgattttgagataatcacatgaaaattatcctgggtaggcttgatctaatcagtcaagccattagaagagactgaggtcttcctgatgttggatggatttgaagcaacagtgatgttctcttcttggccttaaagaagcaaattgtcattgtgtggagagggcgctatggaaggaacagtaggtggcttttagaggctagaacaatacatggctgacggccggcaataaagcagcaatctcagttttatagctgcaaggaaatgaattttgacaataaccagtgagcttgaaagaggaccctgagtctcagataagaacntagtcccagccaacactttgatttcacttggttagaccctgagatgatgatgcaattaaccagtgtccagattcatcaaatctgtgagataatacatttgcatgattctgaacctctatgtttgtaatgatttgttatatagcaatggaaaactaatactcttggctaagaaaaaaatttgaatccctcattttttttcctcccataaaggaaaacattacttgtatttcttaaagccaattatttcacttaggggtgtctttaaaatttaattttaacatttatttatttattttaaatggaatcagaatctttattacagatatcctt

SEQ ID NO: 1724 - DNA, 661 bp, Homo sapiens
  misc_feature [331]..[331]: Chromosome 3, SNP identification no. = rs7644906
  misc_feature [331]..[331]: allele = g, in linkage disequilibrium with rs1907645, respectively
  misc_feature [331]..[331]: n is a, t, c or g
taaatttatttaaattccttgtagattctggatattacacttgtgttagatggatagattgaaaaaattctctctcattctgtaggttgtccgttcactctgatgatggtttcttctgctgtgcagaagctctttattttaattagatcccatttgtcagtttttgcttttgttgtgattgtttttggcaattgcgtcatgaaatgtctgcccatgcctatgtcctgaatggtattgcctatattttcttctagggtttttatagtttggggttttatatttgtctttaatccatcttgagttaatttttgtataaggtgtaagaaagacntcgagtttcaattttctgcatatggctagccagtttttccagcaccatttcttaaatagggaatattttccccattgcttgtttttatcaagactgttgaagatttgaaggtgtgtggccttatttctgggttatttactttcttccattggtctatgtgtctgttttgtaccagaaccatgtggtttttgttactgtagccttgtgtatgatttcatgtctggtagtgtgatgcctccagttttgctctttttgcttaggattgccgtggctattagggcttgttttttggttccataagaattttaaagtagttttttctaattctgt

SEQ ID NO: 1725 - DNA, 661 bp, Homo sapiens
  misc_feature [331]..[331]: Chromosome 3, SNP identification no. = rs2087734
  misc_feature [331]..[331]: allele = c, in linkage disequilibrium with rs1907645, respectively
  misc_feature [331]..[331]: n is a, t, c or g
tgattgcacgggccaggactttcaatgctatgttaaataggaaggttaagatagcgtatccttctcctgcaccagttttcaaggggaatgtccagcttttgttcatttagtatgatgttggctgtgggtttatcatagatggctctcattatttggagatatgtttcttcaataactagttcattgagagtttttaatatgaaaggatgttaaatattattgaaagctttgatctgcatctattgagtaatcaggtgattttgtctttagttctgtttatgcactgaatcacatttatcaatttgcatatgttggaccaaccttacatctnagaaataaagtctacttgattgaggtagataagctttttgatgtgctcctgaattcagtttgccggtattttgttagggatttttgcattgaagtgtataaaggatattggcctaaaattttcttgttctgttgtatctctgccaggttttggcattaggatgacgctggactcatagaatgagctagagtacctcctcctcaatttgttgaaatagtttaagcaggaatggtaccaattcttatttgtacatctggtaaaattcagctgtgaacccatctggtcctgggctttttttggttggtaggctatttattactgactcaattt

SEQ ID NO: 1726 - DNA, 661 bp, Homo sapiens
  misc_feature [331]..[331]: Chromosome 3, SNP identification no. = rs11713968
  misc_feature [331]..[331]: allele = a, in linkage disequilibrium with rs1907645, respectively
  misc_feature [331]..[331]: n is a, t, c or g
aaacttctaagctgtggaagtgaataaaattgatattagtcagtgacttccctgtgggaagaagggtggcagtgtaaatgcagagtaaaggctgaatgaagtctatatatgtttgggggtattttcagcagcggttctttcaaaagtcatttcatttatggcttttttggtgattttgcacaaaataacctagatacatttaatttttacattttcagaagaaacctgctcagtttggagcatgttcacttcttttgaaatgttgatgttgaaagctgcatatagatcttttgagaggccacatgcttgagattctatttttaaattttcntgacagcttttacactctcctgagcatgctggatctaagtttctactgaagcatgtaattaccagcaatgacttagcatctgccatgtggtgccaagtaatggtaaatggaagcaatgtcagaaagagaagattggcaagttggaaatactgagataactcagagactcacctactctggcaaacactctcaccattgctggcagcacaagagaactttatttgcaagaaatgcttatgtaatatttaaagtgccctacatcagagaaaataaaagggttactttttttttgttgttgttgtttagaataaagacataatatcattgact

SEQ ID NO: 1727 - DNA, 661 bp, Homo sapiens
  misc_feature [331]..[331]: Chromosome 3, SNP identification no. = rs9853997
  misc_feature [331]..[331]: allele = a, in linkage disequilibrium with rs1907645, respectively
  misc_feature [331]..[331]: n is a, t, c or g
agcaatcttcatttttctgaagcactgagaccttggaccagatgggaaagatatcactctaacttgaaaaaagctaccttttagcctctgccttagtccattggtgttgttataaaggaatacttgagacagagaaacttataagaaaagaggtttatttgtctcatggttctgtaggttgtacaagaagcatagcaccagcatctgcttccattctgggatttagtgtgtttccactcacagcaaaaggtgaaggggagttggtgtgtgcagagatcacacggcaagagaggaagcaagaaagaactggggttggaggaaacatcaggcnctttttaacagccagatctcacagggactgaggaactaatagagctacagagagaattcacttactaattaccatgagaacagcaccaagccattcatgagggacccaccttcaagacccaaacacctcccctttgcaccacctccaacattgggaatcaaatttcaacatgagatttgaggggtcaaacaaaccaaactatagcagcctctgtctatttccagtataaactgtggacaagcagaattctagagtctcccaggagcatgacagaactgcaaaatcacagattcacaccatctatagaatcagaatttgcattttgacaag

SEQ ID NO: 1728 - DNA, 661 bp, Homo sapiens
  misc_feature [331]..[331]: Chromosome 3, SNP identification no. = rs6768190
  misc_feature [331]..[331]: allele = g, in linkage disequilibrium with rs1907645, respectively
  misc_feature [331]..[331]: n is a, t, c or g
actaccacacagagttctgtctcattaattccaaagagacattgtgcaagttttatggtaattttgacaaattaagtttcttagtgtttttaatttggatttcataatctttcttgccaaataattatttaacttcacaaatgctagctttgtaataattaattggtatttaattatcatataaccaatgatattataatctctatatgaagtttcatttcatttaaaataaaacctcattttaatgtaaatttttttcagattagtatcagtgacagtttttcacatgagatagtaaacttggtttactctctgagcaagcaagtaatcntctttcaagatcagcaaggaatttaggtattgttctttctgaaaattgccctaaagttgtactgtcattttaaaacataagaccatgtcacatactttggtcccttgagactctaactataataattttttggtttaggacattacaattaatggaaaaagataaaaataatggaaaactaagaggtgtaattctgggttcagtgcactaatctagacagtattcttgtcccttaataaaacatggcaagaatcacacatacttatttattttttatgtatcactcttctctacatttccataatgaaaagaatcacctgaggtacttgt

SEQ ID NO: 1729 - DNA, 661 bp, Homo sapiens
  misc_feature [331]..[331]: Chromosome 3, SNP identification no. = rs1492017
  misc_feature [331]..[331]: allele = c, in linkage disequilibrium with rs1907645, respectively
  misc_feature [331]..[331]: n is a, t, c or g
ttctatgaggcagtttcccagttactcattctgacacttgaatcccactttagaaattatgatttaatcggtctaagtgtgcctcggccatcagaatttttaaaatgcaatcaaggttgggagaactgatctatatatcctgaattttcagttaaccaccgttatactgaagaaggtgaagatgaataagatttgttcaaacaatagatgttctaggtctgcttgtagtatctacatttaatagctgttttcagtcatctcctgccctcgaataattctttggcttgcatattgtgcctacccataaagcaaatggtaacagcaggtttgncaacattattccttcattctatttccaggaagagatcatagaatttttaaggtgaaggatcacagatgattatctttacagtttaccttggttacattcacatgtaaccctaatttgcttttatggcataaagttataatccacccccaaagtacttttagaaatatactcaaagttaatgggtaactaactaactttaattcattgtagtaatactacaatgaattgtaaagggagaaactatccaagtctaaatgtattttaaatgaagaaaataatacagattaatttctttgttgacagtggaattaaattggaaataattaaaaa

SEQ ID NO: 1730 - DNA, 661 bp, Homo sapiens
  misc_feature [331]..[331]: Chromosome 3, SNP identification no. = rs7637216
  misc_feature [331]..[331]: allele = a, in linkage disequilibrium with rs1907645, respectively
  misc_feature [331]..[331]: n is a, t, c or g
caagaaacccccaaatatttgaaaattaaaatacctaatatcaacaacatgtgtgatagcttaatcagcactggctgatgtgccaggagttctgaaggattttaggagcattccataactaggaaaggatggagtatggaagcccatctttataattaaaacaacctgctaacttctatttctggctgagtttgaataattgtaccatactgactttccaccaaaaacaactagaaaaccagacaaaatatgtaaaacaggtgtttcagacattggacagacagcagcacactactgttacccaaaaaaaagaaaaataagacaaattctntgatttccccatctttccgtctgaaggcactttctggaaagtactgtgtgtgtgtgtgtgtgtgtgtgtgtgtgtgtgtgtgtggttgggggtggaggttgtgagagccaagcagaatatagtgcatttactgagttgagaagatagagatggagttcagatgactgagtcgacgagaatttgcagggcagagtgctggagaggaaggagctatgtggagaagattctccttgatgctattgcaaaatgctaatctgtactaatctggaaatgcctaagtaaaatggtatgaggccaagcaaaaactacttgggagttgccacttgaata

SEQ ID NO: 1731 - DNA, 661 bp, Homo sapiens
  misc_feature [331]..[331]: Chromosome 3, SNP identification no. = rs13322921
  misc_feature [331]..[331]: allele = t, in linkage disequilibrium with rs1907645, respectively
  misc_feature [331]..[331]: n is a, t, c or g
ggcagagtgctggagaggaaggagctatgtggagaagattctccttgatgctattgcaaaatgctaatctgtactaatctggaaatgcctaagtaaaatggtatgaggccaagcaaaaactacttgggagttgccacttgaatattccccagatttacacaggactgagagatgttccagttctgaccagccagattggaaacacataaatgaacatatggggtgttcaataaagatccttgaagagtcaacctaactcatagtgataaaatctggagtaaaaggatatactaaacttgtcccaataaaggttagaaacaagcctcagaangataaagctgaaccacaagttatttgagtgcctacctacaaagttcaacacttaaagacatcgaggctgggcgtcgtggctcatgcctgtaatcccagaactttgggaggccgaggtgggtggatcacaaggtcaggagttcgagaccagcctggccaatatggtgaaaccccgtctctactaaagatacaaaaattggccgggcatggtggtgggtgcctgtagtctcactcagctactcgggaggctgaggcaggaaggagaatcgcttgaatctgggaggtggaggttgcagtgagttgagatggcaccactacactccagcctggg

SEQ ID NO: 1732 - DNA, 661 bp, Homo sapiens
  misc_feature [331]..[331]: Chromosome 3, SNP identification no. = rs11714550
  misc_feature [331]..[331]: allele = g, in linkage disequilibrium with rs1907645, respectively
  misc_feature [331]..[331]: n is a, t, c or g
ggccacaagaacttgcagcatggccttggctgctcagttgagtcacttgccagcagccactgccatagcctttttgctggcagaccctgcctatcagagagcttttgcaggctacctccctcatgcacctgcccacagcccttccccaacttctctgtggcatgtgctcactcacagcttccccctactgctttattgatgcatgcttgcccacagcctcctcctgctgctttgctgacacatgcacacactaactccaccactgtcccactgctgctgcacatgtgtgcatggggaccccaactgctctgctgccacccactgaagtgcntttgccagcagccccccatcacagtattgttgccagcagactgggaacaccttgtcccctccagcatggcagatgcttaaccttatggggcaaaacaaaaacaaaaacaaaaaaacaaaaaacaaaccaaaaacaaacaaaaaaactgtgagcctagtcctagtccccagagttagagtgctcagctcaacagcacaggagtattgagctgagccttcagagttgagatctgaaattatccagaaataaagccaatcaactaaactcaaccttataacatagtaaaatcctcaagagcaccaaataatataaaatcaaaaagccctatcc

SEQ ID NO: 1733 - DNA, 661 bp, Homo sapiens
  misc_feature [331]..[331]: Chromosome 3, SNP identification no. = rs9867827
  misc_feature [331]..[331]: allele = a, in linkage disequilibrium with rs1907645, respectively
  misc_feature [331]..[331]: n is a, t, c or g
gttagactgagtgaaataggtttcctgacagcataatttttcaaaaagtctaaaatgcaaatatattattatatttctaaaagactgtatagcaaactgcattttctagtaatttaaacatcacatctttttctcttggtgcttcttgttggactatacatttggaacatatctgtgtctccttgtactacttttatttctatttaagtgtgaaatgaatttaatacatatgtatgccataaacatttatttttttctcatcattgaatgtatagtaatttaaataattagtggttaaaatagaaactatatacacagagtaaaagcagantaagttaacttttattataaatctaaattatcagaatggttactgtactaagcaaatgttgtcatcctgtacctgctctttgctgttcatcataaaagtcctgaaacaaatttatatgtgacagatactgggaccaaaatgctcagtgccaaattccaaaatttggaattaaaacctacaggtaaatgtgaacaacacgttttccttcatgggttggactggatagtgaaaactgaagtttgagatgctaattatcccttttaatactgtatcttcttcagtaataatgtgtaatttattatttgtgaaagaattataaagtttaataaa

SEQ ID NO: 1734 - DNA, 661 bp, Homo sapiens
  misc_feature [331]..[331]: Chromosome 3, SNP identification no. = rs1388639
  misc_feature [331]..[331]: allele = g, in linkage disequilibrium with rs1907645, respectively
  misc_feature [331]..[331]: n is a, t, c or g
atttattatttgtgaaagaattataaagtttaataaaactcagcaattaaaattaaatgagattaaatattttagtacacattgcaaaaatatttgaaaaaactgtgacctttatgctggcatttgcagtcatctagtggtggccttttgaatatcttaattggtttagtatatggtactgtgtgtattagtgtttggaacacttcaaccaactttccaccactgagagtgtttatctagaatcttgcacagatgagtatgttttatggccataatattacatcttgtaaataataaattttaaaagcaaaaatacagcacttgagtagtnactggtaaagaggactgacactttccgcctccatgtctctgtgtctgggctgaagaggaaggttgtctttctgtttgcagccttctgtaactgtctccttgctcaaagctccatcaagtctcctttggtcttcataaatgatactcttttgggattcatgggtgttatttagcacactactgcagtttgcttgccttccttatttactagaaaactatgaattacaaacatggttggtattgtagctttaatgaagagaaaatgaaaataatccagggatatttatctctgcaaaatcacttttttggcttatttcagtttactctatga

SEQ ID NO: 1735 - DNA, 661 bp, Homo sapiens
  misc_feature [331]..[331]: Chromosome 3, SNP identification no. = rs9855021
  misc_feature [331]..[331]: allele = g, in linkage disequilibrium with rs1907645, respectively
  misc_feature [331]..[331]: n is a, t, c or g
atatttatctctgcaaaatcacttttttggcttatttcagtttactctatgattctgtctatggatttttgctaggaagaaagtcagtaatgtttttacctttggaagaataccagttaactagtaatcttcagaactctgatactggtaaggcttaagtcctccagacagcacctaatcccaggtccagcagctctgactgtaactgtcagtttgccatttcattcatcctcatatataatctagaatacacacatgcgtgtcaaatacatcctgtagttttaccttaaattttaaaattaaattgtctaatgaatagcctttgtaaagncacaaagttaggactccaatgtagacaatgggctggaagtcccacttaaaactattttagcatacatatttaatacatattatatgttataatcatatctcaaattatttttctcatacattttctagtatccaaatacgtagaaaggaatggagtatgatattaaaaattattttctttcttatctagcatgttcagttaacaatgtataaccaaaagagctaaaacaaaaggctatatgtaccttttctgttaattttttttgctttattacaaataaaaagagaatacctgtttttagttgttattttcctaatacagtggtatttc

SEQ ID NO: 1736 - DNA, 661 bp, Homo sapiens
  misc_feature [331]..[331]: Chromosome 3, SNP identification no. = rs9855371
  misc_feature [331]..[331]: allele = g, in linkage disequilibrium with rs1907645, respectively
  misc_feature [331]..[331]: n is a, t, c or g
gtcagtttgccatttcattcatcctcatatataatctagaatacacacatgcgtgtcaaatacatcctgtagttttaccttaaattttaaaattaaattgtctaatgaatagcctttgtaaaggcacaaagttaggactccaatgtagacaatgggctggaagtcccacttaaaactattttagcatacatatttaatacatattatatgttataatcatatctcaaattatttttctcatacattttctagtatccaaatacgtagaaaggaatggagtatgatattaaaaattattttctttcttatctagcatgttcagttaacaatntataaccaaaagagctaaaacaaaaggctatatgtaccttttctgttaattttttttgctttattacaaataaaaagagaatacctgtttttagttgttattttcctaatacagtggtatttcccaagtctatgaatagctccttgtaaagatggtttgcctcccagtgacttcacattaatagctaacaaaattgtcattcaattttccctcacaactgtgaaataaaggtataaaaatacaagttaaattatttctcacagtaatgtactgtgtgtatctttggaaaatgaaggctctgtctagaactgcttgtaaatatataacact

SEQ ID NO: 1737 - DNA, 661 bp, Homo sapiens
  misc_feature [331]..[331]: Chromosome 3, SNP identification no. = rs9855525
  misc_feature [331]..[331]: allele = g, in linkage disequilibrium with rs1907645, respectively
  misc_feature [331]..[331]: n is a, t, c or g
taaaattaaattgtctaatgaatagcctttgtaaaggcacaaagttaggactccaatgtagacaatgggctggaagtcccacttaaaactattttagcatacatatttaatacatattatatgttataatcatatctcaaattatttttctcatacattttctagtatccaaatacgtagaaaggaatggagtatgatattaaaaattattttctttcttatctagcatgttcagttaacaatgtataaccaaaagagctaaaacaaaaggctatatgtaccttttctgttaattttttttgctttattacaaataaaaagagaatacctntttttagttgttattttcctaatacagtggtatttcccaagtctatgaatagctccttgtaaagatggtttgcctcccagtgacttcacattaatagctaacaaaattgtcattcaattttccctcacaactgtgaaataaaggtataaaaatacaagttaaattatttctcacagtaatgtactgtgtgtatctttggaaaatgaaggctctgtctagaactgcttgtaaatatataacactacaaccataaaaatgcattatttgtagaaaactattattaaatcaaattgttccaaatattgttttcaataaatgctacttagctaa

SEQ ID NO: 1738 - DNA, 661 bp, Homo sapiens
  misc_feature [331]..[331]: Chromosome 3, SNP identification no. = rs9870513
  misc_feature [331]..[331]: allele = c, in linkage disequilibrium with rs1907645, respectively
  misc_feature [331]..[331]: n is a, t, c or g
aaatacgtagaaaggaatggagtatgatattaaaaattattttctttcttatctagcatgttcagttaacaatgtataaccaaaagagctaaaacaaaaggctatatgtaccttttctgttaattttttttgctttattacaaataaaaagagaatacctgtttttagttgttattttcctaatacagtggtatttcccaagtctatgaatagctccttgtaaagatggtttgcctcccagtgacttcacattaatagctaacaaaattgtcattcaattttccctcacaactgtgaaataaaggtataaaaatacaagttaaattatttntcacagtaatgtactgtgtgtatctttggaaaatgaaggctctgtctagaactgcttgtaaatatataacactacaaccataaaaatgcattatttgtagaaaactattattaaatcaaattgttccaaatattgttttcaataaatgctacttagctaaaactccacctcactgactgaaatcacatcagtggtaatggaagggaagagttgcaaactacatcttcagcatcaacccccaggaaggtcaagagcccaaccttggattaacaggaggaggccttcataacttacgagactcaagaaaacacgcaagttgcctgacggtcc

SEQ ID NO: 1739 - DNA, 661 bp, Homo sapiens
  misc_feature [331]..[331]: Chromosome 3, SNP identification no. = rs9859818
  misc_feature [331]..[331]: allele = a, in linkage disequilibrium with rs1907645, respectively
  misc_feature [331]..[331]: n is a, t, c or g
aacacatttagaaaaccatattgtagcattccacatctgaaagaagtgggtgacatttttcttcctcaaagttcttcagagagggaactgccaagtgactaacccaaggtcatattgttagctaatagtagaactgggactgaagaaacaggtgttctttttgtactccagagaaacttctcctgagcccagataaagtacaaccatgtttttttctcatgaagctagctgtgggtaatatcatgtagtaaaaatcattgcttcttagcttttgctccttttcactttggcaaaaagaagcagagaatatgaattatttaagttttaagcnaatttttagaaagagaagttatatttcttttgtatgtagtgtatattgctgcttgatccatttctttacttgcagcaacatccctttcattttatattagcaataaagggctctgtgggaaagcctcatgtgcaacaatagggtcattacacaacgctttggatggatggtgtttattgatgctacgaactattggaaatagccatatagatcttgtagaagagccctctttaaatggctggtaatagtttcacataatagaggctcagaaaatattcgttatttgatttgcttcttttgtagataatttttgtgaacctatatctaaga

SEQ ID NO: 1740 - DNA, 661 bp, Homo sapiens
  misc_feature [331]..[331]: Chromosome 3, SNP identification no. = rs9864748
  misc_feature [331]..[331]: allele = t, in linkage disequilibrium with rs1907645, respectively
  misc_feature [331]..[331]: n is a, t, c or g
catgaagctagctgtgggtaatatcatgtagtaaaaatcattgcttcttagcttttgctccttttcactttggcaaaaagaagcagagaatatgaattatttaagttttaagcaaatttttagaaagagaagttatatttcttttgtatgtagtgtatattgctgcttgatccatttctttacttgcagcaacatccctttcattttatattagcaataaagggctctgtgggaaagcctcatgtgcaacaatagggtcattacacaacgctttggatggatggtgtttattgatgctacgaactattggaaatagccatatagatcttgnagaagagccctctttaaatggctggtaatagtttcacataatagaggctcagaaaatattcgttatttgatttgcttcttttgtagataatttttgtgaacctatatctaagataatccagtctggaacatgaatagcctgaaaaaaattaatatactgaaatgttcaacatgcatcatttgtttataggtttttctacacaaggatttttcttgaggctgtgctgcatggttttactagcactgcaaatcagagcagaaaagttcctataatcttaactattagcaagtagtgtgtgcttcttttgacttaccaggaaagtacaagagc

SEQ ID NO: 1741 - DNA, 661 bp, Homo sapiens
  misc_feature [331]..[331]: Chromosome 3, SNP identification no. = rs9860169
  misc_feature [331]..[331]: allele = a, in linkage disequilibrium with rs1907645, respectively
  misc_feature [331]..[331]: n is a, t, c or g
gtaaaaatcattgcttcttagcttttgctccttttcactttggcaaaaagaagcagagaatatgaattatttaagttttaagcaaatttttagaaagagaagttatatttcttttgtatgtagtgtatattgctgcttgatccatttctttacttgcagcaacatccctttcattttatattagcaataaagggctctgtgggaaagcctcatgtgcaacaatagggtcattacacaacgctttggatggatggtgtttattgatgctacgaactattggaaatagccatatagatcttgtagaagagccctctttaaatggctggtaatngtttcacataatagaggctcagaaaatattcgttatttgatttgcttcttttgtagataatttttgtgaacctatatctaagataatccagtctggaacatgaatagcctgaaaaaaattaatatactgaaatgttcaacatgcatcatttgtttataggtttttctacacaaggatttttcttgaggctgtgctgcatggttttactagcactgcaaatcagagcagaaaagttcctataatcttaactattagcaagtagtgtgtgcttcttttgacttaccaggaaagtacaagagctttctgtttagaccattgtctatgagataa

SEQ ID NO: 1742 - DNA, 661 bp, Homo sapiens
  misc_feature [331]..[331]: Chromosome 3, SNP identification no. = rs9858171
  misc_feature [331]..[331]: allele = c, in linkage disequilibrium with rs1907645, respectively
  misc_feature [331]..[331]: n is a, t, c or g
tagttcaataatgtgtacacgtggatgtagagtgtgggataatggacaatgaagacccagaaggatgagggagtaggagagggatggatgattagaaattatttaacaggtacaatgtccattatctgggtgattgatattcttaaagccctgacttccccactgtgcagtctgtgcatgtaacaaaattatgcttgtaccacatacatttatacaaatatatatattatttatatatttatataagtatatatatttatatttatatatatatatttttaaaagaagagataccagagaattcaccttctgtcttcaccatgtgaagatnaccacaagaaaccaaccctgccagacttcgatcttgaactccagcttccagaactataaaaaataagtatctatggtttcagccagccacccagtctgtggtattttgttatgtcagacagagctaactgatacaattactttttaaaacaaagtcacagcgtgataaatcaacaaacattttttgaaaacaactatatgcttaaagcttttaaaaaattaaactgttgtctctttaatataaaaatattcatgggaaatcaaaaaaataacacatgcaaactataaaaattaatgcatgatactctttccactagcccaattccttggt

SEQ ID NO: 1743 - DNA, 661 bp, Homo sapiens
  misc_feature [331]..[331]: Chromosome 3, SNP identification no. = rs9865748
  misc_feature [331]..[331]: allele = a, in linkage disequilibrium with rs1907645, respectively
  misc_feature [331]..[331]: n is a, t, c or g
ccactgtgcagtctgtgcatgtaacaaaattatgcttgtaccacatacatttatacaaatatatatattatttatatatttatataagtatatatatttatatttatatatatatatttttaaaagaagagataccagagaattcaccttctgtcttcaccatgtgaagatcaccacaagaaaccaaccctgccagacttcgatcttgaactccagcttccagaactataaaaaataagtatctatggtttcagccagccacccagtctgtggtattttgttatgtcagacagagctaactgatacaattactttttaaaacaaagtcacngcgtgataaatcaacaaacattttttgaaaacaactatatgcttaaagcttttaaaaaattaaactgttgtctctttaatataaaaatattcatgggaaatcaaaaaaataacacatgcaaactataaaaattaatgcatgatactctttccactagcccaattccttggtagaccaactaaaaaaaaattacaagtttaaatagagttaattatttaaggactgatcatgtcatgcgagttctaatatgctcactcagatttcttttagttttgccctttggaccaaccacatccttgcaaaaggcctcaaaaatagctactgcttcca

SEQ ID NO: 1744 - DNA, 661 bp, Homo sapiens
  misc_feature [331]..[331]: Chromosome 3, SNP identification no. = rs4088917
  misc_feature [331]..[331]: allele = c, in linkage disequilibrium with rs1907645, respectively
  misc_feature [331]..[331]: n is a, t, c or g
agtatctatggtttcagccagccacccagtctgtggtattttgttatgtcagacagagctaactgatacaattactttttaaaacaaagtcacagcgtgataaatcaacaaacattttttgaaaacaactatatgcttaaagcttttaaaaaattaaactgttgtctctttaatataaaaatattcatgggaaatcaaaaaaataacacatgcaaactataaaaattaatgcatgatactctttccactagcccaattccttggtagaccaactaaaaaaaaattacaagtttaaatagagttaattatttaaggactgatcatgtcatgngagttctaatatgctcactcagatttcttttagttttgccctttggaccaaccacatccttgcaaaaggcctcaaaaatagctactgcttccataacagccattcagagtcagtaatgttgagtttctccaagatgtgaattatgttttcatagcagaaaacactaatttaagttgaaacatgttggaaaatgtcatttcctttgcaaaccaaacaaattaagaggaagaaaaatatcacttagtggaattcagagcttgttgtgaaattttgaaagagttctagaaatttggcaaaacctaaagtattgcttggcatttataccctggg

SEQ ID NO: 1745 - DNA, 661 bp, Homo sapiens
  misc_feature [331]..[331]: Chromosome 3, SNP identification no. = rs9875906
  misc_feature [331]..[331]: allele = t, in linkage disequilibrium with rs1907645, respectively
  misc_feature [331]..[331]: n is a, t, c or g
tcatgcagatgaaaggtttatgtttactacatattaaaacaatcatggtcatatgcccataggattcagtatacccaagtttttgtaaaattaaacatagaaaaccaaaatttacttgtgtgatagatttcaaggttaccactatgttacatttcatctactgattgaagaaaaaatggcaagtcataaaagttaaaatgcaggaagtctactaaaaagttcttttttcatttcgtagaagataagtgtgtttaaatgctatatgtagttacttgagccactactaaatttagttatacatcttcattttatataggttgggctactgggntctgctaatatctcaatttttgtataagatattggaaaagtcaatttgcagctcagacaagatggaatagaaggaaacatggcagtctttgtggagatcatatggaggtagaaaccattattactcagatgacataaatctgtattttgaagccaaagttctaaatttaaaacgtttttattactggtatttgaattctaatcctataatcttcaactactacaattcctgaaggcttctcctctctatatttgctaaataaaataaaatatgtataacatctagtatagtacttgcaaaaatgtaatttccttttccttcttcttaacc

SEQ ID NO: 1746 - DNA, 661 bp, Homo sapiens
  misc_feature [331]..[331]: Chromosome 3, SNP identification no. = rs9853331
  misc_feature [331]..[331]: allele = g, in linkage disequilibrium with rs1907645, respectively
  misc_feature [331]..[331]: n is a, t, c or g
tcatatggaggtagaaaccattattactcagatgacataaatctgtattttgaagccaaagttctaaatttaaaacgtttttattactggtatttgaattctaatcctataatcttcaactactacaattcctgaaggcttctcctctctatatttgctaaataaaataaaatatgtataacatctagtatagtacttgcaaaaatgtaatttccttttccttcttcttaaccgaggaccaggagtggggaaaagtaacacttatacctgctttggctgcagtatggccattgatcaactctgaaatttggtggttatacagaagggaaancaatggaaagaaggcaggctaggactagtatctatgatctaggagaaagagcacctgacttcagaatcttttggataacaactttggaatcaaaacaattcctagcatgcagtagaaacagacaatgatttgttgaataaacaaactgatagatacataaggataagtgtcaagatatgcttagtgttgaccaagtaagccagaaacagaagacaatgagtatattgttaggctgccataacaacacaatgccacagactgggtggcttaaattacagaaatttattttctcacagttctggatgctaaaagtccaagatcaaggtgcca

SEQ ID NO: 1747 - DNA, 661 bp, Homo sapiens
  misc_feature [331]..[331]: Chromosome 3, SNP identification no. = rs11719701
  misc_feature [331]..[331]: allele = a, in linkage disequilibrium with rs1907645, respectively
  misc_feature [331]..[331]: n is a, t, c or g
caattcctagcatgcagtagaaacagacaatgatttgttgaataaacaaactgatagatacataaggataagtgtcaagatatgcttagtgttgaccaagtaagccagaaacagaagacaatgagtatattgttaggctgccataacaacacaatgccacagactgggtggcttaaattacagaaatttattttctcacagttctggatgctaaaagtccaagatcaaggtgccattggcattggtgtcggtgaggcctctctttctggcttgcaggcaaatgccttcttgctgggtcctaatatggccttccctctgtgtgcacatggangaagaccaatcactaggtctcttcctcttcttgtaaggataccagtcctctcagattagggccccaccctaagacatcatttacccataatcactttcttaaaggccctatgtacaaatactcacattggtgattagggcttcaacatgtacattttggtggtacacaattcagtccataatatggaaagacactgagattataaggaatatgaagtatatcctttgggcagctgttgtctagtaaccactttaattatctttatatccttcaccttgaagactagttttagaatcacaggtctactccaatctaatagctgcagtgtga

SEQ ID NO: 1748 - DNA, 661 bp, Homo sapiens
  misc_feature [331]..[331]: Chromosome 3, SNP identification no. = rs12630167
  misc_feature [331]..[331]: allele = a, in linkage disequilibrium with rs1907645, respectively
  misc_feature [331]..[331]: n is a, t, c or g
aaggatgaggtgccaagatcagtcatgagtggattatgtatttgtgtctgtggccagaaaagtaggccaagatatttggccgttcaatgagaaagacaaagttctagtcactaaggggaagaaggtggttataggtagcaaaaatgtcaaatgtctgtaagagtccatgctgtgaatgtaaagtacctacatctatttttccatgtgtataattttttgttgttgttctacagtaattctaattaattcttatttttatttatattatttttgattgacaaatcatatggcttatatttatggggtataacttgatgttttgatatatgtntgcaatgtggattgattaaatcaaactaacatatccatctgcttgcttacccatcatttttaagatgagacatttgaaatacacttttagttattttgaaatatataatacattattataaactgtagtcaccctgctgaacaacagatcttcaaatctattcctcttgtctacctaaaactttgtacactttaatcaacaactccccattcttttcctctctacctacccaggctctagtagccattattgtattctctacttctatgagttcaacttttttaggttttacatataagtgaagtcatgtcatatttgtctttctgtgcc

SEQ ID NO: 1749 - DNA, 661 bp, Homo sapiens
  misc_feature [331]..[331]: Chromosome 3, SNP identification no. = rs6771948
  misc_feature [331]..[331]: allele = t, in linkage disequilibrium with rs1907645, respectively
  misc_feature [331]..[331]: n is a, t, c or g
taaagactatcaattgcttaataaactgcttccctgacttagaacaattatttttccagcattggatggaaggatcttcactgtcccctagtgcaacttgaacaagctacttctacattttagggcttataacttttttcttcctcttttggtattgtttttgtatttaattgacattagtttaaattaagacaaaatttaaactaacgtcagcaaaaggatatatacgttatatatataaaggtataaatatatatatgaaaatataaaaagcatatatatatatattaagggatgactgctgggatatctataggaagcagggaatctnctaggatcttaagaactgaaatcagaaacttgatgtattcattcaacaaacttctattgagaacctgctatagtatgtgccaaactctgaggtcaacatggagcaaaaacagtcacttactgatttcctaaaacttaaagtctgtattaatgaggttatctgtttccaattcttactacgtcttcttaattgcttagcagattcattttcttagatttctttatgtggcagtatacacaattcctaacatttcctgagttacatcctttcaatttctcaacttgaagaaagggtagtttttctctggtcgttctatcaagaaaatcttgg

SEQ ID NO: 1750 - DNA, 661 bp, Homo sapiens
  misc_feature [331]..[331]: Chromosome 3, SNP identification no. = rs9824284
  misc_feature [331]..[331]: allele = c, in linkage disequilibrium with rs1907645, respectively
  misc_feature [331]..[331]: n is a, t, c or g
aagatggtttaaaaaaatctcctaggattcttaaagccagaatggtttctgtcttttcaatattatctgggtccccaagatgattaaaaaatgggtagaaagagaatggctctggcaattacttagtctttgaattcctaagaatcactgttctttaacctttgcttttgaatcctccagtaacttccactttttaattgctcctaaatcctaaaccttgccttgtttttcctggttgaaactgtttctttcactactaattttccacatttcttggatgattcaagcctttttttttttttttttttttttttggtgcggatcataagtngaagaccaggagtgatatctttgtatgttatgatcaattctgaaatcattgtgaaatgatttttatctctattgaccttatgattcttgtaacccttcagctactgcagtaatttctacggattttgaagccatttcataattttacttcagaagcagcttgctcagtattttcacaaatgattatttatatagaaaactaataaaagatagaaatttaattgttatataatattattatgctgtagattaatattagaattattctttaagaaagtagttctcagccaggagaaattttgccccacagggcatatttggcaatgtgtgg

SEQ ID NO: 1751 - DNA, 661 bp, Homo sapiens
  FLJ31579
  misc_feature [331]..[331]: Chromosome 3, SNP identification no. = rs4682054
  misc_feature [331]..[331]: allele = c, in linkage disequilibrium with rs6788543, respectively
  misc_feature [331]..[331]: n is a, t, c or g
ttcacaaacaagctgtggttatttaattggttaaagggcagggtgtatcttagaacaaaaggagtgatgaagaaagcatctaccaatacatgggaaaggcacttcaccagattattatttgaaggtttgaaagtactagaagtccagccagagaagaccatgcccagaaatcagagaacttttgggaaactataatcttacatttgtggctgtaagtatcaagcctgggtatacattagaatcagcaagaagcttgtcagcttccgtcccagagagattttgacttagaaggtttggggtgagctcatgggcactggtgttttttaaaagngccccctgctctgccacctcccagtgattctgatatgcatctaaggttgaggatcaccactttacattataaagtgctttcacatacatgattcaggatttttgtatgcacacagaaaggaaaaagaaacaccgttaatgactgttgactgtaaaagaaaataggaagaaacaggggtagtaattgtgaaaatgaaaggattagagaaaagtcaatttctagaaactggaggaaaaaaacttcacctttctaagggctaaaattagtcctatgcatatagaacattaaggagggacttgtatgtccatatttactgctatatatggaata

SEQ ID NO: 1752 - DNA, 661 bp, Homo sapiens
  FLJ31579
  misc_feature [331]..[331]: Chromosome 3, SNP identification no. = rs4381908
  misc_feature [331]..[331]: allele = c, in linkage disequilibrium with rs6788543, respectively
  misc_feature [331]..[331]: n is a, t, c or g
gagggagatagatcatagataatagagataataaacatacatatatgtgtgtgtatgtgtctgtgtgtcacatatatacatatatgtatattctctctccatatatgtgtgtgtatatacacacacacacacacgcacacacacacataaagtgttagaaagtgataagagctatggaaaacgaaaaggtcaagcatggtgagagggaaccaggattctgtgggttggaggattggttgaaatgtttaaaagttgatcaggagaggcttcattgaaaagatgacatttgaaggggttaatcacatgcttatttgggggcagaagaagcagncagtgcagagacccaaaagcaggagtgtccctgccatctttgaggaaaaggaacatgcagtatggctgtagagcaggtgaagacagagtagtgagaggaggtcagagaggcgactggtgatcatgtgagcctagaaggccctgtaaagacgctagccttcactcactctaagcgaggagagttctggcacaggatgttgtggcctgacttaggtcttaataagatctctccggttgcaatactaggaagagaccagggcagggggattgggcagaagtaaggaacccagtgagactgttagtggcaagtggtcagattttgcatctgtca

SEQ ID NO: 1753 - DNA, 661 bp, Homo sapiens
  FLJ31579
  misc_feature [331]..[331]: Chromosome 3, SNP identification no. = rs4401340
  misc_feature [331]..[331]: allele = g, in linkage disequilibrium with rs6788543, respectively
  misc_feature [331]..[331]: n is a, t, c or g
aaatgtttaaaagttgatcaggagaggcttcattgaaaagatgacatttgaaggggttaatcacatgcttatttgggggcagaagaagcaggcagtgcagagacccaaaagcaggagtgtccctgccatctttgaggaaaaggaacatgcagtatggctgtagagcaggtgaagacagagtagtgagaggaggtcagagaggcgactggtgatcatgtgagcctagaaggccctgtaaagacgctagccttcactcactctaagcgaggagagttctggcacaggatgttgtggcctgacttaggtcttaataagatctctccggttgcantactaggaagagaccagggcagggggattgggcagaagtaaggaacccagtgagactgttagtggcaagtggtcagattttgcatctgtcagaaggtagagccgacagggtttcctaatggatatgatttggggtatgaaagaacatgaggattcaaggatgagtcccaggcttggccggaataactggaaataccaagttgtttttgcgcaccctgagaagttctaaatgtcttcgacaccacggaggcttcatgagttaactcttagtatctgctaaagtctatctaaacaagtttcttcactaagacttttgtaagtgatattttgc

SEQ ID NO: 1754 - DNA, 661 bp, Homo sapiens
  FLJ31579
  misc_feature [331]..[331]: Chromosome 3, SNP identification no. = rs4413291
  misc_feature [331]..[331]: allele = g, in linkage disequilibrium with rs6788543, respectively
  misc_feature [331]..[331]: n is a, t, c or g
ccacctggccaattacacctctacaaggaaatcctccccttcccccaggcaatctgcttatcatgagcctgtgattaacctcattaacacaccggtttaccacagacgtcattagcagtcagtcagacattactcaaaaccattagaaacaacaagaacagccgttacccagttcagtgcaaccagcctggtgctccccagctctgggccttggggagcagttagtcaggcaccttagtcacgagctaaatgcacaccggaaatgaggctgacatccagagctcttgttcttgggtgcccgggaggattaccctctgtggccaactatccngggatggcagtccaggcctcgtgagcatgtgcagggcattcctccaggaaaagattactagtgcctgggacagggaaaaatatattcctttagaaaccttcacagcagagctctgaattgggacgatcaaaatagcagtttcctatcccacagctgcctcccagaaactaattaatgctgtggatgtagcttgctaattattttcaacatcaccaccatcctgagcggtccctgtggaggccagttgcctctgcaaagtctcccctgactcaagtggcacactccccactctcctgggaagggcagttccaggcagagccagcacacacg

SEQ ID NO: 1755 - DNA, 661 bp, Homo sapiens
  FLJ31579
  misc_feature [331]..[331]: Chromosome 3, SNP identification no. = rs2137595
  misc_feature [331]..[331]: allele = g, in linkage disequilibrium with rs6788543, respectively
  misc_feature [331]..[331]: n is a, t, c or g
caattttagtaaaaatgaatatgtattttttttcccatccaaatttaaagacttcttaaattctaccctcatatccctctggggaagctttggacctcaggctgagaactcttaggctgagcagcaagcgctgtctagaagttatgtctcctgtaattacaaaactgacagcttttggagttgaaataaaaacactgaactaatttgtgggtaaatagactttcaatcgtgtgtgctggctctgcctggaactgcccttcccaggagagtggggagtgtgccacttgagtcaggggagactttgcagaggcaactggcctccacagggacngctcaggatggtggtgatgttgaaaataattagcaagctacatccacagcattaattagtttctgggaggcagctgtgggataggaaactgctattttgatcgtcccaattcagagctctgctgtgaaggtttctaaaggaatatatttttccctgtcccaggcactagtaatcttttcctggaggaatgccctgcacatgctcacgaggcctggactgccatccccggatagttggccacagagggtaatcctcccgggcacccaagaacaagagctctggatgtcagcctcatttccggtgtgcatttagctcgtgactaaggtgcct

SEQ ID NO: 1756 - DNA, 661 bp, Homo sapiens
  FLJ31579
  misc_feature [331]..[331]: Chromosome 3, SNP identification no. = rs9877859
  misc_feature [331]..[331]: allele = c, in linkage disequilibrium with rs6788543, respectively
  misc_feature [331]..[331]: n is a, t, c or g
aacagtgcatactacccttagtatcagaaacatgcttcccagttttaaaacttggattcctttctatttcttttggccccttcttaaaagtgaaaagaacaatgatgggagatctttttagcgtggggcccaacaagagatagatatgcatgtttgctgcatgccagatatcttttatttaattctacagctttttccagaatggctgccaggtagagcacctgcatcattttggcaaagtcctctttggagtggggtcttcaagcctgatcttggaattgcgttttattattgtctgcctaggactcaggtctgcactgtgggacacaangctaagtggaaggccccttatccatggcaccatggaagcaggcgcaggatgcatgggaaactgcaatggcattaaaggaggaagctccaagtggatttggagccattctataactccttgaaaacaagactacctcggggatatttaggatgactcgtgtgtcaccaagtgagaaatacctagtgttggaacatttccagtccttctcttgatggttctactttctgcaggttgttttgagcctaccaatcactactgcatgaggactttgaaactcgagagggaattttttttttatcgataagaggtgcttatctataaggagccctc

SEQ ID NO: 1757 - DNA, 661 bp, Homo sapiens
  FLJ31579
  misc_feature [331]..[331]: Chromosome 3, SNP identification no. = rs4682298
  misc_feature [331]..[331]: allele = a, in linkage disequilibrium with rs6788543, respectively
  misc_feature [331]..[331]: n is a, t, c or g
acattctatttagcacagaagttaagtataggcatttcagaagtgcacagacctgggtttctatctcaactccataccctggcggagtaaccttaggcaaattaacgtctgtacctacatagaagatagggctaaaaataccaaccatgaagggtaattgagaagacaaaataagaaaatgcttaggaagcattttagcacggagcatggcacatagtaaatactccatagtagctcttagtcttagtaataagggactttgcaccctcctccttcaaatggcacccaacgatcacttcaacatgattgctaacctttgtgttaattggtngatgatttagcaggaactaattaatgagaggtaagtcaatataaatttgacagtgaaagaaaacgtgaaatccctttgtgtggcaaattcttgaggctctgcagtggaaggtcaaggcagctggatggtgctgagtgattagacttggtcattcatctctctgtctttctctctctctgtctttctgggtgtgtgtgtgtttgtgtgtgtgtaggtgagagggggatggttgtaaggggcaaagagtagaagagggcgggtgtgaggaaggcactagagacaaagtcctgggctttggctattggtggtttccacctctggaagcttcct

SEQ ID NO: 1758 - DNA, 661 bp, Homo sapiens
  FLJ31579
  misc_feature [331]..[331]: Chromosome 3, SNP identification no. = rs4682299
  misc_feature [331]..[331]: allele = c, in linkage disequilibrium with rs6788543, respectively
  misc_feature [331]..[331]: n is a, t, c or g
ggcttcagtacctactagttgcatgaccattacccctttgagcctttgttcccttgtgcataaaatagaaataaaatctcaacattaccatcaggatttgtggtaatatgcatgaaatgcataacatataatactctctcaatgaatggtagccatatttatttaaaaaactaccagatgcttctcaccatacaagaatttaatagaagaaactccactattaaataggacatttgataaagtgacttccagatttccctctgagattgctgaaatctaaaggaataaaaatttcgtttcctctataaactattctcggggcctcttgtcnacttcccagatgcagttacaagggaatcacttttctggatagccaatggctatcagactgtgctttctgccccccacagtcctgccatctgatttttccatgcagctctggttggatttaagcaggactagcagtctgtcctggtgtgtaatgattggctagaccaggcggctgaggccagggcagactccctccttcacatctgtcaatatacctggctgcaagcaagttgctgcctgtgaccacagtctgcagaggccagagagagcaggaaaggaaatggaaaggaacctcaccttcatgcttggggaaaaggagaaacctgtgtta

SEQ ID NO: 1759 - DNA, 661 bp, Homo sapiens
  FLJ31579
  misc_feature [331]..[331]: Chromosome 3, SNP identification no. = rs11711533
  misc_feature [331]..[331]: allele = c, in linkage disequilibrium with rs6788543, respectively
  misc_feature [331]..[331]: n is a, t, c or g
agcctgttctggaaagcaggctgtattttccttctgtcttctatctcttctgaaaattgttgttgctcctgtacgtatttcagaaacttggaaggttttttaaaaatttttcattataacaaattatatgtgcgatttattaaaatgatttcattggtggtaactccacaagcatggttttgttccagaattttcgttgcataatttttttcaattttcaagacataccagagaggacagtgtacatatactgtagtatatggtatagaataatatattccgagaaatatactgtccattcacagggctgtcaacctcgtatgataggctntcccaggaagtcacgtatatttttctgctttggaacctagagagttaaaagtcctgaaattactggagcagaatcaagcctatttacctaagcttatcacatcggcagccaggtcaatcatttactgagactaggccgtttcttaccctgaatcaggaggaccaccaaagcctttgctggcctgagtccctctgtagcaaaggcatgggcaacacagaagaaatgctcctctgaagctatagtccagattctcttctcaccagaagtaagtttttctccttccgagaatagtaaatatcccaagaccccccttccccagctcaatgataa

SEQ ID NO: 1760 - DNA, 661 bp, Homo sapiens
  FLJ31579
  misc_feature [331]..[331]: Chromosome 3, SNP identification no. = rs11711582
  misc_feature [331]..[331]: allele = g, in linkage disequilibrium with rs6788543, respectively
  misc_feature [331]..[331]: n is a, t, c or g
gcaggctgtattttccttctgtcttctatctcttctgaaaattgttgttgctcctgtacgtatttcagaaacttggaaggttttttaaaaatttttcattataacaaattatatgtgcgatttattaaaatgatttcattggtggtaactccacaagcatggttttgttccagaattttcgttgcataatttttttcaattttcaagacataccagagaggacagtgtacatatactgtagtatatggtatagaataatatattccgagaaatatactgtccattcacagggctgtcaacctcgtatgataggctctcccaggaagtcacntatatttttctgctttggaacctagagagttaaaagtcctgaaattactggagcagaatcaagcctatttacctaagcttatcacatcggcagccaggtcaatcatttactgagactaggccgtttcttaccctgaatcaggaggaccaccaaagcctttgctggcctgagtccctctgtagcaaaggcatgggcaacacagaagaaatgctcctctgaagctatagtccagattctcttctcaccagaagtaagtttttctccttccgagaatagtaaatatcccaagaccccccttccccagctcaatgataaacaaacatgagcaaa

SEQ ID NO: 1761 - DNA, 661 bp, Homo sapiens
  FLJ31579
  misc_feature [331]..[331]: Chromosome 3, SNP identification no. = rs6438003
  misc_feature [331]..[331]: allele = g, in linkage disequilibrium with rs6788543, respectively
  misc_feature [331]..[331]: n is a, t, c or g
gcaattagtctgagccaggattctactcagttctgccttgttcccaacccagtgcatttcccataaggtcatggagttgaccatgtggataagcataaattggagggtcactgaggtaagcaaggctgactaatacagtcagaagttctgaagttctccactggctcttggatgtgccatgcctgagcctctgtaacaaaaaggccagtagtggacttccaaaaaggataaaacaggcaagagcaaaagcaagtgtttttagtcatggcagtcactggagtcttctctgtcctgtatattttctaaataacccagataatcctcaggctanatctttgtccctttttatactgtagactcaaattctgagccccaactaaagtacaacatctgaactctttccagagaagaaatgaccctatcccaatctttctcaaggaactcaagaatttactatctcatctcagcaaatacccactcatttaaatctaagagacttgggcacagagaggcttaaagcccgagaaaccatcaacagtccctcctgtcaaggctctcaccatctgcaacccaaagagacccatgtcggcttggagtctaaatggctttttggtgtcatttgagcagtgaatgagtaatgtacagcagaagccttaatccg

SEQ ID NO: 1762 - DNA, 661 bp, Homo sapiens
  FLJ31579
  misc_feature [331]..[331]: Chromosome 3, SNP identification no. = rs9868909
  misc_feature [331]..[331]: allele = t, in linkage disequilibrium with rs6788543, respectively
  misc_feature [331]..[331]: n is a, t, c or g
attttcattaaccaaaacgctaggagaaagaaagttgaagctaaaacacaaagactcatcacaacatttcacctgtgtcaagtacttattatgaccaaaacatgaactgctgccttcttatctacactttttttcatttaattttcataacaaacctctgcaacttgcccaagtcacagagctagtaagatgaggtaaaatttgagttgggatctgaatccaaatcccatgttcttcagcattctgttctgggaaacatactcacccaacagtgtctacactgttcacgttctaaatgtagaagagtaaaaaaagttctttctaaattatntgatcagatccttagagtatatatttattcccccttcccactcacacaagatgttcttgatgttcttgagtgtaagcataaaactcagtatgacagtggttttcctctcctctagaaaaggaaccacaaaacacacatgcacacatgcacacacacaatagcaattgcccaagagtcagtgctttgattcctttctgaagctgagagagaaaattgttcttatcatctcctagtttataaacattgttttgtttgtttgagtgattgactttaacataatgtacaagacaaatttgtcatttattttaccaagatttttttaaaagttta

SEQ ID NO: 1763 - DNA, 661 bp, Homo sapiens
  FLJ31579
  misc_feature [331]..[331]: Chromosome 3, SNP identification no. = rs6788543
  misc_feature [331]..[331]: allele = c, g
  misc_feature [331]..[331]: n is a, t, c or g
tcacccctgtctccctgcctctccctgagccaccccaggcaccctgcccaggtttactcacccaggttgttgctaactgggtgcctgtgctcgtgtcccttcttgtaagcttcataaaaggctatttgtaatgaagagagggcatatcaaagaagggagactgcatcctccaggccccgaaccaaaaaggcaggtttttttttaagaggaagtctggtttccctattaaaatctgcagaaatgaatggtcctcaagatgactagcagaattatgacattctatttcaagcatttttaaaatttttttttacctgaggttattttacttctntttgctctccttctccacataaaaaggaaagaataatgcttgctcactatgatactgtatgagagaaggcagcccgggcagtacaactcaaaggaacctactaattgcaccaaacagcaaggcacagctagacatttcagtaaataaagtgtgatatcatcatggctcacacgggtttaccttatcacccagacccatgcctagggagtgctaagaccctgaagaaccacaatcacaagtgatggcaaagaacctctggtccaagaagaaaaacgctgaaagaaattggacatcaatgatcttatgtctcagttgcatttagaggctgca

SEQ ID NO: 1764 - DNA, 661 bp, Homo sapiens
  FLJ31579
  misc_feature [331]..[331]: Chromosome 3, SNP identification no. = rs6796087
  misc_feature [331]..[331]: allele = c, in linkage disequilibrium with rs6788543, respectively
  misc_feature [331]..[331]: n is a, t, c or g
gtctttatagcagcatgatttatcaaatattttccattgttctaacatagatccaataagaagacatttatagagtgcctaacatgtttgacaccttgctaagggatatagattcagagatgagtagttgacagttctgcccaaagaaagatcaacatgatcaacatcttatagagaaaatgaaccaataaaggagccaacacagtatcatatgtagtcataactgaacacaaagcagaaaagtttcagacgggtgctccccaactaccaaaggagttggggtccaagtggtattttaaagaaaagaaaatttggattcacagtcttcctntctaaaaatccaggctatgaagaaaaagctacttccttttaggaatttatctgaatatcctaaggaggtgaaattacaagagtagagacagttgtggtagccatggctaaggaagtttcgatccctggagaaagaggataagaggagagtctggggagatccttttaactaaaaggtaggaaaaagaattcaaactttgccctgaatcacagtctctgcctaattcacatcgtttggactggagacttaatttagaaaaattctgtgcagtccagggctcgcatgctctcccataccctagggacttctgcctcgtggacaagcttgtta

SEQ ID NO: 1765 - DNA, 661 bp, Homo sapiens
  FLJ31579
  misc_feature [331]..[331]: Chromosome 3, SNP identification no. = rs12330761
  misc_feature [331]..[331]: allele = g, in linkage disequilibrium with rs6788543, respectively
  misc_feature [331]..[331]: n is a, t, c or g
aatccttcttaagttggcttaggtaagcttttagtgtataagtgaaaactttcatcatcttaagcaatttgcctgtttcctgaagtagggctaacaagatggttgaattttctgattcttttagaaactcagatcataaatcacactcttaatgaacaattttcatattggtttcatttttatcatccattggaagaatatctataaaagttaattaggatagatttggctacctaaatatttaaaacttatttacaaatgcttaaacaaaggtaaaaatagaaatagtgaactgagaaagtacatttgcaacataaaaaacagacgaaangttactgttcctaaagagtacttataaatccttaccagctagaggcaataatagcccagtaaaaagttgggcagaaaatgaactgacaactcacaaaagaagaaagacttatgatctataatgatatgaagaaatgttcagccacagtaacaatgaaataaaggcaaattgaaacagtaaggtagcatttcatttttatgagattggcaataattgagtaatattagatgttaatgagcatgtggggagcagacccttccgcacattgctgctggtggaagtgtcaattgctacaacttcttttttaaggacagtttgtcaaaacatatt

SEQ ID NO: 1766 - DNA, 661 bp, Homo sapiens
  FLJ31579
  misc_feature [331]..[331]: Chromosome 3, SNP identification no. = rs4682303
  misc_feature [331]..[331]: allele = t, in linkage disequilibrium with rs6788543, respectively
  misc_feature [331]..[331]: n is a, t, c or g
caacttcttttttaaggacagtttgtcaaaacatattttaaaatgttttaacaaatataactttggatttattcacttccaggacttatttttagaaaacaataatagcgcagtgcataaaaagtttcacacagtacttaaatatttttgtaaggtttgtttataacagcaaattttgaaaacaactgaagtgctcatcagagaggacttagatataaacacaaacatacgtggatactgtgcagccatttcaaatgatgagatccatgttgcagtagtagctccgagctaccagtagtagttcagtggccaatagatctgtgtttaaatnttagctctattcattactagctgtgtgaacttgggcaagtcatttgacctctgtaagcctcactaatctcatcttaaagaaacgaggataacacaacttcctatatcttaacatcaaagtgaattatatgaaaggatgaatgaaaagctcttagtataccacctgacacacagtaagggcagaataactgtgaactattgttagtgacagcctgtggattcaatcctgctatgtgaggaaaattaagatgaaaatagcactgtcagtttctgtgcaagatggcaaactagctccatggcttttgatcctcccaagaccttattaaaataa

SEQ ID NO: 1767 - DNA, 661 bp, Homo sapiens
  FLJ31579
  misc_feature [331]..[331]: Chromosome 3, SNP identification no. = rs13074817
  misc_feature [331]..[331]: allele = g, in linkage disequilibrium with rs6788543, respectively
  misc_feature [331]..[331]: n is a, t, c or g
gctgggattaacccagctcttttgatatgttgctcagggttcttggttccacaatcagactaactcaagctgtaagcagaaaacaaatttattgaaaggaggtcaaatagtttacaagagagctaagaatgctggtgaatgaggcctggtgtatgggaaaaaaacacaggaagcaaaatagacccaagatggcatgtgaagtctgtttaagaggctaccattggcattgtcaccatgaccactagctatgatttcaccagccacacctgactctaccctccatcagaggcaccaaccttaatctctaaaggttcactggaaatttgcattnctcagtgaagaatcaaatcctagccagatgttcctagtggcctgagcttccggggaaggaaatgtctaaccctttgggcttgggctttctttattggtatttcctgaaataggagggcagggcaggcaaaatagtcaaaagtccatttcacttggtgaccctgtgaggctctaccagagcagccagccaactcatgtccctgtttattgtcacctcttttttctttttcttttttttcttgagacacttgttgcccagactggagtacagtggcgcgatctcggctcactgcaacctccatctcctgggttcgagcgattctcttgcctc

SEQ ID NO: 1768 - DNA, 661 bp, Homo sapiens
  FLJ31579
  misc_feature [331]..[331]: Chromosome 3, SNP identification no. = rs4284954
  misc_feature [331]..[331]: allele = c, in linkage disequilibrium with rs6788543, respectively
  misc_feature [331]..[331]: n is a, t, c or g
gtcatactctaaacatgagtttctcatttacatttttagagtctttttatgtgtacttctgaataaacatgcatgaggctgagaagtctttcctgttaaattctactgggacataagtttcacattacctatgagcctttttcattgaaaaacaaaaatccttccagaacaagagaaggctaaaaaaaaaaaataagaagaataaaaataaaaaataaaacagagaaccattttgaggataagttcaaagagactgaatgttccaatgtaattaaccaccaacaatgtaagatgcttatttcatgaattcttgaaagagatcttaaactangatagcacagaaatcactgaattgcttaactcaagagttaaatagatgtctctggtaaattggtaccaaaaaaaaaatctgtgaggaaacaaagacatccattttagtggcatgtgaaagatgatgtaagtataaataaagaaatatcaaccgttggttgatactctttgcactaaattatattcgtaagcaagatttgtatgttttgttggatctgacttttcactaccctgttacaataatatttcttttgtttgttttagtctcctttacatttacagtgtcctggagggtagtggtgttaaatttaatttgtcaacctacgtttaa

SEQ ID NO: 1769 - DNA, 661 bp, Homo sapiens
  FLJ31579
  misc_feature [331]..[331]: Chromosome 3, SNP identification no. = rs9834030
  misc_feature [331]..[331]: allele = g, in linkage disequilibrium with rs6788543, respectively
  misc_feature [331]..[331]: n is a, t, c or g
ggatattcatatttaaaaagaaaattaaattagaaataaaagctcattcattcaaatgcaaagcattgtgcgaacacaaatgaagaaatgtagaaagaaatacaaaacatttccccttctcttgagaagcctacagagtctcagtaggcatgatttaaaagttcaaaacattaaataaaattaaagatttaaataaaagcctgagtcaccaaagaaattctgcaagttagttcatgaataactgctgaacaatacacatggctgcaatgcaagtttcagaagtgagaacatttcagggccagaggttaaaggagaaagttgacgtaatcangaccttaaagattggtctgaagtgtgtgtacgaaagttggaagtaatctgagagatcatcttctaccccagtgtttcctaaacttacctgttaaaaagactcacatatgagaaatctaaaaataaaattccccgggggccggatgcgatggctcacacctgtaatcccagccctttgggaggtcaaggcgggcagatctcttgaggccaagagctcaagatcagcctgggcaacatggtgaaaccccacctctactaaaaatacaaaaattagccgggcatggtggtgcatgcctataatcccagctactcaggaggctgaggcatgaga

SEQ ID NO: 1770 - DNA, 661 bp, Homo sapiens
  FLJ31579
  misc_feature [331]..[331]: Chromosome 3, SNP identification no. = rs10934106
  misc_feature [331]..[331]: allele = c, in linkage disequilibrium with rs6788543, respectively
  misc_feature [331]..[331]: n is a, t, c or g
tttcacataatgaacactcaagaaatatcttgcactgactccattaaaaatgaagcaaagaacaaaacgagctataactttcaagcatttgatgacctatttattacttattaccacctatgttctactcattttataaaacctctccttagaaacacagcccgtgaatcttaaagtcaattgtggattgtgtagcaagacagagtcaaatccctcagtgcccaggaaaaatttaaatgccaaggaggtaaagagacctatgttctactcattttataaaacctctccttggagacacagcccatgaatcttaaagtcaattgtggattgngtaacaagacagagtcaaatccctcagtgcctaggaaaaatttaaatgccaaggaggtaaagagattttgctggggggaggggggagggatagcattaggagatatacctaatgctaaatgacgagttaatgggtgcagcacaccaacatggtacatgtatacatatgtaacaaacctgcaccttgtgcacatgtaccctaaaacttaaagtataataataataaaaattttttaaaaaagagagattttgctgcaatgagctagaaagttgaaattcaagaaaaggagactctgagctgcatctcagagaatctattcagatgcttatt

SEQ ID NO: 1771 - DNA, 661 bp, Homo sapiens
  FLJ31579
  misc_feature [331]..[331]: Chromosome 3, SNP identification no. = rs13079085
  misc_feature [331]..[331]: allele = c, in linkage disequilibrium with rs6788543, respectively
  misc_feature [331]..[331]: n is a, t, c or g
tgttcaaaactaactcaagccctgagcaaaccacagaaacataaactaccatatgggggataatctcactgtggcagggtggagcaaatgacttcatgcattttttcaccatcccccaccatcagagctctggttcttaatgcttctctccgcatttctctagtcagtggaagtttctaagtgtgtgtgtgtgtgtgtgtgtctgtgtctgtgtgtgtgtgtgtgtgcattttaagacacaaatgcctgtactcatatcctactaaactctaaaattctatcattcgcttttctcataggctctctacttttttaatggaatttgtgaagncccttaataacaagttgatttataaagcttaaatagaaataatgttttcacattaatattttattacttgacattttagtacatgtagtttaaatgtcagaatcagagtttactaaaaacatcaagttttcattcgcttattttctaacaaaaatattccaaatgcatctattttgctgttagtatataaatgtcagaatcagagtttactagaaacatcaagttttcattcggttattttctaacaaaaaaatttcttttttattattattttattttattttattattattatactataagttttagggtacatgtgcacaatgtgca

SEQ ID NO: 1772 - DNA, 661 bp, Homo sapiens
  FLJ31579
  misc_feature [331]..[331]: Chromosome 3, SNP identification no. = rs10934107
  misc_feature [331]..[331]: allele = g, in linkage disequilibrium with rs6788543, respectively
  misc_feature [331]..[331]: n is a, t, c or g
agcgcagtattagggtgggagtgacccgattttccaggtgccatctgtcacccctttctttgactaggaaagggaactgcctggtcccttgcacttcccgagtgaggcaatgcctcgccctgcttcagctggtgcagtgtgcgcgcacccactgacctgcgcccactgtctggcactccctagtgagatgaacccggtacctcagatggaaatgcagaaatcacccatcttctgtgtggctcacgctgggagctgcagactggagctgttcctattcggccatcttggctcgaccacaaaaaaatttcaagtgcatctattttgctgttantatagcttgaagaacccatggcttgacatgtttcataggattgcagccatgggaggggtgagtcatcaaccacgataaactcatgaagatggttttataagctactagatgcggcacagacagagacaacaagctatgttttgctaatgggtcctatcaatatggggcccaggccatctttagcctataagcttcatcccagaaactaggagtcagtcagtagagtttactgtgatattttaaggaagaaaggagaaaaatgactgctcttcagagctgattagagtaaaaatgtaattatatatgtgcataaatatcctagtgatatat

SEQ ID NO: 1773 - DNA, 661 bp, Homo sapiens
  FLJ31579
  misc_feature [331]..[331]: Chromosome 3, SNP identification no. = rs6768713
  misc_feature [331]..[331]: allele = a, in linkage disequilibrium with rs6788543, respectively
  misc_feature [331]..[331]: n is a, t, c or g
gtgcgcgcacccactgacctgcgcccactgtctggcactccctagtgagatgaacccggtacctcagatggaaatgcagaaatcacccatcttctgtgtggctcacgctgggagctgcagactggagctgttcctattcggccatcttggctcgaccacaaaaaaatttcaagtgcatctattttgctgttaatatagcttgaagaacccatggcttgacatgtttcataggattgcagccatgggaggggtgagtcatcaaccacgataaactcatgaagatggttttataagctactagatgcggcacagacagagacaacaagctatnttttgctaatgggtcctatcaatatggggcccaggccatctttagcctataagcttcatcccagaaactaggagtcagtcagtagagtttactgtgatattttaaggaagaaaggagaaaaatgactgctcttcagagctgattagagtaaaaatgtaattatatatgtgcataaatatcctagtgatatatcttttttttttttcaatgattgtcttagtccactcaggctgttgtaacaaaataccataaactaggtagcttatgaacaacagaaacttatttctcaccattctggaggctggaaaggccacaattaagacaccagca

SEQ ID NO: 1774 - DNA, 661 bp, Homo sapiens
  FLJ31579
  misc_feature [331]..[331]: Chromosome 3, SNP identification no. = rs6784753
  misc_feature [331]..[331]: allele = t, in linkage disequilibrium with rs6788543, respectively
  misc_feature [331]..[331]: n is a, t, c or g
atgaattttgaggagacaccaacatttagaccacaacattgagattttatatatatttacatgtatatatacacacacacatatgtatgtatgtatatcccgtgtgtgtgtatgcatgcacagtgaggaatatatgtttagcatgtaaagttactctttgcaccaaatggtttcaagacagcaaaataatataacacctactaaaggccaggtaattggacattatccaaatcagtcatcatgcaaccctataaggtggaaatttttatccccaatttataagtgagcaaacaaatctcagattaagtaatttgtctaagggcacacagcntacaagagatgacgtcagattttggatttgagtttctctctttccaaattttttattcttaatcaataggctataattgggtgacaatcaagagttcgttgggaatattgttggttcataatagcaacaatatgcagtttgtaggacaagaggctttaagggcagagatctaaatgtatctgtcaaacagagaaagccatgtgaagtttctgtgtcttcatgcctctgtattggattcaggctgtagccacaatacttatgcaaaagcatttcaggggagacattgctaggcaatcttcacttccactaggtcagagtttaatgcacata

SEQ ID NO: 1775 - DNA, 661 bp, Homo sapiens
  FLJ31579
  misc_feature [331]..[331]: Chromosome 3, SNP identification no. = rs11710738
  misc_feature [331]..[331]: allele = g, in linkage disequilibrium with rs6788543, respectively
  misc_feature [331]..[331]: n is a, t, c or g
ggccacactcgtcaggattaaaggaggaggtattatttcttcaagccctcctggagtctctcttggccttttttggctcacatactgctgtacgtagtttgtgtctgaaatggaaaatttctgtaacacaatacccagctctgatccccacagactctcaaataatctttctcttttttttcttttggtttgggttaaaatatgacttcatgtgcaaaaaagaagcctcatttcccagcactctcagcagattcataaacattgcagactcaaagccctctggttcctaagagttccaaagaattaattctccttttttgaaaaaggagancaatgactaagaagtgagaagagaaatggaaagattaaaactagctgcctgtttggtgcagggtatatagctctgagagcccaccctcttctgcacctgcaagaatccttgcatgtctcccagcacttctacaggcagccccaaggaaaggcagggagccatagctgcactgagctttatgatcctgcctgaaagtgagtatgttaggaaactggacaatgcaaatcaaggattttaggtatttgattcattgactccctagcattcttctcccctggagagtcaactcttcacacactgtttatgctgtgtgaacaatacagtgaattt

SEQ ID NO: 1776 - DNA, 661 bp, Homo sapiens
  FLJ31579
  misc_feature [331]..[331]: Chromosome 3, SNP identification no. = rs7427201
  misc_feature [331]..[331]: allele = a, in linkage disequilibrium with rs6788543, respectively
  misc_feature [331]..[331]: n is a, t, c or g
gttccaaagaattaattctccttttttgaaaaaggagagcaatgactaagaagtgagaagagaaatggaaagattaaaactagctgcctgtttggtgcagggtatatagctctgagagcccaccctcttctgcacctgcaagaatccttgcatgtctcccagcacttctacaggcagccccaaggaaaggcagggagccatagctgcactgagctttatgatcctgcctgaaagtgagtatgttaggaaactggacaatgcaaatcaaggattttaggtatttgattcattgactccctagcattcttctcccctggagagtcaactcttnacacactgtttatgctgtgtgaacaatacagtgaatttcccttgagtgagttatttctatgacaagttactctaacataatagcgaactgcaaactgcacagggctttggagcccaactgtttgactttcatttccacctctaccactttctagctgggtgacctagggcaatttactcacactcttcatgttttagttcgctcatctgtaagtgggacttgtcatcaactgtacattgtgagattttcctaggaataaattacttaataaattatcaagtgcttagggcagttcctgatacatagtaagccccatatgtcttgctatta

SEQ ID NO: 1777 - DNA, 661 bp, Homo sapiens
  FLJ31579
  misc_feature [331]..[331]: Chromosome 3, SNP identification no. = rs12490166
  misc_feature [331]..[331]: allele = a, in linkage disequilibrium with rs6788543, respectively
  misc_feature [331]..[331]: n is a, t, c or g
tttggtgcagggtatatagctctgagagcccaccctcttctgcacctgcaagaatccttgcatgtctcccagcacttctacaggcagccccaaggaaaggcagggagccatagctgcactgagctttatgatcctgcctgaaagtgagtatgttaggaaactggacaatgcaaatcaaggattttaggtatttgattcattgactccctagcattcttctcccctggagagtcaactcttcacacactgtttatgctgtgtgaacaatacagtgaatttcccttgagtgagttatttctatgacaagttactctaacataatagcgaactncaaactgcacagggctttggagcccaactgtttgactttcatttccacctctaccactttctagctgggtgacctagggcaatttactcacactcttcatgttttagttcgctcatctgtaagtgggacttgtcatcaactgtacattgtgagattttcctaggaataaattacttaataaattatcaagtgcttagggcagttcctgatacatagtaagccccatatgtcttgctattactatttatttttattattattgttactacaactactactctactgcaaggaaaagagcagtgctataatctgaatgtttgtatccccaga

SEQ ID NO: 1778 - DNA, 661 bp, Homo sapiens
  FLJ31579
  misc_feature [331]..[331]: Chromosome 3, SNP identification no. = rs6786386
  misc_feature [331]..[331]: allele = c, in linkage disequilibrium with rs6788543, respectively
  misc_feature [331]..[331]: n is a, t, c or g
accagcatcattcaattccagggggcactgtttccatcatactgtattaaagctaggctccaagggcgcctttaatggagaacacaataggatggttgcctcctggagttgtgcaacagaatagctctgatctcaaagtgcaggaaacaaggtccactgacacagacttggactctaacctctcttctttttgatgagtcagactctgtcttccaaaagttaatttatacttgctgagtgagaacttgctaatacccaagcgacatcaccatgaagaggaattgtagaatcacagatctgagagttgaaagaccagcactggtcatcgggnccaccctctccagtgccctaggggaacatgccagtgcagttccagtttgcctttgttaatagggccaaaaaaagtctgaggcttggcttccaaggagtattagagttcaacaaattctcattctcaataggcaggcgtgaaacactcttaacccttggctcactccaccagcacatgtgtttgaagccccttagtcttcactaacgcactttctaaagaagtagaaggaagttgtgatatcagcactgaagggtggtgagaaaaaaatggatggacccaaacaccaatggaagaagatcatggaaagtattgactccagaacactaacaa

SEQ ID NO: 1779 - DNA, 661 bp, Homo sapiens
  FLJ31579
  misc_feature [331]..[331]: Chromosome 3, SNP identification no. = rs6790072
  misc_feature [331]..[331]: allele = g, in linkage disequilibrium with rs6788543, respectively
  misc_feature [331]..[331]: n is a, t, c or g
ccaacctctaatcaataatgtagatttactttaacatttcattgttgccatttcttcttttatatgcacacacacacacatacacatacacacatactgcaaatcagaagaatagaaatctgaagtcaaaacaccaggatttttaatttactacctgtgtcatctttctcagtttcacattgtcttttccataaattaaaatttattatagtgtctttcttacagctttgttgtatagatcaaataagataatgaagtgtacctgctttgtaaatcatgaagcagtaatttttaaataccttttttcaagaaccttcttaagaatctgatnaaaggccaggcatgatgtcttatgcctgtgatcccagcactttgggaggccaaggcaggtggatcacttgaggccaggagttcaagactagcctgggcaacatggtaaaactccgtctctacaacaacaacaaaaaaattagccgggcatggtggtatgcacctgtaatcccagctactcaggaggctgaggcagaaaaatcgtttgaacccagaaggcagaggttgcagtggaacccaggttatgccactgcactccatcgtgggcgacagagtgagactctgtctcaaaaaaaaaaaaaaaagaatctgatgaaatctaagaaacctt

SEQ ID NO: 1780 - DNA, 661 bp, Homo sapiens
  FLJ31579
  misc_feature [331]..[331]: Chromosome 3, SNP identification no. = rs6777540
  misc_feature [331]..[331]: allele = a, in linkage disequilibrium with rs6788543, respectively
  misc_feature [331]..[331]: n is a, t, c or g
gtcttatgcctgtgatcccagcactttgggaggccaaggcaggtggatcacttgaggccaggagttcaagactagcctgggcaacatggtaaaactccgtctctacaacaacaacaaaaaaattagccgggcatggtggtatgcacctgtaatcccagctactcaggaggctgaggcagaaaaatcgtttgaacccagaaggcagaggttgcagtggaacccaggttatgccactgcactccatcgtgggcgacagagtgagactctgtctcaaaaaaaaaaaaaaaagaatctgatgaaatctaagaaaccttaccaaaatttttacacntgcataaaaagagttttgcatgtaatttcatagggttttcagacattctgaagacaccaatttaacacctgcttggatagtgcttaccaaatgtagaatattccagcctggacaacacagtatttttacaacatgggataaattaagatgagtcatttatttatttgataaacgtttactggacccttactaggtagtgcgggctgcagaggcactgatatccttgtctttcaagagttagcaatccaggttgtgcgcagtggctcatgcctgtaatcccaacactctgggaggccaaggcaggtgaaacacctgagatcaggagttcaa

SEQ ID NO: 1781 - DNA, 661 bp, Homo sapiens
  FLJ31579
  misc_feature [331]..[331]: Chromosome 3, SNP identification no. = rs9825915
  misc_feature [331]..[331]: allele = t, in linkage disequilibrium with rs6788543, respectively
  misc_feature [331]..[331]: n is a, t, c or g
gcagaggttgcagtggaacccaggttatgccactgcactccatcgtgggcgacagagtgagactctgtctcaaaaaaaaaaaaaaaagaatctgatgaaatctaagaaaccttaccaaaatttttacacgtgcataaaaagagttttgcatgtaatttcatagggttttcagacattctgaagacaccaatttaacacctgcttggatagtgcttaccaaatgtagaatattccagcctggacaacacagtatttttacaacatgggataaattaagatgagtcatttatttatttgataaacgtttactggacccttactaggtagtgcnggctgcagaggcactgatatccttgtctttcaagagttagcaatccaggttgtgcgcagtggctcatgcctgtaatcccaacactctgggaggccaaggcaggtgaaacacctgagatcaggagttcaagaccagcctggccaacatagtgaaaccccatctttactaaaaatacaaaattaccaggtgtggtggcacgtgcctgtaatcccagctacttgggaggctgaggcaggagaatcgctggaacgtgagacgcagaggttgcagtgagccgagattgtgccattgcattccagcctgggcaacagagcctgacttcatctcaaa

SEQ ID NO: 1782 - DNA, 661 bp, Homo sapiens
  FLJ31579
  misc_feature [331]..[331]: Chromosome 3, SNP identification no. = rs4682305
  misc_feature [331]..[331]: allele = t, in linkage disequilibrium with rs6788543, respectively
  misc_feature [331]..[331]: n is a, t, c or g
actattatgatgggtgtgtagaggagaaaaatgtaagaggacaactggtgagaggtgtagtgctaaaactatggcctgcagaggagctcttttctatttgcagacctagccccaacccatgaatgaaaacaatagaaatgatctgctataagatttcagggagtttaggggagctccggagagctgtatgtccacacatcagccagccagtccgtccctcacccacaccctcggatcctgccacaaatatttgaatcactgccatagcaatgttcatggacccatgccaaacaaaggtccatacgactgcctgggatttaaatgtcttccngtgtaatctcatcacccaagtccacccacgtacttggagtttgctctgccctgccagcttcttttgcattgtctagctggacctacattcagaggtccttggagacaatgcttggattcatgtctggaatgcttcagcataccattgaacccactcccacttcatcattgcctggggaagagattcacaagtgcccaaggagcccactggttgccaatgagcaatttctcgagcctttaattatgggccaatgaaaacaatgcctttagtgaactgctgcctccctttcacctctgacccatggtcagacacgtgactgtgagtgttgcc

SEQ ID NO: 1783 - DNA, 661 bp, Homo sapiens
  FLJ31579
  misc_feature [331]..[331]: Chromosome 3, SNP identification no. = rs6786612
  misc_feature [331]..[331]: allele = g, in linkage disequilibrium with rs6788543, respectively
  misc_feature [331]..[331]: n is a, t, c or g
ctcttcccaccacttactgggaaagctgccgtaacagcaggtaccaggaaaaagccaaactggcctaaataaagagaaattttcaaatgacatttagttcatctgtattcagtattaaggtttcttcttcacttagctgagctctataaacacctgtcagtggcactatgagatacagcctttagaatattgctgcttcattcacacagtggactgtagggaggagaaagccagtgccagggagggctccttagttattgagacctcaccttcccacctctgttgtgtgctcttgggagctctaggtaggggtctcactcaagtaaggctntgagaggtatctgggtgatggatgtgcttcaggaatgcatttcacagcagatgtttttccagacttgctgttagggtgcagtttcctccttcagggagggtttagtggctcaggaaattaataaagtcagacagaaaaaaaattgatcaaagtcctggtgctaatgtatgctctatctcctggaagttaatggagatcagacagcaaaatgctagggatgcgagccccgagtggcttggcgcatctgcatttagaagcactggctgaagaagcatcactgctagaaatgtaagacatgcagagtcctgggaaagggcaccactggggctt

SEQ ID NO: 1784 - DNA, 661 bp, Homo sapiens
  FLJ31579
  misc_feature [331]..[331]: Chromosome 3, SNP identification no. = rs9818574
  misc_feature [331]..[331]: allele = t, in linkage disequilibrium with rs6788543, respectively
  misc_feature [331]..[331]: n is a, t, c or g
atactcaggaaatgtaattataaaactagagataaaattttggcttaaagtttgacccagagaataattattttagatatgcgttcccctagtgaataaagtaggagaatgtttacatttttctacaattgaacacctgggaacccattgatatcttactgctaaattagtgagagctcagaatttgcactgagtttatggaaatgggcatttctttctaaaataagttttaaaagtatgcttcattgctttgctataaaactggccctgaagtgttctgacagctgctggtgaaagctttggaacgtatttagctctttttcagagatantgacctcctcacagcaattccaaaggcaagagattcttaagcatagtgggacaatacagagcaagcttctgggctgatgcttatgaataactagactgagagcccctcataactgctatttaggaaggcagtcatgtaagaatcagtcttattcaaatgtggacctttagaggaattacctataggattagagtataagtggatctgagaaataatcccctttatcgtataaactctccttgagtcccattccacatctctttgtcaatcaagtggcactaggggaaggaaaggggatagaaagagaagatagaaaagcaaaatctcttt

SEQ ID NO: 1785 - DNA, 661 bp, Homo sapiens
  FLJ31579
  misc_feature [331]..[331]: Chromosome 3, SNP identification no. = rs9870656
  misc_feature [331]..[331]: allele = t, in linkage disequilibrium with rs6788543, respectively
  misc_feature [331]..[331]: n is a, t, c or g
tgtaacctattttcaaagtatttataatttatgggatttgatatctattttaaatcaaatattaatttactaactgagtgcacgttcctacattgcacctctcactccagactaatacagttggaatctccctgcagcatcctggaaagtttagcttcctgagggcaaatcttttcctgcctagatactaaatcaactacatcatattctagaaaactggaaaatgtgaaggaagggatttgtaataactcatacacctagatgtagaactccaagaatctaggcctgcataagagtgccaaggagttacagttcccccttgatgtttcanataaacttcaccttccctttgtcatcaggtaattcaataacgtgtacttcctttagatttggcaatcagtcctaaaaccagtggtatttattatgctttctcccttccaatctttctcaggtagagaagatagaaatacattctgtccaaagatgcttaagctgaagacacttaagtatatttccaaggaaatagaaaatagattcttatctctaaggagcttacagtcaagccaagaaaatttggaaagtgtgtacggtgaaggggccaaagaaataaaggccaccaatcagcataaaaaagagaagccagaaagctgagagccagtta

SEQ ID NO: 1786 - DNA, 661 bp, Homo sapiens
  FLJ31579
  misc_feature [331]..[331]: Chromosome 3, SNP identification no. = rs10470303
  misc_feature [331]..[331]: allele = c, in linkage disequilibrium with rs6788543, respectively
  misc_feature [331]..[331]: n is a, t, c or g
tctttctgttatgtgccacattttttttcttccaaaagatactcacttgtggtaaccccatatgcatcatatttgcaacttgttgtttgatgccatctgtttaatacaataaaaaagaattagcagtcctatcacatgagctgaatttcatctgattcctcttcaaagaaataggaggcactattctaatgggcaaaaataatgagtgctaaatccttcaactagttttagatgtaaaacacctgttttaccccagtatagatgttacatattcttctacatcattaccctcccttttttttaagctaaacggactggcttctggcaaatncagaccatttaacaaactccagcagatatgttttataagcgtaggagctgactatattgtggagagctccggatttacatttcatcgcacaatcaacctactgccccttgggcactcatacaacctctctgtaggtcttcattttgaaaatagggatactgttatgggttatgtttccccaaattcatgtgtagagtcataaccaccaagacgtcagaatgtgaccttatttggaggtaggtctttacaaaggtaatcaagttaacatgaggtcattgggtaggtctcctctactatgatttatgtccttatcatagggaaatgtggaca

SEQ ID NO: 1787 - DNA, 661 bp, Homo sapiens
  FLJ31579
  misc_feature [331]..[331]: Chromosome 3, SNP identification no. = rs9823974
  misc_feature [331]..[331]: allele = a, in linkage disequilibrium with rs6788543, respectively
  misc_feature [331]..[331]: n is a, t, c or g
gttttagtgaacttggaaggcaactcgtgctctcatgtaaaatgtgcttcaactctcattacagagtccatagccttagagtatcttgctcagaacatctctactttctacccagggctcaagtcaggacaatttggtcccaagaaaccacagtgaaatgtgaatccctaaaaaaaacatggcaagtgttgtgtggatatacatcaacagaaactgaaactgagggatcacactttctccccagttctcttctgtcatctaatccactctcttccacctaaaattttcctttgctcacacagagttccttactgattccctttagcatctntgtggttcattaggccactcaggcagcctttctttggctactttctcaatagtggctctcaaaattttagcagcatcagaatcacctggagggtatgtaaaactcaggtttctgggccctaccttcggagtttctgactcggtaggtctggagaaaaaactaacaagttcccatgtgatgttgatgctgctggtccagggaccacctttaagaagcactgttctatagtatgacatttctgcttcagttttcatggattacttattataacctttcaggttcccaaaatctatatatttttttctttttcaacttttattatagaatctg

SEQ ID NO: 1788 - DNA, 661 bp, Homo sapiens
  FLJ31579
  misc_feature [331]..[331]: Chromosome 3, SNP identification no. = rs4682312
  misc_feature [331]..[331]: allele = g, in linkage disequilibrium with rs6788543, respectively
  misc_feature [331]..[331]: n is a, t, c or g
agttacaattaatttctcctttgtggatatccacaacaagaacaggctcacatagataacagaaatgatcattagtttttcaaatatgatttcatttaaaagcaagaattttcttccgccttctgctatgcagatgcattcctttctccccacactctcaactctcaaattcttaagcatagtaagtacagtttgggggaaaggtgttttttaatctagaaaagaatccggagaactttgcaagattttctcaagtggttcctatactccctttagtgcagattaaatacagtcctctaaatgatgagatggcagctgtaaacagaagcantattgccgtggcacaaaactacctcagtcatagggccagaatgcaacctgcctattttgaatttggtcaagcaaggaaagaatgccttatctctatttccctcaggccaagctctgtttacttatgtactgtctcaggaatatgacaggatccaaggccagggtcaagatatggagataggatgtaatagagaaagactaagtgtgaagctaaacttcattatttgcatccaaatgataaaaataatagtagaatctagagatgggtaatgactgcccttaaaattggtagcaaatgttcaggtttttactgggaacaaccttagttata

SEQ ID NO: 1789 - DNA, 661 bp, Homo sapiens
  FLJ31579
  misc_feature [331]..[331]: Chromosome 3, SNP identification no. = rs4682314
  misc_feature [331]..[331]: allele = c, in linkage disequilibrium with rs6788543, respectively
  misc_feature [331]..[331]: n is a, t, c or g
tttgtacaggagatccttgcttgggttgggatgttaaactgatgacctctaaggcctcttccaaagtctaagattttatgattctggattgtttgacctagctgaagaaaatgacctagtaaataactattgttactttcaaaaatttaagtctgagttctgaaaaaggcttaaagtgggaggataagacagagcatcggcaacttaggggattggcagacaagcccaggccctcccacccaatgataagcagtagaatcttaggcagatcacttatctcacccgggctacagtttgtcattctaaaatgagagagttgaactaaaatatnattaccagatgatctaagagtcccctcaaagcctaagatcctataattctatgtttaataaataggtataataaatgacatagtcaggttttcaaatagaaactcctatgcctattttaataaactctggctgtctcagtgacttgtcctattgagagcctcagatgcaaaaaccagaggttaaatccaaggttcacacatttgtcattcatcaaaaaaaaagtttaagaacttattttgcatggggcgcaatgctaggtactattgattcaagggcaattaaagtgaagactgttgtactgtcaaagatctcacagtttagtggtgatg

SEQ ID NO: 1790 - DNA, 661 bp, Homo sapiens
  misc_feature [331]..[331]: Chromosome 3, SNP identification no. = rs3936551
  misc_feature [331]..[331]: allele = g, in linkage disequilibrium with rs4422272, respectively
  misc_feature [331]..[331]: n is a, t, c or g
gctaaggagaataaacataaaaacataatgtagaagttaagctcctggccctcaaacaacttttaatatagttgaagagacatgggatgttcttaagttatatgacaagatataatatgatcatgcactaaagtactggtacagtcaacatgatatgaaagtctaaaggaaggaaataggactgtggattagtgtgatcagataaagcttcacattggagaagtgttttcagctgagataaaggaagaatatggggaaatggagaaatgggaaaagttgaagagacggaaaccaactaaaaatacagaataaatacatgaacataagtaanatttgttttgaagtcagtagtctatcagcctaactgaaataaaaattttaagttgcgaaatagtagagataaatatagacttgatggggccacaacacagatgccttgaattcctccccagggttccctacaataaataccacttcctttttcttcctccttttttcttctctgtctagtaactatggcatctttgtttgttatgttatactagatgaccttcattacatttcatggaccttcaaagatattaagaacaaaatgtctgcactttagaccactagttcccaatctactgtgcccagattaccaggattccacaagagcaga

SEQ ID NO: 1791 - DNA, 661 bp, Homo sapiens
  misc_feature [331]..[331]: Chromosome 3, SNP identification no. = rs3846047
  misc_feature [331]..[331]: allele = g, in linkage disequilibrium with rs4422272, respectively
  misc_feature [331]..[331]: n is a, t, c or g
catggtgcctagcctctgatcttcagtttagttctgcaatctaaccagtctaccatgaccactgaatcaccgttcagccctgtcagcttagaacctgtcctcttaatccataatgtatctgaatattttaaccactttaaaaatcttatatatcaataaattttaaactatattttcctaatatataaaatgcaagagtctggacttcagaatttttcctttgatttatctttaataaagtccagcttgttctttctttgtaggcagaaattaacaaatttttaaatcatcaaatacaacaaactcacacattacctagcaaaacaaaaanagtattattatgatttaggataatggcctccagttgaaaaataaaattaaataacaatattatgataaccaatggtctgatgtctaaaaacattacagatagttaattacctgcttaagcaaggtgtaaggaagtagcataacacttgaagcaattgttagtaagataatctctctcattcattcaacagatatttatttagtacctaacaaatgtgcgttactgcactagatgctaaggagaataaacataaaaacataatgtagaagttaagctcctggccctcaaacaacttttaatatagttgaagagacatgggatgttcttaag

SEQ ID NO: 1792 - DNA, 661 bp, Homo sapiens
  misc_feature [331]..[331]: Chromosome 3, SNP identification no. = rs4682146
  misc_feature [331]..[331]: allele = c, in linkage disequilibrium with rs4422272, respectively
  misc_feature [331]..[331]: n is a, t, c or g
atgttttcaggttatagaatacaagcagtatagaagtttagccctttttttttctgtttgcattcaagagccatatgatgagattctcagatatctacaagcatcgtatgtcacttgctttgcctcattttcacttctaacaaagttggaaataacaaaaagtcaaaaataacttttttccaagaaaatatgttttttaagctatagaattaatactctttgtaaaacttcatgaaatacagtagagtatacaaagaaataaaagccatccagataccaaccactgaaagatagtgactcttacttttcctataaatatctatctgtattntttatagtaggaaatagaacttaatttgcaacaagaggagacgtgtaagtgtggagctgtagagaaatgtactctacttagcatctgttaaggggcccctggtttagctaaataggcacgttgctttatagtgtggaactcccaaataaatcaagttttgattttagcaataatctctgcatgaagaatcaatcttctgaccagggcaatataatcctttaataaattgtgtcctcggtcccagttgttattctgctatctgggtggccagtggaaacctgtatcctccctggagctgattctgctacttagtgcttctcaaggatctca

SEQ ID NO: 1793 - DNA, 661 bp, Homo sapiens
  DKFZp434C0328
  misc_feature [331]..[331]: Chromosome 3, SNP identification no. = rs6798319
  misc_feature [331]..[331]: allele = a, in linkage disequilibrium with rs4422272, respectively
  misc_feature [331]..[331]: n is a, t, c or g
catgcctatagtcctagctacgcaggaggctgaagcaggagcatcacttgagccccaggagatcaaggctgcagtgagctatgatcacaccattgcactctagcctgggcgacaaaagagccagatccagtctcttcaaaaaaaaaaaagatttaatactttttatgtttcagttttgaggatagatgttatagacactatgattgtgttactttcttgtaaccaccaataggagagagaaagggaaagagaaagagaaagcaaaaaatataataaaagtagttgtttaaaggaaaatttagtacaaattacttgaggcttgttgtacttnttaagtaggcattttaaggactctttttcttaaaattgtaagatccttgccattgaagtcaatgtagtgggagacatttggaaagatgaagggtaacatagagactgctttattagtgtccttaccattcttgctttagtatgcagctgggcatggattagtcatacgctgtttacctgaatttaggactttaggaagatctactctggcccccagtggccaaataggtaagtagcaccaaaaccaggatttttgttttctctttctcacctgcttcttttataagaatggtccttccaaagtagtttcagctggatgtggtggcgcgcg

SEQ ID NO: 1794 - DNA, 661 bp, Homo sapiens
  DKFZp434C0328
  misc_feature [331]..[331]: Chromosome 3, SNP identification no. = rs4422272
  misc_feature [331]..[331]: allele = c, t
  misc_feature [331]..[331]: n is a, t, c or g
cagtgatcttagagggagggcttctccctccttgggcatcactcaggcctgcacatcctgctcagctaggagctgtgggactggatgtggtcacctattctgctgtctgggtacttcctaggggaacacggggttgtgcctgcccacatagttgaggcagaagtgagaccactgggctggacactctagcaggcatggcctgtctggctaccagcagcagggatgggtgggagtcacctaccctgctgtcaaggtgtttcctggggcaacaggaagctgtggctgccagctgagttcaggcagaagtgggactgttgggctgaaggctagnaccaagtcttgtctggcaaggtggagtgaagcaatcttactgctcccaggcaggaccgtgaccgctattggggatatggtactggtgtcattccgttccagggtccaaggcttatagaggtccccatggacttgagagttgtcgccgcagaaactctgggtgtctctctgcctcagtttagaagtgtgggggtagggccaggggaaccagggaattctcccattactagtcttacacaggtgcctgtgtacaatcctccagggagctctcactcactcatcctttcccatattgaggagcttttcctggctctgtgctgatcccagaggg

SEQ ID NO: 1795 - DNA, 661 bp, Homo sapiens
  misc_feature [331]..[331]: Chromosome 3, SNP identification no. = rs1566414
  misc_feature [331]..[331]: allele = g, t
  misc_feature [331]..[331]: n is a, t, c or g
aatagaaaaaccaggacgctcggtgacaaactgagctccttcgaatgcacttgaatatgtatgtaagctgctgaagattctgtaatatgaaacaaaatggctctttgcatgcacttaaagaacaacaggaaaactggctgagaagactggaaaagctataggatttttaaaaatggaaagtgaattttattcaagaagatcatttatgattagtcagggaggagtagatgacaacgtttagtgctgaccaggtgccaactacactacacactcacttttggaaaccctcccactacctcattctacagagaaggaaacagaccccagaaangttaagaggtgcccaaactcatagcaacttaggaagcaacagggctgaaactcagccatggctctggctgaatgtcaagccttgctcctccgagtgcttgctccaaactgtctcaggtgaagaagggatttattgaagagccaggctggaatcctgaatgtcagtgggctgagtttgagaagccagaaatacgttcagactgaacaagagtaccagaaaaacgctgcctcaaagatgaattcgtgatataaattctatgaggtatgactataaactgaagtcaagagactgacttctcgagctgtgtctgatagccaggctcaatgcatt

SEQ ID NO: 1796 - DNA, 661 bp, Homo sapiens
  misc_feature [331]..[331]: Chromosome 3, SNP identification no. = rs10934459
  misc_feature [331]..[331]: allele = c, in linkage disequilibrium with rs1566414, respectively
  misc_feature [331]..[331]: n is a, t, c or g
gtgacaaactgagctccttcgaatgcacttgaatatgtatgtaagctgctgaagattctgtaatatgaaacaaaatggctctttgcatgcacttaaagaacaacaggaaaactggctgagaagactggaaaagctataggatttttaaaaatggaaagtgaattttattcaagaagatcatttatgattagtcagggaggagtagatgacaacgtttagtgctgaccaggtgccaactacactacacactcacttttggaaaccctcccactacctcattctacagagaaggaaacagaccccagaaatgttaagaggtgcccaaactcanagcaacttaggaagcaacagggctgaaactcagccatggctctggctgaatgtcaagccttgctcctccgagtgcttgctccaaactgtctcaggtgaagaagggatttattgaagagccaggctggaatcctgaatgtcagtgggctgagtttgagaagccagaaatacgttcagactgaacaagagtaccagaaaaacgctgcctcaaagatgaattcgtgatataaattctatgaggtatgactataaactgaagtcaagagactgacttctcgagctgtgtctgatagccaggctcaatgcattatagccacatgttcacctggct

SEQ ID NO: 1797 - DNA, 661 bp, Homo sapiens
  misc_feature [331]..[331]: Chromosome 3, SNP identification no. = rs10934460
  misc_feature [331]..[331]: allele = c, in linkage disequilibrium with rs1566414, respectively
  misc_feature [331]..[331]: n is a, t, c or g
atgggcctgtaaacctcagctagaacaagttcagggatcaggtaactaattccatcccagaataaatttagtggtcaaaaaaaaaatctctgtgatcttgagttcaaatgtttttcctcgaaatttctaccatgggccttggcacttctgaaacaacattaatacatacatatcctctgactccggagagcctgtcaaatttttaaaaaacagatgtcacattcctcataagacacttttggaaaatcgtcccttagtgctacaatcatttctcatatttcgttatttcaagagtcttcattattccatttagcactctttagacagatanctggaacaaaatgcagtactccaagaccgtggacattatatctcagtcaatacaatcaaacactgtatcatttgtgatacagtcaattttctatgcttagttcatttctttttttactagtacatataaagttatcataaaaagttagttggtaatgaaaaagtaattttcagaatgagaaacgcgaatgaccatgaatcaaacaaaattagatgttcaacctcattactaagcaggaaaatgcaaattaaaacaaaaatgaaatatcatttcacactcatcagattggcaaattttaaaagtctaatgatagaagtattggcaagcatg

SEQ ID NO: 1798 - DNA, 661 bp, Homo sapiens
  misc_feature [331]..[331]: Chromosome 3, SNP identification no. = rs7372043
  misc_feature [331]..[331]: allele = t, in linkage disequilibrium with rs1566414, respectively
  misc_feature [331]..[331]: n is a, t, c or g
tttcatcagaaggcttctcaatttggattctctagccttttctaatgattagattgaaattatgccttttttgatgatagtaccacagaaatgatgctggatcctgctcggtgcatcatttcaggggatacatgatattaatagtcttattactggtaatggcaaccttgatcacttaggttaaggtgatacctgttttccctgtaaaattactatccccaactttgtaattgataaatatcttggataagatactttaagactactaacatcgtgtttcctctcaaacctcacccactgatggtggcaactatcagtagatttcatctgnaacaattattactgtgatatgtgcctaatggtcatttaattttaaaacttcctcattccttctatatttattaattggaattcctctgtaaggaagggctgccacttatctcacatttatttatgtattgaattataggtttatatcaatatgattccatatttattttattctatgagttataatcccatactatcattatttattttatcagccaaattttttcagctttggccagtgggagttccttgaggttggcgcctgtgttcttcggacatgctttccatcacttttcaaacagttctggtactacaacgctcatcttctatt

SEQ ID NO: 1799 - DNA, 661 bp, Homo sapiens
  misc_feature [331]..[331]: Chromosome 3, SNP identification no. = rs1500079
  misc_feature [331]..[331]: allele = t, in linkage disequilibrium with rs1566414, respectively
  misc_feature [331]..[331]: n is a, t, c or g
ctttatccctactgtctcatttccattagtcctttctttataacccttttccaatccactccctgtaggtaactattaataatttctacctccactttcctatggttttgtttgttttagagtgtgtaggggtgcatttatatgtgtgtgtgcacaaatgcacaggtatgagtattttgttaagtcgtcttcttcctaatattaaaagtagtaaactggctggtttttgtgtttttgtttcttgtatttgtattgttttgttttgtttggatgttatcgttactttggggtttttttcactttgctgagttcaactaaccatatgttctanaaaaatcaatttatagataatttcccttttttaaacagctatatagtgcttcattgtatggatattgttggggatgtttgcatttcttcacatcttttgagcaagacactgactgccctttgttccagactatcttttcaggcatatttgtatagccaacagtcttgaaatatagagatagcatcttcctcagaacaaagggcaggcatgtttactgtctaatatcaaagatacgcactctctaatctcagaattcctcaatcgtacaggaagtcaatcattgtacagacagattatatgaaggtgtatctgccactatttgctttaccc

SEQ ID NO: 1800 - DNA, 661 bp, Homo sapiens
  misc_feature [331]..[331]: Chromosome 3, SNP identification no. = rs1500080
  misc_feature [331]..[331]: allele = a, in linkage disequilibrium with rs1566414, respectively
  misc_feature [331]..[331]: n is a, t, c or g
atcttttgagcaagacactgactgccctttgttccagactatcttttcaggcatatttgtatagccaacagtcttgaaatatagagatagcatcttcctcagaacaaagggcaggcatgtttactgtctaatatcaaagatacgcactctctaatctcagaattcctcaatcgtacaggaagtcaatcattgtacagacagattatatgaaggtgtatctgccactatttgctttaccctgtgggaattggggctgataaaactggtgccaaaaatggcatactttggctacatttactctaggtaataaactttccttcatctctgaccnaggagtctcacgccttctgttagattctacaaaactgtgacagtgttttgacttgcagatagggtaaaatttcagacacttcacagttcttgacagatgtgtcataatttatttaaccactatcctatatatgggcatttaggtaccacagttccacagtttaatggctgctgatagaggacatgagacccatagattagagacaaaggactttattatgtgtgtgtatatatatatatgtatgtgtgtgtgtgtgtgtgtgtgtgtgtgtgtgtctatgtggatatatatacatacatatccaagaataataaatcactattgttttaa

SEQ ID NO: 1801 - DNA, 661 bp, Homo sapiens
  misc_feature [331]..[331]: Chromosome 3, SNP identification no. = rs12485708
  misc_feature [331]..[331]: allele = g, in linkage disequilibrium with rs1566414, respectively
  misc_feature [331]..[331]: n is a, t, c or g
cagtttgctgcaaagttcattttacatagtagaatttaagctatttgaagcctgcaccatcagatttccattatgtgaacaagatggtgaaatttatctgcttcatgctagatgacttaagccaccagggtcaggaactaagatgcattttaaatgacataagccatgctgtagaaaaagtcagccgtttctcgaaatgaaaagaaatgtagagtccataaccatgtgatttccacaagcagacaattccttcatcttgtctctctttttctgggttctctatgcctactatgtatcagttatgccccttcggtccttgccttccttcttncagaccacccttccagaactggcatccccttctccctggtaacaattcagacttccttccctcctgccttgttggccaacatactaactctagtctcaagatgctccttactagcttcttgaaactggcatttttgataactcatataagcggataccttgagataaaacttaacatgttggtattcacaaatttcccctttacctacttagctttttctcccagcctcactctctgaacagaaagagccaaagctgcttagaagggttatcacaagaaaatcaatcaggataataattgtaattaccagaggagttgtatgcataaaag

SEQ ID NO: 1802 - DNA, 661 bp, Homo sapiens
  misc_feature [331]..[331]: Chromosome 3, SNP identification no. = rs1066152
  misc_feature [331]..[331]: allele = g, in linkage disequilibrium with rs1566414, respectively
  misc_feature [331]..[331]: n is a, t, c or g
ctggtcattttccaaataataacctaaacacatggatatcaccgcaaattagtttccacaactccactcactcaagtttaatttttctcacaatcagtttacctgggattgggttatgttattgtacatcctgtccattaccaatatcctttgtctttgaaaaccactggcctcaaatttcctttagaatgaatacagtaaaaaatttctgagagacctgaacagttttctggagacaccaggagtgtgtagtgattctttaaagattggactctagccccaccacccacttactctgcaaatgtgggcaagttatttaaactcgttgagnttcagctttctcatgtgtaaaatgaggagcattgccacaattgagtaagataatgtaggtaaaagagcacctcctgggagtttcttaaaagattatatacatagagtcaccgtacaactctgtgattccactcctaggtttatacccaagagaaatgaaaacatatgcccacacaaaacttgtacacaaatgttcatagcagctatatatatataatagccagaaagtagaaagaactcaaatgtccaccaacttatgaatggatacacaaggtatgatatacacatgcaatggaagatgattccataataaaaagggataaaggtctga

SEQ ID NO: 1803 - DNA, 661 bp, Homo sapiens
  misc_feature [331]..[331]: Chromosome 3, SNP identification no. = rs1066153
  misc_feature [331]..[331]: allele = t, in linkage disequilibrium with rs1566414, respectively
  misc_feature [331]..[331]: n is a, t, c or g
ctcacaatcagtttacctgggattgggttatgttattgtacatcctgtccattaccaatatcctttgtctttgaaaaccactggcctcaaatttcctttagaatgaatacagtaaaaaatttctgagagacctgaacagttttctggagacaccaggagtgtgtagtgattctttaaagattggactctagccccaccacccacttactctgcaaatgtgggcaagttatttaaactcgttgaggttcagctttctcatgtgtaaaatgaggagcattgccacaattgagtaagataatgtaggtaaaagagcacctcctgggagtttctnaaaagattatatacatagagtcaccgtacaactctgtgattccactcctaggtttatacccaagagaaatgaaaacatatgcccacacaaaacttgtacacaaatgttcatagcagctatatatatataatagccagaaagtagaaagaactcaaatgtccaccaacttatgaatggatacacaaggtatgatatacacatgcaatggaagatgattccataataaaaagggataaaggtctgattcatgctgcaacatggataaacttgagaacattatgctaagagaaaaattccagacacaaagagccacatattatatgatttcat

SEQ ID NO: 1804 - DNA, 661 bp, Homo sapiens
  misc_feature [331]..[331]: Chromosome 3, SNP identification no. = rs1066155
  misc_feature [331]..[331]: allele = t, in linkage disequilibrium with rs1566414, respectively
  misc_feature [331]..[331]: n is a, t, c or g
ttattctcttatccagtaatccagtttgaggcatgcccaagcctagagcctcttcctgacctctcctcacttctgccagtactggggctatttctcgcacttccactctcaaagctgaatgtgactgaaagaaatatataaaatagagcattttggggtcattgtttagcattatagctacaagtttgattggagagaagactgacactactggttaaaatgaagtctttgtattaatctatgaatatcatccagggctttgaagaacagccgttttgcaacttgccagtttcatccatttgaaataaattatagatggtacatttgtccncgtgagttatcagttatattcacgtgcatatatgtcctaaaaataaatagtctcagagccacacatattcccagcaagtgacaaggatttacacaccaacatcagcaactttgtaaggaagctttgtccttctcatcattcttttttcttggtgccagcagagattcacaagtagcagtcagcagcagcactatcaaaatgtatttttaagcccattgtgttgttttgacaaactaaacgattaattaacagcaatctagcgaacacatctctacttacagctcagagtgaaacacacagatcgccataaccattctatagtcaccattt

SEQ ID NO: 1805 - DNA, 661 bp, Homo sapiens
  misc_feature [331]..[331]: Chromosome 3, SNP identification no. = rs705246
  misc_feature [331]..[331]: allele = a, in linkage disequilibrium with rs1566414, respectively
  misc_feature [331]..[331]: n is a, t, c or g
gtaaggcagagtttatatgtagctcatgatggtatcccacaagagtgcctgacactgggcaatctctgcataaatacataaatagatgagtaagtgtgcaagtacataatacaaagcttagcctgtaaggtaccaggacttggtgtttcaggaagtacctctatgtctctctaccctttgggtgatcttccactcaaagatcctttgaatatgtagaacctttggggtcttgctcttacactggctatctttactgggaatcactcattggagtgggtgtccagcagccttgcttataccacatgaactggtcattttggccacatttttntggaacagagatggacatttgacccaataagttttcattcgatttttacaactcggagtttgaaattgaggctaagagagtctacctctttgcaggtcagttgctagaacagtaacacataaactgaggagctatgacaaaccatatgccatcatgtggaccacagaagcaggtctgagaggaaaacaaagaggctttcagaaagagaaaatattcccttcctagttcaaggtcctagttaaagtctaactgtttccctgtccttgggatttataagatgttctccatatccttatgataaattatccctttgtactagatcaggatata

SEQ ID NO: 1806 - DNA, 661 bp, Homo sapiens
  misc_feature [331]..[331]: Chromosome 3, SNP identification no. = rs705236
  misc_feature [331]..[331]: allele = a, in linkage disequilibrium with rs1566414, respectively
  misc_feature [331]..[331]: n is a, t, c or g
ctgcctcagccaggctttccttcttcttggtccacaaccaccctagtcagcaccgcaagccttcctctgagtctcagatcccttttttgttcccctcacaaatctattcccagggctttaccattcagcttattatctctgtccagataaacattagcatagcacattatcgtatctaaaacccaaccatacttcaacctctctaatttcaggttagggtgacttaatccttttggagaacgaaaatttcacaacatttctgtcctttggtaataggagtaggattgtgattttgccaggcctataggaagaataagggggctatgtgaangattctgctttgccaaacctgtacacactagcccttgggagggttcaaaggatcctaaggatcagcagacagataagaagcattgtaatggtaagagcctggtgctgcaaaacaagccttctgcaaaaacagggctgaaccatgaggctgagcactagggcccagtgaagtctcctcatgtctaaaatctttgtcctcacgtctaaaatctaaacacttctacctgaaaacatggatgatcttgtctcaatggcatgtgtgcagagacagaaagagatggaatgccccatgaaaaggacaaactccatttaccaactagcttcatggcag

SEQ ID NO: 1807 - DNA, 661 bp, Homo sapiens
  misc_feature [331]..[331]: Chromosome 3, SNP identification no. = rs10934463
  misc_feature [331]..[331]: allele = t, in linkage disequilibrium with rs1566414, respectively
  misc_feature [331]..[331]: n is a, t, c or g
atgatggtaattgataactataaatccaggcaaatcttaaatattcaacaataaaaatgtacaaaagagaaaaaacacattctaagcttcttctgttgttcaggagaacacaagaagactttagaagaacacaatcaagaccttgttaagccaaacatgcaagttaaaatgttaaggctgatctttaaaagatgaaagcagaaggcatgaatttcaaatggtaaatgaacaaaaatgaataaaaataataatcaacataaggcagtaaaaatagaaaaaagcatagagaaagcagaataaaaaataagatggaagaaataaaaccaattancttattaatcacaataaatgtatctgagttatgctacattgtttgtgtgctttaaaaagttttaatatagaaaattatagaaggaatagaactgaaaagacagatgaacacattacactaaaaaaaatccattgcacattgtttatatcaatagataattcataaaaaggcaaggcaaaagatatataaagatatgagtaagtgctcagccttgttggtattcagggaattgaaagttaaaacaataatggtatcccatttaacaactatcagatgggtaaaaccttaaaattcttactattatcaactgttgtggaccaataacaactt

SEQ ID NO: 1808 - DNA, 661 bp, Homo sapiens
  misc_feature [331]..[331]: Chromosome 3, SNP identification no. = rs7433532
  misc_feature [331]..[331]: allele = g, in linkage disequilibrium with rs1566414, respectively
  misc_feature [331]..[331]: n is a, t, c or g
caaacatgcaagttaaaatgttaaggctgatctttaaaagatgaaagcagaaggcatgaatttcaaatggtaaatgaacaaaaatgaataaaaataataatcaacataaggcagtaaaaatagaaaaaagcatagagaaagcagaataaaaaataagatggaagaaataaaaccaattaccttattaatcacaataaatgtatctgagttatgctacattgtttgtgtgctttaaaaagttttaatatagaaaattatagaaggaatagaactgaaaagacagatgaacacattacactaaaaaaaatccattgcacattgtttatatcantagataattcataaaaaggcaaggcaaaagatatataaagatatgagtaagtgctcagccttgttggtattcagggaattgaaagttaaaacaataatggtatcccatttaacaactatcagatgggtaaaaccttaaaattcttactattatcaactgttgtggaccaataacaacttcttacataattggtagaagtacaaactggtacaatcactttaaaaagtttggcaaaatctaataaagttaaaaatattcgtaccttcaacttagcaacattacttctaggtgtatgtctcagagaaactgttgaacaagtatacatacccg

SEQ ID NO: 1809 - DNA, 661 bp, Homo sapiens
  misc_feature [331]..[331]: Chromosome 3, SNP identification no. = rs798576
  misc_feature [331]..[331]: allele = t, in linkage disequilibrium with rs1566414, respectively
  misc_feature [331]..[331]: n is a, t, c or g
catgaagttgcctgaggaggtggtagtaaaccctaaacattttatgaaggaggagactgaggtccagaggggttcaatgacttgctcagagacacaagccaattactacagcctgtaagctgagtcagaagccccaggtgtcctgactcccaagccagctttcgctagcatccacgagccatacaccctgcggcacagtggaaggctgtgaattggctcttacagctgcccacccctcacccaccctctgattctctgaaagcagagtacacagacccagtctgttttggagtttcagagctgcagcctgcatatttaacactggttttanctatcagaaatggagaataaatagcactataataaaacccataaaatataccaacttggatttttttcaggatggctccaagcacaagttggtaatcaaaaggttttgagaaaaactggaaatagtgtttgctgtgttgaaaatttccggaatcttaagagcatccctgttctccatcacccaccagctgaatactttaggaggagagatgtgttactctaagtcacaaggaaggaggacattttcaaaaggcctcataaagaatgcttcctcctcacatctttatgagccattcccactttagagaataaaactgtttaggcttcatgt

SEQ ID NO: 1810 - DNA, 661 bp, Homo sapiens
  misc_feature [331]..[331]: Chromosome 3, SNP identification no. = rs798580
  misc_feature [331]..[331]: allele = g, in linkage disequilibrium with rs1566414, respectively
  misc_feature [331]..[331]: n is a, t, c or g
gtttaaagaaattagataatttgtctaaatcacacaataaatcaatgacagtatcaagactgaacccaagtctctcttaatccataattcatatatttctatttcacttggactgaacataaaactacactaaacagcctctgaaacaaatgaaaagaaagatattcaatcacttaattgttcattcataaatatcaatttatttttattaagtgcctactgctgtgttgcacaacttcagaggtacccctcacaatgtatctcatattaggctctccccactagcacaacgatgtggctagtgctcctggaactgcaaaacttacagacnctctctaccattgcacaaggccttgtataagatacaaaagtaaggcagacagtcttttccttacagaagcctatggtctattctttctgaggataaataaaatacctattaaccattaaataaaataccataatgcttcgagaaaagtaaaaatacagtggaccttccaaagcaagcatccaatttcccaaaggatgcttgaggagattaataaaggagccctttaaataccatgagcaatttgctaactgcacaggtggcctgacatggcccactgctgccaaacacattcaaagacaccacaaggaagcgaggcgaacaggaaaagct

SEQ ID NO: 1811 - DNA, 661 bp, Homo sapiens
  misc_feature [331]..[331]: Chromosome 3, SNP identification no. = rs798582
  misc_feature [331]..[331]: allele = t, in linkage disequilibrium with rs1566414, respectively
  misc_feature [331]..[331]: n is a, t, c or g
gcaaataggtgttctcttgttacctgccctagctcaataaccacttgtcagtacactgacaatacatgaaattaaaggacatccgaaaagactcatgattctaagaatagacatcagagaatattaaaaagtaatgaatccatgattggacaccaagtaaacttcccttcgtgttatttctttggctcacggatatctgataatgcacttatgcctacaaagttaagtatattaggtcaaggattcaattttgatattttttcacatatctaacattatctattgctacagttccataaaaatattaaactgatactaatcatatagatangtgaatacacacacacacacatacacacagcaatgcatgtcccctaccctgaaataaactgcagctgttcttcatttccctccttccattggtacctaagcttttattcttactgaggaaggaagatattaattttttgctctagtagtcagaagattagaagcattaaaacagatgcaccacagtcacgtttacttgagttttttttttaatctaaagaccaaaaggaagcaaatgtaattggcagatacatgaaacagggctgctttctcaaacagattattttcttgctgctgactttcttctcatgctctatccaatgcctcatct

SEQ ID NO: 1812 - DNA, 661 bp, Homo sapiens
  misc_feature [331]..[331]: Chromosome 3, SNP identification no. = rs798583
  misc_feature [331]..[331]: allele = g, in linkage disequilibrium with rs1566414, respectively
  misc_feature [331]..[331]: n is a, t, c or g
caaggattcaattttgatattttttcacatatctaacattatctattgctacagttccataaaaatattaaactgatactaatcatatagatatgtgaatacacacacacacacatacacacagcaatgcatgtcccctaccctgaaataaactgcagctgttcttcatttccctccttccattggtacctaagcttttattcttactgaggaaggaagatattaattttttgctctagtagtcagaagattagaagcattaaaacagatgcaccacagtcacgtttacttgagttttttttttaatctaaagaccaaaaggaagcaaatntaattggcagatacatgaaacagggctgctttctcaaacagattattttcttgctgctgactttcttctcatgctctatccaatgcctcatctttgaaaatacagggtttgctttgtaatgaatcttaggaaatcctccctgtcactcagccagccaggagcagtcttctatggcatggcacgtcccttcacaggtggctacgcctgcgaagaagacatcagaaattccccagagggaagaaaaaacacaaaacagacggcttaaaagtcaaataaagaattaagtgagaaagggtgttttccttcagggaggaaggagattggggaagg

SEQ ID NO: 1813 - DNA, 661 bp, Homo sapiens
  misc_feature [331]..[331]: Chromosome 3, SNP identification no. = rs798584
  misc_feature [331]..[331]: allele = a, in linkage disequilibrium with rs1566414, respectively
  misc_feature [331]..[331]: n is a, t, c or g
ggaaggaagatattaattttttgctctagtagtcagaagattagaagcattaaaacagatgcaccacagtcacgtttacttgagttttttttttaatctaaagaccaaaaggaagcaaatgtaattggcagatacatgaaacagggctgctttctcaaacagattattttcttgctgctgactttcttctcatgctctatccaatgcctcatctttgaaaatacagggtttgctttgtaatgaatcttaggaaatcctccctgtcactcagccagccaggagcagtcttctatggcatggcacgtcccttcacaggtggctacgcctgcgnagaagacatcagaaattccccagagggaagaaaaaacacaaaacagacggcttaaaagtcaaataaagaattaagtgagaaagggtgttttccttcagggaggaaggagattggggaaggttacagagaagacagggactagatagacctggaaaaggattgccctcttcactccagggggaaatccacagtaagtgatgccttagaccaaaccaaacctgcccggtgcttagaaacctgatcatcatcaaatacagatttgtgggtcccacccaaaaaaattgctgaatcaaaacctctggatattgagcctagggatctgtacatttt

SEQ ID NO: 1814 - DNA, 661 bp, Homo sapiens
  misc_feature [331]..[331]: Chromosome 3, SNP identification no. = rs798602
  misc_feature [331]..[331]: allele = g, in linkage disequilibrium with rs1566414, respectively
  misc_feature [331]..[331]: n is a, t, c or g
ttcctagggctttctggatggtgctattttgttcttattaaaagggtactaaagaagcaccaacaatgaagggccttgcccaaatctcccccagattagaaccccaacttgttcccatctgaaccaattacgtcacataccctcagtgagtatttactgattctgatggcaatgttatggtctttgattgtacccacttttttttttagcataacagagcttattttgttatcaaatatttgtgaaatattttattaaatatcattataaaaattcaaagacacagtggcattccttcttgagatgctaattggcaaacataaagggaggntggattggggcaaacattgaaatcatccgccgatgggggttccgactggtccataacaacactgacaccttaaagtgtgtaaaaggtctcccagcactttgggaggccacggcgggcagatcacgaggtcaggagatcgagaccatcctggctaacatggtgaaaccccatctctactaaaaatacaacaaattagccagacgtggtggcgggcacctgtagtcccagctactcgggaggatgaggtgggagaatggcgtgaacctgggaggcggagcttgcagtaagccgagtcgtgccactgcactacagcatgggcgacagtgcgag

SEQ ID NO: 1815 - DNA, 661 bp, Homo sapiens
  misc_feature [331]..[331]: Chromosome 3, SNP identification no. = rs798589
  misc_feature [331]..[331]: allele = a, in linkage disequilibrium with rs1566414, respectively
  misc_feature [331]..[331]: n is a, t, c or g
ctattgtctttcttgtataaaccacagccatcatgtaacatctgatttctttagatgaaacaaaaaaaaatcttaatgcagaattctcctagacttttatgatttaactttttgcagatgttctgtccattcctaatttgataacaatgcttattaacaacttgtatttaaatctttccaaagaagcttagctttcatagaaatgcttttttcttgcattaatatcccatctatttagaggaagtttacagagctcagctcccttccataattggcaccaaaagcctactgacgtactcgggtgctccgtgtgctaccataggccctcacngaaactatctgtggtcacacgcacatctagtttaaacgggcacccctggcccactaccatggggcttgtgcctgctaaatagcctgcttggctgcacacccatctcccagagtacctgcaccaaatcagtgtatgactgccatttactcacagtttctggtgtctcaccggcatcatgccaaacagtctgtatggctgccatcagccacttgattaacatgtgctcaccttgcccttgtgccaagcattggcacagctgcagctgctgacgaagggaggggtgagttgtgatagaggccagcttctccatctcggaggcagagcaagaaa

SEQ ID NO: 1816 - DNA, 661 bp, Homo sapiens
  misc_feature [331]..[331]: Chromosome 3, SNP identification no. = rs798590
  misc_feature [331]..[331]: allele = t, in linkage disequilibrium with rs1566414, respectively
  misc_feature [331]..[331]: n is a, t, c or g
acaacttgtatttaaatctttccaaagaagcttagctttcatagaaatgcttttttcttgcattaatatcccatctatttagaggaagtttacagagctcagctcccttccataattggcaccaaaagcctactgacgtactcgggtgctccgtgtgctaccataggccctcacagaaactatctgtggtcacacgcacatctagtttaaacgggcacccctggcccactaccatggggcttgtgcctgctaaatagcctgcttggctgcacacccatctcccagagtacctgcaccaaatcagtgtatgactgccatttactcacagttnctggtgtctcaccggcatcatgccaaacagtctgtatggctgccatcagccacttgattaacatgtgctcaccttgcccttgtgccaagcattggcacagctgcagctgctgacgaagggaggggtgagttgtgatagaggccagcttctccatctcggaggcagagcaagaaatgctgtcagccccctcatcccaaagacagagtaatcagggctgggaggggctcccctgggtgctgcctgcattgcctacctaattcccacaactcatggggggtataaacactataagaggtgtgttccaccactgtggggggcccctgggctctc

SEQ ID NO: 1817 - DNA, 661 bp, Homo sapiens
  misc_feature [331]..[331]: Chromosome 3, SNP identification no. = rs9289460
  misc_feature [331]..[331]: allele = g, in linkage disequilibrium with rs13074310, respectively
  misc_feature [331]..[331]: n is a, t, c or g
ttagtctttattttcctcaatccaaccctggcccctgtcttgagaggcctcgagccttccacacaccctctttgcctcctctaggctatgtctgaggaagttgaaaggcctggggacggcagagaggcctgcaaggccctgccctcctgccctaacctgtgaccctgatgaaatcctctctctttctctccaagcctcttcccagagggcttccaggggctctgccaacatttactttgaatgttttttactgtgaagattttgctattcaaaattgtaataaatacaacacacccacacaaatgtgttacgtataaattttagtatattnaaaactaccaacacattaacttgggccactgcattaatttgttttttctttttttttgagaagaacttagaataaaactcctatttaattagaggtggtcctgggaacatcaggagagctgattaaaaataaaactaggggctgggcgtggtggctcatgcctgtaatctcagcactttgggaggccgaggcggacggatcatgaagtcaggagctcgagaccagcctggccaacatggtgaaaccccatctctactaaagatacaaaaaattagccgggcatggtggcaggcgcctgtaatcacagctactcggaaggctgaggcagga

SEQ ID NO: 1818 - DNA, 661 bp, Homo sapiens
  misc_feature [331]..[331]: Chromosome 3, SNP identification no. = rs4547696
  misc_feature [331]..[331]: allele = c, in linkage disequilibrium with rs13074310, respectively
  misc_feature [331]..[331]: n is a, t, c or g
accacctttcggtgctcagaacgaaaccctggggttgcactgatgcctctctcactctcacacccctatctcatccatcagcatcctgctggcccttcctgcagcatcatctcagaaccggcccatctctcaccccatccacggcggccttcccaggccaggtacttcttcccctacctgggctattgccatggcctcctccctggtctggttaaaagcaatcattttaacatgcaagcccaatgtcatcactggcctagaatactccagagtccagacagcccttcccatctcacacagggaaaactccaaagtcctttctgtggcctgnacaatctgcacccccatccccagcaacctgatctaggatcccatatcatatctctgtccctcgcttctccatctccaaatgcactgggctctgtcagccatggggcctgtactgctgccccaggctccactcccagacatggcatggaacccttcctcacttccttcaagtccccatttaggtaacccctcatcagagaggaattccctgagcacccaacaaaattcctggtgctcactgcacagcacaccctggcctcttgtactattcgctcatagcattgccaacccacgagctgtgtgtctattgcttgtttattgtttgtctccc

SEQ ID NO: 1819 - DNA, 661 bp, Homo sapiens
  misc_feature [331]..[331]: Chromosome 3, SNP identification no. = rs7632556
  misc_feature [331]..[331]: allele = g, in linkage disequilibrium with rs13074310, respectively
  misc_feature [331]..[331]: n is a, t, c or g
gcctgggtaaggaaaagtatggggacatttatggaacccactgagtcatagcctgggcttttgcaacacctgggacttagaggctgccagggtaccactacaaatgtcaccttcccatcctcaggtgtgtcagagggctcgaaggtagatcctgaagttttgtgggaaaagctcatgctttgaaggctgccagatccgtgcgcaaattcaggcttggcttcttcctagctctgtggcctggaacaaaactgaacacttctgagcctcagtttgcccatctctaaagtggaggtaataataccaacctcacagagcggcactgatgacaagngatcacacatatgatgcacccagcatggcacagggcatacaatggatgctcaactcccaccaggactcctttccttccacctgtgctgggaataagaaccacagttcttggccagactgctagccaaggatgctgactcacataggatggccatgtggtgtaggtgtggtaagaagtgggtgacagtgctcagcttatcagaactgctggaaagcaaaccctttgagtttctgacttccacccctaaagaaatgaatgaagtctgacgcaacgtttattcttcagaaattgggttatggccttcctgagaagatgtcctgattgcctgcc

SEQ ID NO: 1820 - DNA, 661 bp, Homo sapiens
  misc_feature [331]..[331]: Chromosome 3, SNP identification no. = rs7632489
  misc_feature [331]..[331]: allele = c, in linkage disequilibrium with rs13074310, respectively
  misc_feature [331]..[331]: n is a, t, c or g
gcttttgcaacacctgggacttagaggctgccagggtaccactacaaatgtcaccttcccatcctcaggtgtgtcagagggctcgaaggtagatcctgaagttttgtgggaaaagctcatgctttgaaggctgccagatccgtgcgcaaattcaggcttggcttcttcctagctctgtggcctggaacaaaactgaacacttctgagcctcagtttgcccatctctaaagtggaggtaataataccaacctcacagagcggcactgatgacaagggatcacacatatgatgcacccagcatggcacagggcatacaatggatgctcaactnccaccaggactcctttccttccacctgtgctgggaataagaaccacagttcttggccagactgctagccaaggatgctgactcacataggatggccatgtggtgtaggtgtggtaagaagtgggtgacagtgctcagcttatcagaactgctggaaagcaaaccctttgagtttctgacttccacccctaaagaaatgaatgaagtctgacgcaacgtttattcttcagaaattgggttatggccttcctgagaagatgtcctgattgcctgccacaaccccagagtgaggtgggcgagtgcccaccaagggcctgccgctctaatgttt

SEQ ID NO: 1821 - DNA, 661 bp, Homo sapiens
  misc_feature [331]..[331]: Chromosome 3, SNP identification no. = rs7632691
  misc_feature [331]..[331]: allele = c, in linkage disequilibrium with rs13074310, respectively
  misc_feature [331]..[331]: n is a, t, c or g
gcccatctctaaagtggaggtaataataccaacctcacagagcggcactgatgacaagggatcacacatatgatgcacccagcatggcacagggcatacaatggatgctcaactcccaccaggactcctttccttccacctgtgctgggaataagaaccacagttcttggccagactgctagccaaggatgctgactcacataggatggccatgtggtgtaggtgtggtaagaagtgggtgacagtgctcagcttatcagaactgctggaaagcaaaccctttgagtttctgacttccacccctaaagaaatgaatgaagtctgacgcaangtttattcttcagaaattgggttatggccttcctgagaagatgtcctgattgcctgccacaaccccagagtgaggtgggcgagtgcccaccaagggcctgccgctctaatgtttgccccatggccgtttgcatgtctgtctccccactacgtggtgagtgccatgaggacagggctgtgtctcattcatcatggtgtgcctggaacccagcacaagggatctgccagtgtagcctctgggcccccaaacatagagtgaaacattcaaataccaggatggagcctgtcctccagatggcacaggcagacaccctcagctctgctagccaag

SEQ ID NO: 1822 - DNA, 661 bp, Homo sapiens
  misc_feature [331]..[331]: Chromosome 3, SNP identification no. = rs4241373
  misc_feature [331]..[331]: allele = c, in linkage disequilibrium with rs13074310, respectively
  misc_feature [331]..[331]: n is a, t, c or g
gtggcaaggccctgtcgtctcagagaaggaacaggagtttgggctgcgcaagaacacacttcctggaggggagggcaaccttgcaatgggagagagcagacacccttacctgttcccaacaactcatataaggcttctttctggctgagctactgcactccctgtagcctactccccgcataggaaagtgtccttgagtctccccagcttggacaagcaggctcttgtaaggtctttgactattactctgaatgaaatgagaaccactggaaggctttgaactgcagagtgatatgttctgtctcagttttaacaggatctgtctggctgntctgttgagaataaactgaagagtaacaggctggaagtgtgagaccacttagggggttacttgatactgacagtgtgcatttcacatgaaccaaggcttaatcctcagcccaaaaatctatgaagtaggtataattataatcaatctttttttacacatcagaaaactgaatcaaagaggttaggaaactccccaaatataaacagccagtaactggtagagtcaagatttggacccaggcattctggctctagagtccatgtatttaatcagttcactatatagcatgtgtaagaggtcatctgactctagagatatttcaagggaaga

SEQ ID NO: 1823 - DNA, 661 bp, Homo sapiens
  misc_feature [331]..[331]: Chromosome 3, SNP identification no. = rs12695601
  misc_feature [331]..[331]: allele = c, in linkage disequilibrium with rs13074310, respectively
  misc_feature [331]..[331]: n is a, t, c or g
attggaaaatgagattttttgaaaaaaacaattagatagaatcaagaaatatgaaatgcttagagataaatttaacaaagtacgtaacaaagtatgtgcaagccttgaaaactagaaaacattattttttttttgatacaacttattttattattttattttttttggaaggttttttttttattactattattattatactttaagctttagggtacatgtgcacaatgtgcaggttagttacatatgtatacatgtgccatgctggtgcgctgcacccactaactcgtcatctagcattaggtatatctcccaatgctatccctccccncttagcaaacattattaacagaacctaaagaaacaaaaagatatatcactttcatggattggaagactatatttttaagatgttaattctcacccagttttttctatgcaacgccaatcaaaattccagctggtttttcttataagagtaggcaaactaacattaaaatgtatacagaaatgctaaagacctatacaatcttgaaatagaatatatttggtgaacttacactatatttgattttcagatgtaccagaaagctatagtaatcaagatagtgtggtataggcataagatcaaagaaacagattagatagtccagaaacaaaa

SEQ ID NO: 1824 - DNA, 661 bp, Homo sapiens
  misc_feature [331]..[331]: Chromosome 3, SNP identification no. = rs4507252
  misc_feature [331]..[331]: allele = t, in linkage disequilibrium with rs13074310, respectively
  misc_feature [331]..[331]: n is a, t, c or g
ttattcataatagcccccaaactgaaagcaacacagatatacctcagtagataaatgaagaaacaaagtatagtatgtgcctaccacggaatattacttagcaaccaaaatgaaccaactaacaattctctacaacagtatggtcagcaaaagagccagagggaaaagaatacagactgtctgatttcattcatatggactcctagaaaggacaaaattaacttacagtcacagaaagcagatcagcagttgcctgtgactggagctggggagcaactggctgcaaaggaatctgagggaactttctgggggtgagggaaatcttctcagngttgatttgggttgtggttatccaagtgtatacagtttttaaaaattcatcaaaatgtacacttaaaataggtgcattttattatatgtatatcataaacgcattgttaggtgatctcatcattaggctgatctcacactagggtctatggaatagcctatcacttctaggctacaaacctgtacagcatgttactgcgctgaatactgtaggccagcggtccccttccatgtactagcggcagagggatggtttctggatgaaaccgttccacctcagatcatcaggcattagttagagtctcataaggagcatgcaacctagatccct

SEQ ID NO: 1825 - DNA, 661 bp, Homo sapiens
  misc_feature [331]..[331]: Chromosome 3, SNP identification no. = rs4507253
  misc_feature [331]..[331]: allele = t, in linkage disequilibrium with rs13074310, respectively
  misc_feature [331]..[331]: n is a, t, c or g
aatacagactgtctgatttcattcatatggactcctagaaaggacaaaattaacttacagtcacagaaagcagatcagcagttgcctgtgactggagctggggagcaactggctgcaaaggaatctgagggaactttctgggggtgagggaaatcttctcagtgttgatttgggttgtggttatccaagtgtatacagtttttaaaaattcatcaaaatgtacacttaaaataggtgcattttattatatgtatatcataaacgcattgttaggtgatctcatcattaggctgatctcacactagggtctatggaatagcctatcacttcnaggctacaaacctgtacagcatgttactgcgctgaatactgtaggccagcggtccccttccatgtactagcggcagagggatggtttctggatgaaaccgttccacctcagatcatcaggcattagttagagtctcataaggagcatgcaacctagatccctcgcgtgcacagttcacaacagggattgcactcctatgagaatctaatgcctctgctaatctgacaggaggcggagctcaggtgtaatgctccctcgcctgctgctcaccacctgctctgtggccctgttcctaataagccaccacagaccggtaaggtccgtggcccg

SEQ ID NO: 1826 - DNA, 661 bp, Homo sapiens
  misc_feature [331]..[331]: Chromosome 3, SNP identification no. = rs4854811
  misc_feature [331]..[331]: allele = a, in linkage disequilibrium with rs13074310, respectively
  misc_feature [331]..[331]: n is a, t, c or g
caattataacaatgtactataataaaagttatgtgaatgtggtctctctcaaaatatcttactgcaactcatcctttttcttgtgatgatgtgaggtgataaaatgcctatgtgatgagatgaagtgagatggatgatggaggcattttgacgtaaatggaaaactccagaaataaacaactcgtaagttttacattgtgcaccatgctgagtaatgtgatgaaatctcacagcctcctgctctgcttctcccagatttctcccagattgccgttagtcactgagtagccctctgggttatcaaataacattaatcttacttaatgccccnaagtgtaagagtagtgataaaatatttttggaccatggttgactgcaggtaattgggacttttggataagagagagtgtgtgtatgtggcgggggagggggttagtgtgtatctttgttttgctctatctcttcctgaaacacaatccccctcttttcatttgcctaaattttttccatccttcatggcacagctttttatggaccttccttagggaagaaattgaattggaatgaaggagccaaggacctggacattagtcaggcagcagatgagggactaaaaaccagggcatggaggcctgggagaacatgagacctgagcacctat

SEQ ID NO: 1827 - DNA, 661 bp, Homo sapiens
  misc_feature [331]..[331]: Chromosome 3, SNP identification no. = rs4854812
  misc_feature [331]..[331]: allele = g, in linkage disequilibrium with rs13074310, respectively
  misc_feature [331]..[331]: n is a, t, c or g
tgaggtgataaaatgcctatgtgatgagatgaagtgagatggatgatggaggcattttgacgtaaatggaaaactccagaaataaacaactcgtaagttttacattgtgcaccatgctgagtaatgtgatgaaatctcacagcctcctgctctgcttctcccagatttctcccagattgccgttagtcactgagtagccctctgggttatcaaataacattaatcttacttaatgccccaaagtgtaagagtagtgataaaatatttttggaccatggttgactgcaggtaattgggacttttggataagagagagtgtgtgtatgtggcnggggagggggttagtgtgtatctttgttttgctctatctcttcctgaaacacaatccccctcttttcatttgcctaaattttttccatccttcatggcacagctttttatggaccttccttagggaagaaattgaattggaatgaaggagccaaggacctggacattagtcaggcagcagatgagggactaaaaaccagggcatggaggcctgggagaacatgagacctgagcacctatgtactcatcacccacccactggcctactcacctctcacccagccacctagaaaatcacccacttgcctgtctacctaaccgcccagccacc

SEQ ID NO: 1828 - DNA, 661 bp, Homo sapiens
  misc_feature [331]..[331]: Chromosome 3, SNP identification no. = rs4854611
  misc_feature [331]..[331]: allele = g, in linkage disequilibrium with rs13074310, respectively
  misc_feature [331]..[331]: n is a, t, c or g
tctatctcttcctgaaacacaatccccctcttttcatttgcctaaattttttccatccttcatggcacagctttttatggaccttccttagggaagaaattgaattggaatgaaggagccaaggacctggacattagtcaggcagcagatgagggactaaaaaccagggcatggaggcctgggagaacatgagacctgagcacctatgtactcatcacccacccactggcctactcacctctcacccagccacctagaaaatcacccacttgcctgtctacctaaccgcccagccacctgcatcatacccacgcactgcccactcatccanctgtacatacttggggtaggctatctgctcaagcaagtggagttgtaatatcatctgtgctctgtttgtttttctctctttttttggtgccttcttttggatcgatttagaatttttcatcttctttgtcagcttaggagcagtaactctatgctattttagttgtccttttgagtgtagaggatacatataagatttgtcatagtctgttttcaaagtgatgtcataccccttcatgaacaggttaagaccatgaaataatatatttacatttttctcctccaggcctttgagctatttttgtcatacattttatttctttatatgtta

SEQ ID NO: 1829 - DNA, 661 bp, Homo sapiens
  misc_feature [331]..[331]: Chromosome 3, SNP identification no. = rs6777817
  misc_feature [331]..[331]: allele = a, in linkage disequilibrium with rs13074310, respectively
  misc_feature [331]..[331]: n is a, t, c or g
tgccttttgtttggctatgccctgcccccagaggtggagtctacagaggcaggcaggcctccttgagctgcggggggctccacccagtttgagcttcccagccactttgttacctactcaagcctcagcaatggtgggtgcccctcccccagcctcgctgccaccttgcagttagatctcagattgctgtgctagcaatgagtgaggctctgtgggcgtgggaccctccgagccaggcatgggatataatctcctgatgtgccgtttgctaagaccgttggaaaagcgcagtattagggtcagagtgatccaattttccaagtgctgtccntcaccacttcccttggctaggaaagggaattccctgaccccttgcacttcccaggtaaggcaatgccttgccctgctttggcttacgcttggtgggctgtacccactgtcctgccctcactgtctgacaagccccagtgagattaacctggtacctcagttggaaatgcagaaatcatccgtcttctgcgtcgcttatgctgggagctgtagactggagctattcctattcggccatcttggaacacttttagtatttcttgtagcgcaggtctgttggtgattcattctttttggacttttatacctaaaaaaagtcttaatctcacca

SEQ ID NO: 1830 - DNA, 661 bp, Homo sapiens
  misc_feature [331]..[331]: Chromosome 3, SNP identification no. = rs13074310
  misc_feature [331]..[331]: allele = c, g
  misc_feature [331]..[331]: n is a, t, c or g
ttaagttacttagagcccatttaattcttttaggatttgcttttgggcttttgttgttatataggaccagaatagtatttagtctggagctagtttttccccattactgaggcaaagttttctacatattctactggatgccctgtgaattatgaaattttccactccagatggtgagaagaggcatcatttctttcccagtgtgagctataggaattttccctgatttttttcagatgatgcacttccctgacttgtgaaatttcttcatacacatgcacttgtgtcagtactcagttgaatacttcagggaccttccatagatttctanagttttctctctgtgcaactcctcctctctgatctcccctgcaaactcaagccgccttggcctcccagctccatcttttcaaagtggagacttctaagctctccctagactcccctctaggcattaacctggggcatgatagggctcacttcatttattttccatctcttagggatcacagttctttattgtctaatgttcaatgtcttaagaaccattgttttgtatccatgttcagtttaccagttgttttggataaaagtaagcctggccaattaatccatcttgttcaggattagaagtctcagatgttcaccttttaatattgta

SEQ ID NO: 1831 - DNA, 661 bp, Homo sapiens
  misc_feature [331]..[331]: Chromosome 3, SNP identification no. = rs9827105
  misc_feature [331]..[331]: allele = g, in linkage disequilibrium with rs13074310, respectively
  misc_feature [331]..[331]: n is a, t, c or g
ttcatacacatgcacttgtgtcagtactcagttgaatacttcagggaccttccatagatttctacagttttctctctgtgcaactcctcctctctgatctcccctgcaaactcaagccgccttggcctcccagctccatcttttcaaagtggagacttctaagctctccctagactcccctctaggcattaacctggggcatgatagggctcacttcatttattttccatctcttagggatcacagttctttattgtctaatgttcaatgtcttaagaaccattgttttgtatccatgttcagtttaccagttgttttggataaaagtaancctggccaattaatccatcttgttcaggattagaagtctcagatgttcaccttttaatattgtaagtttgaaattactattagtcatccaagtgaagatgaacatccaaagattttatgagtcaaagactttgtacagagtcaacatgttcagtccattatgagttgtctgtttccttggaacttcctgcaaacgtcgtggctgctgacagataagagaagatcccaggatgttctgtgcttggaggaatgtggggtccaggcttgcttctcactttgctacactgccactctgctgattgttttgttttgaacaatcaaggccattttt

SEQ ID NO: 1832 - DNA, 661 bp, Homo sapiens
  misc_feature [331]..[331]: Chromosome 3, SNP identification no. = rs7653175
  misc_feature [331]..[331]: allele = g, in linkage disequilibrium with rs13074310, respectively
  misc_feature [331]..[331]: n is a, t, c or g
ttaatattgtaagtttgaaattactattagtcatccaagtgaagatgaacatccaaagattttatgagtcaaagactttgtacagagtcaacatgttcagtccattatgagttgtctgtttccttggaacttcctgcaaacgtcgtggctgctgacagataagagaagatcccaggatgttctgtgcttggaggaatgtggggtccaggcttgcttctcactttgctacactgccactctgctgattgttttgttttgaacaatcaaggccatttttttgtccaggcttgtggtagcttataaaatataattccttcaaacacttactgcnttgctaatctctttgctttcagttccatgtattaatcataaccaaagttctttcctggtcatagttctcaaatcttgaaatttgctttctcacccactcctctgcatttctctcaatgtaaagctgaagggagagaaaaaaggggatgccagaagggagacatatcttatgcccatctaagatgagcttggcatgacctgatggacaactccaggagaaggggaaaagttgcttggcatcataatctagactgcaagtgtgtacttgatcatcccatagccaaatcctacagaaatgaattcttccctctggcttccagtgttcagggca

SEQ ID NO: 1833 - DNA, 661 bp, Homo sapiens
  misc_feature [331]..[331]: Chromosome 3, SNP identification no. = rs7611109
  misc_feature [331]..[331]: allele = c, in linkage disequilibrium with rs13074310, respectively
  misc_feature [331]..[331]: n is a, t, c or g
gccactctgctgattgttttgttttgaacaatcaaggccatttttttgtccaggcttgtggtagcttataaaatataattccttcaaacacttactgcgttgctaatctctttgctttcagttccatgtattaatcataaccaaagttctttcctggtcatagttctcaaatcttgaaatttgctttctcacccactcctctgcatttctctcaatgtaaagctgaagggagagaaaaaaggggatgccagaagggagacatatcttatgcccatctaagatgagcttggcatgacctgatggacaactccaggagaaggggaaaagttgnttggcatcataatctagactgcaagtgtgtacttgatcatcccatagccaaatcctacagaaatgaattcttccctctggcttccagtgttcagggcatagcaaagaagtcactagagtaattttgctagcattcaatctggtgatgccagactcagagaagagtccaagcaagtcccttggtgccatgatgagttctatctggaaaccttttactgcttgggtggcatcacaagacacaaagagcttacaagaaccacctgaaggaagacttcttcaacggaggagccactgtcccaggaagggccagggcagcctatctctcctctgg

SEQ ID NO: 1834 - DNA, 661 bp, Homo sapiens
  misc_feature [331]..[331]: Chromosome 3, SNP identification no. = rs13080570
  misc_feature [331]..[331]: allele = a, in linkage disequilibrium with rs13074310, respectively
  misc_feature [331]..[331]: n is a, t, c or g
acatatcttatgcccatctaagatgagcttggcatgacctgatggacaactccaggagaaggggaaaagttgcttggcatcataatctagactgcaagtgtgtacttgatcatcccatagccaaatcctacagaaatgaattcttccctctggcttccagtgttcagggcatagcaaagaagtcactagagtaattttgctagcattcaatctggtgatgccagactcagagaagagtccaagcaagtcccttggtgccatgatgagttctatctggaaaccttttactgcttgggtggcatcacaagacacaaagagcttacaagaaccncctgaaggaagacttcttcaacggaggagccactgtcccaggaagggccagggcagcctatctctcctctggcacttgaagcaacactgcatgtgtccctgaccacacagaatcccccagcaacaccaaaagaatgtggatggctgacttagtccatttgtgctgctataccaaaatactcaagactgggtaatttacaattgacagacatttacttctcacagttctggaggctgggaagtccaagaacaatgtgcctgcaaaatcagtgtcttgggagggctgttctctgcttgcaaggtgatgccttgttgcttctgtgtcctccag

SEQ ID NO: 1835 - DNA, 661 bp, Homo sapiens
  misc_feature [331]..[331]: Chromosome 3, SNP identification no. = rs9869613
  misc_feature [331]..[331]: allele = a, in linkage disequilibrium with rs13074310, respectively
  misc_feature [331]..[331]: n is a, t, c or g
atagcaaagaagtcactagagtaattttgctagcattcaatctggtgatgccagactcagagaagagtccaagcaagtcccttggtgccatgatgagttctatctggaaaccttttactgcttgggtggcatcacaagacacaaagagcttacaagaaccacctgaaggaagacttcttcaacggaggagccactgtcccaggaagggccagggcagcctatctctcctctggcacttgaagcaacactgcatgtgtccctgaccacacagaatcccccagcaacaccaaaagaatgtggatggctgacttagtccatttgtgctgctatnccaaaatactcaagactgggtaatttacaattgacagacatttacttctcacagttctggaggctgggaagtccaagaacaatgtgcctgcaaaatcagtgtcttgggagggctgttctctgcttgcaaggtgatgccttgttgcttctgtgtcctccagagaggacaaatgctggaggaacacatggctgaaggaacagaaggcagaaagggccaagctagtttctgccatccctttcataaggtcactaatcccattcattggggctctgagagtcacaggggctctgccttcatgacttaatcatctcctaaaggccccacctctta

SEQ ID NO: 1836 - DNA, 661 bp, Homo sapiens
  misc_feature [331]..[331]: Chromosome 3, SNP identification no. = rs4450812
  misc_feature [331]..[331]: allele = t, in linkage disequilibrium with rs13074310, respectively
  misc_feature [331]..[331]: n is a, t, c or g
ctttacttctatgatttggtgggagtcaggacatcagtgaaaaaaatctccagaagttccaggaactagaatgatctgtcatccatcccttgcatggcaccaagccctgactgaggtctcaaatatgagtgagggctaagatataagtcccctgtgtaaaagggctttctttgacaaaatcccactggggcatgctgggactgacttcagactgagacccagggtgactctccacttggtgagtcggtagtcactgggaggttgccctattcctctagttcccaggaccatggccctttccctgcagtaactgcctctctgcctccacacntcatccctgtgtcagcctcagtttcattctggtgcaagtatcagttgctccaccttccaaagggctgcctcaaggctgtggtgcccactgagagcatataccgtcctgcacacacaggtgagactggctggctctatcttagcctgctgagaaaaggttcccatggagacctcatgagctaaaaagccaaacaaaataaaacaaaacaaaacaagaaaacccagggcagtatgcagcaaaacccaaagatcctccaaagcatgcatcctaaatgttaatgtgcagacaaatctgactacaaatcacaaagatcttgttaaaatgcagatt

SEQ ID NO: 1837 - DNA, 661 bp, Homo sapiens
  misc_feature [331]..[331]: Chromosome 3, SNP identification no. = rs4413311
  misc_feature [331]..[331]: allele = a, in linkage disequilibrium with rs13074310, respectively
  misc_feature [331]..[331]: n is a, t, c or g
gtgaaaaaaatctccagaagttccaggaactagaatgatctgtcatccatcccttgcatggcaccaagccctgactgaggtctcaaatatgagtgagggctaagatataagtcccctgtgtaaaagggctttctttgacaaaatcccactggggcatgctgggactgacttcagactgagacccagggtgactctccacttggtgagtcggtagtcactgggaggttgccctattcctctagttcccaggaccatggccctttccctgcagtaactgcctctctgcctccacacttcatccctgtgtcagcctcagtttcattctggtgcnagtatcagttgctccaccttccaaagggctgcctcaaggctgtggtgcccactgagagcatataccgtcctgcacacacaggtgagactggctggctctatcttagcctgctgagaaaaggttcccatggagacctcatgagctaaaaagccaaacaaaataaaacaaaacaaaacaagaaaacccagggcagtatgcagcaaaacccaaagatcctccaaagcatgcatcctaaatgttaatgtgcagacaaatctgactacaaatcacaaagatcttgttaaaatgcagattgggattcaaaaggaacacccaggtgatgctgacact

SEQ ID NO: 1838 - DNA, 661 bp, Homo sapiens
  misc_feature [331]..[331]: Chromosome 3, SNP identification no. = rs4280634
  misc_feature [331]..[331]: allele = t, in linkage disequilibrium with rs13074310, respectively
  misc_feature [331]..[331]: n is a, t, c or g
cccagggcagtatgcagcaaaacccaaagatcctccaaagcatgcatcctaaatgttaatgtgcagacaaatctgactacaaatcacaaagatcttgttaaaatgcagattgggattcaaaaggaacacccaggtgatgctgacactgccagattgcataccacaaaggaacaatcctaaggaaaagcaaagcaggcagctgggagcatagcagggcctccctccaaagttacggctggacagggcccttctctgagcttagacagatgccaccaggtgggcaacagcccaggcaaaggggccacaggtcccatttggaggggtgttcttnagggggctgggtcctgttgctcatagaacccagctctctactgatacccactcctcagcctcttctagtctgaattcactttccttaaaacgaattctggtggggaaacttttctgtccccattttttctaccctctgcctctcttccctgattattagcaactcaaaaagagagacagatttaccgatctgattgaccataactcagactactcattaaccttcaaggtcaactttggctgtgctgtttcctccatgcccctggcatgaaggaaactggacacttctcttttcagtgcgagtctggccatgactatctttctgtttcat

SEQ ID NO: 1839 - DNA, 661 bp, Homo sapiens
  misc_feature [331]..[331]: Chromosome 3, SNP identification no. = rs9869195
  misc_feature [331]..[331]: allele = a, in linkage disequilibrium with rs13074310, respectively
  misc_feature [331]..[331]: n is a, t, c or g
acagaagaggcggaggctgcagtgagccgagatcaagccactgcactccagcctgggtgacagagcgagactccatctgaaaaaaaaaaaaaaatagatcagaacatatgtccaatattatagcttttctgggcctgcccaagggactggtttctgtctcacctgactcagagtgctgacaaactggagcaagattttggaaaccactgtaaacagaggcaagcatcacattagagctatagctctacaggtagataccaggaatagcaagagatcagaaattatttgagaggtccagctgggctgaatgatgaagaccttcctctgcctnatgctgatacaaagcctggaagaggtgtttgttttttttaaatgcccaaatctcagcaaaaaattacaagacacacaaagaaacagggaaacatggcccaatcaaagtaacaaaataaacctcccccaaaaagcctaaaggaaagcacatctatgagttgcctgacaaagaatttataatgactgtcatatacagaacatttacccaacaaaaacagaatatacattattctcaagtgtacatagaacattctccaacatagatcacgtaataggccacaaaacaaatcttaacaaattcaagaaggttgaaatcacacaagatatcttt

SEQ ID NO: 1840 - DNA, 661 bp, Homo sapiens
  misc_feature [331]..[331]: Chromosome 3, SNP identification no. = rs4854818
  misc_feature [331]..[331]: allele = c, in linkage disequilibrium with rs13074310, respectively
  misc_feature [331]..[331]: n is a, t, c or g
gaacaattatacactaagaaattggataacctagaagaaatggataaattcctagaaacacacaaaccaccaagacagaatcataaagaaacaaaatttaatcagaccaataaagaataaagagattaaatgagtaaatcaaaaaactcccaaaacttcccaataccagatggcttcagtgaagaattctagcaaacatttaaagaattggcatcaatcctctggaaactctttcaatgaattgaagagggaggaactcttacaagctcattctataaagccagcagtaacctgataccaaagtcagacaaagacactatgagaaaactanggatcactatccccgatgaatattgttgcaaaaatccttggcaaatactatcaaactgaacacaacagcacattaaaatgatcatatgccatgattaagtgggatttatcactgagatggaaggatggtttaacacataccaatcaataaatgtgatgcaccatattagcagaatgaaggataaaatcatatgatcatctcaatagttgcagaaaaagcatttgaaaatatttaatatcctttcatgattcaaataattcaccaaactaggaataaaaggaaaatacctcaacataataaagggcatttatgaaaaactcacagtaaaca

SEQ ID NO: 1841 - DNA, 661 bp, Homo sapiens
  misc_feature [331]..[331]: Chromosome 3, SNP identification no. = rs13059653
  misc_feature [331]..[331]: allele = a, in linkage disequilibrium with rs13074310, respectively
  misc_feature [331]..[331]: n is a, t, c or g
cttatttaaggttttgctttctgtggttttagttacctataatcaacagtggtttaaaaatattaaatggaaaactccagatatggacaatttataagttttaaattgcacatttttctgagtagcatgatgaaatcttatgctgtcccactctatcccacctgggacataaattatctctttgtccagtgtatctacactatatgtgctacccattcattagtcacttagtagccatctcagttatcagattgcctcttgcaatatcacagtgtgtgtatttgagtaccctgtatgttacttaataatggtcccaaagtgcaagattagngatactggcaatttggatatgccaaagagaagctgtaaaatacttcatttaagtgaacaggtaaaagttttcaacaacaaaacaacaatagtaagtcctcacatataaaattattttaaatgtaagtggatcaaattatccaatcaaaagacagagtggccaaatggattttttaaaaaattccaaccatatgctgcctaaggagactcactttagccttaaggtatacacacagactgaaagcaaaggaacagagaaactgaaacgctttacgctgttggtggaaatgtaaaatggtagagccattatgaaaaacagtatggaggtgcc

SEQ ID NO: 1842 - DNA, 661 bp, Homo sapiens
  misc_feature [331]..[331]: Chromosome 3, SNP identification no. = rs4552343
  misc_feature [331]..[331]: allele = t, in linkage disequilibrium with rs13074310, respectively
  misc_feature [331]..[331]: n is a, t, c or g
gagttcaagttgatgaagctgcagctgccacccatctgaggagggacaagaaaaccaagctctcctacatgttcctaggacaatatccaccaccctgctataggctgctgtgagactgagacttgagtgtgacgcactgtccacagcttctagcccatgctgcccaccctatctgttcagaaactcataggtggcaccattttgagtttaatgagtttaatgagtttaaggatgggcccatccttgagccgagttataagtgatgtactgcagctgcctcccatctgggaaagggacaggagagattaagctcttctaagaacattcaggncaatatccactgccctgctgcaggaggctgaggacctggggactagcccacccaacccgtaacagcttccagcaacaacacagactgcttggatcccatttggatgttccaccaccactactgtcaccacccacacaacaccagctgcccattggactgagaacccacccacacacctggcccaccactgtcactactaacttctaaacaagccgcctggaggcccaagaatcagctctctagaacccactaatactggagccagtgcaagttgctctggagcctacaaacagtcacattcaccccactgctgctgctgttgggtgaaga

SEQ ID NO: 1843 - DNA, 661 bp, Homo sapiens
  misc_feature [331]..[331]: Chromosome 3, SNP identification no. = rs4854825
  misc_feature [331]..[331]: allele = a, in linkage disequilibrium with rs13074310, respectively
  misc_feature [331]..[331]: n is a, t, c or g
attcctataattcataaaggaaaaggcagacaacagaaaaaggagcaaaaggggcaaatgggcatttaaaagaggatattgaaatgacagaaaaagagacaaaaaggtttctgacctcattagtaaacacagtgagatattactataaccccacatgactggttgaaatataaaagtttcacaagaccacggagaaagagagaatcaccagtgcatggtagaatgtgaaaagatcaagctgcaggacagaagacatactaaacaaacaatggtgataacgtaggatggcagagatcaggccatgctgtaataactcatgggcttacagccngtctgcctaactgtagagagccatgttatcccacgtgaatacagatgcaagtgtaaacagcacttcaggaagtggtttctggaaacaacatctgaagactgaagtggagagccctgaaatcccttcccatgggttctccccagagcccttgattcagcctccaagaagggtgtggaaattctcctgacatgggcactgggaagggttctctccttctttgccccaggcactgagatgagcccttcacggtgggaggcagggaggaccaggtagccttttattaactgcttaaaaccaattcgttctctgagcaaaactcctgctcaaaat

SEQ ID NO: 1844 - DNA, 661 bp, Homo sapiens
  misc_feature [331]..[331]: Chromosome 3, SNP identification no. = rs10804625
  misc_feature [331]..[331]: allele = g, in linkage disequilibrium with rs13074310, respectively
  misc_feature [331]..[331]: n is a, t, c or g
ctaagtcccacagccaactcaggagctgtcacatctactatcttcaggccaaggttgggctaagggtcagtggcaaagggcagctagatggcctcaagctccctatctccataatgcctcccaattaatctcaaataaaaataatcatatgtgacaacggatgttttctcagtgttatgggcagcatgagatacctttagaaatcctggctatgtttgtggatctgtgcttctttgtgaatcaaagaaagagaatgctgctacgtgaacccagtttcatgaccagtcccccagtccattcagatgccacccagaccttctgtgctgatatnggtgagtgagatcattccattttttgtcctcagagcactgcatacttttcagtggtgtttattacttgttataattaattaccccttactttgaacaagtgggacaacagagggtacaagcagaaaacatttttattcctgcccctaaatctccagtagtcccatggctttccaaaccactcttgaataaaaagccttccagtcccttctaatctcaaaatcctacaataaagatgaccagtcgagtgcaatcatcaaaactccaaactctgttaaaggataaggcttctctcctcctcagctcaggcctgctgcagcctgaggagcctg

SEQ ID NO: 1845 - DNA, 661 bp, Homo sapiens
  misc_feature [331]..[331]: Chromosome 3, SNP identification no. = rs4241374
  misc_feature [331]..[331]: allele = t, in linkage disequilibrium with rs13074310, respectively
  misc_feature [331]..[331]: n is a, t, c or g
acctggaggccttatgaaaatacagaccactgggccccaaccctagagtgtctgatgcaataatctgggctggaaccccagacattttcattttaataagttcccaggtgatgctgatgctactggttggggatcacattttgagaaccactgttctcatgtatgtctttccattctttgattgctttttaaatgttgacaattacatttttaatttctaagaacactttattattttctcttatttctttttttcttgtctgtggaagaaaaacctagaatctcactaaagatacacaggaggtttttttaaaagttatttcctaaactntctctatttctcctgagttcacttttctatttatcttcattctttttttgttgggctgttggttttactgaaagatctaaggatctttggctgtccatttatatctgtgactgtaggatttgtggtttaatatagatggctggttttctctaccaccatgtggattgtcatgtagagagggattcaacagccctctcccctaagtgggaggcttgggcatattgacctgcaggattccattaagaggccatggccaggaccccctgatgcacccatgataaaatacagaagccttttttggggatgccaacacaggcatcagaagctcta

SEQ ID NO: 1846 - DNA, 661 bp, Homo sapiens
  misc_feature [331]..[331]: Chromosome 3, SNP identification no. = rs7626852
  misc_feature [331]..[331]: allele = g, in linkage disequilibrium with rs13074310, respectively
  misc_feature [331]..[331]: n is a, t, c or g
atcgctaattgtcagggaaatgcaaatcaaaaccacaatgagatctcatcctaatttgcatggctattatcaaaaagattaaaaacaacaaatgctggtgagaatgtggagaaaggggaatgcttatattctcttggtggcaatgtaaattagtaaagccattatggaaaacagtatggaggttcctcaaaaaatgaaaaatagaactaccatatgatccagcaatcccactattgaatatttgtccaaaggaaaggaaatcagtatgtcgaagagatctctgcagtctcacgtttactgcagcatcattcacaatagtcaaaatacgtcntcaacctaggtcttttcatcaacagatgaatggataaagaaaatgtggtatatatagaggagtctgttccaagatggctgaataggaacaactccagtctgcagctcccagcgtgatcaacacagacgacaggtgatttccacatttccaactgaggtatctggttcatctcactgggactggttagacagtggatgtagcccacggaggacgagctgaagcagggcacggcatcgcctcacccaggaagcacaaggggtagggggatttccctttcctagccaagggaagctgtgacagactgtacctggaaaatcggtacactctgcc

SEQ ID NO: 1847 - DNA, 661 bp, Homo sapiens
  misc_feature [331]..[331]: Chromosome 3, SNP identification no. = rs9857486
  misc_feature [331]..[331]: allele = g, in linkage disequilibrium with rs13074310, respectively
  misc_feature [331]..[331]: n is a, t, c or g
aacaggatgttactgacaatgtctgggaaagggagtggagagggtaggaaaggctggccccatcaaccctgcaggcactctcaagaggattaggggctggacagagcttgtcagagagaccctaagctctacccctggatgactcaggaaaaacaacgcaaggagtggaggtggcttcctgggtggtcctggtagagggccgggaagggagaggatgagtttagctgaggtggctctgtgacatccagggggacaatgtcagaaagagatgtccagaggtcctggaccagtgaccaggtatggggtgctggggacagagcaggtatctgancacagatggagtcactgagggacagatgtgagggagaagactgggacaggaaccttagaaacccctgatattttggggagtgggagagaggtggaagcctgtgcataaagtgagaagaagaaaagccccaagagagaagcgttgaaggaagagagggttttaagcagggtgatgtggtcggcagtcaggaggatgactgagaaaaggtcactgaatctggtagctgtagtctggagcctgcagagggagcagctccagaaagtgagggcactggccccaggtcaggggagtggagggcagggggccctcacggccccactcacatgtaga

SEQ ID NO: 1848 - DNA, 661 bp, Homo sapiens
  misc_feature [331]..[331]: Chromosome 3, SNP identification no. = rs4077107
  misc_feature [331]..[331]: allele = g, in linkage disequilibrium with rs13074310, respectively
  misc_feature [331]..[331]: n is a, t, c or g
tttctagctatcctggagagtcaagctgtgccattcttgcccactgtgatgacccagacaggcccttggatccccccatgatgggatggctctgacagctgtgagaataggctagagttggggaggctggaggcagccctatgaggaagggttgtgtggtccagagggatggagatggagtgaagagaagacggagatgcggaggcaaatttataagtagtggatttagtacggggtgagagaaagaaaacaaggctggtgtcataccagtggcattggatgttgtcatctggacgagaggcttctgaataagaagtgcactaggtgagcntgtgatatccgagtgtgttttctccaagcctgggaaatctcagggaagagagcagatgtctgctttcctgagaggggatggaatgtgaacagggcctctgaacgacaggatggaggcatgagaggggccacttctcaggttcagtctctgcagggacttccctgagagattcggggccgaggtctgagcccagttctggggtggctctaggaggcccatgctggtgggaccatgtttgtcccagccccctatctcccagctcctgccctggaagcaatgatagccatctggatctgaaggactggccagacctctctcactaacctgaaa

SEQ ID NO: 1849 - DNA, 661 bp, Homo sapiens
  misc_feature [331]..[331]: Chromosome 3, SNP identification no. = rs9878348
  misc_feature [331]..[331]: allele = a, in linkage disequilibrium with rs13074310, respectively
  misc_feature [331]..[331]: n is a, t, c or g
actcactgttcctgagtggcaaggagacacagccaacttgcatctctctaaaaacccctcccacacccaagggctggcagaaagataaagcaacgatagtgctgtactcctttgcgcctctgcacccacagggtcataggcttggcattgaacccaacatggggagcagctgggttagcagccatctgcccattctgtcctgcaagtgacctgctagctatggtccagtgtgaaaagatgtgatgagtggggccaatcagattgcctgtcttgggaatttggtgtgaaaataagcacagcaactgccaggttgcagcagatatgtggtgtntatgtagtggcttagaaaggccggaactggtgtgatcgttaatattgagtgtcaacttgattggatagaaggatgcaaagtattgatcctgggtgtgtctgtgagggtgttgccaaaggagattaacatttgaatcagtgggctgggaaaggcagactcacccttaatgtgggtgggcaccatctaatcagctgccagcgtggctagaatataaagcaggtagaaaaaaaaaacgtgaaaagactagactagatgggcctagcctcccatcctacatcttcctcccctgctggatgcttcctgccctcgaacactggactccaagttctt

SEQ ID NO: 1850 - DNA, 661 bp, Homo sapiens
  misc_feature [331]..[331]: Chromosome 3, SNP identification no. = rs4072180
  misc_feature [331]..[331]: allele = g, in linkage disequilibrium with rs13074310, respectively
  misc_feature [331]..[331]: n is a, t, c or g
ggacaagatggaagggaactgggatcttgaatgtttctgaacatgaaccacaccaccagcctgggccactctcctccctttggactctcatataagagacagaacattcatcttatttaatccactctgtattacagcagattctattgcagccaaattcacggagaaaaatgccataaccagtcagggcagtactgctataaattcctgtctctaacctcagctgacctcacttgcactgctcttggtcagctccctttcagatttcccttagagaaaccttcacactcttatgatgcttacagactcctatccaacacctctcactctnaaccaacaataccgtctcttatgtcattaaatgttgagaccaccaagtaggctctcctaacacatccttcaattctttcctctcatcccaactgtacaggtgtcctgtgcgtgctctggtcagactccctagatgagaatcacagctccactatgacctgtgcaatctatctcaacctccatttcctcaactgtaaaatggaaattagtaacaattgttgtcaagattaaatgagatcatgcatgtacagcaatcagtacaaggctgtatagtaggcaatgaccacctgctactatcattgctaacacaaatgtgactgcatcactacct

SEQ ID NO: 1851 - DNA, 661 bp, Homo sapiens
  misc_feature [331]..[331]: Chromosome 3, SNP identification no. = rs6776592
  misc_feature [331]..[331]: allele = a, in linkage disequilibrium with rs13074310, respectively
  misc_feature [331]..[331]: n is a, t, c or g
gtctaaagtgttcttcagatgcctattaagtaatgctatgaccaaatagtatcaattaaaaagtcaaaaaacctagtaggaatgcaagtattgtctaaataaaggcatatgaaatatagtacaataaatctatgtaatagatcattaaatattttttaagctcttttaataagactttcaatggacacacacagccagtctctggcttacgtctaaaggccctaaatagtcagatcatgaagctagcaaaaaggtacctggtggtagatactgtacgccaaatattgaagaaaatataactttgcaagctcaaatctataaggtggtggcngaattatgaacaggtggaaaacagtgggccagaggccaaagtaacagcattcacaatggaatacagcagtagagttttctggtcaaagacttagaagctaaaggtgaggtagtaattcctaccaggctttcatctcaaataatggcaggactcaccaacttaaacaccaagctgactggacactccctacagtcactaagactcttcacaatcactgtactttgacagaacttttgaagcattaaatatattgctaaaggaagccaaataccagcacatttctgcaaagcggcagacactgctagccgttcctcaagagccatcgccttc

SEQ ID NO: 1852 - DNA, 661 bp, Homo sapiens
  misc_feature [331]..[331]: Chromosome 3, SNP identification no. = rs9283588
  misc_feature [331]..[331]: allele = a, in linkage disequilibrium with rs13074310, respectively
  misc_feature [331]..[331]: n is a, t, c or g
tcgctacttacttgaaaaatcctcaaatgaattcccattgtattcagcaaaaaatataaatgtatgccacagcttacaaagacctgcttctttgtaccactcccttccctaactacattctagccacgctagctacctttctctttttccaacagcagcagcagctagagaatgaaggggaacggctgagattggaggccagcttgcttctgctttaaggcttctgcaattatgtgccttctgcctctgtgttctcatggctggctgcttcttgccattcagatcacaattcaaatgccacctgcttagagaagcttggctaattatgacntctaaagttacactctctaatatcactctattatttctatcatagcacttaccaaaatcttatttatgttcattacctgtttttcttaactagaatgcaaaatctagaaagggaagaacctcatctatcttgttccctgcattatcccgagagccaggatacagtgggcactcaataaatatatactgaatgagcaacccaatcctccctctatcaataaaaaaaaaaaaaatttctagaacaggaggattacaagaaaaaacagaatagaatgcatctctaggtcaccagagccagcttataataccacaacactgctttgtcaatttg

SEQ ID NO: 1853 - DNA, 661 bp, Homo sapiens
  misc_feature [331]..[331]: Chromosome 3, SNP identification no. = rs13096460
  misc_feature [331]..[331]: allele = t, in linkage disequilibrium with rs13074310, respectively
  misc_feature [331]..[331]: n is a, t, c or g
taaaaattatattttctgcaaaatcagtaaaatgtaaaacttcagtaacattcacaatctacaataaaactactggaagaacatgagtcagggagatcttataactgctctttccttcccatgtcaaagactccaagtagctcaccaagaaaaatctactacaataaaaatacatacataaaataaaagtgctcacaaacacaaaaagataaggttacaggcaccacaccatccaccaaactgaggacatttcttacaatctgctaattgggagtagaagtcaggtgtcagtacttattttttttttaaaatagatcatgtacatgttaanaaactgtgatttctaaacaatgcactcacttgaacatgaaataagaatgccctgaatactggaagggacgcttgagttgaaccactccatgtggaaaatacacagtaagtgctgtaaatgttgactgaatgccttctaagaatgcaggttatgaatgaaaatataatttacaaatggttcaaagggaccttttaaaaaacagtactccagggactggcttcatatgagtatttcataaaaccaaagaactgttaataaatgtacacagaaaatcatgcccttggcttacttgtggaaaaccaggtactatgtgagctatttttcccgatg

SEQ ID NO: 1854 - DNA, 661 bp, Homo sapiens
  RYK
  misc_feature [331]..[331]: Chromosome 3, SNP identification no. = rs10935104
  misc_feature [331]..[331]: allele = t, in linkage disequilibrium with rs13074310, respectively
  misc_feature [331]..[331]: n is a, t, c or g
agtgttttataagaaggagaagaattatctggggtgcttgctaaaaagtccagttcctctgtcctatcttaataattctgaagcctggatcacattattttatttaattaattatttatttgcatttttagcagaaatggggttttaccatgttggccaggctggtctcgaactcctggtttcaagtgatccaccagccgtggcctcccaaagtgctggaattataggcatgagccaccatgacaggcctggatcacatccctttaaacaaaagtccttggtgggtcttaagattgggtaaatttagcaagtagtcctagatttgttagcngcagtgatcagacagtaaagacagttttcatttatttttattgtagtacagctgacacataagaaattgcacataaagtattccactggataagttctgatatacataaacactcctgaaaccactgccacaaccaagataaggagcatatctatcacttccaaatgattctgttttgatcctttccttccacccctccctaccaccagcactaccatccccaagtacccactaatttgctttctgtcactagatagttggcgttttctagaattatataaatagaattattcaagctgtatactgttttcctagcttcttttactcaga

SEQ ID NO: 1855 - DNA, 661 bp, Homo sapiens
  RYK
  misc_feature [331]..[331]: Chromosome 3, SNP identification no. = rs6762690
  misc_feature [331]..[331]: allele = a, in linkage disequilibrium with rs13074310, respectively
  misc_feature [331]..[331]: n is a, t, c or g
ctgaggcaggagaacggcgtgaacctgggaggcagagctggcagtgctgagatcacgccactgcactctagcctgggcgacagagcgagactccatctcaaaaaaaaacacaaaaaacaaaaaacaaacaaaaaaaaaccacacacaaacccaaagtacgagctcctagctttttctgctgatgtgttcttctaggtgtatgacagtacttggggctgaggaataaaatccttccccaggtaatgcagatgagccacagcctctaaccacttattgagaatcccagctttagtcttgtcaatttacaaagcatatgatacatattaggccnaatactgaatgcagcctttgaacccactttctcctggcaactataataagcatactattataaatcctaaagcaacttaatgggacaacaagatacagctgacagcaaaaaaaacccactaggctttactaccactaccatcataatatgcttggtatctgacctttgctttacagttataaacacaagcagggaagagaaacactcttagatgactgccatcttacagccacgcatattaacaatacatccaattatctcccacaatctagacctccagtcatcaccagactttggtatagtatgaaccaaatggctctagaaagtctg

SEQ ID NO: 1856 - DNA, 661 bp, Homo sapiens
  RYK
  misc_feature [331]..[331]: Chromosome 3, SNP identification no. = rs6439466
  misc_feature [331]..[331]: allele = g, in linkage disequilibrium with rs13074310, respectively
  misc_feature [331]..[331]: n is a, t, c or g
cagggaagagaaacactcttagatgactgccatcttacagccacgcatattaacaatacatccaattatctcccacaatctagacctccagtcatcaccagactttggtatagtatgaaccaaatggctctagaaagtctgtttccattcctaagaggaagatctaggacaagtaccctcagttatcaggaaaacacctaagatggcattacaaagggtttgagttgattatgaataagtacacaacgagaatataaggaaaacttcagcatcagcacagtgtaagcctcaaggcaggaacataagccaacattttcctttaagccaacangttataaatatcttgtggttcattttgaggttcttttttgcaggcctctaaacagtttatatttaagaatgttaatatctactttcaaagacattatcagaaactactggtaaataattggtatttgggcaaatttttctcacctgtggattattggcctctactaacttgcactgtcgtaaaaacaatttaagattcccccaattcatgtaaggcaatatcaccatgggcttttctccttcttctatacacacatgagtaataggaagaagatttctataaaataataaaaaattgggagaaagacaaaggaatccaaaatgttagggg

SEQ ID NO: 1857 - DNA, 661 bp, Homo sapiens
  RYK
  misc_feature [331]..[331]: Chromosome 3, SNP identification no. = rs9853568
  misc_feature [331]..[331]: allele = t, in linkage disequilibrium with rs13074310, respectively
  misc_feature [331]..[331]: n is a, t, c or g
cacaatatttagtgtgtaagattcgggttgctaatttcaatctctggaaatttatactggagtatctatgaagtctctgtataaaattatgaatatttttaaaagccaaactccaattttctgcttatgcctaaaggcaaaggtcagtgctttctaaaacactgtttttttattttatgctaaacttctaattgtgcaacatgtaacaaagcatacagatttgtgaaagaccttggtcagctctatgtggctacaactaaaaccataaaaacagcattccaaaataatcaatctcagagacagtcatgtggcgctatctctctaacaaatntgaggcaatgcacttcccctctgtcccccataaggactcactgtgctttctcttatttccgcacagctcacagagaacattataattacagtggtaaagcacagaaacaaccagtgactacaagtcaagcatatacggaaagagaagtcttatcttgtgaaacagtccaagtatactcattgtgttttcttatcactattatttccttttatctccccttccaaccctaaatcaacccaattttgtataaaaacctccttccttaattcagaacaagtcaataatagcccagttctacacagtctatagaatacttacaaaccccggaag

SEQ ID NO: 1858 - DNA, 661 bp, Homo sapiens
  RYK
  misc_feature [331]..[331]: Chromosome 3, SNP identification no. = rs9858450
  misc_feature [331]..[331]: allele = t, in linkage disequilibrium with rs13074310, respectively
  misc_feature [331]..[331]: n is a, t, c or g
aacaaaaggctgttgtttaataaccttatagttcaaattttacatttacaaaaagtaatatgtaaactctcctagtcagaaaacctactgggacctaacttacacttggtcttagccgaaaggatggacctaacacataaatattaccctttaaaagtgtttttggtgctgggaaggggtgaatgaataaaataaatattgaatgatatagtaaattaaaccacttgtttagaaaatattaaagaggtgtgtgtgtatggatgtatttgtagcagccttaaacaaacaattttgttcaattaaaagcaattccaaagattttttgttagantggtataacccaactttttacaaccaataaacataaacccttcatactttccatgtattcctttaagtaaatttagaaacagttcttataaattaacttcataaactgtataaaattttatcactttctactcataaaactgaatttaatcttcccttcagtttctgaagggaaagtgctaaatttgtttttagatattattagcatgtcttctcaatttacatcagacctgatagacattaagcaccctataaattatcacatttttctttctctctagataagcaaataagacttacctcagaattattatcatcatttttaaaaatt

SEQ ID NO: 1859 - DNA, 661 bp, Homo sapiens
  RYK
  misc_feature [331]..[331]: Chromosome 3, SNP identification no. = rs13080318
  misc_feature [331]..[331]: allele = c, in linkage disequilibrium with rs13074310, respectively
  misc_feature [331]..[331]: n is a, t, c or g
aattgccttttagccaaatgaaacaagctttgatctgtgaaatttcatttaatccttcttatggacagtttttctcccaaaaggttttctaatatagtctcataacacaccaacttttcaaatgaagacatgtttgaaaagatttttttcaaacatctcttcatttgaaaagttgttttgtttgaacaaacaaaaagtttcaaacagaaagttatttttgtttgaaaaggcttttttcaaacaaaatacataatcaatgtaattattctggtattaccacatcctagtaaaaccattgtgagattcaaatttaataagttcccttaattcncattcattcttaattcaatgacagtaaaaacagaatttacagccacaaattagttttcacttcaagaaaaaaaatgttagaataaaaggaaaatctggctttagcaagtagaagttggaatggcatctccagataatgggaagaaacctccccccaaaattagtggacctatgcaatgatcatcaatggttgccaggagaaccacatgaaaagttttgggcaactttacaatgcatgtagactgacaccacctgaaaccactgattggcagcagtttgactgtgatagactgtctaggtgtgtgagtatatgtgaatgtttaattctacc

SEQ ID NO: 1860 - DNA, 661 bp, Homo sapiens
  RYK
  misc_feature [331]..[331]: Chromosome 3, SNP identification no. = rs4682664
  misc_feature [331]..[331]: allele = t, in linkage disequilibrium with rs13074310, respectively
  misc_feature [331]..[331]: n is a, t, c or g
tagcccataaaactagtaaacagaatagccaggcttcaaacagagatggtctggctctagagtccgtactcttgaccactagactatgctctgaaaacgtgataatataagctggttttactcaggtaatgtctggaaacttttgcctgaaaactaaagagaactggaacaccaattcatggatggtaactaattatttcagcaggcagaggtagatgccccatggaatctgaaagttattgcaaaattctggcctatgtgggctcacagccctagcacgcatgcaagcattcaaggaaaacgcaactctctggctatatcaagactgacntccaaatgtcatgctcttcagtcacctctctacctgtatcctctctcaaagtcctatcaaaatgttccctcaatcgcttccaaatgccatttcttcccctgtaaaatctaaacctaacttcaccaccatcatgtacacaaaacatattctgaaacaaatcatatacgtacttccttctcattcgtatcccttttctcttctttctccacacagaaatggaaaataaaacagtggggacaaagagtactaaggggcaggtattgaatccaaccagctcccttccccttcatattcttacgccacaaatatgcttcccagctgcatgttaag

SEQ ID NO: 1861 - DNA, 661 bp, Homo sapiens
  RYK
  misc_feature [331]..[331]: Chromosome 3, SNP identification no. = rs3890774
  misc_feature [331]..[331]: allele = c, in linkage disequilibrium with rs13074310, respectively
  misc_feature [331]..[331]: n is a, t, c or g
tattttgagaactaaaatttatacgtattttgtaacgagtaagctaaaaagttttacaagcaagaatatcatatatttttgagtagtcataattaaagtatgaccatgaaatatgtgtaagatgtttattagcagagggttagaaaatctggcttgcagtctggacctaatcttaagctaatttcatccaggtgaaggtgtaagcttaaagatattatgttacttaaacctacagagcaggtatgcaaagtagatttttattttttggtatcggttgtgtttagatattattacaaacttcttttttttttctgacatgaagacatcgttnggtcttactcttcttgcggtagtgttaatagcagtatcttaaaaggatactagattctcttcatgcaagtagactttaaaaaattggttttgaaaacttcaagtatataaaagttcagagtacgctttgatgaactcccatgtgcccatcccccagcctcagtaatgatcaacactttgccattgttcttccattgattccctccttttgtggttggttaggggtggaggagagtattttcaggcacatcccaggcatcagattatttcacccataaatatttcagtgtagatctcctttaaaagggcctttaaaaaacccccacaatca

SEQ ID NO: 1862 - DNA, 661 bp, Homo sapiens
  RYK
  misc_feature [331]..[331]: Chromosome 3, SNP identification no. = rs9823873
  misc_feature [331]..[331]: allele = g, in linkage disequilibrium with rs13074310, respectively
  misc_feature [331]..[331]: n is a, t, c or g
taaaagaaagtttaacaaagaggctgagagaacaggtctgcatcctagctgcaccacttagctatctgatcttgacaagctagattctctgaagctcagcttccttttctgaaaatgaagacaatgagagaacccattgcctagggttgctgtagggattaaacaggtgtaatacctatcaagcacttagaacacagtaagcactgagggtttgcgaggtttttttaaagtatatttcccccccccatcttagatactaaccaattctacctacgtgaccttgtaaatttgggtcactgtagctttgtggaacttacagtgagtgggttgnactaaacttgtaaggagaactctaaaattctttgatttatgacctagcatgctggaactctttcatatccactcgatttcttcagtaacagataattcaaaaccaaaaagaactaactttgctaagtacccacatacggtattctaagttttaggctagatttaatgaaccgtaaaaaacaacaaacctctgaaacaggtattatgcccattttacagatgaaaaaactaagcctcagagaggttaagtaacttgtatcaatatcctgaaaagagcagagctgccattccaacccaggtctatctcacccgagagcaatgcttctgcata

SEQ ID NO: 1863 - DNA, 661 bp, Homo sapiens
  RYK
  misc_feature [331]..[331]: Chromosome 3, SNP identification no. = rs9839819
  misc_feature [331]..[331]: allele = c, in linkage disequilibrium with rs13074310, respectively
  misc_feature [331]..[331]: n is a, t, c or g
aaatagctaccaatgccttctctggttgataaatgaaagccaagctcggagggcctccttgtggctggtggaggaaggtctgctctgcagacccactcacacaataagcagattccaaggtagatttctcatagaatatctaagtcacatcctctagtcttgctctcaccaaaaagaaagttcatgtttagatccccatttgacctctggatctacttcttaagtgattcagaatccagaagggaagacaggcaacccatgagatgtctctaaaacaccaatgttatctatcaatacttggcctacccaatgtggcttaacagaaccaatnagcatcaataattaaggctctgttgctatggagagttcatgaaagaagcagctcaaactgcaaagcaatagctgaaattcagaatggctgccagcatcaagactttcaatgaagccctacagttcacatcactctctgccctgcccacaggttcttgataactatggtatccctctctcattcagtggtcacaaaaggtatcattggtggcagactgagatttgcagagccacgaggcagcaggttgggaaaagagtgagaagaaagatgttcgataaaccattcttcaagaaacttaactagaagaatgggagacagatggtgaagtgg

SEQ ID NO: 1864 - DNA, 661 bp, Homo sapiens
  RYK
  misc_feature [331]..[331]: Chromosome 3, SNP identification no. = rs9856792
  misc_feature [331]..[331]: allele = g, in linkage disequilibrium with rs13074310, respectively
  misc_feature [331]..[331]: n is a, t, c or g
gaaaaggaggagagaagggaaggaaatgaggctgtgagtgtagctggccaatgagggcacagggagaggtgcaaagggctgaggaggagatttgagaaggcagcccctttggtcctatcagcagcttagaggaatatgaagcatgaaactgtggaagcctccttgctggctccttttttgaggaactgtctaaaaatgggaggcattcacaaggtagttctcttttccctctgcagtctttaagatataaattttaaaactgcagtttctgggattagagaagaaattgccaattattgaagtccaattttctctagtttggcatgtatcnatctgtaaggactctcacttgccaatcatcctttaaagaaacagatctgctcaaaagttaaatgtacagtctactgggacaaagaaatttgaacagcagttgtttatcagaatgtagagtgagccaaaatacttcagaaaagaaactacaggctaggcgtggtggctcacacctgtaatcccagcattctgggaggtcaatgcaggtggatcacttgaggccaggagttcaagaccagcctggccaacacggtaaaaccccgtctctactaaaaatacaaaaattaggtgggcatggtggtgggcacatgctactcggctactcggaggc

SEQ ID NO: 1865 - DNA, 661 bp, Homo sapiens
  RYK
  misc_feature [331]..[331]: Chromosome 3, SNP identification no. = rs1131262
  misc_feature [331]..[331]: allele = c, in linkage disequilibrium with rs13074310, respectively
  misc_feature [331]..[331]: n is a, t, c or g
tggctcccagagttctatctagttctagcacacctgttttcagctggataactgcttaattgtttcaagtctcaatttcttcatctttcttggtgatgataaaaccccgtgtcttttttgcttcataaggcagcccatgttagggccatttgtgatgttcatttgcttatcaatattatcttcactctatttgtatttgaaatactgatagggatgattttgagaatattttaagtgtttaattatttttttcctatttttttctaggtcttgatgcagaactttattatgtgagaaatgaccttattagtcactacgctctatcctttantctgttagtacccagtgagacaaatttcctgcacttcacctggcatgcgaagtccaaggtaagagagtggctaaccacagacatcatgacagggtcacccagccacagaggcaagggctgtgtttgaggactgggctgctgtctgtactgaagggtccgctggtgatgtgatataatagtactgagtcttttcagatttatatttcaaatatttggcctattcctctaaaatttcttgaatcctttaaaacgaaggtggctatcatttaattgattagcacatgacacaacacttaacatccttttaggctcttcaaacagagatccaga

SEQ ID NO: 1866 - DNA, 661 bp, Homo sapiens
  RYK
  misc_feature [331]..[331]: Chromosome 3, SNP identification no. = rs9832732
  misc_feature [331]..[331]: allele = a, in linkage disequilibrium with rs13074310, respectively
  misc_feature [331]..[331]: n is a, t, c or g
atctgcaggacacagctctctgcacaaaacataaatgcttgttaaccaagaggttagtactatagacaaaacaaaaataaatgaaaagcctggaatgccggagaagtgactccgaagtttcactcactcccataccaccttctcagccagggcacatacaatcttccatacgtatcaggatctcaattttgtcacacccttttatcctgcctgtatttaatatttttctttaaaacttatttaatttgttaaaataaaaatttttaaggcaaaatttaatcactacttttcagtggcaaatcaacagttactgttaaaaaaagagttatcnaaaaaacaaaagaaaaacaaatgtactaaattctagctcaattctggtgcctaccaagaaggcagtgaacttgagcctagctcattgtttataaaaagggaggagggaggtataatcaagtgtttgagaaatgtaaaaaaaaaaaaaaaaatcacacagaggatttctccatgatcatccaaggaactgaaagactaagagcagggagtaactttctcttgaattgatttactgttatttaaagttctatccaggtgtccctctagtaatacatgacatatatattccacaagttagagggggaaagatactgaggagaacagccaaaat

SEQ ID NO: 1867 - DNA, 661 bp, Homo sapiens
  misc_feature [331]..[331]: Chromosome 3, SNP identification no. = rs6808085
  misc_feature [331]..[331]: allele = t, in linkage disequilibrium with rs13074310, respectively
  misc_feature [331]..[331]: n is a, t, c or g
ctggttttttctaggttgtaattgtagaacagagattattataatattggaataaagagtaatgctacaaactaatgattaatcatattcatatataatcatatctatattctatttctagtataactattcttgttctatatattttctttattatactggaacagcttgtgccttcagtctcttgccccggcacctgggtggcttgccatccacagcactagctgggtagcactgcttttatttatcctaaaaaagatactgaaagcagagacagaaatgcagacccttctgcaaaagcctctccctgctggcaggagtgttagcaaanatccaggaatggaggattggtggtgctggagaaaggggttagaggaaaaattgtaaataatttaaatttgccttttttcttacgtctgggtcttagtctagtctagataggtgctgtttacttagaaatatatgtcagataaataaaaagaagaaaattacatgaggcagtactgacatgagacaaactaggactcaagttgaaaggatttcatactaaatgtattaatataaaatttactaatgagttcatattaataaaaaacacaagaagatacagtagtacaactgaaaaaaaaaagggcttcaaatatagaaagcaaaaaccaac

SEQ ID NO: 1868 - DNA, 661 bp, Homo sapiens
  misc_feature [331]..[331]: Chromosome 3, SNP identification no. = rs9858069
  misc_feature [331]..[331]: allele = c, in linkage disequilibrium with rs13074310, respectively
  misc_feature [331]..[331]: n is a, t, c or g
ggacatgaaaaagtgaggggggattaatcatgaattagaccacatgcatttaaaatttttttaaaatataaaaacagattcaaaccaaaatcatacaggctaccttccctgatcaaataccatatgataaagatattaactataaggatgaagccaaaagagtattatttgaaaagattaataaaacagttaaacccttcacaaggctgatcaaggaaaaaagagaaaaaacaccaaacacaaattaccaatactaggaatgaaaatgaaacattactacaaatcctatagatgttaaaaagataaaaagattattataaacaactttganaataaaatcaacaaattagatgaaacagaagcaccctttaaaaacataatttaccaaactaaaagaaataaaaatttcaattaaaaacctatcccaaaagaaagctccaggtccaaatggcttcattagtgaattctatcaaacatttagggaagacacaacaccaatcttacataaactctatcagaaaatagttgaagagaatacttcctaactcatctgatgaggccagcagcatcatattgatacaaaaaacttactaaaacataatgagaaaagaaaattacagaacaacatcccttatgaacatagattcattctccacaaaat

SEQ ID NO: 1869 - DNA, 661 bp, Homo sapiens
  misc_feature [331]..[331]: Chromosome 3, SNP identification no. = rs4682668
  misc_feature [331]..[331]: allele = a, in linkage disequilibrium with rs13074310, respectively
  misc_feature [331]..[331]: n is a, t, c or g
atagaagaggccctgtctgccagagcggagcgctccctctctggggctctgtcgctcttgctctctggctccctcgccctctctctttttcttcttccccctccgcctcgcactctctctactgccttctctctctctctctctctctctttctctttcccccaaccccttctgtctctccttccctctctcccttgctctcctttgggctggaaaaaaaaaaaaaaaaaacgtaggatagaaaatcttcacaacctggggtaagcaaagatttcctggacaggtgacacagaacataaagcaaccagaaaaaactgaaaattatcaaaantttaaaaccttatcaaaatttaaaaatcatcaaaattaaaaactgaagttcatcaaaattaaaaacttctgtccctcaaaaaacattaagaaaatgaaattaaagtcacaaactaggagaaaacagtcacatctatctaagaaagaacttagctgggggaagggagagatgttggttaattttttttaatgatttgtttctagaatatataaagaaccaaaaattttttaaccaaattaaataaaatggacaaaagatgtcagcagacatttcataattatatacatacccaataagcatatgaagaggtgctaaacatccttagtcatc

SEQ ID NO: 1870 - DNA, 661 bp, Homo sapiens
  misc_feature [331]..[331]: Chromosome 3, SNP identification no. = rs9856298
  misc_feature [331]..[331]: allele = a, in linkage disequilibrium with rs13074310, respectively
  misc_feature [331]..[331]: n is a, t, c or g
atctagctgtggtcatattatgcctagaaaattagctgagacctaatgtttaactacattataagacaaggaattaaaatattagactgtagaacaggggcatcctttccccatagttgaataagcatgtaaatcttcaatcccatagctgttcaagcaataatctgtggattaaatatgatttttcgtgtaattctctgccacattcttcagcatttcctcatatatttgtcctgcaaccctaagtgtcttgatagaactgtcttgagagtgtatgttcatacacagaaaggaggattagagagagctttccagagaaagaacgtatgcntgaccaacaacagcagacaacataaatataccccttcttcccctccgtccttcagactgccttctttctgcctaaagaaaagcaggtaagcctacccttttggtcctgataggtggtttagaaatcagcttcaagaagacatggaagggaatctcctgttcctcccaaggaaaagccaggaatctgcaggcactaacttttcctaactgtgccacttcaggaagtaaacatgatatgtcgtcaaaatcaacacagaacaggcacaaatgttagaatacaagcaaggacactgaaacaactattatacctgtactccacatggtcaaaaag

SEQ ID NO: 1871 - DNA, 661 bp, Homo sapiens
  misc_feature [331]..[331]: Chromosome 3, SNP identification no. = rs9818714
  misc_feature [331]..[331]: allele = c, in linkage disequilibrium with rs13074310, respectively
  misc_feature [331]..[331]: n is a, t, c or g
atattatgcctagaaaattagctgagacctaatgtttaactacattataagacaaggaattaaaatattagactgtagaacaggggcatcctttccccatagttgaataagcatgtaaatcttcaatcccatagctgttcaagcaataatctgtggattaaatatgatttttcgtgtaattctctgccacattcttcagcatttcctcatatatttgtcctgcaaccctaagtgtcttgatagaactgtcttgagagtgtatgttcatacacagaaaggaggattagagagagctttccagagaaagaacgtatgcatgaccaacaacagnagacaacataaatataccccttcttcccctccgtccttcagactgccttctttctgcctaaagaaaagcaggtaagcctacccttttggtcctgataggtggtttagaaatcagcttcaagaagacatggaagggaatctcctgttcctcccaaggaaaagccaggaatctgcaggcactaacttttcctaactgtgccacttcaggaagtaaacatgatatgtcgtcaaaatcaacacagaacaggcacaaatgttagaatacaagcaaggacactgaaacaactattatacctgtactccacatggtcaaaaagttaagtagaatcat

SEQ ID NO: 1872 - DNA, 661 bp, Homo sapiens
  misc_feature [331]..[331]: Chromosome 3, SNP identification no. = rs9289462
  misc_feature [331]..[331]: allele = g, in linkage disequilibrium with rs13074310, respectively
  misc_feature [331]..[331]: n is a, t, c or g
tctgtggagttccttcctttactcagaatatcccttctacatagagtctgtctctactcctatctaccaggaaaaacgtgagctcctgcaggacttcaggagttcctcatccttcctgcaggaaatatcatctttatgggtggtcagtttgcattacttgaaacccttgctgaatgtaatgcctgtatttcctcaaagcaaggatttttctgcaaagtaagccagagttcccaaactctgttccacaatacaccagcttgataagaggctcatcattgttccaccaaactccttgtccgataagtttgggaaacgagcataccaacacccncttttggcaaatgaaatgtacagtaatatattgaagcttgtgagaagctctatttaactttaactcaataatgtccagatttatttaactgcaggatacttttctcatggcacacttattggcatcaccagttctgcaggcccagtttgggaaatgggtgcagtggaaggaacattagactcacaatgaaaagaaatatcctcgttcacttggctcccttggtgtcccagttccctgcccttccttggagcaacgtcttccaatttgcaaaacaagtgaatagacctgatgttttcattcagacctgtgactggatctgactttttattt

SEQ ID NO: 1873 - DNA, 661 bp, Homo sapiens
  misc_feature [331]..[331]: Chromosome 3, SNP identification no. = rs9990248
  misc_feature [331]..[331]: allele = t, in linkage disequilibrium with rs13074310, respectively
  misc_feature [331]..[331]: n is a, t, c or g
caacacccgcttttggcaaatgaaatgtacagtaatatattgaagcttgtgagaagctctatttaactttaactcaataatgtccagatttatttaactgcaggatacttttctcatggcacacttattggcatcaccagttctgcaggcccagtttgggaaatgggtgcagtggaaggaacattagactcacaatgaaaagaaatatcctcgttcacttggctcccttggtgtcccagttccctgcccttccttggagcaacgtcttccaatttgcaaaacaagtgaatagacctgatgttttcattcagacctgtgactggatctgacnttttatttgaccacgattagaaaattggagccaatggggaaatgctgagagtttatctaagagaaaggagacagctctgaataacggcgagaatacatagatctgctttcagaccccaactctctgaccccttccaactctgtgactccaggtaagtggtaggtcctaagttgtaaatggacccaataatgtcaactctgtagcaggccttaggagaggatggcatgagattgtgcattcaaagcagccaacccattgcctgacccagagaaaacatctgccacattatggccatagtgatgagatcacgccaaagagcctggtgacact

SEQ ID NO: 1874 - DNA, 661 bp, Homo sapiens
  misc_feature [331]..[331]: Chromosome 3, SNP identification no. = rs9289464
  misc_feature [331]..[331]: allele = g, in linkage disequilibrium with rs13074310, respectively
  misc_feature [331]..[331]: n is a, t, c or g
tcctgctgcgactactaatgattggggacatttcttgaacatggacagatgtcagacactctaatgcatgattaacatatgtcttagttcattttatgctgttataacagaataccacagactgtgtaagttataatgaacaaaaatgtattggcttatggtctggaggctgggaagtcgaagactgaggagctaacatctggcagggtcttcttgctatgtcatcccataatggaagggcaaagagagggcaagaaagagacaagatgtggccaaacttgtccttttataaggaacccactactgagataatggcactaattgattcatnagaatggtgcccccatgacccaaacacttctcattaggccccaccttccatcactgctgcattggggatcaagttcccaacatatggactttggggacacatttaaaccatagcaacatgcattatgagatataataagatcacgtaatcctataagaaactacagaagaaggagtaaccagagatttaggagaagcatgagagtagtcatggtgttcagaaaaagaagtgtgttagggaggcagtggtcaattgtgctaaatgcaatgaggtaagccatgaatagaggcatgctcaatgcctctgctgacaaaatgggcattggtgagg

SEQ ID NO: 1875 - DNA, 661 bp, Homo sapiens
  misc_feature [331]..[331]: Chromosome 3, SNP identification no. = rs12492507
  misc_feature [331]..[331]: allele = a, g
  misc_feature [331]..[331]: n is a, t, c or g
aaaggaactggaggggagtcccccatccatagggggagctgctgctcagctccagcacatggttccaggcctgacatgcaagcccactattcctaaaccgccagtttcacagaagctggaactctggatgattcctaaatcaaatttctcattttgaaatgagagtcagtaactaattaaaacattatttttaacagtgtgagcaaaacaagccctgtccacaggcaggattcagcctggggaccaagagttggtagtttttgaactccagcagtagtactgggcccatggcaaagtcttgctcaatgcttcggcaggaaattgtctatcnatgtacgtgccactgtttcagaaactctgaaataaaatgaagtggaaaaaaaaaatcctgacttctaactgttatacaaagactgcctactcctcccatctctcccaccttataggtctactaacaagtaactgctgtcactgtccgcctctccattcccatctcccctgcccagccacacaaacctgggcagaccctgggtctagttctgaggtctgcaattaatgggagagagagaaactggggtcagttgagaagcaagccacaaagtgattagagatctgaaaaataaagatcaggagaggttaaatgaaccaaggtgattccctt

SEQ ID NO: 1876 - DNA, 661 bp, Homo sapiens
  misc_feature [331]..[331]: Chromosome 3, SNP identification no. = rs12495888
  misc_feature [331]..[331]: allele = c, in linkage disequilibrium with rs12492507, respectively
  misc_feature [331]..[331]: n is a, t, c or g
atgcaagcccactattcctaaaccgccagtttcacagaagctggaactctggatgattcctaaatcaaatttctcattttgaaatgagagtcagtaactaattaaaacattatttttaacagtgtgagcaaaacaagccctgtccacaggcaggattcagcctggggaccaagagttggtagtttttgaactccagcagtagtactgggcccatggcaaagtcttgctcaatgcttcggcaggaaattgtctatcgatgtacgtgccactgtttcagaaactctgaaataaaatgaagtggaaaaaaaaaatcctgacttctaactgttanacaaagactgcctactcctcccatctctcccaccttataggtctactaacaagtaactgctgtcactgtccgcctctccattcccatctcccctgcccagccacacaaacctgggcagaccctgggtctagttctgaggtctgcaattaatgggagagagagaaactggggtcagttgagaagcaagccacaaagtgattagagatctgaaaaataaagatcaggagaggttaaatgaaccaaggtgattccctttggaggagagaaggttacagggtgagctagcgacggttttcaagtatataaaaggctcatgcctaggacagtaat

SEQ ID NO: 1877 - DNA, 661 bp, Homo sapiens
  misc_feature [331]..[331]: Chromosome 3, SNP identification no. = rs17784037
  misc_feature [331]..[331]: allele = g, in linkage disequilibrium with rs12492507, respectively
  misc_feature [331]..[331]: n is a, t, c or g
taattggacttacagttccacatggctggggaagcctcacaattatggtggaaggcaaggaagaacaagtcatgtcttacatggatggcagcaggcaaagagagcttatgcaggggaactcctctttttaaatccatcagatctcgtgagacttattcagtatcacgaaaacagcacaggaaagacttgcccccatgattcaattacctctcaccaggtccctcccacaagttccacaggttcccttcccacttgggaattcaagacaagatttgaatgggggcacagccaaaccatatcattgcctaattgtatttttcttcttgctggnttattaaagagcctcagtatcatctttaaatgttattagcttaataagaatgagaatgtgagactgtcaacattaaatcaaagaagtgttttgcttcgctttgtttcatgtgatgggactatatctagaaggcgtgataaaaggagggtagcccatttaattatacatcataaattgttaccagacatttggaattaggaaaagtacatcaggaattacaagggccagcacatgtgaaaaaggcttaattgagaccatgaatttggaaatagctaaagaggcagtttatcttactgctattatatcttctagtgttgttatgctctggat

SEQ ID NO: 1878 - DNA, 661 bp, Homo sapiens
  misc_feature [331]..[331]: Chromosome 3, SNP identification no. = rs10513344
  misc_feature [331]..[331]: allele = c, in linkage disequilibrium with rs12492507, respectively
  misc_feature [331]..[331]: n is a, t, c or g
tctcaccaggtccctcccacaagttccacaggttcccttcccacttgggaattcaagacaagatttgaatgggggcacagccaaaccatatcattgcctaattgtatttttcttcttgctggattattaaagagcctcagtatcatctttaaatgttattagcttaataagaatgagaatgtgagactgtcaacattaaatcaaagaagtgttttgcttcgctttgtttcatgtgatgggactatatctagaaggcgtgataaaaggagggtagcccatttaattatacatcataaattgttaccagacatttggaattaggaaaagtacntcaggaattacaagggccagcacatgtgaaaaaggcttaattgagaccatgaatttggaaatagctaaagaggcagtttatcttactgctattatatcttctagtgttgttatgctctggattggcttgaatcacataaaaatggttctaaaagggatatggaatccatgttttatgagtagagattaagttatttatttgatattccatcacataaatttgggagctagacaaatctgcattcaaatcccagatctcccatttgctgtgagaatctggccaagaaagttcatccacctctaaaataagcataagaacaccaacctccaa

SEQ ID NO: 1879 - DNA, 661 bp, Homo sapiens
  misc_feature [331]..[331]: Chromosome 3, SNP identification no. = rs17716800
  misc_feature [331]..[331]: allele = g, in linkage disequilibrium with rs12492507, respectively
  misc_feature [331]..[331]: n is a, t, c or g
tttgctgtgagaatctggccaagaaagttcatccacctctaaaataagcataagaacaccaacctccaagtttttcgtaaaaattaacttatgtaagatacatcatacacatagcagtttgtagcacatattaagctttcagcaggtggtaatgattaccaccactaaaataatagtaataacattttcacccctctttgctttctcaaacacttctctagattctaatcagacaaacttaccttgaaagcagatatcagcaacctggaatattgtggcaaaggcagcccagaaattgtatcagacattgtacttccagtgtcttccactnacgtgcaaaagtgtgctcagtgtatcctgggccaccctcctcttcatatcaccctcctaccaccgggtctcctgagtcctcctctccttccagcaaacccatccatgcataccatcctctgccctgccccagtgttactccttctctcaccctcccctctttaatcaaaactctctttccttcaggatggttatattctttgtgtgctaggacaaaagtaccagcagtttcctcatcagccaactgagagagtaaatgaaaagctcccaactgcgccaagccctcatgtggcctcagtaaatgtgagtgctcatccctcttgtgtaagat

SEQ ID NO: 1880 - DNA, 661 bp, Homo sapiens
  misc_feature [331]..[331]: Chromosome 3, SNP identification no. = rs17716806
  misc_feature [331]..[331]: allele = c, in linkage disequilibrium with rs12492507, respectively
  misc_feature [331]..[331]: n is a, t, c or g
tcatacacatagcagtttgtagcacatattaagctttcagcaggtggtaatgattaccaccactaaaataatagtaataacattttcacccctctttgctttctcaaacacttctctagattctaatcagacaaacttaccttgaaagcagatatcagcaacctggaatattgtggcaaaggcagcccagaaattgtatcagacattgtacttccagtgtcttccactaacgtgcaaaagtgtgctcagtgtatcctgggccaccctcctcttcatatcaccctcctaccaccgggtctcctgagtcctcctctccttccagcaaacccanccatgcataccatcctctgccctgccccagtgttactccttctctcaccctcccctctttaatcaaaactctctttccttcaggatggttatattctttgtgtgctaggacaaaagtaccagcagtttcctcatcagccaactgagagagtaaatgaaaagctcccaactgcgccaagccctcatgtggcctcagtaaatgtgagtgctcatccctcttgtgtaagataggagatccgtacaggtttacctctaaaaccctgggattacacagaaatttagagcaaagtatgaagccagggtagtttgtatgctggcagaaaagttttct

SEQ ID NO: 1881 - DNA, 661 bp, Homo sapiens
  MGC27085
  misc_feature [331]..[331]: Chromosome 3, SNP identification no. = rs9841443
  misc_feature [331]..[331]: allele = c, in linkage disequilibrium with rs12486767, respectively
  misc_feature [331]..[331]: n is a, t, c or g
atgggcgcagaaatatttaaaacggagatagtacagaggtgcaaagtcagaaacagtatcaagaccctcatgcccccctgtgacctgctctctgggactttcacaaaaagggggctgagaagagcccccccgccaccccctcccggagaccctgagagcacggcgacagacaccatctgcacaacctatcgcgcaaagggcggacccacgggaactcctctccgtggactcctctcctgcccccggtcgcaaagggcgaccggggactcttctcctgccctcgtttctgggcgccccaaacctctggccacagctggggttcccaggggcncccctcccgcctcgacgccttgggctggcgggctgctgggaggactcctgccgtgcgaccccggcgcccctcgcgcgttttgtctgggccaggccgcgcagacgtgctccctacttcttaccgcgctggaccgccagggccgcgcccggagtactggcctgagtggaggcccaagccggggacctggccggcgcacgggcggcctcccgggagctccccatgctcctctcacccactggccgcggcggctgcgctgccatggcgaccgcgcgcgcacttacagtccgcctgcagctgtgaggcggctacacgagcctcggcgccagcctg

SEQ ID NO: 1882 - DNA, 661 bp, Homo sapiens
  LOC344657
  misc_feature [331]..[331]: Chromosome 3, SNP identification no. = rs6793160
  misc_feature [331]..[331]: allele = g, in linkage disequilibrium with rs12486767, respectively
  misc_feature [331]..[331]: n is a, t, c or g
tgtttcaataaattttttaattttcttaattttttcattgacccactggtcattcaggagcatgttgtttaatttccacgtgtttgtacaattcccaaatttcctcttgttattgctttctagttttattccattgtgctcagagaagatacttaatatgattttgatatttttgaaaatttttaagacttgttttgtgacctaaaatatgtctatccttgagaagatccatgtgctgaggaaaagaatgtgtattctgcagctgttggatgaaatgttctgtaaatatctaggtacatttggtctatagtgcagattaagtccaatgctnctttgttggttttctgtcttgatctctccaatgctgaaagtatccaatgctgaaatcaacagccattattgtactggagtctatttctttctttatctctagtaatatttgctttacataactaggtgatccagtgttgggtgcatgtatatttatgatcgttatatcctcttgctgaatgaacccctttatcattatataatgaccttttttgtctttttttatagcttttgtctcgaaatctattttgtctgatatatgtatagctactcctgctcttttttgttttccatttgcatagaatatcttttcccattcctttattttcag

SEQ ID NO: 1883 - DNA, 661 bp, Homo sapiens
  LOC344657
  misc_feature [331]..[331]: Chromosome 3, SNP identification no. = rs10936602
  misc_feature [331]..[331]: allele = t, in linkage disequilibrium with rs12486767, respectively
  misc_feature [331]..[331]: n is a, t, c or g
gaagaattttctttctggtatagggaaggcatgtttcacatggaaggttttatttcctgttttcaaggcgagaaagggaagattagaatacacttattgcatctgctatttttcaagtgtctttagcttaaagtaatcctcataccaaagtggcatattttggagtggcatattctgccactctttattaccattacatgaatatccagtctgaagtcaattaaggttacttttagtttgtttgtgattcaccagtttttagaaggagaagttctgctgagtgaagttttaagcaaaatcttgaaattcttttaactagaaatgggttttnatgctaacagagagagtcacacaccatattaacctcaggaacctagtcttacctatctagtttgtgcatagacagacttggaaacaaaagcatcaacactcactgtaaatttgagagggctgattagtttcttaaatgattttctcaggggttagagttacacaaagaaagctaattgttaaactatccaaatcttggctccttcaaatgaagatgtaacaattatttaatttaaaaatcacccgaccataatattggattgtaataataagtaaatttgatcacatttgtgtagcaatccctagagaaaaaatggccaataaagaccaa

SEQ ID NO: 1884 - DNA, 661 bp, Homo sapiens
  LOC344657
  misc_feature [331]..[331]: Chromosome 3, SNP identification no. = rs7632991
  misc_feature [331]..[331]: allele = g, in linkage disequilibrium with rs12486767, respectively
  misc_feature [331]..[331]: n is a, t, c or g
ttgcataaaaactatagatccaattaggggaatattgacatctttttttttttttttttttgagacggagtctcgctctgtcgcccaggctggagtgcagtggcgcgatctcggcttactgcaagctccgccccccgggttcacgacatcttagcattactgagaattctaatccatggacatgatttgtccctccatttatcagagactttaatttgtttctgggttgggctttagttcattcaattaaccgcagttccaaatgtctcacttagacagagttaagctccttccagccaggcttcggtacttaagaccatgaaacttcagnacctgtctctgttctttagtccagcctgcaattttccctgtggccgtttaaccagccaaagactaatgggaaaaactagttagtggggagaactgactttgcatttggggctactccagattctaatccactatgccagcccacacatgactgttaaaagtttggcaggtttattcttctcccagaagttcctttgcctgtgcctattaaagggttgtttctctgcctgacagtcctcaaacttgcaaatgccatcaggcatgagagggtctactcacgggtctctagttatttagaaaaggttggtgcatctctagaatatagtgtttt

SEQ ID NO: 1885 - DNA, 661 bp, Homo sapiens
  LOC344657
  misc_feature [331]..[331]: Chromosome 3, SNP identification no. = rs1920119
  misc_feature [331]..[331]: allele = t, in linkage disequilibrium with rs12486767, respectively
  misc_feature [331]..[331]: n is a, t, c or g
gtcctattttattgtcatccagtcccaggacttcaaggttcttcagtgcacagatctgcagcgggcagtggtgcagatggttctggcttaggtccaggaagcgcaagttgaccaggcacctgaaggagccccgcagcctgtgcaggccggtgtttcccaggtagagcaggtgcagcgaggtccacctgcaaatgaggcgtggcaccttctccaggcggttcccgctcagcccgatttccgtcatcttcctgagctcggcgaagctcttcgggatggagtggaggaggttgtgggataaatcgagcaccgacagttggctacactggcacanggacgcgggcagaacgggaaggttgttagaagccatatagaacttctgcagccccgtcaggtgtccgatctcttctgggatggcacctattttgttctcgtccaggtcaatgatttccagggtgtagagaacacagagctcctgggggaaaacttcaaactggtttcgcttcaggtagatctccctcagcttggtctggttcactatttccttgggcagacatttcaggtggtttccggtcagtccgagcagctcgagatggtggaggtttttaaagatgacgacgggaatttccttcaggtcggtctggtagagccggagctcgcgcag

SEQ ID NO: 1886 - DNA, 661 bp, Homo sapiens
  LOC344657
  misc_feature [331]..[331]: Chromosome 3, SNP identification no. = rs10936603
  misc_feature [331]..[331]: allele = g, in linkage disequilibrium with rs12486767, respectively
  misc_feature [331]..[331]: n is a, t, c or g
gaagcggagcttgcagtgagccgagatcgcgccactgcactccagcctgggcggcagagcgagactccgtctcaaaaaaaaaaaaaaaaaaaaaaaagagatttttttcccatgtggtctcccatggtccagaaagaaaccgatagacggacataatggtgaagctgattttggctgtactaaagtaggaaatctgatgattagaagtagccatagaagataatgagcttttcttcacaggaggtggtgtttagataaaactggatggctcgctataaaaagtatgcaagcactgtattagaaggttgaaatagagaaccttcttaaggcnttccagccctgaaagtgtggcactctgtgaaatgccgacccagttcccacacaggttacacaagcctgggtattcactgaaaagcagaacatgacacgataggatcataatggagttcactgaacactgattagaaatggtgtgaatatatgtttgcctccaactgagatttcaactgaagtttcaaaattattaaagccttttaggatgaagagtcatatcactaaatttattagttccaataactgaatttataatgaatattattattgcaatattacacataactttagtatttttctttctatagtgtcaaacagttgccacact

SEQ ID NO: 1887 - DNA, 661 bp, Homo sapiens
  LOC344657
  misc_feature [331]..[331]: Chromosome 3, SNP identification no. = rs12486767
  misc_feature [331]..[331]: allele = a, g
  misc_feature [331]..[331]: n is a, t, c or g
aaaaaaaaaaaaaatcaatagtctgctgaccttaggaacagcagggtctgagagtgatttttcccagtgggctgtcagtttcagctaaaaactgttgctctaaacaaacaaaacatttggaatatctggagactgaattctgttctcttcattttgagaaggagcaaacatagagctagaacttttattagatggtagaaaaagttttgtcgggtcttgtgcatccttcctctcattccctttgcaaatgcagaattggatccctcacctatgtggacaggattaggtgacaagttaatattgtttcttctaagattgaaccaccattacnaaaaaatcttttcagctttgaaagaattacggctggaggacaacttgctcacccatcttccagagaatttggattccctagtgaatcttaaggttctgacactgatggacaatcccatggaagaacccccaaaagaagtgtgtgctgaaggcaatgaggccatatggaaatacctcaaggaaaacagaaacaggaatataatggcaacaaaggtaaaatcagcccagattcttgataacagttgctttagagggagtctaatggtaaacacagtacagattatcctacggagcaactccttacacccttgtcctgcttctgaaaagagaa

SEQ ID NO: 1888 - DNA, 661 bp, Homo sapiens
  LOC344657
  misc_feature [331]..[331]: Chromosome 3, SNP identification no. = rs7647824
  misc_feature [331]..[331]: allele = a, in linkage disequilibrium with rs12486767, respectively
  misc_feature [331]..[331]: n is a, t, c or g
gaggcaggagaatcgcttgaacccaggaggcgggggttacagtgagcctagattgtgccactgcactccagcctgggcaacagctgtctccaaaaataaatgaataaattatttcagtgtgtatatgctcaggatggattacacttgaaagaatgaaagttgtggttcttaattgaatacttcctaaaagcattttgaaaaactgtgcaccctcttgcacgttcttaaaatgatatttaacattgttggccacaagtttaaatcattgcaaaggatgtaatttccagtgaattttaaatgttgacattttaaaatagagctgttagatcantattttaaatgtatccagtggaaactgaatatcattatgatttgtcaacaccaatttacaaatactcaaacaagttattattttataggcagaatttttatatcatattccttttcttcttaaacatgtacttccattctactttcccctcaaaattgatcctaaggttttatgtatacacatataagtctttcatagattgctcttttgtacttctaggtgacaaaaatatttatataaattaaattttaaaaatttaaaaatgtatatacattacaactattagtataaaatcacctaaaacaacataaaatttcttacaaattttaa

SEQ ID NO: 1889 - DNA, 661 bp, Homo sapiens
  LOC344657
  misc_feature [331]..[331]: Chromosome 3, SNP identification no. = rs9833035
  misc_feature [331]..[331]: allele = g, in linkage disequilibrium with rs12486767, respectively
  misc_feature [331]..[331]: n is a, t, c or g
gtgtgtgtgtgtgtgtcctaatgatttttggagtccagggcaatgcaccatagtaagattcaggtgggtgcaagctgtgcccttcctctgtggagcatcacaggggcaactgggatgggggatctgcagttatgttctcgggatgattttaggaaggggtacatatggaagctggagctcaggaaatggactgtcttcaacctatccatgcctgcacactgttggaaaggctttgtagaccagggtataggccacacaattgaagactgcttaaccttaagtcaacaaaaagccccataaatttccaaaatgcctctagagagcagtgctnttccctggatcccgattggtctgctgttttcactccccatctcctctttcctactctcactggacttcagtcacaagcagatctggtgttcctccaaggaccaagcatgttcctggctcagggccttaacactggctcttcctgtgcccagagatgctttccccagatatgagcaagattctggccctcacttcattccatctctgcttaaacattctcttatcagagagcccttccttgatccaccttatataaaacagcatacccccagccacctctttcatttgttcattcattcaacaaacatttattgagcttctactatgcacc

SEQ ID NO: 1890 - DNA, 661 bp, Homo sapiens
  LOC344657
  misc_feature [331]..[331]: Chromosome 3, SNP identification no. = rs4352416
  misc_feature [331]..[331]: allele = g, in linkage disequilibrium with rs12486767, respectively
  misc_feature [331]..[331]: n is a, t, c or g
aacagcatacccccagccacctctttcatttgttcattcattcaacaaacatttattgagcttctactatgcaccagacactgttctaagcattgagatacatcagtgaacaaaacaaatatttatgtcctcacagtacttaaaatctagtaggagggaaataaaagcatgaaatagaaaacataaaatgaaatactatgttagagagtgctactgtttaaaaaaaaaaaaaagttagcctaaggggaactgaaattgccagtagtgtgtggaggtggagaagtggttgatttaaataagattgtcagagtaggcctcactgaaaaaatgncagtcttagcttaggctgccacaacaaaataccatagaacaggcggcttaaacaatggaaatgtattttctcacagttctggaggctggaagtctaaggtcagagtatcagcatgattggagtctggtgaaggccctcttcctggcctgtagaagctgacttctccctgtgtcttcatataacagaaagagagagagagagagagagagattgcactagagagtgctaactctctgatatctctccttataaggccactaatctcatcatgaggaccctgctgttatgacctcatataaatctaatcatctcctcaaagccccttctcca

SEQ ID NO: 1891 - DNA, 661 bp, Homo sapiens
  LOC344657
  misc_feature [331]..[331]: Chromosome 3, SNP identification no. = rs2421830
  misc_feature [331]..[331]: allele = g, in linkage disequilibrium with rs12486767, respectively
  misc_feature [331]..[331]: n is a, t, c or g
cccaaattcatatgctgaagtcctaatccccagtgtgaatgaatttggagaaggggctttgaggagatgattagatttatatgaggtcataacagcagggtcctcatgatgagattagtggccttataaggagagatatcagagagttagcactctctagtgcaatctctctctctctctctctctctttctgttatatgaagacacagggagaagtcagcttctacaggccaggaagagggccttcaccagactccaatcatgctgatactctgaccttagacttccagcctccagaactgtgagaaaatacatttccattgtttaagcngcctgttctatggtattttgttgtggcagcctaagctaagactgccattttttcagtgaggcctactctgacaatcttatttaaatcaaccacttctccacctccacacactactggcaatttcagttccccttaggctaacttttttttttttttaaacagtagcactctctaacatagtatttcattttatgttttctatttcatgcttttatttccctcctactagattttaagtactgtgaggacataaatatttgttttgttcactgatgtatctcaatgcttagaacagtgtctggtgcatagtagaagctcaataaatgtttg

SEQ ID NO: 1892 - DNA, 661 bp, Homo sapiens
  LOC344657
  misc_feature [331]..[331]: Chromosome 3, SNP identification no. = rs2421829
  misc_feature [331]..[331]: allele = t, in linkage disequilibrium with rs12486767, respectively
  misc_feature [331]..[331]: n is a, t, c or g
ggcacagttgtgactcagggcctgtatattcgctgctttctttgcctggaactcttctcagtattcagatggctcacccctccgctgcttcaaggatttgcttgattgtcattgctacggactgaactgtgttgccccaaattcatatgctgaagtcctaatccccagtgtgaatgaatttggagaaggggctttgaggagatgattagatttatatgaggtcataacagcagggtcctcatgatgagattagtggccttataaggagagatatcagagagttagcactctctagtgcaatctctctctctctctctctctctttctgttntatgaagacacagggagaagtcagcttctacaggccaggaagagggccttcaccagactccaatcatgctgatactctgaccttagacttccagcctccagaactgtgagaaaatacatttccattgtttaagccgcctgttctatggtattttgttgtggcagcctaagctaagactgccattttttcagtgaggcctactctgacaatcttatttaaatcaaccacttctccacctccacacactactggcaatttcagttccccttaggctaacttttttttttttttaaacagtagcactctctaacatagtatttcattttatgt

SEQ ID NO: 1893 - DNA, 661 bp, Homo sapiens
  FLJ23259
  misc_feature [331]..[331]: Chromosome 3, SNP identification no. = rs3732451
  misc_feature [331]..[331]: allele = c, in linkage disequilibrium with rs12486767, respectively
  misc_feature [331]..[331]: n is a, t, c or g
catgactctggaattcgttcatgttcttttcctttggagaatggtttgtagcttagtaggacatgggaaatcagtttactgaaacccaccatggtcaaagtgaatgcttctttttttatcttggtcaaagcattctagttcttcctcctgtgaagctgggagaatccatcttttcattcctatctcagtgatctgaggaagcttggtcacagcatataacaagtgtctaaaccattgtccacaatctcgaaaatttgatggtcgaaggctaatatccagctcgattagctctttgaggaaccgcacgttttggcagaacatggtccacccngcatcacagatgctgtcattgtagctcaggtccagcttttgcagtttggccagatgacccgtctgtatgaccgatgctggaaaacagaatcactctaaatgctaacatacaagaatactgtctgccatggctattcccatttcccataacactatctccaggaatagtaatgacaagattagtaattagtaatgatttgttattagcagctttattcaggacatctgaaattagtaacagatttcctctctgtacatcccatctacagctttttttatttctttttccaaatctcaacccaataatttttttttgtcaagttcctgctct

SEQ ID NO: 1894 - DNA, 661 bp, Homo sapiens
  FLJ23259
  misc_feature [331]..[331]: Chromosome 3, SNP identification no. = rs9831336
  misc_feature [331]..[331]: allele = g, in linkage disequilibrium with rs12486767, respectively
  misc_feature [331]..[331]: n is a, t, c or g
attgtagctcaggtccagcttttgcagtttggccagatgacccgtctgtatgaccgatgctggaaaacagaatcactctaaatgctaacatacaagaatactgtctgccatggctattcccatttcccataacactatctccaggaatagtaatgacaagattagtaattagtaatgatttgttattagcagctttattcaggacatctgaaattagtaacagatttcctctctgtacatcccatctacagctttttttatttctttttccaaatctcaacccaataatttttttttgtcaagttcctgctctctgttccactgaagtccnagctcttcctacagattttctctaattaaatgtaaagagtgatggctcattggctttaactaaggaccatttgtaaataatcatcttgctgctttaattgttcattttcattcattcagtacttcttcatccagcaattatttaaatgagcattttccatatgcagaacatacctggataatttccaattcaccttagagaccccaatacatgtgacagttttccttttgaatagaacatatcagtactacctacaatggcacttaaaaatgatgactaatgtacaatctgagctatttgatcagaaaataaataagttaatgatgaaat

SEQ ID NO: 1895 - DNA, 661 bp, Homo sapiens
  FLJ23259
  misc_feature [331]..[331]: Chromosome 3, SNP identification no. = rs12492588
  misc_feature [331]..[331]: allele = t, in linkage disequilibrium with rs12486767, respectively
  misc_feature [331]..[331]: n is a, t, c or g
cctacagattttctctaattaaatgtaaagagtgatggctcattggctttaactaaggaccatttgtaaataatcatcttgctgctttaattgttcattttcattcattcagtacttcttcatccagcaattatttaaatgagcattttccatatgcagaacatacctggataatttccaattcaccttagagaccccaatacatgtgacagttttccttttgaatagaacatatcagtactacctacaatggcacttaaaaatgatgactaatgtacaatctgagctatttgatcagaaaataaataagttaatgatgaaataaagactnctgtaagaggaggcaggagagataaccacggaaaatgggacatgcttcccttttcaaccaaacccaggaatggattgcagagatcaggtgggttgtatagaatctcagcgttgcaagggatcttggaagtctccttatccaacctcctaatcaataatcagagagaaatccttttcacagcctctctactcatgaccaccacaattctggctgaactgttctttcaagtttgccccagcattatggagcagctcctagcgggaggaagccctcccacagggccccaatctatcttctggtgtctttcacccagtgccccaatcagtcagc

SEQ ID NO: 1896 - DNA, 661 bp, Homo sapiens
  FLJ23259
  misc_feature [331]..[331]: Chromosome 3, SNP identification no. = rs12489230
  misc_feature [331]..[331]: allele = g, in linkage disequilibrium with rs12486767, respectively
  misc_feature [331]..[331]: n is a, t, c or g
agtacttcttcatccagcaattatttaaatgagcattttccatatgcagaacatacctggataatttccaattcaccttagagaccccaatacatgtgacagttttccttttgaatagaacatatcagtactacctacaatggcacttaaaaatgatgactaatgtacaatctgagctatttgatcagaaaataaataagttaatgatgaaataaagacttctgtaagaggaggcaggagagataaccacggaaaatgggacatgcttcccttttcaaccaaacccaggaatggattgcagagatcaggtgggttgtatagaatctcagcnttgcaagggatcttggaagtctccttatccaacctcctaatcaataatcagagagaaatccttttcacagcctctctactcatgaccaccacaattctggctgaactgttctttcaagtttgccccagcattatggagcagctcctagcgggaggaagccctcccacagggccccaatctatcttctggtgtctttcacccagtgccccaatcagtcagctgtaacattcagctccttcttcctcctggcagccctgcagtgttggacaacagccaggtctcccttaaactttatccctgtaggactgaacatgccctggtctttcagtc

SEQ ID NO: 1897 - DNA, 661 bp, Homo sapiens
  FLJ23259
  misc_feature [331]..[331]: Chromosome 3, SNP identification no. = rs16854453
  misc_feature [331]..[331]: allele = g, in linkage disequilibrium with rs12486767, respectively
  misc_feature [331]..[331]: n is a, t, c or g
tgaccaccacaattctggctgaactgttctttcaagtttgccccagcattatggagcagctcctagcgggaggaagccctcccacagggccccaatctatcttctggtgtctttcacccagtgccccaatcagtcagctgtaacattcagctccttcttcctcctggcagccctgcagtgttggacaacagccaggtctcccttaaactttatccctgtaggactgaacatgccctggtctttcagtctttcctcacacgcatggctttcagatcaaggaggatgctccaactccatcactttcacttgccaacagtttgattccacagtnaatttgagagctcagccacccgtgcacacaacagctgcactctgtctctaggtgttcatgtcagtgtgtgtctcccttcctgtctcgcaacattaatcataatattctcaagacctaactgttaaaacaatgtgcacgctttttctcttttaaaaaatgttgtattatgaaaattttcaaacacaaaaagtagagagaataggagaaagtggaccaccatgtacccatcattcaacttcaacattatcttcattacatcaatcttgcctcatctagtcccctttcttctacttttttgttttttaaaaacacattttaggctgggtgtgg

SEQ ID NO: 1898 - DNA, 661 bp, Homo sapiens
  FLJ23259
  misc_feature [331]..[331]: Chromosome 3, SNP identification no. = rs6785618
  misc_feature [331]..[331]: allele = g, in linkage disequilibrium with rs12486767, respectively
  misc_feature [331]..[331]: n is a, t, c or g
atcccagcactttgggaggctgaggcaggcagatcacgaggtcaggagatcgagactatcctgaccaacatggtgaaaccccgtctgtattaaaaacacaaaaactagctgggagtggtggcacatgcctgtagtcccagctactcagcaggctgaggcaggagaatcgcttgaacccaggagtcggaagttgtggtgagccgagatcatgccactgcactccagcctggtgacagaatgagactccatctcaaaaaaaaaaaaaaaaaacaaaacaaaacctgtctctaatcatagatgatatgattatctatatagaaaatcctacagnatctaccaaaaatatcctacagctaacagatgagtttagcaagtttgcagtaaaatgtcaatatacaaaaatcaattatatatccacgtaacattgggaatctaaaattaaacagtatcttttataagagaacaaaaattaaacactcagatataaatttaacaaaatataaaaactagaaaacaccagtgaaagaaatcaaagagtacttaaatacagagatagactgtgttcatggattggaatactcaatattgttaagatgtcatttctccctgaattgatctataaattcaatgtaatcccaataaaatttccagatggattttt

SEQ ID NO: 1899 - DNA, 661 bp, Homo sapiens
  FLJ23259
  misc_feature [331]..[331]: Chromosome 3, SNP identification no. = rs11928433
  misc_feature [331]..[331]: allele = t, in linkage disequilibrium with rs12486767, respectively
  misc_feature [331]..[331]: n is a, t, c or g
ggatttttaaaatagatattgacaatctgatgctagctttaaatggaaatgctaagtaactagaataaccaaaacaattttgaaaaagaaacaaagaatacttatactacttcatttcaagacttactataaagtttcagcaatcaagacagcgtgatattggtaaaataagagacacagagatcaatagaacagaactgagagaccagaagtaggccatcacaaatatggccaattgatttttcacaaaaatataaaggcaaatcaatggagaatggatagtcttttcagttaatggcactcaaataattggacagtaatatgcaaaaanattaacctctacccatacctcataccttatataaaaattaactcaaaataggtaataggtcaaaatataaaatgcaaatacaaagctttaagacaaaaatatggaaaaaatctttgagaacttagatttgcaaaacgctctaagatgcaacacaaaaaaactctattcatcaaattaacaaattgataaatctttatcaaaactgaaagctttgatctgcaaaaaaacactatcaagagaatgaaaaagccagtgggacagacccagagaaaataatagcaaattatatttctgataaaggacttacttgtattcagaaaaatctaaaaa

SEQ ID NO: 1900 - DNA, 661 bp, Homo sapiens
  FLJ23259
  misc_feature [331]..[331]: Chromosome 3, SNP identification no. = rs10049456
  misc_feature [331]..[331]: allele = t, in linkage disequilibrium with rs12486767, respectively
  misc_feature [331]..[331]: n is a, t, c or g
acaattttgaaaaagaaacaaagaatacttatactacttcatttcaagacttactataaagtttcagcaatcaagacagcgtgatattggtaaaataagagacacagagatcaatagaacagaactgagagaccagaagtaggccatcacaaatatggccaattgatttttcacaaaaatataaaggcaaatcaatggagaatggatagtcttttcagttaatggcactcaaataattggacagtaatatgcaaaaatattaacctctacccatacctcataccttatataaaaattaactcaaaataggtaataggtcaaaatataaaangcaaatacaaagctttaagacaaaaatatggaaaaaatctttgagaacttagatttgcaaaacgctctaagatgcaacacaaaaaaactctattcatcaaattaacaaattgataaatctttatcaaaactgaaagctttgatctgcaaaaaaacactatcaagagaatgaaaaagccagtgggacagacccagagaaaataatagcaaattatatttctgataaaggacttacttgtattcagaaaaatctaaaaaactctccaaactcatcaataagaaaacaaacaatccaattttttaaatcaggcaaaagatttagaacagacat

SEQ ID NO: 1901 - DNA, 661 bp, Homo sapiens
  FLJ23259
  misc_feature [331]..[331]: Chromosome 3, SNP identification no. = rs13074500
  misc_feature [331]..[331]: allele = t, in linkage disequilibrium with rs12486767, respectively
  misc_feature [331]..[331]: n is a, t, c or g
gggattataggcgtgagccaccgtgcccagacacataaaatgattttagggaatatttgggtagcctcaatcccacagtgcaaaagttattccttattcaattatctttccatctttctagactgacatggaaaaagggtcagattgttactacagtatgcctttaaccctctcatctttttctaatagagaggagcctctaatcaaagccatcagcagtctagtatctgtgagaagtgatacctgtatttcagttacagtgataatcagtttcctgtttaaataaaagcatttaaattaaagagtcaatttaaaggaaaagttaagcaanagtgctggaaccatgtggatgggtgagatgtagatgactgaagtgggaacactcacggaccgcggaggtgtggaacagagctgtttgcctttcaggaacctccccacctatctatatccatatccttttaggaaatgccttccactgtcatgtggttttagaattgccttcgctcattttaattagacctctcggcagatgttggtgagaagggaatctgcacagagggcttcaccccaggtctggtacctcccccacctccccacctggtgctttgcaggggccgcacccactgctctgtttgccaagaccgcttgggaacaagtagat

SEQ ID NO: 1902 - DNA, 661 bp, Homo sapiens
  FLJ23259
  misc_feature [331]..[331]: Chromosome 3, SNP identification no. = rs9290375
  misc_feature [331]..[331]: allele = a, in linkage disequilibrium with rs12486767, respectively
  misc_feature [331]..[331]: n is a, t, c or g
ctctcggcagatgttggtgagaagggaatctgcacagagggcttcaccccaggtctggtacctcccccacctccccacctggtgctttgcaggggccgcacccactgctctgtttgccaagaccgcttgggaacaagtagatacacacccaggagagccacatcctctgtcaccagggaacagctgctcagcctcagcacttgaagagacatggaaagctttagtgtttccagaagcagcttcaagttgccaccaacacacttgttccaagaaaggttgaatacttccagagcagagaggtgaacagaggcttcagctaaaagtgataacnatacgaacagcagtaatttaggatttcttacagatcataggctttggatttgaggaaactggtctaggacaacacatgaatataactggggttgagaaagttgtagagaccattttcttctgccttaaatttatggcctcaatttatgttgtctgttttttgttttttgttttgagacagagccttgctctgtcaccaggctggagtgcagtggcgcgatcttggctcactgcaacctccgcctcccgggttcaagtgattcccctgcctcagcctctcgagcagctggggctacatgtgcgtgccaccacacccagctaattatttttg

SEQ ID NO: 1903 - DNA, 661 bp, Homo sapiens
  FLJ23259
  misc_feature [331]..[331]: Chromosome 3, SNP identification no. = rs11717389
  misc_feature [331]..[331]: allele = t, in linkage disequilibrium with rs12486767, respectively
  misc_feature [331]..[331]: n is a, t, c or g
ccacatcctctgtcaccagggaacagctgctcagcctcagcacttgaagagacatggaaagctttagtgtttccagaagcagcttcaagttgccaccaacacacttgttccaagaaaggttgaatacttccagagcagagaggtgaacagaggcttcagctaaaagtgataacaatacgaacagcagtaatttaggatttcttacagatcataggctttggatttgaggaaactggtctaggacaacacatgaatataactggggttgagaaagttgtagagaccattttcttctgccttaaatttatggcctcaatttatgttgtctgtnttttgttttttgttttgagacagagccttgctctgtcaccaggctggagtgcagtggcgcgatcttggctcactgcaacctccgcctcccgggttcaagtgattcccctgcctcagcctctcgagcagctggggctacatgtgcgtgccaccacacccagctaattatttttgtattttaatagagacgctgtttcaccatgttgcccaggatggtctcgatctcctgactcaggatccgccagccttggcctcccgaagtactgggattacaggcgtgaaccaccgcgcccagcctgttgtctgtttttatttggggaaatattggaaa

SEQ ID NO: 1904 - DNA, 661 bp, Homo sapiens
  FLJ23259
  misc_feature [331]..[331]: Chromosome 3, SNP identification no. = rs12485940
  misc_feature [331]..[331]: allele = a, in linkage disequilibrium with rs12486767, respectively
  misc_feature [331]..[331]: n is a, t, c or g
attaaccagaatatcttattcccaagttaattgcactttaatctattctgccttccttctagaaaataatgtgttcaaggggaaaatatatatccttttataatatctagtaagaaaatccttacagagatctacattaaggagaaatggaactttttcttctaaaagtgatgtagggaaatatatatttgcttcatttacttaattcaaattgaatggtagatttatgtcagatgatataatttagtgtgatacctagttgatcatgattcattgattgtgcagctagaattagaaacagctgtgccttctaatggctgcaattcctttnaaaaaaaaatattttcccagaatgggcaacatggtaaaactctatctctaccaaaaatacaaaaattggccaggtgtggtggcatgttcctatagacccagaagctactgaggaggctgagatggcataatcacttgatcccaggagttcaaggctacagtgagccatgatagtgccactgcactccagcctgggcagcagagcaagaccctcccaaagtactgggattacaggtgtgagccactgtgcctgacccaagtccacggttctctactgggggttagtcatctagctaccctccgctcagcatacaccaaaattccatcctca

SEQ ID NO: 1905 - DNA, 661 bp, Homo sapiens
  FLJ23259
  misc_feature [331]..[331]: Chromosome 3, SNP identification no. = rs16847897
  misc_feature [331]..[331]: allele = g, in linkage disequilibrium with rs12486767, respectively
  misc_feature [331]..[331]: n is a, t, c or g
cgtgattggagttgctggatttgggtgcttcctggataatgctaaaaacagagtccttctctccaaccctctcaccagtgttttttatcagttggcacttccttaaaaatgaattgtactgtccaccagacaagggctattattaatgaaataaatgcattaaattcataaaaatgagtaattattattatacattaataaaaataaatgcatattatttacccccaaatttgaagaactctatatttagggcattcttgccctccttttcggcctgagtatttggctcagcctgagtattttgctcagctcgagtattttgctcagctcncatagacttggtcctcaccatgtcctgctcccagcactccctcagcatcattcatcccattgtccacatgtctggatggggaaaagtcccaggatacgtagccttcagccctgctgttctagggcccatggacccaccagacaagtctaggtatgcttgaaggggtgcctgtgagctccctaaaactgattacagttattctgtggggaagagtatggtacattttctgtatgcaaaacatctggaattagacttcctgaaatcaaatcctgcctctggctcttatgaccttgggttacctcatgtacttaacatctctgtgcttcagtt

SEQ ID NO: 1906 - DNA, 661 bp, Homo sapiens
  FLJ23259
  misc_feature [331]..[331]: Chromosome 3, SNP identification no. = rs4955676
  misc_feature [331]..[331]: allele = a, in linkage disequilibrium with rs12486767, respectively
  misc_feature [331]..[331]: n is a, t, c or g
catcattcatcccattgtccacatgtctggatggggaaaagtcccaggatacgtagccttcagccctgctgttctagggcccatggacccaccagacaagtctaggtatgcttgaaggggtgcctgtgagctccctaaaactgattacagttattctgtggggaagagtatggtacattttctgtatgcaaaacatctggaattagacttcctgaaatcaaatcctgcctctggctcttatgaccttgggttacctcatgtacttaacatctctgtgcttcagtttccttgtctgcaaaatataaaatggaacaatggcacatgccttatncagttataagagttaaattggtgaatgcatgtaaagttcttggaaaggggcctggcacataggatatgctcaataaatgtcagttgttaagttctgcccacttggtgacaagtgcagtgtcagcaagtaagaggagatattttgaaacaaagagacttggtagcacttttccaaatccatcacccagggaaacagtagtttgtgcacacagtgctggggtccccaacaccacctccctttacttgctgacactaaacttgtcaccaaatgggcagaactttcagattcagtaggttcctgatgtaggctggggtatatctgtgaccttaa

SEQ ID NO: 1907 - DNA, 661 bp, Homo sapiens
  FLJ23259
  misc_feature [331]..[331]: Chromosome 3, SNP identification no. = rs4955677
  misc_feature [331]..[331]: allele = t, in linkage disequilibrium with rs12486767, respectively
  misc_feature [331]..[331]: n is a, t, c or g
ccacatgtctggatggggaaaagtcccaggatacgtagccttcagccctgctgttctagggcccatggacccaccagacaagtctaggtatgcttgaaggggtgcctgtgagctccctaaaactgattacagttattctgtggggaagagtatggtacattttctgtatgcaaaacatctggaattagacttcctgaaatcaaatcctgcctctggctcttatgaccttgggttacctcatgtacttaacatctctgtgcttcagtttccttgtctgcaaaatataaaatggaacaatggcacatgccttatacagttataagagttaaantggtgaatgcatgtaaagttcttggaaaggggcctggcacataggatatgctcaataaatgtcagttgttaagttctgcccacttggtgacaagtgcagtgtcagcaagtaagaggagatattttgaaacaaagagacttggtagcacttttccaaatccatcacccagggaaacagtagtttgtgcacacagtgctggggtccccaacaccacctccctttacttgctgacactaaacttgtcaccaaatgggcagaactttcagattcagtaggttcctgatgtaggctggggtatatctgtgaccttaaggcatacccagattcctc

SEQ ID NO: 1908 - DNA, 661 bp, Homo sapiens
  FLJ23259
  misc_feature [331]..[331]: Chromosome 3, SNP identification no. = rs6764267
  misc_feature [331]..[331]: allele = c, in linkage disequilibrium with rs12486767, respectively
  misc_feature [331]..[331]: n is a, t, c or g
tttctgtatgcaaaacatctggaattagacttcctgaaatcaaatcctgcctctggctcttatgaccttgggttacctcatgtacttaacatctctgtgcttcagtttccttgtctgcaaaatataaaatggaacaatggcacatgccttatacagttataagagttaaattggtgaatgcatgtaaagttcttggaaaggggcctggcacataggatatgctcaataaatgtcagttgttaagttctgcccacttggtgacaagtgcagtgtcagcaagtaagaggagatattttgaaacaaagagacttggtagcacttttccaaatcnatcacccagggaaacagtagtttgtgcacacagtgctggggtccccaacaccacctccctttacttgctgacactaaacttgtcaccaaatgggcagaactttcagattcagtaggttcctgatgtaggctggggtatatctgtgaccttaaggcatacccagattcctcagacagcacataaatcctgttgggagtgattgcttggcagttagctaggctcacactctagtaaatggctcactttcccatcagatcccagatcctcaccatgtcctgcaggtgggcatgatccaccaggagggtggatcacttgaagtcaggagtttga

SEQ ID NO: 1909 - DNA, 661 bp, Homo sapiens
  FLJ23259
  misc_feature [331]..[331]: Chromosome 3, SNP identification no. = rs11709840
  misc_feature [331]..[331]: allele = a, in linkage disequilibrium with rs12486767, respectively
  misc_feature [331]..[331]: n is a, t, c or g
cacagtggctcactgcctgtaatcccagcactttgggaggctgaggcgggtggatcacgaggtcaggagatcgagaccatcctggctaacacggtgaaactccgtctctactaaaaaaaaaaaaaaaaaaattagccgggcgcagtggcgggcgcctgtagttccagctactcgggaggctgagacaggagaatggcgtgaacccgggaggcggagcttgcagtgagccgagattgcgccactgcactccagcccgggcgacagagtgagactccgtctcaaaaaaaaaaaaaaaaaaaaaaaaaaaaactcttagccttctctatttcangtggtcattgggaaggtaaaatgacttggtaaaggtaaagtgcttggtatagtgcctggcacatactaactgctcaattaatgtttgaaattataattcttttctcagaatgtaagtaccagtaaggcaatgaaaacaagccatcagaacagacacctattggtaacggcactgggtcctgaggggcccagctaggaattaccctcgttcgctatcttttggctacttctctggcctttgccccaactattaccaaggcagaaaatgcagtatgctggatctctacaaagctggcttacctccttgaagccttccagggtcacccacacc

SEQ ID NO: 1910 - DNA, 661 bp, Homo sapiens
  FLJ23259
  misc_feature [331]..[331]: Chromosome 3, SNP identification no. = rs11919269
  misc_feature [331]..[331]: allele = t, in linkage disequilibrium with rs12486767, respectively
  misc_feature [331]..[331]: n is a, t, c or g
acactcttttgtgataatccacatgaatgtaacttcagtactttcagatttgaggtgctttttaatccctgagcaatactgttcagactgccaacaatgtctctgttaatggaaagatcaagtacttcgagactttgcagcataggtagcagttgacctagaaggaaagaaatccaaataagaagggtaggtaggaggggagtggagttttacatcacctggggatatcgtgacgtaaaactccactcccctcctacatacccttctttaaattcagaataagacaaaacacagcaaacttcccaagctatccagtgggcatcttcacttnttttttttctcttcaaattccacttacccagaaatgtcccatcttctgacgtgagggagcaatccacaagctcaatcatttgtatcttgctccctttttggaacttctgaaggatcagaggcaaatttcctcccactttactgttccaagacaaatttagctcttcaagttcaggaatcatctcaaatgcttctcctgttaacaaatggcccgaaaattctgttggtcactagtcagaaaagcagggaattcatttcagaatcagcacaaccatgattaatggagtgtggaaactgggccaggtactgtcctgtttggcaccgaggaaca

SEQ ID NO: 1911 - DNA, 661 bp, Homo sapiens
  FLJ23259
  misc_feature [331]..[331]: Chromosome 3, SNP identification no. = rs1920116
  misc_feature [331]..[331]: allele = g, in linkage disequilibrium with rs12486767, respectively
  misc_feature [331]..[331]: n is a, t, c or g
taggattacaggtgtgaggcaccgtgcccagccactagcatgttattacagtgttattacagaggaagctagtgagggtgccacagtagtccctaataacaaggaggacagacgaggctttccaaattcactttctggcaggagttgagaaaaagcaaaagctctcccaggcctagtttctctggatttgtgtttgccaattgaatggtctagaaactgaccggcaagaattccacttactccgtgtggccatttgcagctccttgatggtgatttcaacgctttcccttcttcacctgtttggtttgaggaggcaagtatctctgcttcntccctagcagttgcatccaccaaagatatgcgtgcccttcaagtaagcaagcatctcaaaagccgggctgacaggtttacttctcacccaggaatgcagctctgtcttcatgctgagaagcccaggtcaggtcatgatagaaaagccactgcgttcctcaggctcctgaagcagtgtctgggcacctggcggcaggaacagtggttagttaagctttgtccctagtaaatggctctgcctctgagttgaggtttttataaaagagcaattcagagttatgcagtcttttcacttgtctgattgtggtcattatgcatctttaatacatcc

SEQ ID NO: 1912 - DNA, 661 bp, Homo sapiens
  FLJ23259
  misc_feature [331]..[331]: Chromosome 3, SNP identification no. = rs7647589
  misc_feature [331]..[331]: allele = a, in linkage disequilibrium with rs12486767, respectively
  misc_feature [331]..[331]: n is a, t, c or g
cgacctacaatcatcctcaagttccagccccaccaaacccactcttctgttttctcctcaagacactgctctgtcaagcatttcctttactgtcaaatgtttggaaagagtggtttccacttgctggcccaactccttccccacatttacaagctaaccctctaccttctggttgctacactcctctatccaaatacattgtttctcaaaggtcaccaacaataacctacaaactgacagacgcagaaatctcttctcagtccacatcccactgggtgctctgtcatgtttgatgtgactgacaagtaagcagtacagtcaaaagacctgntccaaatcacaggtctgtctgaggaacaagtcactcaacctctctgagccttggtttactcatctatgaaatgcctggttcatttctcaagagcatcgtgatttaaacttactggaacctcctatgcacatggtaatctgcagggccttttacctgagaggtatttggtaaatatttgttaaatgagcaaacaattgaatgaatgaatattggttttacagttcctcaattaccaaaataaatcatcatgataaatctttatcaaaacacttaaatataaatgtgagtactaacttatgagacccctggacatctcctcacagatcatgt

SEQ ID NO: 1913 - DNA, 661 bp, Homo sapiens
  misc_feature [331]..[331]: Chromosome 3, SNP identification no. = rs7652654
  misc_feature [331]..[331]: allele = a, in linkage disequilibrium with rs12486767, respectively
  misc_feature [331]..[331]: n is a, t, c or g
agatctgcagagaccaccaaatgaccaaatgacctgcctgcagggaggaactaccctctccaagggcctcctctctgctgagcactgaacactgagggtatgacctgcctgcctacagaggggagctacccactgtgggtctcctctgagctgttctaacactaaataaagctcctcttcatcttcttcaccatccacttgtctgtgtacctcattcttcctggacacaggacaagaactcaggcaaaggtgctaccagccacagggttttcaggaagaaaatagacacccaaagatccagtaacaatattattcaggcacaaaaatatantgaagtattgatacataactgaatatgaataaatcttgaaaatatgctaagtgaaagaagtcaaacataaaaggccacatatattattccgtttatattaaatagccagaataaaacaaagtagattaatagttgtacattgggtgaggagatagggatattataactaaaggatatagagtttcatttccacatttctacagaaatgtggaattgtcctaaaattgattgtggtgatgattgcacaactgtgaatatatttaaagtcattgaattgtacacattaaatgagtgaacttacacatttttggtatattttgtggttaagct

SEQ ID NO: 1914 - DNA, 661 bp, Homo sapiens
  misc_feature [331]..[331]: Chromosome 3, SNP identification no. = rs7653134
  misc_feature [331]..[331]: allele = a, in linkage disequilibrium with rs12486767, respectively
  misc_feature [331]..[331]: n is a, t, c or g
agggatattataactaaaggatatagagtttcatttccacatttctacagaaatgtggaattgtcctaaaattgattgtggtgatgattgcacaactgtgaatatatttaaagtcattgaattgtacacattaaatgagtgaacttacacatttttggtatattttgtggttaagctgtgaacaacttttacattgccataatagtataaacactatatgttaaaactcaggaataaccatattggaatgccgaggaaaggggaaatttgcaaacatgtaacagaaataaatcctcatttgtcctacaaagaggacaataggtaatacctnaaaatgaaataacagtataagcatgttatttggaaatgcagaggtacacagcacacaaaaggtaaaagggatgcatttcctgaacaaaactcttacttattatatttagagttttctgaatctgacagaaacaatttaaattaattttttttcttattaagtcttttgggaaagagagatgagaaatcacagtgacaatctcaaagaactaaaagctgttctggctttttacaaccttctggagaaaaatgaaaatatagaaaatatatactagtgatgtcatttacaacttaagtaaaggataacaggcattttgtgaactaacaattt

SEQ ID NO: 1915 - DNA, 661 bp, Homo sapiens
  misc_feature [331]..[331]: Chromosome 3, SNP identification no. = rs7614694
  misc_feature [331]..[331]: allele = t, in linkage disequilibrium with rs12486767, respectively
  misc_feature [331]..[331]: n is a, t, c or g
cttaaaccggggaggcatgaacctgggaagcagaggttacagtgagccaagattgcgccactgcactccaccctggcgacagagcaagactccgtctcaaaaaaaaaaaaaagaaaaaaaagttttaaaatgcattttgaatttaagctgcctggttacattatgacctggggaaagcctgaggtcagaactgacatgacctgagaaagacaaagggaagggaaggccactgttgggtgaagtgctgtgctctcagcatttctcccctgctgctctatggcatcctccacccagctgttgatggtaggtgccctcgctccactatctgtgntgtgctctttttcctccctgatcttctcccaggctctccctggagaagcccaggctcaggagggccatccagcctccaaaacccgagtcctaccacccccaagccagctcacctcccacatccccatagactttgactatgtaactggctgtgtggagctttctcacctctgaaattcttgtattgcctgacctgtatttaaaaatacatagccatgaatttaagtaataagtaatttaaggtattaacatcttgcttcctcagctgggcagttagttccttaaggacaacagccatgagttgtatttctttgcacctattaatacccgg

SEQ ID NO: 1916 - DNA, 661 bp, Homo sapiens
  misc_feature [331]..[331]: Chromosome 3, SNP identification no. = rs7650849
  misc_feature [331]..[331]: allele = c, in linkage disequilibrium with rs12486767, respectively
  misc_feature [331]..[331]: n is a, t, c or g
cagtttcttgggtaggaggctgcgataaacattactattacacaccagtacctgccattctactcctctccctggattacctttttgaatttaggtggccttgtgacttgctttggccatcaaaatgttcgtgtaattgagatgcgacactcccaggcagaagcatttaacagccagtgctcaatttttccagccgtcttcccttgctgcagcaatcatgggagccaatgtccagtgagagatgcagcaaagtcggagcagggagacggagtgcattcactccaagtatacttactgagcaccaagtatgtacttactgagcaccaaccangtacttagcaccaaccacgtacgaagcattgttaggcactgggaatctcctagtgcgcaaggcaaggtctctgccctcatggacgttcctgtctggcaggggagacatctatttttaacttatttttaacttagatataagtcattatttaattctggccgtgactcatgttatgaagaaagtagaacttgtccagagagcatagaatacaggcatcctgaggtctgagattcaatgggagggttgatttaagaacaaataggaggggccagttaaagaatattccaggctgaggttctgtgtcagggaggggtacagtgaatctgaaaa

SEQ ID NO: 1917 - DNA, 661 bp, Homo sapiens
  FLJ12748
  misc_feature [331]..[331]: Chromosome 3, SNP identification no. = rs9844162
  misc_feature [331]..[331]: allele = t, in linkage disequilibrium with rs7644746, respectively
  misc_feature [331]..[331]: n is a, t, c or g
ggaggttgaggctgcagtgaactgagatcatgtccctgcactccagcctgggcaacagcagcaacaacaacaaaacaaacaacaacaaaaaaaccccccaaaaacccaactgtatcaaggcattatttccaaaccatacaattcatccattaaaaacatacagctggatgacttttgacaaatgtaaccacttgggtaccaccaccattatcaagacacaaagaacattccatgtccccaggaggaggctccctcataggtcggcactttgtaaggaactcgctgggggacagtggttgcagggtgggtcttgcattcactgacacgtccncaagctgagccgccaaagctggagtgggcaacactgagccgcagcgctcaggccctagactagccagctggaggggcctgaatagcggagagtctggaaggccaggggtcctgagcgtgcagcgcattccagcggctgaagttctaggcaccagagcagggcaaggggtggagcttgcagggagacagcttcagctccgggaaggaagcgctttctgtcagttacaacagtctgcccatggagcgagctgacttgcatggcgctgggctcctctttactagggatgttctagcagaggcttagcttttatttatttgaagcaaggtcttg

SEQ ID NO: 1918 - DNA, 661 bp, Homo sapiens
  PSARL
  misc_feature [331]..[331]: Chromosome 3, SNP identification no. = rs262998
  misc_feature [331]..[331]: allele = c, in linkage disequilibrium with rs7644746, respectively
  misc_feature [331]..[331]: n is a, t, c or g
ggttcttgcccttaagttagaaatgtcagtgctggagcaatcacagttgtgccgcttgtttcttgctgcctttcaggccctgaaagccattatcgccatggatacagcaggaatgatcctgggatggaaattttttgatcatgcggcacatcttgggggagctctttttggaatgtaagtttgagtgtaattgattgctaaactgcttccttgggtcatgcgctcctcctaccccagcctcacccctaccccccatccccatggcagagacattgaactatgcaacggaagcagaagcaggtgggcttgggagggtgaggaaacctcaacntggcttgctttgggtttacccagcatacctggctcattgtagagacagtctgtgcctttaccctacgcttaaccttaagttgccccaactgttggcctgttattcccagccccctcttagaagactgcagcctggcccccagtctatgctgacatcttctttttccccttcagactttcctgccctcctctcccctgcctggcgtcccaccctgctaccctgacctctgtctcgccagtgctatttagacatgctgagttggcggagccattgctctgtatgactggagtagaggccggtgactgcaaaccaatgtggaccacttactga

SEQ ID NO: 1919 - DNA, 661 bp, Homo sapiens
  PSARL
  misc_feature [331]..[331]: Chromosome 3, SNP identification no. = rs9866941
  misc_feature [331]..[331]: allele = t, in linkage disequilibrium with rs7644746, respectively
  misc_feature [331]..[331]: n is a, t, c or g
gtttcgaactcctggcctcaagtgatccacccacctcggcctcccaaagtgctgggattacagttgtgagccactgcgcctgggctcacaaacatttttctgtatctatataatcttcaaatctatcatacttatgttttttaactttatttggtattataatttaagtgaatctgctccctctgcttacaaaagctaagtacagctaaagaccctgggtgttacatatgaaacaaatgtaagaggactgtgaaaggaagagagaggaaagcggaccagctaggaagcctgagattcaatcaatgttgtggtggtgagttccctgggcttncttttggcctcatatcgatcatccctcaacatgttctctctagtcaaggaccaaaaaaagatagcctagcaaaagagaccttttagacaatatttagagaaacgggtgcccagcaaaggctgagcagagcctagactcccacccttgccacactgtaatgaggcatcccaatacgcctaacaggcggtgtcagcggaaagaagcacccttgctcctcctagccacagcgacattagcagaggcacactaggtagcctgcacgccctcagctcccatccctgccctgcagtgacaagagcccctatcactcaggaggcaaaggcggctgag

SEQ ID NO: 1920 - DNA, 661 bp, Homo sapiens
  PSARL
  misc_feature [331]..[331]: Chromosome 3, SNP identification no. = rs3732581
  misc_feature [331]..[331]: allele = c, in linkage disequilibrium with rs7644746, respectively
  misc_feature [331]..[331]: n is a, t, c or g
ctcacagtgatccagattgaaacccgacactgtttatctgtgtagaaatcagaaatgaaaaccattttcatggctggatgtggtgccgcacgcctgtaatcccagctactcaggaggctgggggacaagaataacttgaacccggtaggcacaggttgcagtgagccaaaattgtaccactgcacttcagcagccggggcgaaagagtgaaactctgtctcaaaaaaaaaaaaaagaaaagaaaaaaaaaagtaaaccatttttatacctcacttaaattattgtaatgtgacttgtttttcaggtgttatttccaattttgtcagttacntgggtaaagttgccacaggaagatatggaccatcacttggtgcagtaagtatttctattgtaaattttttttaatttaatttttaaatttactttgaaataagtttagacttagaagaatgttgtaaaattgataagaggttctcatatacccttcaccctactgttaactaacatcgaaaccaagaaattaacattgaaacaatacagttgactaatttagaatttatacatttgtaaagctttgtaaatgtccggctatagcttttaaccattggtcatatatatatgtttaccagagcagagtatatctcagaacagtaagtgtgca

SEQ ID NO: 1921 - DNA, 661 bp, Homo sapiens
  PSARL
  misc_feature [331]..[331]: Chromosome 3, SNP identification no. = rs3811725
  misc_feature [331]..[331]: allele = a, in linkage disequilibrium with rs7644746, respectively
  misc_feature [331]..[331]: n is a, t, c or g
ttttctcagacatgttgaccttcacctacacagatgactcacatatgtttccataagctggcagtaagtttaagaagcataccatgccctgaggaaaaagaagtaatgttagctcttctactcttggccaaagaacctaattctgtatattacttctgtctttggtttggctattatagacaataaattattgatctgattataattgagaaaagtaagctcttctaaagaagtaaaatatggatctagggaaaggaagttagctcccagagcatttacaatttcccaggaattctgtgactttaccaaccctaggcagtgctgatacttnaaaagcattcatttcacttgcttttttttggctcaccccctatcccccaggtatacagtactcttacataattgtggaagaatcttacaagggggtaatgtagatcagactttcctgctttcatttttaacctccctaaattataaatatttattttgtaggtattatagctgcaaatgtccttgtattctgtttatggagagtaccttctctgcagcggacaatgatcagatatttcacatcgaatccagcctcaagtaagtctaacttgtgtgaatttattttaaggtagaaataatatgaaagaaatatgctttagttaatggaagt

SEQ ID NO: 1922 - DNA, 661 bp, Homo sapiens
  PSARL
  misc_feature [331]..[331]: Chromosome 3, SNP identification no. = rs3811724
  misc_feature [331]..[331]: allele = t, in linkage disequilibrium with rs7644746, respectively
  misc_feature [331]..[331]: n is a, t, c or g
acctgctatgtgaaggagttgtggcaattcataaaattaatatattttttgaagtttgtagttttcaataataatttcttatctaaaatgtaacaagttaattatattatcgaataaacctcaatttcgtagtactaacaacatcaacacttacagaaaaaggaaagtcactcaactcccacatgtaaacagactttagaagcagttgcagaggttttctaaattatccctgaattcctatcacatgactatttttctcagacatgttgaccttcacctacacagatgactcacatatgtttccataagctggcagtaagtttaagaagcntaccatgccctgaggaaaaagaagtaatgttagctcttctactcttggccaaagaacctaattctgtatattacttctgtctttggtttggctattatagacaataaattattgatctgattataattgagaaaagtaagctcttctaaagaagtaaaatatggatctagggaaaggaagttagctcccagagcatttacaatttcccaggaattctgtgactttaccaaccctaggcagtgctgatactttaaaagcattcatttcacttgcttttttttggctcaccccctatcccccaggtatacagtactcttacataattgtgga

SEQ ID NO: 1923 - DNA, 661 bp, Homo sapiens
  PSARL
  misc_feature [331]..[331]: Chromosome 3, SNP identification no. = rs9844777
  misc_feature [331]..[331]: allele = a, in linkage disequilibrium with rs7644746, respectively
  misc_feature [331]..[331]: n is a, t, c or g
aaatcttgaggaaaagcaggggaataagatttccatagaaactctgaaaacctctaacatattcctggactctacaaggccacatgcatagtaagacaaaatagaccttaagacaaaattcattgctagagaaaaaggaggatattatataatgatgaaaaggtcaatccatcaagaaatagcaattagaaacatatgtacctaacaaaagaatctcaaaaatgaagaaaaatggacagaactaaaggaataaataacaataatagctggagacttcagaactctatttataataatggagagaataattaaatgatcagcaaggaagcanaagacttcagcagctctataaaacgactagacctaacagacatctatagaacacaccacccaacaaaaacagaatatacattcttctcaagtgcacatgcagcacattccaggatatgttcagtcacaaaacaactctcaataaacttaaactaaaacactaaaattatacaaactatgtcctctgatcacttggaatgaaattacaaatcaatacagaaataaattcagaaaattcaccagtatatggaaattaacaaactcctaaataaccaacggttcaaagaagaaatcacgagggcaactaggaaactcagatgaatgaaaacaa

SEQ ID NO: 1924 - DNA, 661 bp, Homo sapiens
  PSARL
  misc_feature [331]..[331]: Chromosome 3, SNP identification no. = rs6808482
  misc_feature [331]..[331]: allele = g, in linkage disequilibrium with rs7644746, respectively
  misc_feature [331]..[331]: n is a, t, c or g
tgttcagtcacaaaacaactctcaataaacttaaactaaaacactaaaattatacaaactatgtcctctgatcacttggaatgaaattacaaatcaatacagaaataaattcagaaaattcaccagtatatggaaattaacaaactcctaaataaccaacggttcaaagaagaaatcacgagggcaactaggaaactcagatgaatgaaaacaaaaatacaatataccaaaatttataggaggcaacaaaagtggtgctatgaatgcccacattaaaaaaagagatctcaattcaataatctaacttttcaccttaagaaagtgtagagangagcaaactaaaaccaaaggaagcagaaggaaagaatgaagaacatacgtaaatgaatagaaaaataacagaaaaattaataaatccaaaagttggatttgtttgaaatgatcaataaaattgacaaacttttagctacagtgacaaagaaaaaaagactcaaattacaaaagtcatctcatacaggtctgagatttgctaaaaaagaaaaataaaaataaaaacaaattactaaaatcaggaatgaaagcagaatgttactacgaaccttatagaaatcagaattactacaaaatacaatgaacaattatataccaacaaatgagaata

SEQ ID NO: 1925 - DNA, 661 bp, Homo sapiens
  PSARL
  misc_feature [331]..[331]: Chromosome 3, SNP identification no. = rs7640729
  misc_feature [331]..[331]: allele = c, in linkage disequilibrium with rs7644746, respectively
  misc_feature [331]..[331]: n is a, t, c or g
actaatcaaatctgcaaagaccctatttcaagtaaagtaacattctgtggttctacgtggacacaaattttggggaagcacactattcaacttactacaactgggaaattctaccaaatataaaagagaattaacaccaatccttctcaaactctttcaaaaaatagaagaggaaggaacattctatgtagccactatcacctccgtatcaaaaccaaagacatcacaaaaaactatcaatattcctttatgaaaagagatgcaaaaatcctcaagaaaatattggcaaaccaaatccagccatatataaaaaggattataaatcatgacnaagtggaatttgtcacaggaatgccagcttggttcaacatatgaaaaatcaatgtaatatttcatattaacagttggaagactcacaattcatagtttcagaatttacaacacaaacctacaggaataaagacaatgtagtattagaataaggtcagatatatagatcaatggacagaattgacagtccagaaatacacccatacgattacggtcacctgatttttgactaaggttccaaaacaattcactaggggaaagaatagtcttgtcaaaaaatggtgctcagacaagtggatagccataagcacagaatgagtttggaccccta

SEQ ID NO: 1926 - DNA, 661 bp, Homo sapiens
  PSARL
  misc_feature [331]..[331]: Chromosome 3, SNP identification no. = rs6443911
  misc_feature [331]..[331]: allele = c, in linkage disequilibrium with rs7644746, respectively
  misc_feature [331]..[331]: n is a, t, c or g
tttctccgaagaagaataaatatacaataagacatgaaaagatgttcattagtcattaaggaaaggcaaatcaaaaccacagtgatacaccccttcacactcaccaggatggatataataaaggcaacaaaatgggagaaaatgtgcaaatcatatccaataagggattaatatccagaatatataaaaaaaaactcaacaacccaatgtaaaaatgggaaaggaagtaaatagacagttctccagagaagaaacacaaatactcaataagcacatgaaaagatgctcaccattactagtcactagcaaaatggaaatcaaaactataccnattacgatggctattatcacatttaaaaaaaaggaaaataggccaggcatggtggctcacacctgtaatcccagcactttgggaggccggggcaagaggattatttgagcccaggagttcgaaagcagcctgggcaacttggcaagacctcatctctacagaaaattaaaaaattagccaggtgtggtggcgcgtgcctatggtcccagctactcaagaggctgtggaaggagggttgtttgagaccaggttgaggttgtagtgagccatgttcatacaactgcactccagcctgagtgacagagcgagactctgtctcaaaaaaattaa

SEQ ID NO: 1927 - DNA, 661 bp, Homo sapiens
  PSARL
  misc_feature [331]..[331]: Chromosome 3, SNP identification no. = rs13317769
  misc_feature [331]..[331]: allele = c, in linkage disequilibrium with rs7644746, respectively
  misc_feature [331]..[331]: n is a, t, c or g
ctgtctcaaaaaaacaaacgaaaaagaatgcttataactcaacaacaaaaaaaaatcaaataactcgagtacttgaaatacatttttccagagatgataaaacaaatggccaacgagcacgtgaaaagatgctcaacatcactaatcaccagaaaaagcaaatcaaaaccacagtgaggtattatctcacactcatcaagatggctactgtcaaacacctacacactcacacaaagagaaaataacaaatgttggcaagaatgtgagaaattggaagacttgagcgctgttggcgagaatgtaaaatggtacaaccgccatggaaaacagngtgagaattcctcaaaaaattaaaaatacaataaccatgtgatccaccaatcctgtaactggatatacatccaaaagaattggccaggtgtggtggctcatgcctgtaatcccagcactttgggaggccgaggcaagtggatcacctgaggtcaggagtttgagaccagcctgaccaatatggtgaaaccctgtctctaccaaaaaaaaaaatacaaaaattagccgggcatggtggtgtacacctgtagtcccagccactcggtaggctgagacagaattgcctgaacctgggaggtagagcttgcagtgagctgagatcacgccactg

SEQ ID NO: 1928 - DNA, 661 bp, Homo sapiens
  PSARL
  misc_feature [331]..[331]: Chromosome 3, SNP identification no. = rs6775202
  misc_feature [331]..[331]: allele = c, in linkage disequilibrium with rs7644746, respectively
  misc_feature [331]..[331]: n is a, t, c or g
ttcttgcgatctctctccctatccttttctgtccttgctccttcttgatcaaaaataataatttagctgattttttcctgtggctttacctgaatctcaatacagtaaagtcagcattctcttgaactaacaggaaaacctggcaagtgcctcaaagacaaccctgaaagctagaaagggaggagaaaatattctctctgggggttgcctggggacctctaggagaggcttaaaaggctgacagatcagggcaatagaacagaaaattaggtgaaatataaaagcaccagggatgacaaatttaagtttgaagaatgccacgttatactcnccgcttgccccacaaatacctagtgggcttataaacactttttcagagcaatatgaagcctggggagattatttctgtgtaataaaaattaagaccaaaaaaaaaatccccaaacaaaccaaaaaaaaaggattaaaacaagtttcctagcatagctttaaaaagggatttgcacagacagattgagacagaacagtcaaaaactacagactcgccgggcgcggtggctcacgcctgtaatcccagcactttgggaggccgaggcggtggatcacgaggtcagaagatctagaccatcctggctaacgcggtgaaaccccgtctctacta

SEQ ID NO: 1929 - DNA, 661 bp, Homo sapiens
  PSARL
  misc_feature [331]..[331]: Chromosome 3, SNP identification no. = rs6809370
  misc_feature [331]..[331]: allele = g, in linkage disequilibrium with rs7644746, respectively
  misc_feature [331]..[331]: n is a, t, c or g
agaaactatgtatatttggattaacactttactgtctgaacttaccgtatccaaaatctttccatccaaattcaagagctcaacagattcaatggcaaggaatacttacatgaagtgtttggtgtagcagtgagaaatctttaaccgactagagctttcatgctgccattgtctaggtatgaatactacaaagcagagaggcacactggtctcacaaagctttaaaaactctctaggtcaaacttgtcaagttctttcaaaatataaaacgaaaaaaaaaaaaacccattcggaaaacatctccaatccaaagaaagaaagtgggacggantagacctgtcaccccataaatctatcactgattaaaaccagaagctgagccaacttcactttgcagtctacaagaagcaatcaggagtgctcagcaaggaaagctggactaattggcaccccaggaagaagacaagacatactaaataaacagtttattcttgagactctcatatataggtaattgattaagcaccacttacagacattgtaaagctagaatcactattactagaataattatttcctacaagaaaagtctgaggtgacacaagacagttcaaatggcatttcctgaggttaaagtcacttggataatctaacaataaag

SEQ ID NO: 1930 - DNA, 661 bp, Homo sapiens
  PSARL
  misc_feature [331]..[331]: Chromosome 3, SNP identification no. = rs1554397
  misc_feature [331]..[331]: allele = a, in linkage disequilibrium with rs7644746, respectively
  misc_feature [331]..[331]: n is a, t, c or g
atccctgaaaaattaggaccctcctctttttattaaactccagtaccattactatatctttaaaaaagtgcaatttagtagacaatattctcagaattttaaaacataagaccttggtatgaataatcacttccttggtacctgtctgtatctgtgagtgtgctaggggctttacattattgttattccttgtgataacactgctgggtacctattattgtcccatttcatgtgtcaagaaactgaagtttagaaataattgtctgaggttccagagctatccagtggttggttctgtgtggagaatgtgggctgcctgactataaaacangtgccttttccactctaccacgtatttattatgtctgtgaccaccagtgatttttgcagaagaggaattcctcttatgtgcgaggcattttcttctggtttttcatttttgtagcctgaaatttctcacatgtggtgatgcaattttctgtctgttttagattaacaagtggtggaataacctaagtgatggccagcggactgtgacaggtttgtgttagcttacacgttttaaccattcaagggaagagaaatcaaaccaaaaggtacagtatgtcacaagcaatggctcttgtaccatgctcaccagtggtttagaagacagtctctg

SEQ ID NO: 1931 - DNA, 661 bp, Homo sapiens
  PSARL
  misc_feature [331]..[331]: Chromosome 3, SNP identification no. = rs7648408
  misc_feature [331]..[331]: allele = a, in linkage disequilibrium with rs7644746, respectively
  misc_feature [331]..[331]: n is a, t, c or g
tgtctctataacacacaagtacaacttgaagcagcaagtgtggatgtagaaactgcagcaacttatcaagaagatcctaagatgaaggtggctacactaaacagatttgcaaagcagacaaaacagccttctattggaagaagatgccatctaagactttcatagctacaggtgaggaggcaatgcctggcttcaaagcttcaaaggacaggctgacttcattaggcactaatgctgttggtgactaagttgaagccaatgctcatttaccattctgagaatcctagaacccttaagaatgatggtaaactactctgcccgtgctctacanatcgaacaacaaagcctagattacagcactcctgtttacagcatcgtttatggaatattttttatttgtttatttttactttttgagatggagtctcactctgtcgcccaggctggaagtacagtggcactatctcagctcactacaacctccgcctcccaggttcaagcagttctcctgcctcaaccctccgagcagctgggatcacaggcgcctgccatcatgtccggctaatttttgtgtttttagtagagatggggtttcaccgtgttggccagggtggtcttgaactcctgatctcaggcgatccgcccgtgttggcctcccaca

SEQ ID NO: 1932 - DNA, 661 bp, Homo sapiens
  PSARL
  misc_feature [331]..[331]: Chromosome 3, SNP identification no. = rs7644746
  misc_feature [331]..[331]: allele = c, t
  misc_feature [331]..[331]: n is a, t, c or g
caggcgtgagccaccgcgcccagccccagccagtactcttgactgcttaatcagagctggagagtctcagatggcttcactcgtacctggagccttagtgctggttgttgtctgcttgctctttcaccgcccagtccttggtgttcagtagtctagcgggggcttctaccatgacagagggagtgttccaagtgggcaaaggcaaaagctgcaaggtcttctgaggccgactctggaccttgcacaatattacttccaccacatgctaccgatcaaactaagccgcaagtccaacccagctgcaaggaatagggaagttgactccagcttnggataagaactacaaaatattgtggccatggtgttttatctaccacactagatgtggcagaggcagttatgcttcctagtctagagcagtaattctcaattctggctatacattagaactgcctggtgagctcttaaaagtcctacaccatggctctacctcataacaaatgagaatgtctaggagtggacccaaggccttagtagttgtaagacctccccaggtgattctcatgtgccgccagagtcaagatctattcataccacaggtttggggaaactttagtttacatacaaatcacctggaaatctcattaaaaacattgtaatt

SEQ ID NO: 1933 - DNA, 661 bp, Homo sapiens
  PSARL
  misc_feature [331]..[331]: Chromosome 3, SNP identification no. = rs9290776
  misc_feature [331]..[331]: allele = a, in linkage disequilibrium with rs7644746, respectively
  misc_feature [331]..[331]: n is a, t, c or g
tttttttttttttttttttttttgtatttttagtagagacagggtttcgccatattggccaggctggtctcgaactcctgacctcaggtgatctgcctgcctcggcctcccaaagtgctcccaaaggattacaggagtgagccactgcacccagccttaaatttcttaaagtgtgaaacaagcaaaagcatgataaatgtccctaattgcaaatgtttgctatcttattcacaggtttaggttattcacctcttcccaatcagatgggtatataagacagggaaataaattacttacctgaataagttggaaaacaaagtgaagcgccgcnataaaatggatggggatgggaaagagggtcccttgaggcatatgacaactcacgacagcaggcctgccttgactctgctgctttggtccttctgccaggaactagtgatttggggaagcaatcaaatgtgctcaaagtgggaggatgtcatgaatacttaagttgccaccagccacagttatagttcagtttttttttttccgtttttaagacacagttttgctcctgctgcccaggttggagtgtaatgccgtgatctcggctcactgcaacctccgcttcccgggttcaggcgattctccttcctcagcctcccaagtagctgagatt

SEQ ID NO: 1934 - DNA, 661 bp, Homo sapiens
  PSARL
  misc_feature [331]..[331]: Chromosome 3, SNP identification no. = rs2056332
  misc_feature [331]..[331]: allele = t, in linkage disequilibrium with rs7644746, respectively
  misc_feature [331]..[331]: n is a, t, c or g
tgcctcaggctcccgagtagctgggattacaggcgcccgccaccatgccccgctaatttcttgtatttttagtagagacggggttttgcaatgttggccaggctggtcttgaactcctaacttcaggtgatccacctgcctcagcctcccaaagtgctaggattacaggcgtgtgagccaccacgcccggccagtattaatcttttctttcccccttaaaccatgcaatctcaaatgggattaccacctccatctgtcctcattttccacctccccaggagtttaagattagtgcctgacagatctatgttagtgtatgaagatacaatgnatgtaaagttttcacaagtccctgataaaattcacctggaatgcttgtcggacatataggttcttccactccacccacccctctcctgattgtgatttgggaggactggggtgaggcctgggacataaaatccatacaaactcttcaggtgatccttgagattaggcaatggctccgccacattagagcctcgattatttaccactgactatcccacgtgttgataaacaatgtttcttatcagcaatcaggtggattcgaggcacccatctaaccaagtcagaaattggaaggaatgaagttttgaacaaaagaggaggaaaattttca

SEQ ID NO: 1935 - DNA, 661 bp, Homo sapiens
  misc_feature [331]..[331]: Chromosome 3, SNP identification no. = rs9844684
  misc_feature [331]..[331]: allele = a, in linkage disequilibrium with rs7644746, respectively
  misc_feature [331]..[331]: n is a, t, c or g
accagcacaaaaattctaatagtctggctaatgctattgctgtgggtaataaattgtccttcatttctgacccaggagtcttgtattttctgccagcacccataaaactataccaggctaacttgttagttttcaagtagggtgaaatattagacccttcacgattctctatagggatctgtgaatttaccatttcagagggtgagagcttctcttagggactgaaaagaacttgggtgtggccatagggctgatggctgaagaggaacgaactgaaagtcactaaacatgagggagctcagaaacagagaggtcctggacgttgactgcnttgctcacacgaacttgaggtcttcagggtgatggcaggacttggaatgaaatcctaacatttcagtgaagaagagggtgactagaaggctattaatagtgctgaagaggtgctagagataaaggagacagtttcagcagaggagacatatgtggtcaaggtggtctttgggcaagtaatctggaagaattatgagggcatgaggaggatgctcacctccggaacctaaggggcctggggctggggtgtgctgaatatcctccgcttgcccctccagctcactctcatacactgctccaggccaccggaggctgactttttttttttttt

SEQ ID NO: 1936 - DNA, 661 bp, Homo sapiens
  misc_feature [331]..[331]: Chromosome 3, SNP identification no. = rs2176827
  misc_feature [331]..[331]: allele = c, in linkage disequilibrium with rs7644746, respectively
  misc_feature [331]..[331]: n is a, t, c or g
acatttctattaccccagaaagtttcctcatgtctttttacagtcaacctataaccctgctcccgaatcctggcagccacttatctatggaatattttctgtccctataggtttgcctttttaagaatatcacagaaatggaatcatataattcatagatatgcatttgtgtgaacatatattttcatttcttttgggtaatacctaagattgggactgctgggttgtgtggtgtaatgtttaattttacaagaaattgccaaactgttttccaatgtagtcgtacctttttacatttccacctgcagggtatgagaattccatttgcttngcatcttttccagtacttgggattgtcagggttttctttttagcagttctaatcggtatgtaatggtatttcatttgattttagtttgcatttccttgatgcaagtcagtctttttttttctgagacagagtctcgctctgtcacccaggttggactgtagtggtataatctccgcccactgcaacctctgcctccaggaactcacaagtcattctttgtttttgcttttgtttgtttgtttgtttgtttgtttgtttttgagacagtttcactcttggatcccaggctggagagcagtggtgcgatcttggctcactgcaacctctgcc

SEQ ID NO: 1937 - DNA, 661 bp, Homo sapiens
  LOC391599
  misc_feature [331]..[331]: Chromosome 3, SNP identification no. = rs1317772
  misc_feature [331]..[331]: allele = a, in linkage disequilibrium with rs7644746, respectively
  misc_feature [331]..[331]: n is a, t, c or g
ggtgatgttctggcctccttgcaaaggaggttctcagctcatggaacaggttcagagcacagcctatccagtatgcaaaaaggacagcgccccgccccccgcaacaaccgccctccacttccccagactgtagaaccatctacctgctgggtacctcctggggtcgctgtgccagcttctgcccagtaaatggcaatttggaattcgcaatcaaatagaatgtctgagaagagagacaggctggaagtgcaaccgtcgtatcagggactattgctgttgtcacgatcactcagctgatgaaatggttaggaacagtttaggaatatctgtnacatttaatgatctactgtcaagctttgattccactttcagcagacatctctcgtccaagttgtaaaagctcaatattgatttcagctcgttaatgggcccctggagcctttatcacagaacaagtcctagaatcaaattggcaggaatgagctcttaataaggaaatttctaatcccaaacggcataacacagagcagtaccctggccccctctttttaacttaagttggcacagcttctagacaacctgggcctgggtccttctgccacgccagcagcaagatgacctgatgccctggtcctatccactttcccagagactcttgaca

SEQ ID NO: 1938 - DNA, 661 bp, Homo sapiens
  LOC391599
  misc_feature [331]..[331]: Chromosome 3, SNP identification no. = rs9847536
  misc_feature [331]..[331]: allele = c, in linkage disequilibrium with rs7644746, respectively
  misc_feature [331]..[331]: n is a, t, c or g
atagcttgaacctgggaggcagaggctgcagtgagccaagattgagccactgcactccagcctaggtgacagagcaagactccatctcaaaaaaaaaaaagaatagaggttaaaaataaataattatttatataaacttcaactgtgttattttggctgactgtaggaatgaaaggaattttatctcttaaaaggaattgagataagaagcagctgccatcttgaagaatatttctgcatcttttaaaaactcctgcttaaatcactgccactacatggtccactggcccacaaaagaatattgtgaatgatgatccttgtcataacttanaggcatgtgataagccaaagctttcctgatacaggcatgcttccttttattacataataactcataattaatcgagatttccttttttcccttcactccaatgaaattcagactcgagttttatgtacatatgtggcaactgttcttgatttgacttatttttataactttcttcctctctccttatttggcacttgttttcttaaccttgctataaaatgaaagaagcaagcaaggcatttctgctagaaaccagttttaaggagataatacaaaatgcagaccaagcctaaggcacataaattgcaaatggcctaaatgttcaccaac

SEQ ID NO: 1939 - DNA, 661 bp, Homo sapiens
  LOC391599
  misc_feature [331]..[331]: Chromosome 3, SNP identification no. = rs9848311
  misc_feature [331]..[331]: allele = g, in linkage disequilibrium with rs7644746, respectively
  misc_feature [331]..[331]: n is a, t, c or g
atccttgtcataacttacaggcatgtgataagccaaagctttcctgatacaggcatgcttccttttattacataataactcataattaatcgagatttccttttttcccttcactccaatgaaattcagactcgagttttatgtacatatgtggcaactgttcttgatttgacttatttttataactttcttcctctctccttatttggcacttgttttcttaaccttgctataaaatgaaagaagcaagcaaggcatttctgctagaaaccagttttaaggagataatacaaaatgcagaccaagcctaaggcacataaattgcaaatgncctaaatgttcaccaacaagggttaaaattgcaaaacatccatttggtggaacattatgcagccattaagaatgatgtagatgcccagtgtggtggctcacacctgcaatcccagcactttgggaggcctaggcgggcgatcacccgaggtcaggagttcgagaccagcctggccaacatggtgaaaccccgtctttactaaaaatacaaaaaaaaaaaaaaaattagccaggcatggtggcacacctgtagtcccagctatgtaggaggctgaggcagaagaatcgcttgaacgtgggagacagaggttgtggtgagccgagatcacac

SEQ ID NO: 1940 - DNA, 661 bp, Homo sapiens
  LOC391599
  misc_feature [331]..[331]: Chromosome 3, SNP identification no. = rs1464323
  misc_feature [331]..[331]: allele = t, in linkage disequilibrium with rs7644746, respectively
  misc_feature [331]..[331]: n is a, t, c or g
ccaaataatttagacagaaatgagagctgtggtcagagcagctgtgcttagggcttcgctgggatgttgcaggtccagaaagctgtatgtcctaggatataaccagcctctgattccttgcccatgcattcatgctgaaccacaacaaaggtttgatgctctgaatgtgtcagctcaccaggcagaagccacggtctccctcctgcccaccttgcaccctccctgccaggccctggctgaggcccctgcctgcctcgggcccctaaggtaatggcctgcacacctgcctccccaaatgccaattacccggcgccacacagtgctgacaaangccaggccaaagtcgatggcttgagtcagttcctggaagatgggatcctctaagaggaagtggtggccaaacacaagggccccgatgactctgactgtggacctgacaatggatacctgagggtcgaagggtctacctgagggtagaggggcagggctcaggacgaggaggcacgagaagcactaccctgagcacccatctgatctcgtatctagtcgctcatttactaactcagtcctccattcccattcctcactcatgcactccgcaaatgcttaccagccgggcgcagtggctcatgcctgtaatcccagcactttgggaggctga

SEQ ID NO: 1941 - DNA, 661 bp, Homo sapiens
  LPP
  misc_feature [331]..[331]: Chromosome 3, SNP identification no. = rs6789800
  misc_feature [331]..[331]: allele = a, g
  misc_feature [331]..[331]: n is a, t, c or g
ttcaaggaggccattgcctaacctagttggccaaagtctcttcagaaaataccccatttagtgctccccataagctactgggttatataatgatagtaatggtaatatagcaattaataactgcagaaatccccttttgtttttctgctgtttcatttgtggtggctcttatggcagcttttatattgtgaaagttaattattttggtcagttttgcctgtctccatctgcttaagcttcttgtattccttaacaaaagattcaaccacatcgatacaaccaataattgccaacttgattttattataaacatgtccggtaaaatgctganggaacaaataaatttatttttaaagcctggccgtgatcttacagtcaaaaagtggtccaccaaggttatggctcctaagtaccccacccgtatttcttattgtgataattgtttgtgaaactagttcttccctcactggccaaagtcaacactgttggcaggggaagtgagaacagctggtggttcacagtatatgctgagaatcagaacttctgcatttttctcatggggctagtaccagcttttgctctggccttgaccaatgcacgtacctttctcttccccatttacctttctcttcctctaggtctctgaagagtagaggtggat

SEQ ID NO: 1942 - DNA, 661 bp, Homo sapiens
  LPP
  misc_feature [331]..[331]: Chromosome 3, SNP identification no. = rs4122385
  misc_feature [331]..[331]: allele = a, in linkage disequilibrium with rs6789800, respectively
  misc_feature [331]..[331]: n is a, t, c or g
acatgttctcactcataagtgggagctgaacagtgagaacacatggacacagggaggggtacatcacacactatgtcctgtcagggggtgggggcctaggggagggatagcattaggagaaatacctaatgtagatgacgggttgatgggtgcagcaaaccaccatggcatgtgtatacctatgtaacaaacctgcacgttctgcacatgtatcctagaagttaaagtacaattaaaacacacacacacacacacacacacacacacacacacacacacacaaagaagacaccaaaaagaaaaatatggtaaggaacattagcgtaacctnttctatattagcagggccaccaaagagaaacgcatataggttagaacactggctgtaatacagtagttcaagttcaaagatgtgcacacgagggaggaagaccagaactatccaactgaatgaagacagagaaaagggagcacattcatttgagattccagagatcgttacactatgtagctctgcatgggataactatattgcacaaggcatgcattttaggttgttaggagttcctgttctttttctttttctattctttttgtaaaaaccagaaaactccctagtcacaatctcatctctcccaaaactgcatttagtttaatgagg

SEQ ID NO: 1943 - DNA, 661 bp, Homo sapiens
  LPP
  misc_feature [331]..[331]: Chromosome 3, SNP identification no. = rs6765695
  misc_feature [331]..[331]: allele = a, in linkage disequilibrium with rs6789800, respectively
  misc_feature [331]..[331]: n is a, t, c or g
acagcactagagttaccttgttaactagactgagagctggaactctaagcctttcatcattatattgacaatgtgtaacgtatggttaagttacagaagaaacattacattattattattgaataagtaataattatgagttttattaagagggcccagttcaatttatatgtgcaaaactgatgcccttaattgtaacaatactttagaaatgatagtggaagtaagttccttttgcagagaaaatgcaccttaaaatgcctaggcacaaatttaatgagatacattgttctatatcccaataaaaacaaagacaaagccaaagtaatgncctcaaactctctagaaggacacgaggcttaatggtaacagtccctgatgcaggtgggtcctcttaggcaatcttaggtttgcattggccttactatatggtgaaagtgagcatatgttttatttatgcatcatccattttactttagattgaaagtatttccccatgttttggtaaaacctgctgctcctgaaacctacctttgttcctagtcctgcccttataaattgcaaaaaacaaagccaattcatcttgcttatatgagcccgtcttccctttcataatagagatatgtccttcattctgactcgtcttcttttctttaagcgg

SEQ ID NO: 1944 - DNA, 661 bp, Homo sapiens
  LPP
  misc_feature [331]..[331]: Chromosome 3, SNP identification no. = rs9862474
  misc_feature [331]..[331]: allele = g, in linkage disequilibrium with rs6789800, respectively
  misc_feature [331]..[331]: n is a, t, c or g
cagaagaaacattacattattattattgaataagtaataattatgagttttattaagagggcccagttcaatttatatgtgcaaaactgatgcccttaattgtaacaatactttagaaatgatagtggaagtaagttccttttgcagagaaaatgcaccttaaaatgcctaggcacaaatttaatgagatacattgttctatatcccaataaaaacaaagacaaagccaaagtaatgacctcaaactctctagaaggacacgaggcttaatggtaacagtccctgatgcaggtgggtcctcttaggcaatcttaggtttgcattggccttnctatatggtgaaagtgagcatatgttttatttatgcatcatccattttactttagattgaaagtatttccccatgttttggtaaaacctgctgctcctgaaacctacctttgttcctagtcctgcccttataaattgcaaaaaacaaagccaattcatcttgcttatatgagcccgtcttccctttcataatagagatatgtccttcattctgactcgtcttcttttctttaagcggaatagttccactgcagagtctcttaattatttaatgtagtacatccggaaagacctcatttgtaaggaccaagaactgaaaatattgctattg

SEQ ID NO: 1945 - DNA, 661 bp, Homo sapiens
  LPP
  misc_feature [331]..[331]: Chromosome 3, SNP identification no. = rs7624965
  misc_feature [331]..[331]: allele = a, in linkage disequilibrium with rs6789800, respectively
  misc_feature [331]..[331]: n is a, t, c or g
tgcgtgaaatggttgtcatctggaatgactgccttttaccctagaaaacagccagcccaaggttgagaacacatctgagaaactgtgcctattttgagaactaccaagaaatttttattcactggaacagctgccaggaaacttgttggtcatagaccagtgccttagttgggcatttttttcagaagtagagaaaggcaaagctagagtcaccgagggattggaaggatgaaagacgtgtagttgaaagctgggcaccatggaagaccgaaacactcttcaaacattctgttttcaagaataaacccaaccctaggagcacgagacagantataaagagccatgatttttagcgaagacctcgcatttatcttaaaatttgattttgttgtgaatataatctcagaattatgcagggatggtccatcaaaaaggtctgccagagtcaagctgagtttatcttagccatgctgaaaagtaggtggcagtcaatcaaaatggcaattactgtacaagacaagagttcactggagggaagggtgaatggaaaggacactccctgcattcttgaggcctatgtaaatcaacaaatgactctgggttagtttccacaattgtaaaacaatgtgattgaacaatattgtttcttcacttccttcct

SEQ ID NO: 1946 - DNA, 661 bp, Homo sapiens
  LPP
  misc_feature [331]..[331]: Chromosome 3, SNP identification no. = rs7649407
  misc_feature [331]..[331]: allele = g, in linkage disequilibrium with rs6789800, respectively
  misc_feature [331]..[331]: n is a, t, c or g
ctcgcatttatcttaaaatttgattttgttgtgaatataatctcagaattatgcagggatggtccatcaaaaaggtctgccagagtcaagctgagtttatcttagccatgctgaaaagtaggtggcagtcaatcaaaatggcaattactgtacaagacaagagttcactggagggaagggtgaatggaaaggacactccctgcattcttgaggcctatgtaaatcaacaaatgactctgggttagtttccacaattgtaaaacaatgtgattgaacaatattgtttcttcacttccttcctgctctaagattgtacaaaagtatgattcanctacagatattgcataaaattggttactcctgaagtgcatggagtaaaattgttcccatagaatatcgtgaatttagttaggttgtgacatgggtcatagtctccgcagtctgtacgccctcagtatattcctctgacaaccccatgtcctttcattctaagctaatatccttacacatctttttctctacacctgagcaaaatatacattcatgttcttaagtgcatgtagttaagaggaagctaacacttaatttgttcctgctgtatgccgggtatctggtatgtcatcttcatagcattatttgaagtttggtactaatatttcca

SEQ ID NO: 1947 - DNA, 661 bp, Homo sapiens
  LPP
  misc_feature [331]..[331]: Chromosome 3, SNP identification no. = rs13080560
  misc_feature [331]..[331]: allele = t, in linkage disequilibrium with rs6789800, respectively
  misc_feature [331]..[331]: n is a, t, c or g
aggtattctgccaagagctgtgcaggataggaatgaacaagggatgacctttgctttggctatgtacaccagaaaaacgagcaggggctggaggactcttgccaagaagctatttagtggttctcttagagccttatctctatctaggctggagattaactcagaacatttttttagtctgtttacctctaaaatgaaaagaaatatatattaagaataaggaggtggcgtggagctttcactgaatgtatttcaactggagtattgaacgttatagtgatggatacagttaatccatcacaaccaccatttcaaaggaaagtggggaaancctttgtccctgtgtgaaaaataacttaggaaattttggtctgacagttgtgagagggttaagaaagtcaatcattttgtaaccaggcacagcaatcttgtatgaaccatgtcaggatgttgtctgcatgccgtctttgctgatcacagtaatcgggtcataagagaaagggaagtaatagagtgtctcttagcaaccaaccccaggaaaaagaaaattactcaaacccagccatccagccagagaagtagaaagaaaaaaatattctgatagtttgctgaaagagctcagggatgagagagagagaaagagagagagacagaaagtgag

SEQ ID NO: 1948 - DNA, 661 bp, Homo sapiens
  LPP
  misc_feature [331]..[331]: Chromosome 3, SNP identification no. = rs9851525
  misc_feature [331]..[331]: allele = t, in linkage disequilibrium with rs6789800, respectively
  misc_feature [331]..[331]: n is a, t, c or g
ttttctgacataaatagtggtaagaaacacatagtacattgacaagagcgtatatatgtacatgtcaatgtaatatatattgtcaatgtaatattatgctaagtgaaattttcatatatagatatatatattttttcatatataggctctttatgtgatgcatactaatgttttctattcaatttcattacaaaaattcttttggatacctgctgaattgattgtatgaccctaatgagttacattcttccatttgaaaacaccagtctaggatcagcacttgccttacattttgattttactagagtggtgccaggcagcaagttcagtnttggtgaagagtctttggccagcactgtgatgttcagaataacagctatttaagctaaatattttcttgtcatctgccaagtagatgtatcctaagagtctgtcctggtttggaatttaaggggataaacctgaggcaattccccctggactatcttcagtttagaaaagtgccacagtgtgttcaagaagcaccggactggactcaggagacttggttgcgcttgatggcatccttttctcactctgagcctggggtcaatgatggatcgaattagatgatgtcataaattccttctggctgtaacatcttggaatttatagctggatg

SEQ ID NO: 1949 - DNA, 661 bp, Homo sapiens
  LPP
  misc_feature [331]..[331]: Chromosome 3, SNP identification no. = rs9882818
  misc_feature [331]..[331]: allele = a, in linkage disequilibrium with rs6789800, respectively
  misc_feature [331]..[331]: n is a, t, c or g
aactatggaggcaggcatggcatacctgcagaacaggactagaatctcataggtttttgaacttattaggcagacctaaggttttttacacttcctgaggctatagaacagaactaatctcttagccttaatgtcactataacgtaaaaaccacgtgaagagaattacgatggtgagcagaggataggacacttattatagttgttacctcatttatttaattctttgtttcttagagaataagattctggtacatagcaggttcccattaaatacctattgatttaaagtttaaaacaaggaataatggctaaatgaatcattgaatgcntatgtctatttcttggaggtctaatcatgttttcaaaactttggctcaactgtagttagtgcagagtatgtatggtcattctgctagagcaaaatcttagtataggattaaagaactctgcaaattgttaaaacatgcaggtacactagtttcaaaatgtattagtttgatttattattgtcattttctgataaagaaaggggagtagtctcccctaaagtttggtgattaagtcaccagccaccttttctattttggttgttgtggtaattggtgtttcctggaaattttccctctgttctattaataatgttaaagggggttacagcc

SEQ ID NO: 1950 - DNA, 661 bp, Homo sapiens
  LPP
  misc_feature [331]..[331]: Chromosome 3, SNP identification no. = rs2162259
  misc_feature [331]..[331]: allele = a, in linkage disequilibrium with rs6789800, respectively
  misc_feature [331]..[331]: n is a, t, c or g
tgtattattagaaaaagaatacagctccaccatatcaatgctgtgtagaacaaaaatacatcatccttgtagtttaaagtattgaaattatttagttattcccttcccaagaagtgaaaaatatctgaattgtaaagagaaaatttccaggttggaacattttaatgaagagaggaaaaacacagcttctgagcaggtttgaggaagagtcaaagatgtatttgaaaattatgcactatatttgcaaagtgaagcatgtccactaaaagtacattctttatacacatgctaacaaaattaagggcacaccatcctttattgaatgagagcntgttagaagagctagtgtgtaccatttccttttgttccctggaggaaagctaagggatgaaaaatactttgttaatgaataatattaagctgcaaattcaaaattttaagccactgagattgataaattaaggttctgatggcaacccaattctttcctgtcaggcacatggtatagctataactggaacacttgtttccatcttaaggaatggggaggattgatacaacacgagattcagcattgctaattaggaaacatcagcaaaagtcgtttggaagctgctggagtcaaaaccacaaagaaaaggacatgaaactcatcccacca

SEQ ID NO: 1951 - DNA, 661 bp, Homo sapiens
  LPP
  misc_feature [331]..[331]: Chromosome 3, SNP identification no. = rs9865055
  misc_feature [331]..[331]: allele = a, in linkage disequilibrium with rs6789800, respectively
  misc_feature [331]..[331]: n is a, t, c or g
caagaagctgaggcaggagaattacttgaatccaggaggcagaggttgcagtgagcagagattacaccatagcagtccagcctgggcgacagagtgagactgcctcaaaaaaaaaaaaaaaaaaaaaaaattaacctgtcatggtggcatgtaatcccagctactccagaggctgatgcaggagaatcacttaaaacccgggaagtggaggttgcagtgagccgagatcgcgccattgcactccagcctgggcgacacagcaagactccatcttagaagaaaaaaaaaaggtgactctccgggattctatagcagtatggccatagagtanggacaagaacatatgcctcctcatttaccatcagtgctatttctattttgtttactaccatttactctcatttgattgtgtcaaattatctactgttgtactggggggccagagtggattcccaagcctcaaccacatagaagagtagattggaggttgttttcaaactattcaacattatcagtgggttgaatttgtaagctatcaactcaaaatataaagataatttttataacagggtctatattggattgtaaaaagagggtcataggatttggatctttagggctctgtaattcaaaatttgggatgttcattaggactatttgt

SEQ ID NO: 1952 - DNA, 661 bp, Homo sapiens
  LPP
  misc_feature [331]..[331]: Chromosome 3, SNP identification no. = rs7609720
  misc_feature [331]..[331]: allele = a, in linkage disequilibrium with rs6789800, respectively
  misc_feature [331]..[331]: n is a, t, c or g
aatacaaaaattagctgggcatggtggcaagcgcctgtaatcccagctacttgggaggctgaggcaggagaattgcttgaacctgggaagcagaggttgcagtgagccgagatcacgccactgcactccagcttgggtgacaaagtgagactctgtctcaaaaaaaaaaaaaaaatctatttacattgcagctcctttaggaggtttactacttgtaatactgtagagtcttccagagtgtgcatccattgtatttcactgattgatttcgttagtgatacacctcaaagtgaggtagtcatatacctccaactcttggctgccacaaatntactgtcgtgagcattttgtatatgtgttcttaatgattggcagaagttagctcaggatttgtggctgtggggagggtgcttgatcatagtgcattttaatattgagtttcactaggctctgtgttttttgttttttgtttttgtttttttttaaacataaaggcttcactagggttactttcccccagtaaagcattaggattcttgttttcttcatgccatcaccagcacggggtattgcatgactttatattttttgctaatatgatgggtatggaactactagtacctcctggtttctgcttcttttccatacatagtaaacagat

SEQ ID NO: 1953 - DNA, 661 bp, Homo sapiens
  LPP
  misc_feature [331]..[331]: Chromosome 3, SNP identification no. = rs7621433
  misc_feature [331]..[331]: allele = a, in linkage disequilibrium with rs6789800, respectively
  misc_feature [331]..[331]: n is a, t, c or g
aaaaaaaatctatttacattgcagctcctttaggaggtttactacttgtaatactgtagagtcttccagagtgtgcatccattgtatttcactgattgatttcgttagtgatacacctcaaagtgaggtagtcatatacctccaactcttggctgccacaaatgtactgtcgtgagcattttgtatatgtgttcttaatgattggcagaagttagctcaggatttgtggctgtggggagggtgcttgatcatagtgcattttaatattgagtttcactaggctctgtgttttttgttttttgtttttgtttttttttaaacataaaggctncactagggttactttcccccagtaaagcattaggattcttgttttcttcatgccatcaccagcacggggtattgcatgactttatattttttgctaatatgatgggtatggaactactagtacctcctggtttctgcttcttttccatacatagtaaacagattcagtctctcaaaattactgggaagaaaagtgatttgtttcataagtgttaagtgtctgtttctggtcatggctatctctgggactgtggtcatagagaggcatactggctattcagcagggtttctgagtgggaaaaaaatctcttgaaaatgtggtgttgtcaag

SEQ ID NO: 1954 - DNA, 661 bp, Homo sapiens
  misc_feature [331]..[331]: Chromosome 4, SNP identification no. = rs16894896
  misc_feature [331]..[331]: allele = c, t
  misc_feature [331]..[331]: n is a, t, c or g
gggacccctgccctcctggtaacccactgtccagtgggagcaatggcccataaatagactgtggctttgatggagcacagaattcctgcaaaacgagacactggagccagtcctgaagatgagttgaggtcttggcggaggcgacagaatgggtaatgggcacaggtgtgtaaaggagcacgcctctcagggaatgaggtgggctgtggtgtctgcgtcacaggctatattgggagtactggtgggagcttggagtaaagagagggcagaagccatggggtgaagaataaactggagagacagactcctggtgttttagaaagggcatttnggctgctacatggaggatgtattggagccatagagtgactggaggagtgaggtccagctaggagaagagaactatgtccacatgagagccaaaggtgccgaaccacacagtgtagtagggaatggggatgagtgaacagaagtaaaatcaacaaaacttcgcaagcaacaagaggtagggtgtgagagagaagggagaaggttttagtaacgcttcatttctagtgccctagtctggctaagtgggtgaacagtcgtgtccataaacaatggaagccttgctatctgcatagaggaggctaagtaatcactggggaccagcaaccccagc

SEQ ID NO: 1955 - DNA, 661 bp, Homo sapiens
  misc_feature [331]..[331]: Chromosome 4, SNP identification no. = rs16894897
  misc_feature [331]..[331]: allele = g, in linkage disequilibrium with rs16894896, respectively
  misc_feature [331]..[331]: n is a, t, c or g
ctatattgggagtactggtgggagcttggagtaaagagagggcagaagccatggggtgaagaataaactggagagacagactcctggtgttttagaaagggcatttcggctgctacatggaggatgtattggagccatagagtgactggaggagtgaggtccagctaggagaagagaactatgtccacatgagagccaaaggtgccgaaccacacagtgtagtagggaatggggatgagtgaacagaagtaaaatcaacaaaacttcgcaagcaacaagaggtagggtgtgagagagaagggagaaggttttagtaacgcttcatttctantgccctagtctggctaagtgggtgaacagtcgtgtccataaacaatggaagccttgctatctgcatagaggaggctaagtaatcactggggaccagcaaccccagcctggcaccttgatccagcccaacgatgaggcttgagcttgaatctctcttcctaactgtccagttgccctgtctagggccctgtgcttctccaggctggggccctaccttactccttgctttgatctccttggagatctcctggggatagtcactgtcctggtgcccctgtcctatttgaacagaaccacaactgccattctgctagtcagccttcccgcattt

SEQ ID NO: 1956 - DNA, 661 bp, Homo sapiens
  misc_feature [331]..[331]: Chromosome 4, SNP identification no. = rs7442366
  misc_feature [331]..[331]: allele = t, in linkage disequilibrium with rs16894896, respectively
  misc_feature [331]..[331]: n is a, t, c or g
tctccttggagatctcctggggatagtcactgtcctggtgcccctgtcctatttgaacagaaccacaactgccattctgctagtcagccttcccgcattttctctcctaccaggagatggggctcattttcagtcattcttcttaaatatttttcttttcaaatttaatgtcgggctggctcaaaaaagtaattttagcaataccaaagcattcatattttccttctagtgccaaaattatatttcttgcaaataattccttttactaagtacaaatgtccagcatacagcaaaaagtgttagtcacatttattcacatttctagaataantggtagttttcaaggcactttcatgatttctcactgctctaaaggcaaggtcccaattcctgccttgatatgccgggctcttggtgcctggagccctccctacctcattgccccatttccctccatcctgcctcagactctgctttccattcagacccatggctccgacctgcaccgtgctctcttccccttgcctctgactgcacctgtgcataggctgtatcttccatctggaaagcctctccccacctttcacaccctgttctgttctttactgccagcatctcctccaggaacactttccagcccagcccagcctgaccccaggct

SEQ ID NO: 1957 - DNA, 661 bp, Homo sapiens
  misc_feature [331]..[331]: Chromosome 4, SNP identification no. = rs1830381
  misc_feature [331]..[331]: allele = c, in linkage disequilibrium with rs16894896, respectively
  misc_feature [331]..[331]: n is a, t, c or g
caaagcattcatattttccttctagtgccaaaattatatttcttgcaaataattccttttactaagtacaaatgtccagcatacagcaaaaagtgttagtcacatttattcacatttctagaataattggtagttttcaaggcactttcatgatttctcactgctctaaaggcaaggtcccaattcctgccttgatatgccgggctcttggtgcctggagccctccctacctcattgccccatttccctccatcctgcctcagactctgctttccattcagacccatggctccgacctgcaccgtgctctcttccccttgcctctgactgnacctgtgcataggctgtatcttccatctggaaagcctctccccacctttcacaccctgttctgttctttactgccagcatctcctccaggaacactttccagcccagcccagcctgaccccaggctaagattggtaccctcctgacttggggtctcatagcaaatttactcattttttcctgcccctggccacactactgcccagtcccacactggactgtagggcctgcctgcctccctgccactagagtatgagcaacttgtgggcacattctgtgtctttttcatccttttcagttttctccttgcagagtctagagcacaagatgg

SEQ ID NO: 1958 - DNA, 661 bp, Homo sapiens
  misc_feature [331]..[331]: Chromosome 4, SNP identification no. = rs12642427
  misc_feature [331]..[331]: allele = g, in linkage disequilibrium with rs16894896, respectively
  misc_feature [331]..[331]: n is a, t, c or g
tttagcaccattcccctagtgctgtcttgtgagtaagttctcatgagatctggttgtttgaaagtatgtagcacctccccattctctctctcttcctcccgctccagccatgtaggatgtgccggcttaccctttgctttctgccatgattgttaagtttcctgaggcctacctggccttgcttcttgtacaccctgtgtaactgtgagtcaattaaacctcttttctttataaattacccagtctcagatagttctctatagcaatgtgagaacagactaatacacttggtaacaggggtgaacaggggcctcaaaaagctatgtccaantcctaagcctccccacctccacccaccccacccccattcagtatctgtgaatgtgaccttatttggaaataggattttgcaggtgtaattaaggatctcggcatgtgatcatgctggatttacaacaggctctaaattcaaggatggtgagagaaaggaacagggacctttcagacacacagacacagacagacacacagggataaagccttgtgcagacagaggcagagactggagcgatccgtccacaagccaaggatcactaaggatggtcagagccgccggaagctaagagagaggcaaggacggactcttccccggaaccgcctg

SEQ ID NO: 1959 - DNA, 661 bp, Homo sapiens
  misc_feature [331]..[331]: Chromosome 4, SNP identification no. = rs10003191
  misc_feature [331]..[331]: allele = a, in linkage disequilibrium with rs16894896, respectively
  misc_feature [331]..[331]: n is a, t, c or g
ccaagtcctaagcctccccacctccacccaccccacccccattcagtatctgtgaatgtgaccttatttggaaataggattttgcaggtgtaattaaggatctcggcatgtgatcatgctggatttacaacaggctctaaattcaaggatggtgagagaaaggaacagggacctttcagacacacagacacagacagacacacagggataaagccttgtgcagacagaggcagagactggagcgatccgtccacaagccaaggatcactaaggatggtcagagccgccggaagctaagagagaggcaaggacggactcttccccggaaccncctgggggaccacccctgctgacttcttgctttcagacttctggtccccagaattgtaagagaataaatttctcttgttttcagccaccatgtttgcggtaatcagttacagcagctctaggaaacagaaataaggggatcactgtgaagtgcaatatgaacacacatatgatgcctatatacctgagtcaaagtattttctgtttatgatttggtttccttttggaaatccccttaaatgtctaaactgcttcaccaccacccctcaagtaagtgcccccttcccagcctcacccccaagcggggtaaatcacccaatgtggtctagtc

SEQ ID NO: 1960 - DNA, 661 bp, Homo sapiens
  misc_feature [331]..[331]: Chromosome 4, SNP identification no. = rs16894917
  misc_feature [331]..[331]: allele = c, in linkage disequilibrium with rs16894896, respectively
  misc_feature [331]..[331]: n is a, t, c or g
cctgggactcaatgtctaatcaatctataaatgtgacctatctcaacaagtcaatgacttcaacttcaaaacacacaaatagacacaagccacagtgcacaaggttatcatctaatgtgacatggggagacaccagttgggactattaccaggtacccagaggactgtgtaggatcattgcatctgtgggtcacttcaattttagcacctcgcacattacctaacactacccaacacatactaggcactccataaacatctgttacagttggggtttcctaagcatcttcacacacattatatggttgttaaacctcaaactatccttcgnaataggcattttttacttatactcactcattttaaagtttgtgaaactgacatttctaccagttcgacgagttgcccaaaattgtaacaagagtaataaatgatacaaatagaacccatctctccatcattcaaggctagtgtgtgtaatactgttacataagtataaaaatttcagaagtaacatggaactgggattgacttagatagaacgtcatgtccctcacaacactatagaccttgccatggtatatgcggttctagcaaaaatgcatttttacacttcgatcaaaatttagcagagtatctgagaaggttgacaagatgttag

SEQ ID NO: 1961 - DNA, 661 bp, Homo sapiens
  misc_feature [331]..[331]: Chromosome 4, SNP identification no. = rs1830374
  misc_feature [331]..[331]: allele = c, in linkage disequilibrium with rs16894896, respectively
  misc_feature [331]..[331]: n is a, t, c or g
ctcttggtattcacacttttgtgtaatcttctctgcttaagtgtgagctgaacctagctacttgcttctaccaacagaatatggcaaaggttatggcgtgttatttccatgattaggttacctaagattgtgattgtaccttgccggaagattctgccttgcaatctttgatgaatcaagctgccatgttggagagatccacatgacaagaaattgagggcagtctctggccaacatctagcaaggaactgaggttcttagtccaacaacccacaattaactgaagcccaccaataagcatgagagctcagaagcagatccttcccctatnaagccttcagataagactttaccccagccaacaccttgattataaccttgtgagagactgagtagaggaccacaaaaagccatgttcaacctcctaacccacagaaactatgaaataacaaatatgtgttgctttaagcaagtttgggggcaatttgttacattataatacataactaatatgaagcccaagaacaggctgctatgagagatcccagagggggactgcttgagactaagtggtgagcacaggcttctctgaggaatcacatttaagcagagtcctgagtgacgagcaggtgcccaccaggaatgtgaggaaagagaattc

SEQ ID NO: 1962 - DNA, 661 bp, Homo sapiens
  misc_feature [331]..[331]: Chromosome 4, SNP identification no. = rs12649443
  misc_feature [331]..[331]: allele = a, in linkage disequilibrium with rs16894896, respectively
  misc_feature [331]..[331]: n is a, t, c or g
cttgagactaagtggtgagcacaggcttctctgaggaatcacatttaagcagagtcctgagtgacgagcaggtgcccaccaggaatgtgaggaaagagaattccaagtctttgaaccttagtggagcctcaatttcctcaaatagaaaatgagaattttccctaggtatttcctgcatatagttgctttgaggattaagtaagaaaatatttgtaatgtgctttacatcatctatgatgcaaataataagcctgattacaatgatggatggtgaggatgttattaccaccagtattttacaaataaagtactaggactgaatggcacccantggcaaaatgtagtatgtgttctaagaatggacacttcctgtccatagattctgtttctttcagtcttctctggctggcccatgcctttctctggctaggcctttctaggcttctttatgcagataggggaagcagttgtataatccctcctactaatcattgtgcagatacatttatttctctgttacaaaccactgtcacattactgactgactctcttatcagccaatagcaaataattctgtacttagcttgggcagtcctgctttctcattcagctcactcctgtctacacccaattaaaatgcatctcccaggccaggcacagt

SEQ ID NO: 1963 - DNA, 661 bp, Homo sapiens
  misc_feature [331]..[331]: Chromosome 4, SNP identification no. = rs16894937
  misc_feature [331]..[331]: allele = t, in linkage disequilibrium with rs16894896, respectively
  misc_feature [331]..[331]: n is a, t, c or g
tggacccagcatctctggcagaggaaaccaccgaaggaaaggcatggaaacatggatcagcacagagtatgaccgagatatcagaactgcatttgacaagtgtgcaaagctgagacaggcaagaaggtgtggcccatgtgatgatggcagtaaatgcccagctcacattttctgagaagcaggattcacctgcaggattaagctcccagcagccatatttctatcccatgactctcctgagcatagtttatcagaccatggtgcccacgtgacccacgctggaccaaacagatcctctctggtgaatctggaattggtatgagaacatacnaatcagactaggctgtcctcctgaatagagatgaaaaagtaaaaactacgtgatgtcatgcacagagagaagcaagaaaaagctgctctcaggatgtgaagaataaagcaaatgaacccagcaaagcagcagctggaaagaagacagggatgcctagagttcatgggaatttctttccagttcttgcgtaagttgcttgaaataccccagaatcgggccgggtgcggtggctcacgcctgtaatcccagcactttgggaggccgaggcaggcggatcacaaggtcaggagatcgagaccatcctggccaacatgttgaaaccctgtctct

SEQ ID NO: 1964 - DNA, 661 bp, Homo sapiens
  misc_feature [331]..[331]: Chromosome 4, SNP identification no. = rs12650437
  misc_feature [331]..[331]: allele = g, in linkage disequilibrium with rs16894896, respectively
  misc_feature [331]..[331]: n is a, t, c or g
ccacctctcatcattcatgtgccagttcaaatgtcagctcccagagagaatgtcctaatcacatttgcaaaataagaccatccaagattaactacctcacatatcactctgcttctttcaagtacttatcacaatctgaaaagatcgtttgattgttgtttaactgtttattacctgaattctcctgccaaaaaagtaagcaccaaccaaggaggcaggtacctcatctgcctcattcactgtgtagccccaattaagcccaaaatctggcatatagtaaatgttcaataaacatctgttgactgaatggatgaaaccaaggacaacactnaagttcaaataggagagtgacaagaaacatctcgcatgcttcatctacatccatgacaacagtgtggaagattgacttcaggaggcagagtccacatcctattcatctttgtacccccaatgtctaacgtgggacaatctgatctactatgtataataatgagattccaaagcaataccattttatcaaaaatcacatttaaagtacattcactttggtgtgtttggctagaaggagaactagatatacataatagcaaaggttatttttcctgtatgaatttcatgaataaagaattttagttgtgcatgctttttattaaggaaaaaa

SEQ ID NO: 1965 - DNA, 661 bp, Homo sapiens
  misc_feature [331]..[331]: Chromosome 4, SNP identification no. = rs12651615
  misc_feature [331]..[331]: allele = t, in linkage disequilibrium with rs16894896, respectively
  misc_feature [331]..[331]: n is a, t, c or g
attgaaagtggaaaaatcatggagatatgtaaggcctcagtcatcagaaagtggtagaaatgcccaaaaggtgggaattctgcccatcattttacaaccccataaaacttctgaccccctgattgagtggcattggatcggactgaagctttgggaaaattattgcacataataagatctgcaatttaatccatatttctaaactgttcttgtggtttgcctaggattcttggccaaatcatgtcacatgtgctgctcctgcctaaatgagtttgataatgatgctgcattccatttccaaatgccataaaacccacaaatgtattgcacngctgcgtttggttgtttttggttttttgaggatttttttttttttggaggcggggggcttctctacagcttagttgctgcagatcatactcgctgctgagttactgaaaagatttagtttcacctcatgcttctgctctgcttctatctcttccaatactcaagtcagttctattgcaggtgtcactgaagtttgcaaaaaaaaaaaaaaacaacatctggggaagatcagctagctgcctccaagagctctcacaaggtgaacttgtcagaatctggccctcagcttctcaagtctagaatctccacctcattagagctttgtgactat

SEQ ID NO: 1966 - DNA, 661 bp, Homo sapiens
  misc_feature [331]..[331]: Chromosome 4, SNP identification no. = rs10516309
  misc_feature [331]..[331]: allele = t, in linkage disequilibrium with rs16894896, respectively
  misc_feature [331]..[331]: n is a, t, c or g
ctatctcttccaatactcaagtcagttctattgcaggtgtcactgaagtttgcaaaaaaaaaaaaaaacaacatctggggaagatcagctagctgcctccaagagctctcacaaggtgaacttgtcagaatctggccctcagcttctcaagtctagaatctccacctcattagagctttgtgactatatcatcctaagtgtcatcgttattatcaccatggtactctaagactttaacagggggtgtggcattgagggcccctacacaaaatgaccccaaaccatagtatattctgtgactgcatctgacattgttttttctctctttaangtaattggagtgtgtgggcatctctcccttctcttgactgccttccagtagaatccacactgcccatttctaaattatgaagagctttaagaaaaaaaaagataacataggtctttaaattatgtgtaaaacaacaatctgtaggcaaagagtgagggtctaaagcattctttaattacttaaactatacaaatttactgtatacaattgatgccccctcttttgactgctcagaaactgttctactgcctagatgtcaattgcattccaggtagccgagttcaacagaagttaggagttaccgctctgatcttgaaatacttaggggca

SEQ ID NO: 1967 - DNA, 661 bp, Homo sapiens
  misc_feature [331]..[331]: Chromosome 4, SNP identification no. = rs16894953
  misc_feature [331]..[331]: allele = a, in linkage disequilibrium with rs16894896, respectively
  misc_feature [331]..[331]: n is a, t, c or g
acttaaactatacaaatttactgtatacaattgatgccccctcttttgactgctcagaaactgttctactgcctagatgtcaattgcattccaggtagccgagttcaacagaagttaggagttaccgctctgatcttgaaatacttaggggcaatagagatgcatgccaagaaaaaaacaaaactctatcacaaaaagtattcatattcactctgtacatataggtttacagatcaatttatctacattacatatattgtaagaatttctaatcaatgttctataacttaaacctaagtttgagaaattcagcaaattgaagaaaccaatnaatggccccttcctgctggtgctctatggcatttccaaaagctcagcagttacacaagcagaagaaacccacaggccaaaaatcatggctgtccagttgccagagtgtccacaggtggtgaccctctcactttctccccactcttccctgaggcccagcacagctgaactgccctggcacaggagacaggaactaacaagatcttactaattagttgaaaaatatgtttagtaggaaagaaaaaggagcacgaaattctgtttgagcaattatagaaacagtgatcaactgtcctggttttcccaggactagggggcttccaggaatacc

SEQ ID NO: 1968 - DNA, 661 bp, Homo sapiens
  misc_feature [331]..[331]: Chromosome 4, SNP identification no. = rs2314958
  misc_feature [331]..[331]: allele = a, in linkage disequilibrium with rs16894896, respectively
  misc_feature [331]..[331]: n is a, t, c or g
attttctagaaaaagtaaaaacagaaagacacattaagatgctcctgaccactacactgattgaaaaggtttatcaatgaatatcagttactgctgcctgtttcttctgtactttccaagcattcctctcccctgaattttctccctaagtctacgtctttcccattctaaaatatgaatctcccttaccagtggtgtctgtaatttaaaatactccagcataaaaagtgtaacacacgcatgtgttcagctaagttgcactctagggctcacacttctggggaagttactacaagcccttctgttattcctatctcaacatatcagtccntttgtgctgccgtaacaaaacacctgagactgagtaattgttaaacaatagaaatttatttctcacagttctggaggctgggaagtccaaaaccaaggtgccagcaggttggatgtctggtgagggcctgctctgtgcttccaatatggtaccttgttgctacatcgcatcctcacatggcagaagggataaatgtcatgaacagcatagtggaagggcaaacaaggagctagctagcacccttcaatctcctttttagtggaactaatcccattcacgagggcacagccatcatgatctaatcacctgctaaagaccccacacctctta

SEQ ID NO: 1969 - DNA, 661 bp, Homo sapiens
  misc_feature [331]..[331]: Chromosome 4, SNP identification no. = rs4235386
  misc_feature [331]..[331]: allele = c, in linkage disequilibrium with rs16894896, respectively
  misc_feature [331]..[331]: n is a, t, c or g
tggggaagttactacaagcccttctgttattcctatctcaacatatcagtccatttgtgctgccgtaacaaaacacctgagactgagtaattgttaaacaatagaaatttatttctcacagttctggaggctgggaagtccaaaaccaaggtgccagcaggttggatgtctggtgagggcctgctctgtgcttccaatatggtaccttgttgctacatcgcatcctcacatggcagaagggataaatgtcatgaacagcatagtggaagggcaaacaaggagctagctagcacccttcaatctcctttttagtggaactaatcccattcangagggcacagccatcatgatctaatcacctgctaaagaccccacacctcttaataccatcaacttggggtgtaagtgccaacatgtaaatttaggaaggatacatgcattcaaaccaaagcactcagataacaccagaagctttgataattaacataataagggtcagaaatgagctttaactggtaaaaaatagtggtttaattagcatcatggatattagaaatggtctctcaccagtgaaatttatggtattcaagaagacgtgagttgccttacacttttcagccatcttagtttcctagggttgccataacaaaatatcacaaat

SEQ ID NO: 1970 - DNA, 661 bp, Homo sapiens
  misc_feature [331]..[331]: Chromosome 4, SNP identification no. = rs10516310
  misc_feature [331]..[331]: allele = a, in linkage disequilibrium with rs16894896, respectively
  misc_feature [331]..[331]: n is a, t, c or g
cacctcttgagcatcaccaacctagaaaacaaagaccaagctctgtaatgtagccaaaatggcccttcatcagctggtccctggctactagtcccacaccttctcccccctctacctgtggtgtgcctgatgccctataaaactctttatgattatgtctaacatattgcagcataattaattctgtatatatctgcttttcccatgaaccatgagctccttgagtgtggaggaccctcaggtattcctctgtatatgcaaactgcataacaagtgtagtgcctgccaattagtagacatttaatgtctgttggataggtaaacaaatcanttgaagaggacttggaaacaaacaaaaaaaaactctagctttggtgtctattattgccacatctctgaaaaattacaaccatatactttccttttcaacttttgagcactgttaaccaagagaatttttctgttactctctgtttcatgatgtacacctaattttcccagttagagggtaagatcctttaaaatgaagatttttgttttaaacttctttcctaaatctcatatccttcaatacagtgctgaccccataatgtagcttaacatagactttgagaaatacagtgactctctgtaaaaacttcactcatggaagagaagcctg

SEQ ID NO: 1971 - DNA, 661 bp, Homo sapiens
  misc_feature [331]..[331]: Chromosome 4, SNP identification no. = rs12651322
  misc_feature [331]..[331]: allele = t, in linkage disequilibrium with rs16894896, respectively
  misc_feature [331]..[331]: n is a, t, c or g
tgcttttcccatgaaccatgagctccttgagtgtggaggaccctcaggtattcctctgtatatgcaaactgcataacaagtgtagtgcctgccaattagtagacatttaatgtctgttggataggtaaacaaatcaattgaagaggacttggaaacaaacaaaaaaaaactctagctttggtgtctattattgccacatctctgaaaaattacaaccatatactttccttttcaacttttgagcactgttaaccaagagaatttttctgttactctctgtttcatgatgtacacctaattttcccagttagagggtaagatcctttaaaangaagatttttgttttaaacttctttcctaaatctcatatccttcaatacagtgctgaccccataatgtagcttaacatagactttgagaaatacagtgactctctgtaaaaacttcactcatggaagagaagcctgggtaggatggtaattaaacacatggattgcagagttccacaacctaaattccaatccagcctttttccacctcttactagctctataatcactcacttaatatatctaagcttgtgtttcctcatggggaaaaatgaataaagtaataatatttacttcatttattcaaaataatttattgattatctattaca

SEQ ID NO: 1972 - DNA, 661 bp, Homo sapiens
  misc_feature [331]..[331]: Chromosome 4, SNP identification no. = rs16894976
  misc_feature [331]..[331]: allele = a, in linkage disequilibrium with rs16894896, respectively
  misc_feature [331]..[331]: n is a, t, c or g
tagtcccagctgaggctgaggcaggaggatcacttgaacctgggatgcggaggttgcagtgagctgagattgcgccactgcactgcagcctaggcaataaagcaagaccccatctcaaaacaaacaaacaaaaaagtttatttcctcatttgaactaatattttaacagatagagacagaaaatgaatatgtagtagttacataatataactccagacaatggtaagtgctccaaagaaaatatactagggcatttagtgggataatcttagaaaaaaatttcaagaaaaatgtcattgaggaaatgaaatttggtctcctaaacacaganggttgccatgaagataaaatgaagtaaatgcatgtaaaatgctgaatacagtgaatattcataaaattggaaatatcctataaatatttagtagtgctattacagggaacactcactagagagaactatcatttgttgagtacttgctgtgtgccaggcatttggccatcattttattgtaattttcacttaatcctcccaacaaaaacaaccttgaagaacagtattattggctccattttacaagaccaaggctcagagagcaactggccctggggtcacacagcttgtgagtggtggagccatgcgggtccctccaacctcaaatcc

SEQ ID NO: 1973 - DNA, 661 bp, Homo sapiens
  misc_feature [331]..[331]: Chromosome 4, SNP identification no. = rs921371
  misc_feature [331]..[331]: allele = t, in linkage disequilibrium with rs16894896, respectively
  misc_feature [331]..[331]: n is a, t, c or g
atttacagtaacccatcaggtgaggattatcatcccatctttcagataggagaactgaggcagagtggttagtaagttgcctgaaatcctacagctgctaagtgggattgaaacccacacattctgtctctacaaccatcccacttaatatcactctgcaattctttcccatgataagtgacagctccaacacttaccatagctgtgcctcttgttactttctgggtgtgatgagatggctaggattctctcttcttactgcaatgggaatgctcacaagagatgaaggcttatggaagctgcttgaaaatgaaagtagcctgcttttcantaaagacatggagatactcatactagcccacgagctgcccccaacactggcctttgtggctaaagggctgtatatatcttggagccgcctgctttttgatcttgacttcaataaaatgaactttcattgaccctagcatgttccaataggtttgaataggaaatggacttgagaggggaggatcctgtatctaatttacaaaggcacatgattttccctggtgacattttcctctgtgaggtattatttgatctttcctttttactaaggaagggtgccagccatccactcttttcttcattcctgtttttagacttcctatctactgaa

SEQ ID NO: 1974 - DNA, 661 bp, Homo sapiens
  misc_feature [331]..[331]: Chromosome 4, SNP identification no. = rs16895007
  misc_feature [331]..[331]: allele = t, in linkage disequilibrium with rs16894896, respectively
  misc_feature [331]..[331]: n is a, t, c or g
aggggaaaatagatttttgtcagagtgcttttttcaaaattgcaaaacagatattaacttaccacaccacttttgcctccctctctctgtctctctctctccctctcacacacacacacatagacacacacacagagagagagcaaagtaatactctcctgtcaagctaaaatcatcttattttgatatatcaacacatatcacataattcgtatctttaatcaatacatctaatttggataatgcacatggggtgattgggtgtctatctgctaataacagggtctgaatgctaatggctgagaaaagctaaatgcccaagaatagacanggattaactatgagcatttgcctcttggctttcctagcactgtttgatttccccttcatttaaccttgacatttataaacctaatcaaaaggtttaataaataggaacccaacttaaacacaaagcaaaatgccaaaaatcctatatgtattgccctaaggggaaaaaaagttgaagatgaatgagagcctcttcttttaacaccttgtactttgacctcattgagtaaagatgacctaagaatcaagtagcttgttattaaaaagaattcttggtgagtaaaggaaaaaatatagttaagagtatttaattacccatgaaaatattcga

SEQ ID NO: 1975 - DNA, 661 bp, Homo sapiens
  misc_feature [331]..[331]: Chromosome 4, SNP identification no. = rs12643829
  misc_feature [331]..[331]: allele = c, in linkage disequilibrium with rs16894896, respectively
  misc_feature [331]..[331]: n is a, t, c or g
aaatacttttattgggtctgtgagaaaattcatcttcaattatgttagctttgaattatgtaaattctttaaaaatctatccttcacataaactgtaatctctgtccatgagtgcaggggaaaggcatttcagaaaaagctaagtatcattcataaacacatagaagcaagaaagaaagaaagaaggagggaaggagaaaggaaaggaaaacagaaaggaagaaaggaaggaagagggtttaaaatagtcaagaaacagtaggaagtggaggagcagggaatgaagctaaaaaacattggttgcaaaccaataatgcccaaaagcctggcntcaattcagtatcaggccatgatggaattttcataaatccacagtgaaatgagaaaaaccagcatggcattttccacaaagctaaatacgtaagatatttatataattgtttcaaatgaccttttattatgagaccacatcctctgtaatttgttagcaataaaatttcctatctgtacacctactatgtacccacaaaaattaaaaatttaaaacttgttttaaaaataaaatacagtatctgttatgaaatggtggcaatggcatatgacagatgtcatacagagttatttttatacattgttttttgacaaaattaaaattgacaat

SEQ ID NO: 1976 - DNA, 661 bp, Homo sapiens
  misc_feature [331]..[331]: Chromosome 4, SNP identification no. = rs4698581
  misc_feature [331]..[331]: allele = a, in linkage disequilibrium with rs16894896, respectively
  misc_feature [331]..[331]: n is a, t, c or g
ttcggggggcacatgtgctgatttgttacatgggtatggtgcatgatgctgaggtttgaggtacaattgatccatcaccaaggtagtaagcataatattcagtttttcaacctttgcctccccagactccctctccctctagcggtccccagtttctattgttgccctctttatatccatgagtactcagtgtttagctcccacttataaatgagaacatgcagtatttggttttctgttcctgcattaatttgcttaggaaaatggcgtctagctgcattcatgttgctgcaaaggacataattttgttcttttttatagctgtgtagtngtccatagaatgtatgtaccacattttccttatgccccaaagctagtccccaattcaggatcaggccatccacctttgatgggtaccaggttgatgccatgtctttgctcttgtgaatagtactgcattgaacatacgagtgtgtgtatcttttagtagaatggtgtatttcctgttggatatatatacccagtaatagaattgccgggtcaaatgataattctgttttaagttctttgggaaatctccaaatggctttccacagtggctgaattaatttatgttcccaccaacagtgcataagcgttcccatttctccacagccctgcc

SEQ ID NO: 1977 - DNA, 661 bp, Homo sapiens
  misc_feature [331]..[331]: Chromosome 4, SNP identification no. = rs4698184
  misc_feature [331]..[331]: allele = t, in linkage disequilibrium with rs16894896, respectively
  misc_feature [331]..[331]: n is a, t, c or g
cattgaacatacgagtgtgtgtatcttttagtagaatggtgtatttcctgttggatatatatacccagtaatagaattgccgggtcaaatgataattctgttttaagttctttgggaaatctccaaatggctttccacagtggctgaattaatttatgttcccaccaacagtgcataagcgttcccatttctccacagccctgccagagtctgctgttttttgactttttaataatagccaaaaaatacatttttaaatattcatgaaagatttaaaaataaaatttcaggaagctccaaaagtagaaattattgcacaatccaaaggcantagaaatttacaacaaaagataaccagcatcatcctatcccaaaataactatttgggaattttaaagagctattttaaataacttctaagtaaaagctgaaattaaaagcaaaattacagaatctgtcaaaattaatgctaatgacggcattatataacaaaaactttaagattcagcctcagtggcattcagagatctttgatacatttattaggttaattatctaactatccaattcaagaattacaaagtaaaaaacaaatataaagaaaaggaaaagaaaggcactaatacataaaataagttaattaagtgtaaaataaacagta

SEQ ID NO: 1978 - DNA, 661 bp, Homo sapiens
  misc_feature [331]..[331]: Chromosome 4, SNP identification no. = rs11099581
  misc_feature [331]..[331]: allele = a, in linkage disequilibrium with rs10031382, respectively
  misc_feature [331]..[331]: n is a, t, c or g
tcagcctcctgagtagctgggactacgtgcatgtgccaccacgcctggctcatttttgtatttttggtagagaaggggtttctccatgttgggtaggcaggtctcaaactcctggcctcaagtgacccacccgcctcggcctcccaaagtgctgggattacaggcatgagccatgacacctggccttgaaataccgaagtatagttttcaactgcggtaggcagcctcaaaggtggtccctactcatggtatttattccttcatgtaatctcctccctttgagttggggctggacctagtgactcacttctgatgaacagagtatgggagnaatgatggtatgccacttctgagattaggttccagagagattgtggcttcttgaatgctttctcttgctctctcttgagttgttcccacttgaagaagccagctgccacgtcctaaggtagctgtaaggtggagaggtccatgtgtctaagacctgaggccttccaacaaccacgtgagggagcttggaagcagcccccactttgtgcggtcttagagaacagaggccctggctgacaccttgttacggccacgtgacacaactggacccaaaaccacctggctaagctgcacctgccttccaaacccacagataacaaatgtttgctgt

SEQ ID NO: 1979 - DNA, 661 bp, Homo sapiens
  misc_feature [331]..[331]: Chromosome 4, SNP identification no. = rs6856697
  misc_feature [331]..[331]: allele = t, in linkage disequilibrium with rs10031382, respectively
  misc_feature [331]..[331]: n is a, t, c or g
cattcccagggctagtcaatacctagagataataaatgcttcacccacctgggagcgtgcatttcatatgcaaaccagctagtccagagctcatacccaaatcaccttctttttttgagacagggtctcactctgttgcccaggctggagtgcagtggagtgatttaagttcactgcacgcctggctaatttctgtatttttagtagagacggggtattgccatggtgcccaggctggtcttgaactcctggagctcaactgatctgcctgccccggcctcccaaagtgctggcattacaggtgtgcaccactgtgcccggcttcaatcangtcctttattgttttcttacactctaggccactgtctgcctggcctaatcaccccagggcctgctacctggcccctgacaactagagacactccctccaccccagagcccgctgaaattattcaagccagccaatgtgaggcctacttaccctgctgcccactctgttccttctcgaggagaccaaaaaaggctcttgcccatatattcccgtctctgcctcctgactgaccccagtgttctacatgtcacatccctcagccccatggcatggtgcatccccttctcttgggatctgtgaatataaccaactgtcttgtcaatggcagtc

SEQ ID NO: 1980 - DNA, 661 bp, Homo sapiens
  misc_feature [331]..[331]: Chromosome 4, SNP identification no. = rs6852031
  misc_feature [331]..[331]: allele = a, in linkage disequilibrium with rs10031382, respectively
  misc_feature [331]..[331]: n is a, t, c or g
tagagacggggtattgccatggtgcccaggctggtcttgaactcctggagctcaactgatctgcctgccccggcctcccaaagtgctggcattacaggtgtgcaccactgtgcccggcttcaatcatgtcctttattgttttcttacactctaggccactgtctgcctggcctaatcaccccagggcctgctacctggcccctgacaactagagacactccctccaccccagagcccgctgaaattattcaagccagccaatgtgaggcctacttaccctgctgcccactctgttccttctcgaggagaccaaaaaaggctcttgcccatntattcccgtctctgcctcctgactgaccccagtgttctacatgtcacatccctcagccccatggcatggtgcatccccttctcttgggatctgtgaatataaccaactgtcttgtcaatggcagtcatctcctgatctgttggccttgcaatacctaaataatatgaaaacctacattttaaaacaacaatgcaatatgcatgtcttcgtagacattgtctattttattttttgttttgataattacaagtgttaaagatcttgtttcacaaagatattttgttgcaaatgaaatgacagctttcatatctgatttttcaaggcttctct

SEQ ID NO: 1981 - DNA, 661 bp, Homo sapiens
  misc_feature [331]..[331]: Chromosome 4, SNP identification no. = rs4693594
  misc_feature [331]..[331]: allele = t, in linkage disequilibrium with rs10031382, respectively
  misc_feature [331]..[331]: n is a, t, c or g
cctgggattataggcacgtgccaccatgcctggctaatttttgtatttttagtagacatggggtttcaccatgttggccaggctagtctcgaaccaatacaacttatattaaaaaggatatgactgtgaatttatggttcagctttgatgccattatgacagaaatagttgttgaaagagttttaagtgtctctagatgtacttagctttctcttcttaaataaatggacagagaactttgtagacatggaattacggagaaacaatgtatatctctgaatgagcaatacagaacacgggagaaataggctgataattgctcaatagcacngattataagaagactgtgtacctatcaggggtctaaaaacttcaataattttgaagtagtagtgagtgaaatgatatttcaaggcatgtctaacaattgaattggctctaaaaatatctgtgatttctactagtggaaagtcatgagttttgttaaaactactggagtttcttgcctacactcataattaagcaaaatgctaaattttattttaaggttagtgaaaacaaagatatattactcccccaaccaaggttctggatccagtttggaacactgttctagagcttaattctcagccactgccatactcccttttccatggtcagg

SEQ ID NO: 1982 - DNA, 661 bp, Homo sapiens
  misc_feature [331]..[331]: Chromosome 4, SNP identification no. = rs11099583
  misc_feature [331]..[331]: allele = a, in linkage disequilibrium with rs10031382, respectively
  misc_feature [331]..[331]: n is a, t, c or g
accttcatgtgcaccctgtaaaagacttcctcttgcatccccttggcagagcccaaaccagctttgatttggtgtttcctgattcacaaatcactactcaaataaactctttaaaattttattgtgccttagtttaacactggtcaaatgcgtactttgtctgagtgttgggtaattcagcactggttaaagtattgtaagtaagggaaatacattttcatcttggagcccaattaagctcccttcccaaaggggcagatgaccccaacgatggcagcttgctgtaatgtgtgttcctggatcggcgatctgttgggttgcaaggacaggnaaggttgataaaggaaaagcatacattacagcaaggtgtgattcctgggtaacagagacaacagactgcctgcattgcctagttgagtgttgaagggagaaaacgttgtaaaaaaaatcaactaataaatgatacttaagtcaaacattgaacatactgcattaaaaaagaccaagaacgatctgcaaataataataaggactaggaaccaagaaagccatctgagtgcatttgacacgagcccagaatagcttgacaaatgtgcccctgaaaagtggcaaacaggagtttcagcagaattggagtcgcttacatgggagcaggggtgat

SEQ ID NO: 1983 - DNA, 661 bp, Homo sapiens
  misc_feature [331]..[331]: Chromosome 4, SNP identification no. = rs6535445
  misc_feature [331]..[331]: allele = t, in linkage disequilibrium with rs10031382, respectively
  misc_feature [331]..[331]: n is a, t, c or g
ttgcctcggagctctgcaggctgactaggccttttggactttccagttttatccaaagcacacaggaggcccctacaaaagaacactccccaggaacctttgtctcaggaaatctttccagcgtctgcctctgaactactctctgtcctgtcctctactccagacttttcccttgtgattaagttcttgtctccttggactaggtcctttgtatcagacagaaagctgcccttatgtgggtgggggcataagtctctctttggttccaccctataaccctgggccagcccttcttattctcaagcagagtcctggatcctgagaccctagnctgaacctgtatcccatccccataatttgagtaggtgaagcaaaaatgaatctgtaccccatccccataatttgagtaggtgaagcaaaaatgatcaaatctggccaggcatggtggctcatccctgttgttccagcactttggggggctgaggcgggagaactgcttgagcccaggagtctgagaccagcctaggcaacatagtgagaccttgtttccacaaacaaacaaacaacccaatctgtgaatgccaagattgcttaagaattaacaaatagcatttgaaaaagatgtaagaattgttaggaacataaaagttataggatacta

SEQ ID NO: 1984 - DNA, 661 bp, Homo sapiens
  misc_feature [331]..[331]: Chromosome 4, SNP identification no. = rs13122305
  misc_feature [331]..[331]: allele = a, in linkage disequilibrium with rs10031382, respectively
  misc_feature [331]..[331]: n is a, t, c or g
ccaatatggtgaaaccccatctctacaaaaactaaaaaaaaaatagctggatgctaatgctctgagatgacagatttttggaactgtggatgtaaagcccatagaccttaacattagtgtgtccagtcccatgacatttcattagcttatggcttctgctccagagactcccaccatttccccattgataagggagaggaaggaggaagtaagagattatttaaaaacagttgtgaaactaccaaggtctgtggttgagagttggttttctaaccaacctttgtctagtctagtctaacctttgactacagacatcatataagggacacgnttgcctcagatgcagaagatatcaggaagggctgatttgttccacactatttgaccacactgattgcaacaggatgtggacatgttttgctatgagtgtgtcctaaaacattggaaagaaaccccacatcctgtcaccctccctgagggcaaggacacttagagtggagaaatctgaggtttaacctgtgctggggatgatgactgatacaacaaaggatataggacctcacctaatgaatttcaaagattgctgatgtaagatgcaccaagaacaaatgttggtgtcctggtagtagagcaggggaccccttgtgagacctgtctttga

SEQ ID NO: 1985 - DNA, 661 bp, Homo sapiens
  misc_feature [331]..[331]: Chromosome 4, SNP identification no. = rs7684212
  misc_feature [331]..[331]: allele = a, in linkage disequilibrium with rs10031382, respectively
  misc_feature [331]..[331]: n is a, t, c or g
agagctttggggcttcttaagtacaatgactaataaaatataaacatacttgctgtctccagggggtttataattaaaatcataatgtatattgacattgtttatcagggtaaagactatactaattggcaggaatagaatactcttttctttttttcaaaagtataagtactgaaaaatttgaccaatctctgtgttctacttactacttctaatgaagacctgacaattctacattaatttaacagtaactttaagcattggatatgttgatttgtaattatcaggagagactgagatcaagcatttatgttggtatatacattactanaaatgatacaaaaatagggctttaataaaatgaagaaacttttttttatttatatgcacctaacagaaactgagatcagtatgtgcaacctatgtctctgccaaatttatcctccttccagccctaccttggagaggggtaatcatctaaaattaaactatttgcagacaatttttcttggaaatgtaatgttaacagaggcaattatttttctttaggctatagaaaaacaaatttttatttatttattttttattttaaaaaataatggagtggcagggtcttgctgtgttgcccagggtgggcttgaattcctgggctcaagtgatc

SEQ ID NO: 1986 - DNA, 661 bp, Homo sapiens
  misc_feature [331]..[331]: Chromosome 4, SNP identification no. = rs6816988
  misc_feature [331]..[331]: allele = t, in linkage disequilibrium with rs10031382, respectively
  misc_feature [331]..[331]: n is a, t, c or g
tgttatcatttctctattatctgtttctcctgacagacctgtagatagtggaactttgaatcttcttcactttattttattgttttaattaattaattaattaattaatttttttttaaagacagagtcttactctgttgtcctggttggagtatagttaagcaatcatagctcactgtaacctcaaacaactgagctcaagcaatcttcctgcttcagcctcccaagtagctaggactacaggcatgcatcacctcacccagcgaatttttaaatttttgtagaaatgaggtcttgctatgttgtccaggttggtcttgaaaccctgacngcaacggatcatcctgccttggcctcccaaagctctggcattacaggtgtgagccactgtgcctggcttccactttattttaagaaggaaaccacaggtaaatattcttacacttttatcactcttgacactacccttccactaggtaactgcaggaacagggtcagatgactgctggggttgttttgaaacttgacatgattaagcctgtgatgccaggataaaaaaaaattacttttctcttgccttttatctgttgtctgtcttttagacatttaactatcagtcttcctacataaaggaataaatggggtaaaaaaaaaaaaaaaa

SEQ ID NO: 1987 - DNA, 661 bp, Homo sapiens
  misc_feature [331]..[331]: Chromosome 4, SNP identification no. = rs4290885
  misc_feature [331]..[331]: allele = a, in linkage disequilibrium with rs10031382, respectively
  misc_feature [331]..[331]: n is a, t, c or g
ctcactgtaacctcaaacaactgagctcaagcaatcttcctgcttcagcctcccaagtagctaggactacaggcatgcatcacctcacccagcgaatttttaaatttttgtagaaatgaggtcttgctatgttgtccaggttggtcttgaaaccctgactgcaacggatcatcctgccttggcctcccaaagctctggcattacaggtgtgagccactgtgcctggcttccactttattttaagaaggaaaccacaggtaaatattcttacacttttatcactcttgacactacccttccactaggtaactgcaggaacagggtcagatgnctgctggggttgttttgaaacttgacatgattaagcctgtgatgccaggataaaaaaaaattacttttctcttgccttttatctgttgtctgtcttttagacatttaactatcagtcttcctacataaaggaataaatggggtaaaaaaaaaaaaaaaaaaagagtttttcccattccaagctggccaaataggaacagctctggcctgcagctcacagtgtgattgatgcagaagacgggtgatttctgcatttccaactgagcctctgctggtgatacccaggggaacagggtctggagtggacctccagcaaactccaacagacctg

SEQ ID NO: 1988 - DNA, 661 bp, Homo sapiens
  LOC391674
  misc_feature [331]..[331]: Chromosome 4, SNP identification no. = rs4637393
  misc_feature [331]..[331]: allele = c, in linkage disequilibrium with rs10031382, respectively
  misc_feature [331]..[331]: n is a, t, c or g
attctaagaactacatctcccagcatgtgtggcagagtggtggcctctgtgcaccatctgcacccgtcagaggcgacaatgcagtgggctgtgagcacggtggccaatcggggttttctcctgcaggcattccctcctgccttgtgtcatctgcttagttgtgcacagaccgagatacgtggtggtgacccggtgaagctgatgcagagtctagtggttggagacactgcagagctgaggccaaaccagaggacactgttgctgtttaccaatgaggctggaggcaccttagatgacttgattgtgaccagcacttctgaggggcacctanatgtgatgtccaacactggctgctgggaaaaagacttggccttcatgcaggacaaggtcagagaactttagaggcagggcagagatgtgggcctggaggtagtggatactgccctgctagccctgaaagggccccctgtggcccaggtgctacaggccagcacggcagctgacctgaggaaactgccttcatgactagtgctgtgatggaggtgtttgacgtgtctggccgccaccttacacactgtggctgcacaggagagaatggtgtggacatcttggtgccagcagcgggggcagttcaccccgcatcagctcttctggaaaaccc

SEQ ID NO: 1989 - DNA, 661 bp, Homo sapiens
  LOC391674
  misc_feature [331]..[331]: Chromosome 4, SNP identification no. = rs4396979
  misc_feature [331]..[331]: allele = t, in linkage disequilibrium with rs10031382, respectively
  misc_feature [331]..[331]: n is a, t, c or g
gaggcgacaatgcagtgggctgtgagcacggtggccaatcggggttttctcctgcaggcattccctcctgccttgtgtcatctgcttagttgtgcacagaccgagatacgtggtggtgacccggtgaagctgatgcagagtctagtggttggagacactgcagagctgaggccaaaccagaggacactgttgctgtttaccaatgaggctggaggcaccttagatgacttgattgtgaccagcacttctgaggggcacctacatgtgatgtccaacactggctgctgggaaaaagacttggccttcatgcaggacaaggtcagagaacttnagaggcagggcagagatgtgggcctggaggtagtggatactgccctgctagccctgaaagggccccctgtggcccaggtgctacaggccagcacggcagctgacctgaggaaactgccttcatgactagtgctgtgatggaggtgtttgacgtgtctggccgccaccttacacactgtggctgcacaggagagaatggtgtggacatcttggtgccagcagcgggggcagttcaccccgcatcagctcttctggaaaacccagaggcaaagctggcagtgctggcagcttgcgcctggaggcaggcctccggctgtacaggagtgacact

SEQ ID NO: 1990 - DNA, 661 bp, Homo sapiens
  LOC391674
  misc_feature [331]..[331]: Chromosome 4, SNP identification no. = rs10031382
  misc_feature [331]..[331]: allele = a, g
  misc_feature [331]..[331]: n is a, t, c or g
cattggggaagtgccactgagctgctctcgacttccctggagccaaggtcattgttccccagctgaagggaaagtgcagtggaggcgtgtggggttgatgtgtgagggggccctgatgcaggcacacagtcccacctgagcatggagggcccatgattggtactgtgaccagtggctgtcccttgccctacctgaagaagactgtggcaatgagttacatgccctgccagtagtcagccagggataatgctgctggtagaggtgcggcagaagcagcagatgggcgcagtcagcaagatgccctttgcgcccatgaactgctctaccctcntgtgaggatggctcagggcaggaccatcccctccagaagtcttgccctagagggcattctacaagggcttaggcaggaagctgaggcagaactcactgggggtgggcagctaaggggcaggttggttttagttgtctggttaagggggccataccacctactctctccacccaacccatggccactccagctccaggaccctgtttctgagcgacagaccagccattcaatgtcttctttcggtccatgatcccactgacccactctagcctgatggagggaaatgagcagctctggttctgctatctctcccactctgccaggtgctgg

SEQ ID NO: 1991 - DNA, 661 bp, Homo sapiens
  misc_feature [331]..[331]: Chromosome 4, SNP identification no. = rs6848459
  misc_feature [331]..[331]: allele = c, in linkage disequilibrium with rs10031382, respectively
  misc_feature [331]..[331]: n is a, t, c or g
attcgcattgcaaggagtcattaccatgggcaatatgggctcaggccactccttccagtttgctttccataaatgcaaactgtccctaccgtgagtcaggaatgactcctgactcacagtggggctgctgtaaacttggggatggttgagggaacacagacacagtcttccatgctccccaggtggtccagcctgctgcccagaagcaaaccatggcaggctcaccaccggttctatgccgcagggctgttgtaggacaggctgggctttctcctggactcaccttaccctgggctgacctttgcccctggtatccaataatggcctccantaaatcctgaaaaaaaaattaaacacacttccttcttaaaaataaatattctaaaagttctgaggaaattattattattattattttgagacagggtctcactgtcacccaggctggagtgcagcagcacgatcatggctcactgcagcctccacctcccaggctcaaatgatcctcccgcctcagccctgaaagtagctgggactacaggcatgcaccaccacacctggctaatttttgtattttttatagagatgggggctcatcatgttgtccaggttggtcttgaattcctgggctcaagtgatcctcctgcctctgcttcccaaa

SEQ ID NO: 1992 - DNA, 661 bp, Homo sapiens
  misc_feature [331]..[331]: Chromosome 4, SNP identification no. = rs6847179
  misc_feature [331]..[331]: allele = g, in linkage disequilibrium with rs10031382, respectively
  misc_feature [331]..[331]: n is a, t, c or g
gtttgctttccataaatgcaaactgtccctaccgtgagtcaggaatgactcctgactcacagtggggctgctgtaaacttggggatggttgagggaacacagacacagtcttccatgctccccaggtggtccagcctgctgcccagaagcaaaccatggcaggctcaccaccggttctatgccgcagggctgttgtaggacaggctgggctttctcctggactcaccttaccctgggctgacctttgcccctggtatccaataatggcctccactaaatcctgaaaaaaaaattaaacacacttccttcttaaaaataaatattctaaaanttctgaggaaattattattattattattttgagacagggtctcactgtcacccaggctggagtgcagcagcacgatcatggctcactgcagcctccacctcccaggctcaaatgatcctcccgcctcagccctgaaagtagctgggactacaggcatgcaccaccacacctggctaatttttgtattttttatagagatgggggctcatcatgttgtccaggttggtcttgaattcctgggctcaagtgatcctcctgcctctgcttcccaaagtgctgggactataggcatgagccaccacacccagccagaaagttatttttaactca

SEQ ID NO: 1993 - DNA, 661 bp, Homo sapiens
  misc_feature [331]..[331]: Chromosome 4, SNP identification no. = rs11944281
  misc_feature [331]..[331]: allele = c, in linkage disequilibrium with rs10031382, respectively
  misc_feature [331]..[331]: n is a, t, c or g
tccctcccaaacaatgcagcagctgagtggtggctggattgccagattctgggggtgctggtttgcccagtattttcatagttgagtgcagatactcccatgccctggcaaaccaggaggtttgctcaccctagctgggggataagcaggccttacgtgcccacctaggaaggtctgagtttatcagtacagtagcatcatgaacaaacagccaccaggtacagcttcctagaagcctctttcctcagagaagaaaagacaagataatcatcccccttaaaatggcagatttgccactggatccagttgccttgtgttttcctcatcactnacactgtggtgggtgtcagctggagttccaggccctccagaccagggttgagggttttttcaccttgtaccccaaggaggcaaaatagagtaacagtcaagagtggaggctgcgactcctgaccacctacggtcaaatcgctgctctgcgccttccttaggagtggtggctttataattgtcaacttggctagactgaactacatgtcccacagttcttctgcctgcatggctctggttagggtgggccaccagagacattcttcaatcaagaccctctgcatctgtaaatttattaagtctgaaaactgggtaaaaggctgtgactttt

SEQ ID NO: 1994 - DNA, 661 bp, Homo sapiens
  misc_feature [331]..[331]: Chromosome 4, SNP identification no. = rs10026779
  misc_feature [331]..[331]: allele = c, in linkage disequilibrium with rs10031382, respectively
  misc_feature [331]..[331]: n is a, t, c or g
ctgcgactcctgaccacctacggtcaaatcgctgctctgcgccttccttaggagtggtggctttataattgtcaacttggctagactgaactacatgtcccacagttcttctgcctgcatggctctggttagggtgggccaccagagacattcttcaatcaagaccctctgcatctgtaaatttattaagtctgaaaactgggtaaaaggctgtgactttttactatgatgatgcaagctacatttttgactacccatccattttgttcctaggaacactatgatcaattaccaccacagatctttgtgagctaaggcaactggttagcantatgttcctgctgccctgtattgtaaatatgtccacgcttcttgtctttggtggttaaatgcagtcactttgactctgcctctctgggattccatcatccccattgaaatctggaagcctctctcaatggtcgcattctttacagccacacgtagcctgcaaaggagacacccacagagcttttccagtctgctggtgccttagtgcagggagttgtctcctgactcttttcctggaacatgctgggggctgggcatgcagtttgcacatggtaaatccagtcccatttgcctatcgccctaagcctttggagtctctcttccatattgt

SEQ ID NO: 1995 - DNA, 661 bp, Homo sapiens
  misc_feature [331]..[331]: Chromosome 4, SNP identification no. = rs10004019
  misc_feature [331]..[331]: allele = g, in linkage disequilibrium with rs10031382, respectively
  misc_feature [331]..[331]: n is a, t, c or g
tgtctttggtggttaaatgcagtcactttgactctgcctctctgggattccatcatccccattgaaatctggaagcctctctcaatggtcgcattctttacagccacacgtagcctgcaaaggagacacccacagagcttttccagtctgctggtgccttagtgcagggagttgtctcctgactcttttcctggaacatgctgggggctgggcatgcagtttgcacatggtaaatccagtcccatttgcctatcgccctaagcctttggagtctctcttccatattgtgacaggaaagctgtctagttaaagtgcgctcataggaatgaanttagcctgctctagtgttctatcccactattctcattcgaacatctttaggatgtacttccacacatgttccccaggtctctgaagatacacattagaaaagtgtggcaattcttttggcgtataaactatttcttgctgggtcatggtggatccctgtcctactggaacttgctgagctttggcaataatcatgagtctagtggcaacaaggggtggttgtggtagatttagagaatgagtaactccttttaaggcatctgtccccagatgagcttaacacagatatttaagcagaggaaggctagtcttctaccaagagcaagctact

SEQ ID NO: 1996 - DNA, 661 bp, Homo sapiens
  misc_feature [331]..[331]: Chromosome 4, SNP identification no. = rs10027145
  misc_feature [331]..[331]: allele = c, in linkage disequilibrium with rs10031382, respectively
  misc_feature [331]..[331]: n is a, t, c or g
tctctgggattccatcatccccattgaaatctggaagcctctctcaatggtcgcattctttacagccacacgtagcctgcaaaggagacacccacagagcttttccagtctgctggtgccttagtgcagggagttgtctcctgactcttttcctggaacatgctgggggctgggcatgcagtttgcacatggtaaatccagtcccatttgcctatcgccctaagcctttggagtctctcttccatattgtgacaggaaagctgtctagttaaagtgcgctcataggaatgaagttagcctgctctagtgttctatcccactattctcattngaacatctttaggatgtacttccacacatgttccccaggtctctgaagatacacattagaaaagtgtggcaattcttttggcgtataaactatttcttgctgggtcatggtggatccctgtcctactggaacttgctgagctttggcaataatcatgagtctagtggcaacaaggggtggttgtggtagatttagagaatgagtaactccttttaaggcatctgtccccagatgagcttaacacagatatttaagcagaggaaggctagtcttctaccaagagcaagctacttccacaggagagggaagctcaaaactatacattcaact

SEQ ID NO: 1997 - DNA, 661 bp, Homo sapiens
  misc_feature [331]..[331]: Chromosome 4, SNP identification no. = rs10029426
  misc_feature [331]..[331]: allele = c, in linkage disequilibrium with rs10031382, respectively
  misc_feature [331]..[331]: n is a, t, c or g
tgactcttttcctggaacatgctgggggctgggcatgcagtttgcacatggtaaatccagtcccatttgcctatcgccctaagcctttggagtctctcttccatattgtgacaggaaagctgtctagttaaagtgcgctcataggaatgaagttagcctgctctagtgttctatcccactattctcattcgaacatctttaggatgtacttccacacatgttccccaggtctctgaagatacacattagaaaagtgtggcaattcttttggcgtataaactatttcttgctgggtcatggtggatccctgtcctactggaacttgctgagntttggcaataatcatgagtctagtggcaacaaggggtggttgtggtagatttagagaatgagtaactccttttaaggcatctgtccccagatgagcttaacacagatatttaagcagaggaaggctagtcttctaccaagagcaagctacttccacaggagagggaagctcaaaactatacattcaactattgttgtaagtcagcaacccacacccttaaattttatgtttaattttttagcaatatcagccctctggctgtgagcaataaaagattcttttagggctatcctcaaagctctgtcgtcctctaacaatgacttgagctca

SEQ ID NO: 1998 - DNA, 661 bp, Homo sapiens
  misc_feature [331]..[331]: Chromosome 4, SNP identification no. = rs7356196
  misc_feature [331]..[331]: allele = g, in linkage disequilibrium with rs10031382, respectively
  misc_feature [331]..[331]: n is a, t, c or g
tatgctcagaaaaatctgtcccacagtacattccttacaggcatcatgtactgccgtaacagttagttgcaactgccatttgggctcctaagacacttgctttggttacaacttcattacaattagccacaagtgctagcttgatgtgtgatgtccctgcatgccacaggtcactagcttcccatttcccattgctaaggagttcagcactgtgctgaactccaaggacagggtcagccctcaaatcccacctccgcaggtctatctcctaggactactcccagcaccattttgtggcagttggattctgtactagtccagaatcggagtntaatttgaacagggaaagtttaataaatagtattaactagaggaggggaataactaaaaggggtaagcagaatgctaaagagtactctagagctgagaaaaatacttgaggaagaagcaaacttggaagggattcctctggtcaagctggaattcaagctctgctggagaaggtgtggctgcagtccactggagggtggacaagtttgctgggttgatccaggccagagccagtctaagtcactggacaggcaggtaatattcttctagggagcagggggacggaggctggccagaaaaccacagttaggactaccaagtgggaaacatg

SEQ ID NO: 1999 - DNA, 661 bp, Homo sapiens
  misc_feature [331]..[331]: Chromosome 4, SNP identification no. = rs7356201
  misc_feature [331]..[331]: allele = g, in linkage disequilibrium with rs10031382, respectively
  misc_feature [331]..[331]: n is a, t, c or g
ttgatgtgtgatgtccctgcatgccacaggtcactagcttcccatttcccattgctaaggagttcagcactgtgctgaactccaaggacagggtcagccctcaaatcccacctccgcaggtctatctcctaggactactcccagcaccattttgtggcagttggattctgtactagtccagaatcggagtgtaatttgaacagggaaagtttaataaatagtattaactagaggaggggaataactaaaaggggtaagcagaatgctaaagagtactctagagctgagaaaaatacttgaggaagaagcaaacttggaagggattcctctngtcaagctggaattcaagctctgctggagaaggtgtggctgcagtccactggagggtggacaagtttgctgggttgatccaggccagagccagtctaagtcactggacaggcaggtaatattcttctagggagcagggggacggaggctggccagaaaaccacagttaggactaccaagtgggaaacatgtctctgggatgcacgtgagaaggttggcaaaccactccgaggtgtaggagagggctgaggctagtggatggacctgtgcagggattgagggcatcaagaacccctttactgactgcttgtcatgaagcctggtgttagga

SEQ ID NO: 2000 - DNA, 661 bp, Homo sapiens
  misc_feature [331]..[331]: Chromosome 4, SNP identification no. = rs6825902
  misc_feature [331]..[331]: allele = g, in linkage disequilibrium with rs10031382, respectively
  misc_feature [331]..[331]: n is a, t, c or g
taggggcatctttccttggcttgtcttccaccagtgccttcacatgtttccttttgtgggagtctgtgtcctcaactcctcttcttgtaaggacaccaggcatatcaaattagggcccacactagtaatctcatttaaccttaataacctctttaaagaccctatctccaaatacagtcacattctgaggtattgcaggttaggatgtcaacatgaatttggggggacacaatttagcctgcaatagttggggaggagcattactggatgtccctgccatatgttgcttacagccaggagcagaagcaagaagcaaatggaaacacgcccnaccaggaagaagccctttcctcctgcagggtccctccagcgccctctactgaaaaagtctgacatcccactcactgcaaaggagaaaagtctacaggattcaactccactattgcagagtagataatgaaggacggatttagagctgagaggcaataaattaataacaagcacactggttcttcagctttcccagcatttctgtgagttttctaatgtcctccagagaaaatgtgtgcctaaactgaccggtttacaactgagaacactggcaaatttgcagtttcccacttttttttttttttttgacagtagttatgcattatggtac

SEQ ID NO: 2001 - DNA, 661 bp, Homo sapiens
  misc_feature [331]..[331]: Chromosome 4, SNP identification no. = rs10002954
  misc_feature [331]..[331]: allele = g, in linkage disequilibrium with rs10031382, respectively
  misc_feature [331]..[331]: n is a, t, c or g
aatgtctttaacactttcctctcttcaaggaaatgatgtaaactgaaagcaatttatgtttatgaggcattcctgcaatgggacatgacctctgatcccaataattctttcccagatgctgtgttgacatttctactgcttaagtataaagcaagtaaaagccatgattatttcagtttgttactatgccaatgctgcctaagaaaaaaattactaacttgaattttcaagattgttgaagagttttaaacgagataaacaaatataaatctagttaacatttgcatgcattactttccatttctttacatgaatttatacttcgttaatnggtaggatatccctagatatatatatatatattttaaatatttttttttttgagacagagtcttgctctgtcccctaggctgaaatgcagtggcgtgatcttggctcactgcaacctctgtctcctgggttcaagcgattctcctgcctcagcctcccaagtagctgggattataggcacctgccataatgccaggctgttttgtatttttaggacacggggtttcaccatgttggccaggctggtcttgacctcctgacctcaggtgatccaccagcctcggcctcccaaagtgctgggattacaggcctgagccactgtgcctggcct

SEQ ID NO: 2002 - DNA, 661 bp, Homo sapiens
  misc_feature [331]..[331]: Chromosome 4, SNP identification no. = rs7667017
  misc_feature [331]..[331]: allele = g, in linkage disequilibrium with rs10031382, respectively
  misc_feature [331]..[331]: n is a, t, c or g
aatacttaccattgtgttacaattacctacagcatgaagtacagtatgctacgcaggtttgtagcctaggggcaatagactatataccacatagcctaggtgtgtagtaggctagacaatctaggtttgtgtacatgaactctataatgtctgcacagggatgaaattggctaatgatgcatttctcagaaagtatctccatctgtaagtgacatatgactgtatatcatatgttttaatatggagaaaaagcagtgagagagaaaaagaagtttgtgtaatggtgtgtgttaagtcttagaaaatgaagacaatggtttcactgaatcgntgacttttgggcaaatactgaaggaggtgaggaagtatccatggcaacatctaggaaagcattccaggaaccccaacgaggccagaaggctgcagcggcagaaggcctgcagcagcactggcgagggagggagtggaagaagagccagaaggcagcaggagcccgctcactgagggtccttcagccatgctaaggactttggctttacactgggagaaatggggaggtatggggaggttctgagttagaggaatgacatacgctggctttggttgtagcaggatcggcctggctgctatggtgaggacacatgaaagggggcaagggaga

SEQ ID NO: 2003 - DNA, 661 bp, Homo sapiens
  misc_feature [331]..[331]: Chromosome 4, SNP identification no. = rs6535450
  misc_feature [331]..[331]: allele = g, in linkage disequilibrium with rs10031382, respectively
  misc_feature [331]..[331]: n is a, t, c or g
aggccagaaggctgcagcggcagaaggcctgcagcagcactggcgagggagggagtggaagaagagccagaaggcagcaggagcccgctcactgagggtccttcagccatgctaaggactttggctttacactgggagaaatggggaggtatggggaggttctgagttagaggaatgacatacgctggctttggttgtagcaggatcggcctggctgctatggtgaggacacatgaaagggggcaagggagaaggagggagaccagtgaggaggctaatgtgttaatccagcggggagaagatagggacttgggccagggtggcagctgtngaggtggtaggaaaagattagattctgcatgtattttgaaggtagaaccaatatgcttttctaatgtcttgaatatggaatgtgggaaaaaggagtcatggttgattccaaggttttggtcagagcaaaaggaaaaggagatgccattaatgagatggcaagaagggtgggaggaggaggtttgaggctgagatcaggagttcagttttgaacatattgaactggaggtgcctatttggcattcatgttgaaatatcaagtaggcagttcaatattcaattctgccaagtgcaagttcaaaagggaagtttaggctggaggtacacattt

SEQ ID NO: 2004 - DNA, 661 bp, Homo sapiens
  misc_feature [331]..[331]: Chromosome 4, SNP identification no. = rs6535451
  misc_feature [331]..[331]: allele = g, in linkage disequilibrium with rs10031382, respectively
  misc_feature [331]..[331]: n is a, t, c or g
aaatggggaggtatggggaggttctgagttagaggaatgacatacgctggctttggttgtagcaggatcggcctggctgctatggtgaggacacatgaaagggggcaagggagaaggagggagaccagtgaggaggctaatgtgttaatccagcggggagaagatagggacttgggccagggtggcagctgtggaggtggtaggaaaagattagattctgcatgtattttgaaggtagaaccaatatgcttttctaatgtcttgaatatggaatgtgggaaaaaggagtcatggttgattccaaggttttggtcagagcaaaaggaaaagnagatgccattaatgagatggcaagaagggtgggaggaggaggtttgaggctgagatcaggagttcagttttgaacatattgaactggaggtgcctatttggcattcatgttgaaatatcaagtaggcagttcaatattcaattctgccaagtgcaagttcaaaagggaagtttaggctggaggtacacatttgggaataatcagtatacagatgacatttaaagtcaggagtttagatgagatcattttctcatgcaattcttaaaacaccagcatgaggtagatattattttaattcccattttagatataaagagataggctggagag

SEQ ID NO: 2005 - DNA, 661 bp, Homo sapiens
  misc_feature [331]..[331]: Chromosome 4, SNP identification no. = rs6813311
  misc_feature [331]..[331]: allele = t, in linkage disequilibrium with rs10031382, respectively
  misc_feature [331]..[331]: n is a, t, c or g
ctatggtgaggacacatgaaagggggcaagggagaaggagggagaccagtgaggaggctaatgtgttaatccagcggggagaagatagggacttgggccagggtggcagctgtggaggtggtaggaaaagattagattctgcatgtattttgaaggtagaaccaatatgcttttctaatgtcttgaatatggaatgtgggaaaaaggagtcatggttgattccaaggttttggtcagagcaaaaggaaaaggagatgccattaatgagatggcaagaagggtgggaggaggaggtttgaggctgagatcaggagttcagttttgaacatantgaactggaggtgcctatttggcattcatgttgaaatatcaagtaggcagttcaatattcaattctgccaagtgcaagttcaaaagggaagtttaggctggaggtacacatttgggaataatcagtatacagatgacatttaaagtcaggagtttagatgagatcattttctcatgcaattcttaaaacaccagcatgaggtagatattattttaattcccattttagatataaagagataggctggagaggtttaaatagttcactctaagtcattcagttagtaactgtagggactccaatgttcattcttatctctaagagatagtt

SEQ ID NO: 2006 - DNA, 661 bp, Homo sapiens
  misc_feature [331]..[331]: Chromosome 4, SNP identification no. = rs9999909
  misc_feature [331]..[331]: allele = c, in linkage disequilibrium with rs10031382, respectively
  misc_feature [331]..[331]: n is a, t, c or g
gttcacccgatgtacaaaaattacaaatgtttactgagtgcttacagtgtggtatactggggacatttcaatgaataagacaaacaaggtcccactgatcatgaaatctccattctcgcaagggaagacagagaatttttaaatccatgagaaaggtattaggattatacctatttgagtatttgagccaccgagaggtcagggaactttcccaagagcaaccaactggtaggcaggtgttacagcagattccaaccctggcaagctgtcgtcatgatagcgttcttagttcctgctccactggcacccagagggtggagggtgtactttnagttggaggaaacattagggtgaggccagattataaaaatcaggtagaggcattaaacaatttagcaaagaaatccgggaagagggagaggcagcccttgtgatatggtatattggggatatttcaatgaataagacaaacaaggtcccacttaccatgaaatctccattcgcaggggaagacagaaaattttgaaatgcatgagaaaggtattatgattatccccgagtgagccacagagaggtcagggaacttgcccaagatcacccaactgataggtgttaaagcagattccaaccctggcaagctgtggctgtgactggcattcac

SEQ ID NO: 2007 - DNA, 661 bp, Homo sapiens
  CL640
  misc_feature [331]..[331]: Chromosome 4, SNP identification no. = rs4515150
  misc_feature [331]..[331]: allele = c, in linkage disequilibrium with rs10031382, respectively
  misc_feature [331]..[331]: n is a, t, c or g
gaagagtgaggccagtggggctacaggtgtgagtgtgagaagtcagacatgaagccaagtcatggagggcctggcaggtggtaggactttcgttttgtactgagtgacctagggagatcctggagggttctggggagaggaatgacatgaccttactcaggttttaagagaattactctggttactgtgttgagaacattgtgaaggtgagggcaggtaaaggaaaaaacagtaaacatttaaatatcactatcctataaactataatgggataagataaaaaagatatagacagaaaatcaaggtagtctctggtgactgcccacttgtntgttctggtcactgtgactgcacacagagaccaaatctcccaaataaaagtcagggttggtaaacagtggtacatgtggctataatagctaaatacttctatttggttatttaaattctcctaaaacataaaaaaacagaattggtttcctaaattacagtttttggcagtgactaaaggtcacaataaagaacagtaaggcccaacttcccatagttgcttttatttttccctaaaaaaaagagtccattttcttatacagacattcatttatgtaagacccacatcaggctttttctaaagtgccaaaacccgtgcaatccccataac

SEQ ID NO: 2008 - DNA, 661 bp, Homo sapiens
  CL640
  misc_feature [331]..[331]: Chromosome 4, SNP identification no. = rs4693596
  misc_feature [331]..[331]: allele = t, in linkage disequilibrium with rs10031382, respectively
  misc_feature [331]..[331]: n is a, t, c or g
gcatctccatatactgttgtaaataatgatggtcacgtagtatcagtggctgtatgctgaactctctgcactgacctaccggcagacagcaacctgacaggctctcttttggggcccaaatccaaataacaatgactgtgggtgtttctgtttttcctttcatactagaatcaccttcagggtgcaaactgtgtctatagttattatgtgaaccacaaaagtgccaatgagtatgtggtgttttcctgaagttgttaatctaattggagtactggtatcctaagcactcattccagaccttaccgcaaaaagtacaggcatctcttctaanctgtaagtcaagtttcactttggaagtaagactgattacagatccgccttttcatgatactacaaatgtagcagggcatagggggtttagtggaagaaaacagaatgaaatccagacatattcttcaagtaaatgactgagaatatataatcatatttcagaaaaatactgagaaaaacttttttgaaaagtttataaatgtattctcagaacatgtactatcaaatcatcacactgtataccttgaatatgcataattttatttgtcagttacttctcattaaagctgggggagagtttataaatgtaaaagaaaaaaatgagttttta

SEQ ID NO: 2009 - DNA, 661 bp, Homo sapiens
  CL640
  misc_feature [331]..[331]: Chromosome 4, SNP identification no. = rs4693597
  misc_feature [331]..[331]: allele = t, in linkage disequilibrium with rs10031382, respectively
  misc_feature [331]..[331]: n is a, t, c or g
gtggctgtatgctgaactctctgcactgacctaccggcagacagcaacctgacaggctctcttttggggcccaaatccaaataacaatgactgtgggtgtttctgtttttcctttcatactagaatcaccttcagggtgcaaactgtgtctatagttattatgtgaaccacaaaagtgccaatgagtatgtggtgttttcctgaagttgttaatctaattggagtactggtatcctaagcactcattccagaccttaccgcaaaaagtacaggcatctcttctaacctgtaagtcaagtttcactttggaagtaagactgattacagatcngccttttcatgatactacaaatgtagcagggcatagggggtttagtggaagaaaacagaatgaaatccagacatattcttcaagtaaatgactgagaatatataatcatatttcagaaaaatactgagaaaaacttttttgaaaagtttataaatgtattctcagaacatgtactatcaaatcatcacactgtataccttgaatatgcataattttatttgtcagttacttctcattaaagctgggggagagtttataaatgtaaaagaaaaaaatgagtttttaaaatggaatttatcaaaaaggcaatatcaaaagctataaaaatgc

SEQ ID NO: 2010 - DNA, 661 bp, Homo sapiens
  CL640
  misc_feature [331]..[331]: Chromosome 4, SNP identification no. = rs6535454
  misc_feature [331]..[331]: allele = g, in linkage disequilibrium with rs10031382, respectively
  misc_feature [331]..[331]: n is a, t, c or g
actgttgggggattaagtctgtaaagtacttaaaacagtgcctggcacatagtaaatactactttattgcttgtaaataaaataaatgagttgaattttggtaaacacacataaacataaaaaaaattttgttggagccatggaactgtgaatgactttctttttagaaaaaaaaaattcttcctccttaatttggttcttaaagttcttaaaaaacaacaacaaattttagaaaaaaatgctttctccttaatttggttctttaaaaacagcaacaactaaaccaaagttaagaaaagataatttctttacctgatgggcataaatagtntcatatattagtgtccacataactccagaaaaataaagaggcaggcaaacagatggatcacaggaacccttgatagcagaccatccaagtaacgctccccaattaaatgtcaagcctacaattagcaaaacacaaaaagggggaaagtctgtatgtactttagaatcctaaagggaaggagtggcatcggagtgtgttcagtgctcctgggtatcagactctgtgtgtgctgctttctgtgggttccttccttaaaccctttcaactctcggtggtacttattagctccattttacaaaaaacaaaacaagctcagagaggttaattaac

SEQ ID NO: 2011 - DNA, 661 bp, Homo sapiens
  CL640
  misc_feature [331]..[331]: Chromosome 4, SNP identification no. = rs4693075
  misc_feature [331]..[331]: allele = c, in linkage disequilibrium with rs10031382, respectively
  misc_feature [331]..[331]: n is a, t, c or g
aagtgcctctcctttgtggtcccatagcactcctgcctgacacgttgtactgcaatgacctgtttatctgtcatctccatctccaactccttaaagatggtcagggtgttttagtcatttttattttcccagtacctgctgcaattcctagcacgaagtaaatgtaggggttcagtaaatgtttggagtaaatataccagcttcttaatattatcttatagataggaaatgcttatattgagaatataatttcaaatttaataaagagaacattcaatgagaggatcttagaaaaagataaatattctaccacaactttcccacaaatcangctcacatcaatttcttgagttgcttttagttctttcatttactgaaaaaaatgattcaaagaactagaatcattctaggaatagaatagaaaagtctgggaatagatatttttgcagcagattctgatacctgcttacctaactatgtttctttcttttcaccaacaagtatgtattcaatacctacaccgcaccaagtgctatgctaaatgctgggccacaatttattaactggagaccataggaggctctcaacgtattcttggttgaattaatgctgctgaaataagtaagtgccggattagaatcctatggtagcccagaagaga

SEQ ID NO: 2012 - DNA, 661 bp, Homo sapiens
  HPSE
  misc_feature [331]..[331]: Chromosome 4, SNP identification no. = rs4693602
  misc_feature [331]..[331]: allele = g, in linkage disequilibrium with rs10031382, respectively
  misc_feature [331]..[331]: n is a, t, c or g
gtagtgctggtggaactgaacgctcattgcccacagcagcaaactcaacagcaaaaattaatattggttttttcttcacttccctctcacactccctgttctttcattccttattcccaaataacccacctgacccaagtccttgtctcagactgtgcattggaaaacccccacttctgatcctgatagtataacaaggggtgaaacaacacactagtggttctatatcctgtttccaggtataaacaaagcagtgaaggaaaacaaggcttccaaatgtaggagtctgtaggctttacattactaaaagaatagtcatacaatatcaagnttataaaaattactttatttcaaatgtgaaaatataaaaaccacttacatataaaatttaagagtattgaaagatctaaaatttaattttcagctttagctccttacaaatatacttaaattgaatgaaattgaatggaattaacctaagtgtccatcaactgataagtggataaagaaaatgtggtatatatgtaccatggactattactcagccataaagaagaataatgtattttgcagcaacttggacggaactgggggctgttatcctaagggaagtaactcaggaatggaaaaccaaatactgcatgttctcacttataagtgg

SEQ ID NO: 2013 - DNA, 661 bp, Homo sapiens
  HPSE
  misc_feature [331]..[331]: Chromosome 4, SNP identification no. = rs10025120
  misc_feature [331]..[331]: allele = a, in linkage disequilibrium with rs10031382, respectively
  misc_feature [331]..[331]: n is a, t, c or g
ttgatcatccaccatctttagagttagaccattgagttggacagatctgcaaaggagaaagatacaccgagttaaccaagtggtgcatgccccacccatgctgctacaaaagtcatgaaatcttttttagaccaaataaatttttttttgtggcagcctatattatataacttgtatttcaacactatatcacttaggcatttgacctagataatctttaagctacaatggcagggatgagtagttatgatagagaccatatggactccaaagccagaaatacttactgtctggcccattacagaaaatggaacacacacaatctatatantaggcaatatgatggtggtataaaaaggataaacatgacacaacttctggaatggtggctattttatttaatggccaataattgaaaccttttttatgtaaagaaaatagatatatagaattgaatgcagtttttatgaatttagcataaatggtagccaatgaaatttctcacttgtaactatgcccataaactgcctaactcccctctccctgcaggaggtatgcattcattttcttactgttattaagaaattttggtagaatgctgtggtgaaacaaaaacaatttggctaaactacagaaaattttatattttctatgtatttca

SEQ ID NO: 2014 - DNA, 661 bp, Homo sapiens
  HPSE
  misc_feature [331]..[331]: Chromosome 4, SNP identification no. = rs12503843
  misc_feature [331]..[331]: allele = g, in linkage disequilibrium with rs10031382, respectively
  misc_feature [331]..[331]: n is a, t, c or g
gaagtgatctgcctgcttcagcttcccaaagtgttgggattacaggcatgagccactgcgccaagcctgtaaactctttttatgctccaatatgagaatagtcatgagaaaggaactccttccaacatacattgaacagaaaccttaaaatatttatatgcctaactcttcaagactcatagtcattttttggcactccattgaatacaggcttttataagatgtagtcaataattggtttttgaaaccaaagtgtatgagaatctacttaagaagtatactctagctattctttttcttactctaaccaataaaaattaatgctgtaaangaatcacactgatctcacatggtatgatattttataccaacccacatacctttgatagcaattatataaaggtatattttgctttagtgaatgtgttaccaagaattatgtctttttagagtaaataatttaaatgcgttgagtggatcttgatatgtcaagttattttgaaatgcaaacttattctctaagataactgctagtttgtgttcacatccttttgctttagactcttagggtgagttatactcatattagtaagtattcatacataaatttcctgaatattaagaattattacactttgggaggacgaggcgggcagatcac

SEQ ID NO: 2015 - DNA, 661 bp, Homo sapiens
  UNC5C
  misc_feature [331]..[331]: Chromosome 4, SNP identification no. = rs4699847
  misc_feature [331]..[331]: allele = c, in linkage disequilibrium with rs10049501, respectively
  misc_feature [331]..[331]: n is a, t, c or g
aacatgagctccatgagggcaaggatggttgcatgttttgtttctagtaccaaccccaatacccacaattgtcccaagaacagagtgaatcttcacttagtatttgtctaagtgaacaaatacatacaaacatatacatatatatgttgtgaaaggtagtaagataagggtgcaatgcttcagcatgaagaatagctgaaaggcatggaaatcaaagtagttttaatctagtgtgattacaatgtagaaatccttacccttccgagctagaaacataggttggatatgtaaaccacaaaatgtagttgttattggctgaactacatcccantcccccaaattctgatggggaagccctaaccctcagttcctcaggatgtgactatattgggatataagacttttaaagaggtgatcaagttaaaatgaagctgttagggtgggccccaacccaatctgactggtgtccttataagaagaagaaatttggacacacagagacaccagggatgtgcacacacacagagtaaagactatgtgaagacacagtgagaaagaggccaccagcaagccaagaagagcggcctcaggagaaaccaaacctgctgacaccttgagattgcacttccagccttcagaactgtgagaaaataaatttcta

SEQ ID NO: 2016 - DNA, 661 bp, Homo sapiens
  UNC5C
  misc_feature [331]..[331]: Chromosome 4, SNP identification no. = rs1531866
  misc_feature [331]..[331]: allele = c, in linkage disequilibrium with rs10049501, respectively
  misc_feature [331]..[331]: n is a, t, c or g
gtgttttaagcaagtagatgacatgatcagatgagaattaaatatatacatatatgatatataaaatagatatgtgtgtatgtgtatgtgtacatgtgtatatctgtgtgtatgtgtatgtgtattcaattctttatagtttaataagttcataaaagttataatttctcaaaatgtttgattataggtgacaggagagggtatattttctggaactccttaaaaactgtattttagaactttccttaacacctagaaaatattcaaatgactaaacacactcagggaaatgaacaactacccaatgggagtaggagctgtcccactgggngaacaaacaatatttcctatcaagagctgatgaggcttgtgtcatagaaactactaagctcataggcccattaatgactagctaaatggtaatgaagcccaagacggtgggttttataatcccaaggcgtgacaggatcctaaggggcaactctattgtgaaaagcttatgaagtacattcaaaattatttcaatgttttgaaaattagcaatccttgtatgtttatatattaaccagtttaaaaagaatttccaagtaagtggcatattccaatccatcacccttctatggaaagaagattagtagattatgttagccaatgtctaact

SEQ ID NO: 2017 - DNA, 661 bp, Homo sapiens
  UNC5C
  misc_feature [331]..[331]: Chromosome 4, SNP identification no. = rs10049501
  misc_feature [331]..[331]: allele = a, g
  misc_feature [331]..[331]: n is a, t, c or g
aataagttcataaaagttataatttctcaaaatgtttgattataggtgacaggagagggtatattttctggaactccttaaaaactgtattttagaactttccttaacacctagaaaatattcaaatgactaaacacactcagggaaatgaacaactacccaatgggagtaggagctgtcccactgggggaacaaacaatatttcctatcaagagctgatgaggcttgtgtcatagaaactactaagctcataggcccattaatgactagctaaatggtaatgaagcccaagacggtgggttttataatcccaaggcgtgacaggatcctnaggggcaactctattgtgaaaagcttatgaagtacattcaaaattatttcaatgttttgaaaattagcaatccttgtatgtttatatattaaccagtttaaaaagaatttccaagtaagtggcatattccaatccatcacccttctatggaaagaagattagtagattatgttagccaatgtctaactaatgtaacaatcctctcagcaacaatcctaggccattaacaaataacaccactttgcctcctctttcctggtccctactcaggcctctcattttcttatcttattgtattttttcacattattccaattctggaaatctatg

SEQ ID NO: 2018 - DNA, 661 bp, Homo sapiens
  UNC5C
  misc_feature [331]..[331]: Chromosome 4, SNP identification no. = rs4699850
  misc_feature [331]..[331]: allele = a, in linkage disequilibrium with rs10049501, respectively
  misc_feature [331]..[331]: n is a, t, c or g
cttatcttattgtattttttcacattattccaattctggaaatctatgggaagatggaatcacaacctctttccccagtccccatatctttctctctctctctttttttccccctactctctgatgtttgatggtttttccctgctttacttatttatacattccctcttcatggggaaattcagttactggaaacaaacctcttcctttaagattactgtagtaacttacagtcaccaaagggctgataaatttgcaatatgtgtttccttagaactataatggttctttatacgatgcagagcagcaactaatatgctcaggatattanaaccacatccaaatatttggtgtcccaagatgataacttcaggtctcattctcccccacttttacttaaagcaattacaggaagcctaattaaatgcttgaggaattcagtaggtccactgtatcctttagctcaaataggctcatggatggttctactgaccacaaatctgaagcctttttaaaagccacagaccaaccctcctgctacaggagttattcatagtctgaatgctctgaattgtttggctcaggctccctgtgggcactggagtcaagcacacactgatttttgtattcagcttcacagatgtcccattcaggaggagct

SEQ ID NO: 2019 - DNA, 661 bp, Homo sapiens
  UNC5C
  misc_feature [331]..[331]: Chromosome 4, SNP identification no. = rs6848737
  misc_feature [331]..[331]: allele = t, in linkage disequilibrium with rs10049501, respectively
  misc_feature [331]..[331]: n is a, t, c or g
gaacctgaaattggtttcaggttatttaagggtgggggaaatgctttggtctacaggacttactcaaatacaaatgtgtagtttccatcacatctgataacatcaaagatttcccatcatgctgcttcctttaatagtggcatctcaaggatgcatgctgtttgaagtttgcagtgatttgtttttataataggatttgttgtagtttgggagccagagtgcaggaaagtaattagcatgttattccaagaagtcttatgatgagtatgagtgtgcacttgttaataatacatttcaaatgaatatagaaattcagattcaaatgcaaccntctgattggatctttgtgaggtcatacatgaatatggcaataagacctgataatgacatgacatttatttcttatttttagcatatgcttaatttcataatagtggtaaggcaccacaaatactgtttttctaggatactaccataaagtgagcacaaatacatgcttaatccaattaaatgattacttaaaataatatctgtatttccccaaaatgtaatctacagtgctatcaaataaagtaagtattaaagtccattaataacagatattatgctaagttgcagaaatgtaaggatgaatcaaacattacttagccttaagctctcc

SEQ ID NO: 2020 - DNA, 661 bp, Homo sapiens
  UNC5C
  misc_feature [331]..[331]: Chromosome 4, SNP identification no. = rs1483735
  misc_feature [331]..[331]: allele = g, in linkage disequilibrium with rs10049501, respectively
  misc_feature [331]..[331]: n is a, t, c or g
tctttaaaatgtactgcatcataattatcttgtgaataaagctgtattctattcacaaaattatcatttgaggtactataaagacttaggaggggagaagagcaccactaattgaaaactatattagtcacatacccagatgagaaagacatgactggtttggggaattttcagtggactcgggcaagtcaagtctgagtgaagatttcagttgttcagggcaatgcagatgaggctaggttctttagaaatggattctgaacactagaaatgagttcaggggagttgcctttaagtttcttctccttcagccaagccacctggaattttnctaatcctccagaaccccaccatcctgaagtgtagatatagcggagctatcctgacatgaagaatcaaagtgcataaggtctacttattttgacaaccacaatgcttgcacagctcctctatcaggcattccctagatccctattcaataacacaggtgaggcagagacattaagcaattgaacagaaattactaagtaggttagttctgactaattttggacagaataagctaacatccatattttaaaaaagatataaaattcatgagtataatcatgtcttctggaggcttccttcactttccaactagaatgtgagccccctcagg

SEQ ID NO: 2021 - DNA, 661 bp, Homo sapiens
  UNC5C
  misc_feature [331]..[331]: Chromosome 4, SNP identification no. = rs2626033
  misc_feature [331]..[331]: allele = c, in linkage disequilibrium with rs10049501, respectively
  misc_feature [331]..[331]: n is a, t, c or g
tcacctttactttgcaatcatgttctagaccatatgtgtgcaataaatatatgctagtaaaattttctatacagtatgaaattcaaacattaaaaatcttccccatgggatataattaaattaaaattacatagttctgcaaataggatatagtcggggtgctctggagtacatacagggtctataatactgatatttgcaaatatcggaattaccaaaaatgaacaaataacaataaaaataaaaacttcatgacaacaatagattagaaacaaaaagaatctaaatgtgtagcctaaaaattttcaattttctcttctttttgtaagtnagaaaaagaatgaaaacaaaaacgtttatacgcagaaggtgagcccaaataagtcagctagcagagattcatctgcgtgatataatagaagcaactgcaacaaatacataagttctagaactctgatctaactatgtttttgtaattgcagctgagtttatgttggccatgttagcccaggtgtttaaagacaaagtcaatgtgaaataaggatgaatcaattgtgaacactaataaatgaaaaataagctgaactatatagttcagtatcccatggggaagatttttaatgtttgaatcttcatactgtatagaaaattttaatagcat

SEQ ID NO: 2022 - DNA, 661 bp, Homo sapiens
  UNC5C
  misc_feature [331]..[331]: Chromosome 4, SNP identification no. = rs2621459
  misc_feature [331]..[331]: allele = c, in linkage disequilibrium with rs10049501, respectively
  misc_feature [331]..[331]: n is a, t, c or g
gagggagcaggatatgtggatacctagaaggatattatttagtaagtattagaggaacaccaagaaagtctgagtgactggcacagattatgggagggagaaaatgttaggaaatagaataagaagagggtcagctcatatagatgtagggcattctaggccatggtaaaatgaaaccatggaaagccggggaacagttaagtagtgttgtggcatgtgtttacttatgtttttaaaagatcactctggctgttgcgggatagttgcgtttaggggtcaaaacaaggaaacctgcaaggaggccattactatagtacaagacaagagatantgagatgatggtggttttgactctgttggtagcagaagacgttgtaggagttgaatctgaggtatatttggtctttaggaaatcagaacttaatcctagcttcaaggagtgctggcagaatctgctacaaccttgtattgtttttactctcctgtgatggtgtagctgcttgaggattcttcctgatcaggacctagggcctggtgctacttcttacacccaacttttcagaaatctaaactgaactcttttgttatatttgtgcatcctctgagcactatagaatgatgtctcagtaccttgcatagaagcagagcaagaaaatctctc

SEQ ID NO: 2023 - DNA, 661 bp, Homo sapiens
  TM4SF9
  misc_feature [331]..[331]: Chromosome 4, SNP identification no. = rs13108940
  misc_feature [331]..[331]: allele = g, in linkage disequilibrium with rs4699354, respectively
  misc_feature [331]..[331]: n is a, t, c or g
tgcaacctccacctccccggttcaagcgattctcctgcctcagcctcctgagtagctgggattacaggtgcgtgccaccacgcctggctaatttttgtatttttagtagagacagggtttcaccatgttggtcaggcgggtcttgaactcctgacttcgtgatccacctgcctcggcttcccaaagcactgagattacaggtgtgagccaccttatcagcaaggcactgacattacaagtgagtccttcgttactatcttttcaagaaaatttgaacagcagatagccttgaaagattcagtgtttctttacagagcaagggtcagggagncttactgcccattataaaagatcggagttccctaagttcagggttcctctcctagaatacaactcactatgtatcacctggccctctctgcaccaccctgtaagaattagggctcagggaaagtgtacaaaaatattgatcctctggttcctggcattgctgtgattaataaagtcctatgtgtctgccccagcagtgtgatgccttctgccaggatttgtgacactgtggcaggataacttgtttgctggcatgcagggtgaaatctcagacccttcacagtccttgacactcagtgttattgttccacagaagagtttggtgtcttag

SEQ ID NO: 2024 - DNA, 661 bp, Homo sapiens
  TM4SF9
  misc_feature [331]..[331]: Chromosome 4, SNP identification no. = rs4699639
  misc_feature [331]..[331]: allele = c, in linkage disequilibrium with rs4699354, respectively
  misc_feature [331]..[331]: n is a, t, c or g
tctttctgatgctttataaattcaatcaaaacctaaaacatcttgagagatgaatgcaggatgcatggggcataatcaggagatcccaatccattgattatcatgtgaaagaaggcacagaggcaattagtcctttgttgtggatgacaaataacctccacataaaatgttctatacactgaggcatctttgatccatcttactggctcagtgactcacaaaggaggaaggaggggggatgtctgaaaacaaaagggcagcctgacgacaccatttagttatttattctgtatgttcagctcagtttttcctctttccaacttttcatganactataaaaagaaatggaatggattcctttcaaccaagaacatcagcactgcatactaagaagtaaagtactggcttaacacagagcccacagaagccaccgaatatcatcctctctccttagttaggtattttttacaaggaaaatgggttttgacaaatcattcttttatatgttcttttatataagactttaatgcacagactcttggaaattaatttacatataagacaaactattcacagcttcaggagagaaggctgggttctcaacaagcactgccttggaaactatccatgtgtgtgcactctggaattttccttttctgtt

SEQ ID NO: 2025 - DNA, 661 bp, Homo sapiens
  TM4SF9
  misc_feature [331]..[331]: Chromosome 4, SNP identification no. = rs4699640
  misc_feature [331]..[331]: allele = a, in linkage disequilibrium with rs4699354, respectively
  misc_feature [331]..[331]: n is a, t, c or g
gaaggcacagaggcaattagtcctttgttgtggatgacaaataacctccacataaaatgttctatacactgaggcatctttgatccatcttactggctcagtgactcacaaaggaggaaggaggggggatgtctgaaaacaaaagggcagcctgacgacaccatttagttatttattctgtatgttcagctcagtttttcctctttccaacttttcatgatactataaaaagaaatggaatggattcctttcaaccaagaacatcagcactgcatactaagaagtaaagtactggcttaacacagagcccacagaagccaccgaatatcancctctctccttagttaggtattttttacaaggaaaatgggttttgacaaatcattcttttatatgttcttttatataagactttaatgcacagactcttggaaattaatttacatataagacaaactattcacagcttcaggagagaaggctgggttctcaacaagcactgccttggaaactatccatgtgtgtgcactctggaattttccttttctgttagaattgtttggaagagtctcctgatgaacaacagcatgagggatgtgaataagcgtcccttatttcctctggtttaaagacatccataactttttgttctctgaataaa

SEQ ID NO: 2026 - DNA, 661 bp, Homo sapiens
  TM4SF9
  misc_feature [331]..[331]: Chromosome 4, SNP identification no. = rs4699343
  misc_feature [331]..[331]: allele = c, in linkage disequilibrium with rs4699354, respectively
  misc_feature [331]..[331]: n is a, t, c or g
gtagctgcacagtcacttctctggtatctattactatttcagtcaagcttcttaaattagatttaaaagggaaagaaacagctttcctaaattaaatcagttcctttaaatgaggttgacccttgagtaggtaatttgtgtaaacataaaatgggtcctgctcttcctaaaatcttatcactaggttctcaaaactgggctccaaatgtgagatgtggtgtacagcaggtcttcgagaaatgtcattttgttcaatgtcgtttccttcagtaacattgatgagaggccggggccattgtgcagagtttgcacatttgccccacgtctgcangggttttctttgggtactctggtttcctcccacatcccaaagatgtgtgcattaggtgaaccgaactgaagtgtccacacggtccctgtctgagtgagtgtggatgtgtgatggaatggtgtcctgtctagggtgggtccctgccttgtgccctgatatgccaggacagactccagccactctcaaccctgaactaaaatcatggaatcattgagtaaataattattttgtttttattaatcctttctcttgttttcgagacagagtcttgctctgtcccccaggctggagtgcagtggtgagatctcggctcactgcaacctccacctc

SEQ ID NO: 2027 - DNA, 661 bp, Homo sapiens
  TM4SF9
  misc_feature [331]..[331]: Chromosome 4, SNP identification no. = rs10002696
  misc_feature [331]..[331]: allele = c, in linkage disequilibrium with rs4699354, respectively
  misc_feature [331]..[331]: n is a, t, c or g
atttataatgtggttgaccacatgatcccaaagatgctaacacttctaaccgcctactacatatctccatttggttactactcattcaactaaagcatgtgccctcgaaaatcaatgaaattagagacttttctttccagctggaagggtgtagcaagcctgatttgaaaatgattacaactgcttctacagggtaaaaaactgcccgaagtgggcattgagtttaaacattatatcctcgtcattaataaaaacaagagctaacatttattgcatccttacaatggaactggcacagttacgaacttgtgtcatttcaataaagtttcangacaaccactgaagtaaacaccatatcgtcactttccaactgtggaaactgagcttacgagacattaagtagcctggactagagttgctacctacctagtgactgggaaaaccccaattcaaacccaggcatctgactccagaatcccgaccactccaaatgcaggatgagaagatctattggcaatacagtttctcctcactgcgtctcagaacttggggattcagtttcatttagacttctgcagccagtttaatctctaacctactcatcttgtttggttggttaagagatgttatacagccacaaaataacacaagatctgtaata

SEQ ID NO: 2028 - DNA, 661 bp, Homo sapiens
  TM4SF9
  misc_feature [331]..[331]: Chromosome 4, SNP identification no. = rs10025051
  misc_feature [331]..[331]: allele = g, in linkage disequilibrium with rs4699354, respectively
  misc_feature [331]..[331]: n is a, t, c or g
gaaattagagacttttctttccagctggaagggtgtagcaagcctgatttgaaaatgattacaactgcttctacagggtaaaaaactgcccgaagtgggcattgagtttaaacattatatcctcgtcattaataaaaacaagagctaacatttattgcatccttacaatggaactggcacagttacgaacttgtgtcatttcaataaagtttcaggacaaccactgaagtaaacaccatatcgtcactttccaactgtggaaactgagcttacgagacattaagtagcctggactagagttgctacctacctagtgactgggaaaaccccnattcaaacccaggcatctgactccagaatcccgaccactccaaatgcaggatgagaagatctattggcaatacagtttctcctcactgcgtctcagaacttggggattcagtttcatttagacttctgcagccagtttaatctctaacctactcatcttgtttggttggttaagagatgttatacagccacaaaataacacaagatctgtaataattcagaatcttttggctttgagaccaaaaactgctgtaatcctaaaaagaatcaccaattaaaaactaagattttgagtatgttcaagtaaaagaatctacactgccatagaagc

SEQ ID NO: 2029 - DNA, 661 bp, Homo sapiens
  TM4SF9
  misc_feature [331]..[331]: Chromosome 4, SNP identification no. = rs10006366
  misc_feature [331]..[331]: allele = t, in linkage disequilibrium with rs4699354, respectively
  misc_feature [331]..[331]: n is a, t, c or g
tatacacacacacacacacacacacatatttagaaacaggatcttactccattgtccagactggaatgcagtggcaagaccatagctcactgctgccacaaactcctgagctcaagccatcctcctgcttcatcctcctgagtagctgggactaggggcatgtgccaccatacccggctaaatgttaaaatttttttaaaagacggtctcactatgtcgcccaggctggagtatagtggcatgaccatacctcactgctgcctcaaactcctggtattatataatctttctgcctcagccttctgagtagctgggattacaggcacacttntctatttttatttattcttttttaaattatactttaagttccggagtacatgtgcagaacttgcagtttcattacataggtatacacatgccatggtggtttgctgcacccatcaacctgtcacctacattaggtatttctcctaatgctatccctcccctaccccctaccccacgacaggccccagtatgtgatgttcccttccctgtgtccgtgtgttctccttgttcaactcccacttatgagtgagaacatgcagtgtttggttttctgttcttgtgatagtttgctgagaaagaggatttccagcttcatccatgtccctgcaaa

SEQ ID NO: 2030 - DNA, 661 bp, Homo sapiens
  TM4SF9
  misc_feature [331]..[331]: Chromosome 4, SNP identification no. = rs4699644
  misc_feature [331]..[331]: allele = t, in linkage disequilibrium with rs4699354, respectively
  misc_feature [331]..[331]: n is a, t, c or g
ttcccttgctggtgaggagttgtaatcccttggaggagaagaggtgttcttgtttttggtattttcagcctttttcagctggtttctccccatctttgtggatttatccatctttggtctttaatgttggtgaccttcagatggggtctttaagcagatgtgctattcctttctgtttgttagttttccttttggcagtcaggcccttctgctgccggtctgctggagtttgctagagatccactctcagccctgtttgcctgggtatcaccagcggaagcaaagattcctgcctgatctttcctcaggaagctttgtcccagaggagcanctgccagatgccagccagagctctcctgtatgaggtgtccgtcggcccctactgggaggtgtctcccagatacacaggggtcagggacccacttgaggaggcaggctgaccctcagcagagctcaaacactgtgctgggaggtccgctgctctcttcagagctgtcaggcagggacatttaagtctgctgaagctgcgcccatagccacccctttccccgggtgctctgtcccagggagatggaggttttatctataagtccctgactggggctgctacctttttgtcagagatcctctgcccagagaaaagaaatctggcggtctggcc

SEQ ID NO: 2031 - DNA, 661 bp, Homo sapiens
  TM4SF9
  misc_feature [331]..[331]: Chromosome 4, SNP identification no. = rs2037832
  misc_feature [331]..[331]: allele = t, in linkage disequilibrium with rs4699354, respectively
  misc_feature [331]..[331]: n is a, t, c or g
tggatggtgtcactactgggcacagttttccctgcatcagcagcaataggggaatacgtgcacacaggaaggctcaggttccccaaactcatatagcatctggactaaaaggaaggatttgtacagggctctagaggttaactgtcagttatgtagttgctccactttagaacaatgactttggacactttagggcatagccaaagagcaaagcagttactttgtggctgttctgcctgctcctcactcttggccatcagtaagtctggcttaggatggagaaatccaagggtctcctctggctgagggaggcaggtccagaaagccacanaccagcagtaccagttcactacatcagctccttagtccacaaaaaggtccacaggatggacagggacagaggccaacagccaccccgccaccagagcagggccattcctctgacatctaagagtcacatccatatgactactgcaacctgtggctcaaagtcagctgaaaaatggttatacacattaagttagagccattttgtgaaaactaattcagttttcttcccgttgcttggtacatacacactattcagtgaaatattagcttttattcaaggcatgacataggaattccttcaaaattaatattttatgctatactttgtatc

SEQ ID NO: 2032 - DNA, 661 bp, Homo sapiens
  TM4SF9
  misc_feature [331]..[331]: Chromosome 4, SNP identification no. = rs6532742
  misc_feature [331]..[331]: allele = c, in linkage disequilibrium with rs4699354, respectively
  misc_feature [331]..[331]: n is a, t, c or g
gataaatcattttctctctttgaagctcaacttccttacccataaaatagtgacaaaaccatctaccttgttggtgctcagctggcctcattccctccttctctagacaggggtggataaaaccacatcgctagaccctttctagtcctaagattacctggtacaggctttactctgactgcaggagagatgtggatttgataacactaaggtggtccttatccaccaaccttcctgctctcttggcaaactctgagaggctcatttcctgaatgtttctctcagaagattacatatacactacaatgcatccttttcttccataagaaantgtgggataggctgggcatggtggctcacgcctgtaattccagcactttgggaggctgaggcaggcagatcacttgaggccaggagatcgagactagcctgggcaacatggaaaaaccccatctgtactaaaaatacaaagaaattagctgggcatggtggcatgcctataatcccagctactcaggaggctgaggcatgagaattgcttgaacccaggagggggagggtgcagtgagccgagatcatgccactacactccagcctgggtgacagagcaagactctgtctcaaaaaaaaaaaaaaaaaaaaagagagagagagagagaga

SEQ ID NO: 2033 - DNA, 661 bp, Homo sapiens
  TM4SF9
  misc_feature [331]..[331]: Chromosome 4, SNP identification no. = rs1919211
  misc_feature [331]..[331]: allele = a, in linkage disequilibrium with rs4699354, respectively
  misc_feature [331]..[331]: n is a, t, c or g
gagttcaagaccagccgaggtaaaacagcaagacacccattctctacaaaaagacttaaaaattcgccaggcacagtggtacatgcctatagtcctagctactcagaagactgaggcaggaggatcgtttgagcccaggagctcaaggttacaattagctatgatcgtgccactgcactttagcctgggtgacagtgagacctcatctctttaaaaaaaaaaaaaaaaaaaaaagactccatgaaggcaaaccatgacaaaagtttgctgttgaatgaggtgtgacggagacaactgcataacactggaaaaattctggaaaaacctcccnacttagattactttgcaagtattgctgagttctaggtccaccttaaaaaaatgtaaatggaagttgtggctgacaaattatggctgaagtttacacaaggaagatacttcagtcagaggacacttagacaagaaaaagaccttgggcctatctcaaaacattcctagtactcaaaatattacagcaagtgacataccactgggggaaaaatatcagagtctccatgcacacagcacgagcagggaaaaaaccaaaatgctagacaatatactacttcaaaatcgtattttcatttaaaataaaatgtgtaaagtatgtgtcattttacac

SEQ ID NO: 2034 - DNA, 661 bp, Homo sapiens
  TM4SF9
  misc_feature [331]..[331]: Chromosome 4, SNP identification no. = rs4699650
  misc_feature [331]..[331]: allele = g, in linkage disequilibrium with rs4699354, respectively
  misc_feature [331]..[331]: n is a, t, c or g
tactctcagttgaattattcaaagaaaacatctatgtaggaagtcttatgttcaggggagggatggtggaagtgtgtgatgggcatctgctgagatgcccccatggagcagccctcctccattctgaccttgtggcttgaacagggctgagcctacaaggcaagtacatgacccaggacatctaatgaccagtgcctctcatggctccgtgaccgacagtggcaaggagtcaggaggggtgagctgagcctagcccaccaaagtccatgtccatcagatgcaagactaagctgaaattaccagagaagagggtttttcttcctgctagtgnaacagaaacctagagcagctggtggctgtttctgccactgcttgggggcaagcttgcctgaaaaagaagccaacagagaaaggcagagcaagaaatgaagagaaaaactgctgataccttcagagcaactggaaatggccaatgccaaaagcaatatccctagatgtttctgttacgtcaatcagtaaattcctatttttgcctgagccagtttgattggggtttctgtcacttagagctgaaaatgtcctaattcaaaatgtaactatctagctgcaatatatatattttttcatttaaccacactgcttactgttcatgcttttgaac

SEQ ID NO: 2035 - DNA, 661 bp, Homo sapiens
  TM4SF9
  misc_feature [331]..[331]: Chromosome 4, SNP identification no. = rs4699345
  misc_feature [331]..[331]: allele = t, in linkage disequilibrium with rs4699354, respectively
  misc_feature [331]..[331]: n is a, t, c or g
gacatctaatgaccagtgcctctcatggctccgtgaccgacagtggcaaggagtcaggaggggtgagctgagcctagcccaccaaagtccatgtccatcagatgcaagactaagctgaaattaccagagaagagggtttttcttcctgctagtgaaacagaaacctagagcagctggtggctgtttctgccactgcttgggggcaagcttgcctgaaaaagaagccaacagagaaaggcagagcaagaaatgaagagaaaaactgctgataccttcagagcaactggaaatggccaatgccaaaagcaatatccctagatgtttctgttangtcaatcagtaaattcctatttttgcctgagccagtttgattggggtttctgtcacttagagctgaaaatgtcctaattcaaaatgtaactatctagctgcaatatatatattttttcatttaaccacactgcttactgttcatgcttttgaacatagggattatttctacacataagacttttttttttttgagacagggtcttgctctgtcacccaggctggagtccagtggtgtgatatcggctcattacaacctctgcttcctgggctcaggtgatcctcccacctcagcctctcaagtagctgtgactactggcgtgtgccacca

SEQ ID NO: 2036 - DNA, 661 bp, Homo sapiens
  TM4SF9
  misc_feature [331]..[331]: Chromosome 4, SNP identification no. = rs6532748
  misc_feature [331]..[331]: allele = g, in linkage disequilibrium with rs4699354, respectively
  misc_feature [331]..[331]: n is a, t, c or g
ttgcctgggctaaaagaaacacctcgctggctccccctcgctcttctcttgtgtggcagcgtcaggcggccccaggagatgctgaggggcttaacatcccacgcggtgctcccactgaggctcctcggctcctctccccgcccaggaagaggacacttcttaagcttttattaaactgttgtcataaattgcttatgagagcaaagtaacaaactatcactttccctttccttccaagtggcgagaactgggcctgtgcctgctccaaagcactgagccaaaatcagccggcagaaaattgccagccatcattaactgtcggactggcagngcagaggaagtccattttattagaggctcatccataatatattttgtttgaaccctgtacagactgaattcattaacatagattaacaattcatcctcgagctcagattcctttgtgcttctcctaagtggcatcactcttttagctcctcccactcacaataaattatttaatcgcaaagttcagaactattttctgtcagtgttaaatatttcctatcagtggctctgaaccttctgtggattaaggatctcctttgagcatctaatgaaagctacacatccttactcaggaaaaatgcacaaagaagccaggtgtggtggctcacgc

SEQ ID NO: 2037 - DNA, 661 bp, Homo sapiens
  TM4SF9
  misc_feature [331]..[331]: Chromosome 4, SNP identification no. = rs6831643
  misc_feature [331]..[331]: allele = t, in linkage disequilibrium with rs4699354, respectively
  misc_feature [331]..[331]: n is a, t, c or g
tgaaaggacaccctttgctttctaaaggagagagtatgtgccaaacaagctttgaaaacaaatttgcattctatttaccaaagaattccatgtataatacatgttcaaggtgggggttggggagaggaagtgacatgagtataaaaatcccacagaaagatactctgcttggagctagaagtgttaggccttggatggtaatagaagaaatagcctgagaacaccagaagttttcctaaagcaaggccctgaaatgtgaacacaagagagctaacagcgtgggtggttactgcttccagcagccccaatggtactgaacatgtccaacttngtgatctgggtgctggttacagagtttcttcagtttgtgaaaatccatcagtatgtgcaccatacgatacttcataatccctaaggatctctgtgctctcctttctaccaactctccaatttcacatcataccactctctccagtcacacaggcctactttctattccttgactatatcaagcaatttttgacgtcaatcatcctgctaattgcatctctttcttctctcctttataaagacagggtactcctaccctaagggtttgtttgagatgataactcagtaaagtcttttctggccacctttgcgaatttattcccccctcata

SEQ ID NO: 2038 - DNA, 661 bp, Homo sapiens
  TM4SF9
  misc_feature [331]..[331]: Chromosome 4, SNP identification no. = rs4699348
  misc_feature [331]..[331]: allele = c, in linkage disequilibrium with rs4699354, respectively
  misc_feature [331]..[331]: n is a, t, c or g
tggatggtaatagaagaaatagcctgagaacaccagaagttttcctaaagcaaggccctgaaatgtgaacacaagagagctaacagcgtgggtggttactgcttccagcagccccaatggtactgaacatgtccaacttcgtgatctgggtgctggttacagagtttcttcagtttgtgaaaatccatcagtatgtgcaccatacgatacttcataatccctaaggatctctgtgctctcctttctaccaactctccaatttcacatcataccactctctccagtcacacaggcctactttctattccttgactatatcaagcaatttttnacgtcaatcatcctgctaattgcatctctttcttctctcctttataaagacagggtactcctaccctaagggtttgtttgagatgataactcagtaaagtcttttctggccacctttgcgaatttattcccccctcatattactaaccacacttcctgaaattattccttctaattatatctgtagttgtttttcagctgtctcccctagtaggctgtatgcatcatgagaatggagaccatgtccatcttatccacttgtgtttccccagcacagtgccttgaatacagaaggtattaaaaaaaattggctgtatgaatgatatttccc

SEQ ID NO: 2039 - DNA, 661 bp, Homo sapiens
  TM4SF9
  misc_feature [331]..[331]: Chromosome 4, SNP identification no. = rs6837359
  misc_feature [331]..[331]: allele = c, in linkage disequilibrium with rs4699354, respectively
  misc_feature [331]..[331]: n is a, t, c or g
taacagcgtgggtggttactgcttccagcagccccaatggtactgaacatgtccaacttcgtgatctgggtgctggttacagagtttcttcagtttgtgaaaatccatcagtatgtgcaccatacgatacttcataatccctaaggatctctgtgctctcctttctaccaactctccaatttcacatcataccactctctccagtcacacaggcctactttctattccttgactatatcaagcaatttttgacgtcaatcatcctgctaattgcatctctttcttctctcctttataaagacagggtactcctaccctaagggtttgtttnagatgataactcagtaaagtcttttctggccacctttgcgaatttattcccccctcatattactaaccacacttcctgaaattattccttctaattatatctgtagttgtttttcagctgtctcccctagtaggctgtatgcatcatgagaatggagaccatgtccatcttatccacttgtgtttccccagcacagtgccttgaatacagaaggtattaaaaaaaattggctgtatgaatgatatttcccaaccccttaagttttcaggtattatgctaaaagggtaaatatagaaataagtaaacaagtagttaaaaattaaaaattag

SEQ ID NO: 2040 - DNA, 661 bp, Homo sapiens
  TM4SF9
  misc_feature [331]..[331]: Chromosome 4, SNP identification no. = rs11730384
  misc_feature [331]..[331]: allele = g, in linkage disequilibrium with rs4699354, respectively
  misc_feature [331]..[331]: n is a, t, c or g
taaacaaaaaggatccaccacactgttaggatatccttagcaaaagcaaagctactaattcattcttttctcctccctgcaaaaagactgaaaaatcactccacacacgcgcgcgcacacacacgtgcgtgcgcacacacacacgtgcacagcacacacccccacacacacagcacccccacacacacacacacacacacacaggtaggaatggctcttcagcactgaactggcatcttcacctactacccaaaccactgggacttcacaatccttacacactgtcttggccccagatgcagagacattttatgccaaatctgtgggtggnaaagtcaattccatccttcctgtagaaggatacacagatgattgttatacaactttaggatgacccatgctttcctgtctcaggaagctcccagagactccctaactgcatctcattcacccacgtggtgggtttcaaacttgctctgatgataaagcactgggaagcagagctgcctattgaggaaaaatatgaaacactgagatactttgcttctttttatgaacgaggaataatttttctggcagaaatggcagtatatgaatgccatctaaaaccatagcttatacgtacctggcaggggagattatttcaaccctaagaaagaat

SEQ ID NO: 2041 - DNA, 661 bp, Homo sapiens
  TM4SF9
  misc_feature [331]..[331]: Chromosome 4, SNP identification no. = rs13134231
  misc_feature [331]..[331]: allele = a, in linkage disequilibrium with rs4699354, respectively
  misc_feature [331]..[331]: n is a, t, c or g
tctcctccctgcaaaaagactgaaaaatcactccacacacgcgcgcgcacacacacgtgcgtgcgcacacacacacgtgcacagcacacacccccacacacacagcacccccacacacacacacacacacacacaggtaggaatggctcttcagcactgaactggcatcttcacctactacccaaaccactgggacttcacaatccttacacactgtcttggccccagatgcagagacattttatgccaaatctgtgggtggaaaagtcaattccatccttcctgtagaaggatacacagatgattgttatacaactttaggatgacccangctttcctgtctcaggaagctcccagagactccctaactgcatctcattcacccacgtggtgggtttcaaacttgctctgatgataaagcactgggaagcagagctgcctattgaggaaaaatatgaaacactgagatactttgcttctttttatgaacgaggaataatttttctggcagaaatggcagtatatgaatgccatctaaaaccatagcttatacgtacctggcaggggagattatttcaaccctaagaaagaataaaaaaacaccataccctaaacttgcgtgttctcaataaaataatagagttattaaactaactggttg

SEQ ID NO: 2042 - DNA, 661 bp, Homo sapiens
  TM4SF9
  misc_feature [331]..[331]: Chromosome 4, SNP identification no. = rs13141997
  misc_feature [331]..[331]: allele = c, in linkage disequilibrium with rs4699354, respectively
  misc_feature [331]..[331]: n is a, t, c or g
aactgaagcagaagaaaatgcacaaatggtattaaatcatgacacagaaaaagagagggtagcatctggcacttctggcgtgctactaagaacacactcggggaggaatacaaattctacagtctctgaactaggcagggtggctgcaatttgggaagctgtttttttcccttaggtagaataaaatgttcatcagaccacatttgtaagtattcactcaataatgaatacaacagtaaccattttaacatccaagtagtttttaaaatcacacacttagaaatacaactgagaattccaaataatttatgtaaatattctgcccacaacngggaagggcaaaattccccattccttatgcaagggctgtacgtagtggcctccttccaaaggaggtgggccgagtcactttacagtggagaaatctggcagcggattgcatcggccacgtgatcaagattatgttgacatgatcacatcagtgataagtcatgttgacaggatgtacccctgatacaacaaaaatggcacttaacctctgtgggtcttcccctagtctaatcatgagaaaaacaacagacaaatctgaggaacattccacaaaatacctaaacactattcctcaaaactgtcaagatcatcaaaaacaaaaaggtctacg

SEQ ID NO: 2043 - DNA, 661 bp, Homo sapiens
  TM4SF9
  misc_feature [331]..[331]: Chromosome 4, SNP identification no. = rs10018825
  misc_feature [331]..[331]: allele = g, in linkage disequilibrium with rs4699354, respectively
  misc_feature [331]..[331]: n is a, t, c or g
aatttgggaagctgtttttttcccttaggtagaataaaatgttcatcagaccacatttgtaagtattcactcaataatgaatacaacagtaaccattttaacatccaagtagtttttaaaatcacacacttagaaatacaactgagaattccaaataatttatgtaaatattctgcccacaactgggaagggcaaaattccccattccttatgcaagggctgtacgtagtggcctccttccaaaggaggtgggccgagtcactttacagtggagaaatctggcagcggattgcatcggccacgtgatcaagattatgttgacatgatcacntcagtgataagtcatgttgacaggatgtacccctgatacaacaaaaatggcacttaacctctgtgggtcttcccctagtctaatcatgagaaaaacaacagacaaatctgaggaacattccacaaaatacctaaacactattcctcaaaactgtcaagatcatcaaaaacaaaaaggtctacgaaactgtcacagccaagaggtgcctaagaaaccatgaacaacgtaatgtagtgcccagggtgagatcctggaacagaaaaggacattaggtaaaacctaaggaagtctgaataaggtacaaactttagttaataataatatatcaat

SEQ ID NO: 2044 - DNA, 661 bp, Homo sapiens
  TM4SF9
  misc_feature [331]..[331]: Chromosome 4, SNP identification no. = rs13149070
  misc_feature [331]..[331]: allele = c, in linkage disequilibrium with rs4699354, respectively
  misc_feature [331]..[331]: n is a, t, c or g
tttttattaaatgtatgttcgaatgctcatacatttatttctctgcagcaccagggaacaagcatttctaacataaggtgttagtaacaggggaaaatgggtgcacagtaaatggaaactgtactatctttgcaactttcctgtaaatataaaactcttccaagtctcacactgtccccctggatctcaatctgctggctaagtaaatccatactgaatttagaacagagattattaggcaaaaagtttttaaagttgcagcgaagggagggtaaacggcttgtgcaccgctgctagctaatatccacagcttccccagggactttaatgnggtggcacttgaagagattggtttgccaatcgatgggctgcttttgaggctcttgattaacatatgtagagttccaaagtgccttgaaagctttctattatctcagcactccaaatgcagtttctaaatgctgatattcagtttcagctttttccagtttcttcttcagccttccacattcatgatcacctgttcacccttagcgagcctcagagcagagtggagttgcttgaaacccatgtgggcaagctgacctactgtggataggccagagtctaactgagggacagcaagattttcagatggtctttagacaacaaattgaaaatg

SEQ ID NO: 2045 - DNA, 661 bp, Homo sapiens
  TM4SF9
  misc_feature [331]..[331]: Chromosome 4, SNP identification no. = rs2866017
  misc_feature [331]..[331]: allele = c, in linkage disequilibrium with rs4699354, respectively
  misc_feature [331]..[331]: n is a, t, c or g
tggttatatgttggtggaaattcttcagggaagtgacatctctggagggggaaacacaaaaacagctcaatacagtcagtcaatttattctacacttaaggaaaaaataactaagtctgcttgctggttttctgtgggctgttaacagctggttgactcaaatttctgctttctaccaattgtgaaaattaagctttaatttagaggagcacctggatgttgagactctgtctgaagatacaggggctaaaaatgttcagattctgtctgaagatacaggggctatggcttgtctatggttacagtttttgcaaatgcagaaaagcttttngagcctacttatgttatggagtatttccaatagtggttattaaagtaattcaaggaaaatcagtaactaatgataataaaaaagttgccttaaaatagtgttcaagaaaatagagtgtgtatgtcatattttagcacatagaaaggcttaaaccctcttgtgaactcctacttaaccatttctttattatactcttcttactcagatttataaattttccttcctttctgcaaaaagacagagataaataaagatactaacttttccccgtcattatatcaccccattaccctgttatgacagtaatattcatgttgaatatccggtcat

SEQ ID NO: 2046 - DNA, 661 bp, Homo sapiens
  TM4SF9
  misc_feature [331]..[331]: Chromosome 4, SNP identification no. = rs7672134
  misc_feature [331]..[331]: allele = t, in linkage disequilibrium with rs4699354, respectively
  misc_feature [331]..[331]: n is a, t, c or g
gatgagctgagatttaaatgaagtgagtggcaaatgttgcaaatattctagataaaagtgttctaagcagaaggaactaattaatatgcaggcaactaacgataacacagtttgcagctagtataatgaggtatgtggccgagtttggtagctgtctaccaaaactccattttgtctttctggtcacccagctagaccacatgtctcagctgcccttgcagtttgagtggctttgtgacttgtctttaccaatggactgtgagagaagtggtaggtgtcacttctgaggcaaggctttaagaaacaaatatatccactccatgctctcttntttaccctttcacataaaacggaacacaatggggctagcagagccataacgtggaaagggcctgggcctatacatcactgcaaaaaggacagtcatccaggctcacgcctataatcccagcactttgggaggccaaggtgggcggatcacctgaggtcgggagttcaagaccagcctgacccaacatggagaaaccttgtctctactaaaaatacaatattagcagatctttttccattgtcatatccctaggacctggcacaaatcctggaaaatggtagatattcagtatttattgaataaatgctactgaaagcatgaaaaaagcaa

SEQ ID NO: 2047 - DNA, 661 bp, Homo sapiens
  TM4SF9
  misc_feature [331]..[331]: Chromosome 4, SNP identification no. = rs10021296
  misc_feature [331]..[331]: allele = c, in linkage disequilibrium with rs4699354, respectively
  misc_feature [331]..[331]: n is a, t, c or g
tgagcactactataggtgctggaaacacaaagcctggtaaggccaggccctggtgaagaggaagcttgaagcacacaacacaaggaagacataaaaagaagagtggtaatgctagtggggtcactacaccgtcgctgcgtcctgaaattccagcagacactgtccaggaagattagctgtgggcaggcacattccagcaaaggtacgaaacagcatggcagctcacagaactgcgaatagtccagccccctcaaaagtaggctccatgatggcaatgactttgttttattcactgctgagtctccagtgcctagaacaggccctgcacttngcagattttgaatgcctagacatttgaggggaggggatgaggttataaataaggctataaaggaggcataaactatggcataacagaaggaattcaaagagctctgatgggaaacagtaaggccagatttgtgttttacaagagcattctagttgaaacatgcttgaaggggtgtgatacctggacaggaaaagcaggtagtagatgactgcaatggcccaggcctcaggagagaggagatgaaaactgaaataagacaacaggaggaaagcaggggtagaaagaaaatcacaggccgggtgcggtggctcacacctgtaatcccagcac

SEQ ID NO: 2048 - DNA, 661 bp, Homo sapiens
  TM4SF9
  misc_feature [331]..[331]: Chromosome 4, SNP identification no. = rs4699349
  misc_feature [331]..[331]: allele = c, in linkage disequilibrium with rs4699354, respectively
  misc_feature [331]..[331]: n is a, t, c or g
catttactgattgacaatgttttcccatatacaaatttcctaaattcacttattcctcttgaaactgaattgctgaaaagaataatgattaaagatattcttgtggatgtgacaccacctacatacatctcatcccattgctctgtattaaatttggactgcttaaagtaggagttatatatacttgttatggggaccaaaaagctgcctggaattttgtagcctttatcacaagcagctgagaggctgtctgagagtcacataagtagatcacagctgccaatggtcagtccaggtgcctgtgttccctcctttttcagtggcctagagnacatgcttcacctgcatgccccattcagacaagaacagatgctgctgcaacaaagtggtccaaccacaacaaacaacacttctctgtgagccatgttatgccaaagcctctgcaggcacagatcatgaagcaatttaatacaagcttagataaaaagccaagtgaacaatctagaagccaaaagaaaacacaagggaaagttccttagttttagcgaggagaagaaacaggcagagtacatctccaggggaaatgagaggaaaggggaggggaggcaacagctgtccgccaggtctatttcagggaaccggtgaaaacgttatttccctt

SEQ ID NO: 2049 - DNA, 661 bp, Homo sapiens
  TM4SF9
  misc_feature [331]..[331]: Chromosome 4, SNP identification no. = rs1534555
  misc_feature [331]..[331]: allele = t, in linkage disequilibrium with rs4699354, respectively
  misc_feature [331]..[331]: n is a, t, c or g
ccgcacgcaggacaggagattcaaaccccaacacaacacattccctggggccaacgaacaagcctcggcctcaagaggaggaatacaaatactggagctgattgtagcagaaacagctgtgctgcagcctacacggccaagtgcaggagacgctggcatgatgtcttcaagagggtgcaggctcccgagtagtgcagctacaaagctgccccccagggtttaactggccaattcttgcaaaggggcactcaataaataatttgaaatttgaataagtctctccatcctgcctactcccagcacaaaatccatcaacagactggatcttctngtaacctgttgggcctatgaggacgcagaagtgcaaaatacattccctgccctcaaagggtttattgtcatctaggcccgatggttccttccaaattgtgggtagcctcctacagtggatagtcaaaatcaattaaatgggtcaaaataaacactgtttttaacacacacaaaaaaagaagaaaatgttcctgtggaactcttaattaaaatgtatgtgcccatcacaacattaaaatatattccttactatgggacaaattaaaaataatttcaaaaataactgattactgaagaaaccaggcacatctaaccatttacaaagaacttt

SEQ ID NO: 2050 - DNA, 661 bp, Homo sapiens
  TM4SF9
  misc_feature [331]..[331]: Chromosome 4, SNP identification no. = rs1573478
  misc_feature [331]..[331]: allele = g, in linkage disequilibrium with rs4699354, respectively
  misc_feature [331]..[331]: n is a, t, c or g
acaagcctcggcctcaagaggaggaatacaaatactggagctgattgtagcagaaacagctgtgctgcagcctacacggccaagtgcaggagacgctggcatgatgtcttcaagagggtgcaggctcccgagtagtgcagctacaaagctgccccccagggtttaactggccaattcttgcaaaggggcactcaataaataatttgaaatttgaataagtctctccatcctgcctactcccagcacaaaatccatcaacagactggatcttctcgtaacctgttgggcctatgaggacgcagaagtgcaaaatacattccctgccctcaangggtttattgtcatctaggcccgatggttccttccaaattgtgggtagcctcctacagtggatagtcaaaatcaattaaatgggtcaaaataaacactgtttttaacacacacaaaaaaagaagaaaatgttcctgtggaactcttaattaaaatgtatgtgcccatcacaacattaaaatatattccttactatgggacaaattaaaaataatttcaaaaataactgattactgaagaaaccaggcacatctaaccatttacaaagaacttttacacaattggttttacagaatccagaaatcccaggatccagctatcattattatgc

SEQ ID NO: 2051 - DNA, 661 bp, Homo sapiens
  TM4SF9
  misc_feature [331]..[331]: Chromosome 4, SNP identification no. = rs7678323
  misc_feature [331]..[331]: allele = a, in linkage disequilibrium with rs4699354, respectively
  misc_feature [331]..[331]: n is a, t, c or g
ggctagacacaaaaggagagagaggaaacctgaaaggggcctggaaaggcagggaggactttggccagggcagtgggtcagagaagtagaaacgagttcagttagttgttggcggtggtggcggggcggggggcctggtcaggcgagtgttcagtccaatatagccgtgggtactggaagttcagagcagactaaagggattaaacagactcatctggtctccatcagtcctgagacttctctagcctctttgagtttcactttcttcatctgtaaaatggggatgacaacaggatctacttgaaaggactaaatgaaataatacatgcanactgcttgggctcaatatatgatagcttaaaaaaaaggagtcacatcacctacgcagaatcttgcaccaatagagaaaatgaacacttgtcactgtatttggccctcacaacaatcctatgagataggcaagatgggtttttagagctcaggaaactccagcagacagacagaatgacttatgctggggcttctgacccagtcctcttattccacagggaaacaagtagaaaataagtctggaggccaggcacggtggttcccgcctgtaatcccagcactttgggaggccaaggcaggcggatcaagaggtcaggagatcgagaccatc

SEQ ID NO: 2052 - DNA, 661 bp, Homo sapiens
  TM4SF9
  misc_feature [331]..[331]: Chromosome 4, SNP identification no. = rs2156504
  misc_feature [331]..[331]: allele = t, in linkage disequilibrium with rs4699354, respectively
  misc_feature [331]..[331]: n is a, t, c or g
aagaatgtcaatcagaagggcttggtcagatttgaaagtggaggaaagcagatagtcaaagagaacagcaatggccttgccactcccagcaatatgtagtgagaaagggcctgaggcaacctcctgagccttggagggtcaggacccactggcaaagtcagcctcactgtggagaaggatgcaggcagctgaagccaactcacttggggtattcccactggcaagcctcctgactgtgaaatggatgcctcggacttaaccttgatgccatctgacacttcacttctctttgtttttattccataccagccaagtaagcatctgattatgntttggcttcccacgaaggcctgactacaggaagaaaatgtgtactagatgttcccacaccagaatcccaggccatgaaatggaaatagaaacagttctattctcattttaaggcagtaagcagacaatctggttttatatatccacttcctgaactgggataacacgatggagagattagctctggctaggctcataaaatcagtttctaagccttggtcctcaggggaccaaggatgtccactggaacacaccgccctgcagaactccttgggaaaacccactctgaccatctgcagggacgtcctattagaagggatgtgggaggcag

SEQ ID NO: 2053 - DNA, 661 bp, Homo sapiens
  TM4SF9
  misc_feature [331]..[331]: Chromosome 4, SNP identification no. = rs7691465
  misc_feature [331]..[331]: allele = t, in linkage disequilibrium with rs4699354, respectively
  misc_feature [331]..[331]: n is a, t, c or g
caccttggcaagacagagaagaaaatttgctgaacctggatgtgatttgagatatgttcatttgagatgacaccatcaaaactatactcagtccaatgactggttgggaccatgataggaccatattcattagattgcttggtcactctattcatttcacaaacatttactgagtgtctacaatgtaccagatattactctgcctgtcactagggacccctgccttcaaggaacttacatggtccagtggtgttggcagagaggtcaatttactatcatagtaaatatagtaggttctatgatggggatgtgcacagagtccaaagggaanatctaaaataatgaacaccaagagagagagaacaaaactttttcagccaaaggaaatcaattttctttaaacagaagaatcaatgttatcctttcatcttcttgaagttttgaattcatggaaatgttgatttttaaatcaaacatcaaaatcctatctaattttacttcctttcaccctataagtggtaaaaaacaaatagcaagaggactgaaaaatactcttagctgagagattgcagcaacacatgtagaaactcccaaaaaaataaaggtacatgccagatctgtgacagcccacagaaaggcaaacatctagtacatgggccaa

SEQ ID NO: 2054 - DNA, 661 bp, Homo sapiens
  TM4SF9
  misc_feature [331]..[331]: Chromosome 4, SNP identification no. = rs7669964
  misc_feature [331]..[331]: allele = t, in linkage disequilibrium with rs4699354, respectively
  misc_feature [331]..[331]: n is a, t, c or g
agttattaatgcttggcttctcagttattaccatatttcctttatatttagaaaatttttattttgttctgttcatgctttgaccatggctattaacccaagcaacactaacaattgctagaagtttctgaagggggctcttctaggagacattgggtaaataggcttagggcctccaaattttatttttcctctgtggtttgacctcgtaatatgaagagaaaaacatacaagcaaatatatcttataaacagttctatctattgtccattgcatttaaaaatgcaaactcatgaaataacaactttttaaattttgtattttgtacagntagagtctatgttgcccaggctggtctcgaactcctgcgctcaagtgatcctcccatcttggcctcccaaagttttaggattacaggcttgagccaccatggcccagccgaaataccaacttttaaatcatagtaacactattctaaagtagataacaactacaagagaatctaaatcatcacttgaaactgtttgaaaactgtcatcgaatactattttgatttatgagagcaagaattctcaaactgttaagtactgatcttctcacatcacccaccaaggactaaacaatcttaataagaagcagaagtacaaaatgttctgaattt

SEQ ID NO: 2055 - DNA, 661 bp, Homo sapiens
  TM4SF9
  misc_feature [331]..[331]: Chromosome 4, SNP identification no. = rs6532751
  misc_feature [331]..[331]: allele = g, in linkage disequilibrium with rs4699354, respectively
  misc_feature [331]..[331]: n is a, t, c or g
atctaaaaaaacaataataataataaaggttattttatgtcctttctcagcctctgataacttaggttattctgttgctttctggatattcacattatttacaagaaaattaaaaaaaaaatcaaacagtattaatttcctctttccccctcaattcatgtacacaatccactttgccaacatattaaacttcaaatgtttcaattaactcaaaatcaacctgcaatgttacaaaacttaaacttacattgctaagtctacaatcaccacaaatattgcctttttcaaaaagggaaaatttttaaaaacatagttgtatatcaaccaaatnagattgtctgaatatgttgatttttatctagatattttgatttaaaaaatgtcatggggccatgagcagtggctcacacctgtaatcccagacaacatactttgggaggtcgagatgggaggattgcttgaggtcagaagttcgagaccagcttgggcaaaaaactaaaaaattagccaggcgtggtggcatgtgcctatagtcccagctacttggaaaactgaggatggagggtcacttgggcccaggaagtccaggctgcagtgagctgtgatgatacctaggcaacaaagcaagaccctgtctcaaaaaaaggccaggactaagaat

SEQ ID NO: 2056 - DNA, 661 bp, Homo sapiens
  TM4SF9
  misc_feature [331]..[331]: Chromosome 4, SNP identification no. = rs6844261
  misc_feature [331]..[331]: allele = c, in linkage disequilibrium with rs4699354, respectively
  misc_feature [331]..[331]: n is a, t, c or g
ttctgttaacagagaagccagaagcagtgccatccctactttcaaccctaaggctcacacattatattaaagttttgtgaagtacctggcacttctcatgcagaagttactgacatactgatttaaaatgtttaccacccttaaaatttgccaagaaacttgccaaccagaatctttattgtttccccccctgaaactccaagtcccctcatcatttgccttctcccagcccagagacatctacctacctttccctcacagcatcgctccataattgacctccagtgaaggacctaccattacataagtgatgtcatttgccaacaacttnacctgtggtacctatcagggtccgtttattttggacctgtactgtatcaatttttgctgtttatcacatttgacaaaagtgtcagcaagtagaaagcagcaatgacgaagccctgaggaaaactggaacaccccagagaaagaaaagagaagcaatgtcacatggcctttaggagcactggctccagagcctgactctttcagcccaaatccagttctgctattcactggctgtgtcaattggctgtgtgagtgactttacctctctagaaatggagatacccataatactaatccttagggtgtttgtgataatgaaaacagatcaagg

SEQ ID NO: 2057 - DNA, 661 bp, Homo sapiens
  TM4SF9
  misc_feature [331]..[331]: Chromosome 4, SNP identification no. = rs2866016
  misc_feature [331]..[331]: allele = a, in linkage disequilibrium with rs4699354, respectively
  misc_feature [331]..[331]: n is a, t, c or g
ggtgggaggagggaggggattaagaaacaacgaatgggtactaggctgaatacctgagtgattaaacagtctgtacaacagacctccatgacacaagtttacctgtgtaacaaacctgcattttaaaagttaaaaaaatgaaaggctttatatcaataaataagtgggcctaaaaaagggagacaaaatgaaggaaaattattctggattcttaagaataaaagtgaaaatatcggactaaactgataaaatgaggtagaaaatagaggaatcacatacacagttttgacttccaacccactttgccttaagttatttcagttgacaagtngaagttgggttgaggggatgagggtaggaggtgagtgatgtatggataaatacaacgttctattttctaatggtaagtatatctgccttccctccctccagtgcttttatacggtaccaaggaatatgttttgctttttgtctgacaaagggaattcacaactcataacagctatttgacatcttttgtgggtaccaagctcacttttcttctttccagtgataagtgccttaatagaacaaagtcaacataatccttgcctccagggagcttgcagtttaatgaggggggcacatgtttacaatatagtggggtcagtgctggggaggc

SEQ ID NO: 2058 - DNA, 661 bp, Homo sapiens
  TM4SF9
  misc_feature [331]..[331]: Chromosome 4, SNP identification no. = rs1358548
  misc_feature [331]..[331]: allele = t, in linkage disequilibrium with rs4699354, respectively
  misc_feature [331]..[331]: n is a, t, c or g
ttctacctcattttatcagtttagtccgatattttcacttttattcttaagaatccagaataattttccttcattttgtctcccttttttaggcccacttatttattgatataaagcctttcatttttttaacttttaaaatgcaggtttgttacacaggtaaacttgtgtcatggaggtctgttgtacagactgtttaatcactcaggtattcagcctagtacccattcgttgtttcttaatcccctccctcctcccaccctccaccctccaccaggccccagggtgtgattgttcccctctatgtgtccatgtgttctcagcatttaangcccagcctttcttatatcaataatctctaacaggcaaaacagaaattccattttgatgattaaaaggaggaagaaaattaacttcatggtcctgacccacgttcaacttgataagagaggagagagcactgtgtgaaggcaagagctggtaagctcagacaacagaaagaccgggactaactcctgctcatcacttcactacacggccttggccatgctgctgatcttcacagcatcaggttcctcatgggtgatttgggaatagcaactggaccaagcctcacagggtgagaaagaagaataagtgagagaacgcatgtaaagtgccc

SEQ ID NO: 2059 - DNA, 661 bp, Homo sapiens
  TM4SF9
  misc_feature [331]..[331]: Chromosome 4, SNP identification no. = rs4699353
  misc_feature [331]..[331]: allele = a, in linkage disequilibrium with rs4699354, respectively
  misc_feature [331]..[331]: n is a, t, c or g
ggctgaggcgggcagatcacgaggtcaggagattgagaccatcctgaccaatatggtgaaaccctgtctctactaaaatacaaaaaaattagctgggcatggtggtgcgtgcctgtagtcccagcttctcaggaggctggggcaggggaatcgcttgaactgaggaggcgaaggcagcagtgagccaagatcatgccactgcactccagcctggtgacagaacaagactccgtctcaaaaacagcaacaacaacaacaacaacaaaacaaggtgcttggatctggggccccaaaacctatccaagttttcaaataacagttggtctcttcngcatttccctgaaggtgttcactacacttcttgccctgtcctttcactttgagttcctaaatgaaacccgtcgtcggccatcctcccgccctgcacagtctattctgcaaactagatattctgtgtcacacttttcagagtcctttcattttcctgttttgtaaaagtggttgtgtctcggaaagttaaaacgaattaacttcatcatggcctgcaggatgaaagagataaaatgaaaaaggattaggctttcaagacatcactgagaagccttttaaatgagccaagtgtgccgatgtcacatgaatggggtggccagtaacagagacc

SEQ ID NO: 2060 - DNA, 661 bp, Homo sapiens
  TM4SF9
  misc_feature [331]..[331]: Chromosome 4, SNP identification no. = rs1893714
  misc_feature [331]..[331]: allele = a, in linkage disequilibrium with rs4699354, respectively
  misc_feature [331]..[331]: n is a, t, c or g
tctctaatgtgaatgttgaaataatgtcattgagtttacatttaataacatcttacgtttgcagagtgctttgttttttaaggtgtcttcatttataacatatcattttatccttttgataaaaggatagattaacaaccctagaaagctggctagaaattaagctatgattactgcattctatacatgagaaaactgaggcccagcacaggttaagggcctggaaagggacacacagcagaaatgtgacagtgttggaaccagactccacactcctgatccctaatccagggctcctgcttcaacaccttcctctttgatgctctctacntgtgaagaaagttcaccctagattagtacatgctggaaacaagtggaaacaagacctaggttatccttaatgccagacagttgtattctgccacactgtgaattccaggatagcaagcactggtcagcaaattggcgcaaacatatatttgcattataatatttcttatgggtcaattaatctcctggaactaagaacaatcctggtctggaagcatgactgagacccagatgtcagtgcttaacagctgcattactggcctgacttagagaagaggccggaaatactcccagagttgttcacttaaggcctgtgatgatggccctagca

SEQ ID NO: 2061 - DNA, 661 bp, Homo sapiens
  TM4SF9
  misc_feature [331]..[331]: Chromosome 4, SNP identification no. = rs4699354
  misc_feature [331]..[331]: allele = a, g
  misc_feature [331]..[331]: n is a, t, c or g
tcagcaaattggcgcaaacatatatttgcattataatatttcttatgggtcaattaatctcctggaactaagaacaatcctggtctggaagcatgactgagacccagatgtcagtgcttaacagctgcattactggcctgacttagagaagaggccggaaatactcccagagttgttcacttaaggcctgtgatgatggccctagcagacaaaggaaagggaaggagggcaattaccagagaacttaattccctataaacaccaattggagtgactgatgagggcatgaggggcacctttctttcctccttagcaggattctttacattanctggataattgcttcttttctccaactgcctagacccacaacccggaactggcacgccagctacgcgcagactaccagaattaggttcaaaacagaaacagcaacaatgtaattaagctttttacaaacatgataccatggcacaaaatttttcattaccttgtgttaatgaaaaccattttctctgaccaacgcgtaaaatgttggagcaaaataaactgaatcgtctatctggtgttgcagtgtcagtgcaggcctagcatgggaatgtctctgtggaaggtggtggggtttttctcccctttttctctttaaagaatctgctgagtt

SEQ ID NO: 2062 - DNA, 661 bp, Homo sapiens
  TM4SF9
  misc_feature [331]..[331]: Chromosome 4, SNP identification no. = rs11943162
  misc_feature [331]..[331]: allele = c, in linkage disequilibrium with rs4699354, respectively
  misc_feature [331]..[331]: n is a, t, c or g
ttaaaagaaactttttaaaaaaattcaactttgaggtataatttacataaaataaaatatattcattttgcattaccattaagtgtgttttgacaaatgcatccaaccatgtaaccatccccacaatcaaaatatacagcattcccaccaccccaaaaagttcccttgttagtacccccatgtcaaactccagaaaaccactgatttgctttctgtacctacagactagttttgcctgttccagaacttcatatgaatgaacattgtatgtggtcttctgagttttattcctttgactgcacaatttttctggaattcatgcatgctgttntatgtatctgtaaatttgttcccttttgttgctgagtagtattccattttatggatataccacaatttgtttaaccattcactaggtgatggattcttgggttgtttccagtttttggccactgtgaataatgttgctatgaacattcacatacaagtcttttttgtggacatgttttaacttatcttgggtaactactaaatggttttccaaaataatcacactacagatatatcttggagatatgcaggttccattctagaccacagtactaaggcaaatattgcaataaagcgagtcacacaatttttttctcagtacacataaaag

SEQ ID NO: 2063 - DNA, 661 bp, Homo sapiens
  TM4SF9
  misc_feature [331]..[331]: Chromosome 4, SNP identification no. = rs846011
  misc_feature [331]..[331]: allele = g, in linkage disequilibrium with rs4699354, respectively
  misc_feature [331]..[331]: n is a, t, c or g
ttaaaatacccagtttatacagccttttaaatggcttagccacaaactgtcaatccctcggaatacttcatccctgtgaataatcacaggaggaactaatttttaatggcttctcaacagtctaaaaatggaggtgtacatgtggctatttaaaattcacccatttatagttaatgtgtttttgatactatatcttagctgcccatccagcattggtcaaaaaaatcacgaaccattgtgaaataaacacctccctgtagctcctctctgctgtgtggacttcacggagttgtccccacacaaccctgcctctggaatccagcttgtcctngttacctgaggtggggctcatgttgacaccaccatttgttttctctgtctatggcatctgtatgcacacggcacatttctccaaaagggacactgaacacttgtttctgcacagcagtaacagctgctctgggcaatcaagaccatctaaaattatgcacatcacaagagcctacattttaaatcagaccaccctaaacaaactccaatcgagtgaaaatctacctagccattttcatgtgatgcagtcacagagcaaaagaagcttgattttatttctgcagattacctttatctttgaagccatctttgctacataaggcaactcatc

SEQ ID NO: 2064 - DNA, 661 bp, Homo sapiens
  misc_feature [331]..[331]: Chromosome 4, SNP identification no. = rs11727262
  misc_feature [331]..[331]: allele = g, in linkage disequilibrium with rs4602510, respectively
  misc_feature [331]..[331]: n is a, t, c or g
ctgtaaaagatgaattttagagaaatgctatcaggaaagtaaaataggaaaacatctattttaagcagtgccaaaagaggtaaaaagaaagtatgtactgacaccatacataaaattttactttatagatatttatagtgcttatcatgctcctagttgtaaataattatgaaagaaatgaattgtcaaccataacttttgtagaatattgtaaaagagttggaagtgaagcaacatgtggctccaactgcaggcatacgcatattctgccatacttggcaagtttttctaatatcatgtagctgctaagccctagcaagtaggaaaaatnatctgcttttattttaccttttaaatatagacactgtgtgcttgacttaagcttccgaatctttttgatgccaagcatttgagttaatcaaacatcttgaattttatatcaagtattggtataaacaaagttctaaatatacttcactctgcattaacagagcagtttacaaagcaagcataatattacatagactttataatcaatgctaacttcagacactttgtttgtgtattaggaagtggggttggttaataatcatatattttcatttgcaacagatcaaacatgagggctgtacagagtaggccctggttgaccacctgtgta

SEQ ID NO: 2065 - DNA, 661 bp, Homo sapiens
  misc_feature [331]..[331]: Chromosome 4, SNP identification no. = rs7671598
  misc_feature [331]..[331]: allele = t, in linkage disequilibrium with rs4602510, respectively
  misc_feature [331]..[331]: n is a, t, c or g
tgtatgtggatagactgtattaagtatattccttggaccaagcatgtgagcaactgcttaccagattgtggacccccaagtgcaaaggggaagacttagcccaggaacacctaggtaggcagaataatggctggccacagacacccacatcctcattacagaagcaattaagttagagagcttgagatggagaggttatcttggattgttacgttgcactcagtgaatgtaatgacaatggtccttacaagtgagaggcagacaggaatgtcagagtcagagatggaggtgtaatgacagaaggagagatcagtgatgcagttgatggctntgaagacagaaggaggacatggggcatgggatgtaggtagcctatagaagctgcaaagggtaaggaaacagattctttcccaaaacctccagaaaaaaacacagttctgttgactgcttgattttagcccagtgagactattttggatttttaacctccaaaaccatgagacttgtattattttaagtcactaaatttgtggtaatcagttataacaaccatcagaaacaaatgttaattttggtacctggaagtgggttacaacaaataaaaaatatgtggaaggggctatggaattaggcagtgggcaggactggaagagttttgagg

SEQ ID NO: 2066 - DNA, 661 bp, Homo sapiens
  misc_feature [331]..[331]: Chromosome 4, SNP identification no. = rs3956574
  misc_feature [331]..[331]: allele = t, in linkage disequilibrium with rs4602510, respectively
  misc_feature [331]..[331]: n is a, t, c or g
atgattacctggatatgttgaagtatcacatctatgttctttttattatttagttagtttgtttgtttggaatgttgctcaatgagtgaaaaaggaaaagaggatacgggattttttttttttagtggataagcttgtgggatttatctcttccttttacaattctatttcttacccatggtacacatcactttttatatatgtcccccacccctactgtgaatgtaagcttcataaaggcttgttttgttaattggtacatttccagatcaaaataattgttcacggtacatagctaaaattcaataagcagtcattgagtcaaggagtnagcaatgttcccagatttggggaggggttaatacaatagttcaggtgagagctcatgaaaaatatcatcagaagcagaggcaaaggtgaacagtaagagcccgacacacattagcaattagtagcatcaggtacctatgattcttgattttgcccatgggtgacttaatatcaatctcaaagagagataaaatgtaatatattctacctaacaaaaattatcatgaagtatatatacaaatatgatttctttcaaagggtctgtttttcatcaagtatatgaagtcctttaaaatgattctaacatctcagatgcaagcaacaagaagaa

SEQ ID NO: 2067 - DNA, 661 bp, Homo sapiens
  misc_feature [331]..[331]: Chromosome 4, SNP identification no. = rs7663176
  misc_feature [331]..[331]: allele = t, in linkage disequilibrium with rs4602510, respectively
  misc_feature [331]..[331]: n is a, t, c or g
actcagcattcccaggctagccacactttgacacatgttgcatttttagccaaaacgcctccattcagaggactttttatccaggtactctcatcctacacactatgtaggtacctctgctgagacctccttactggggagccttgatgacactttctccactctggcatggtacttgcacttttctactcctagtccttcctcatctccctctccctggccactgggcccattcaatggcaggagcctctggttcagggtttacctctgcagcaagacattacttccaatctgtgttgatgtatctgaccctcaccaaatgctgtttcanggagaaaaataaaacattaaaggagacagcaccttttttccagcctcatttatgctatcacagtaagtgaataaagcaataaagccttaattgttgctttctgtttggcttgttgtcctaattaaccacctcagtacctggcatctcagctttccccagctcacctttttttattattattgtactttaaattctggggtacatgtgcagaacttgcaggtttgttacataggtatacatgtgccatggcggtttgctacacccatcaacccatcatctacattaggtatttctcctaatgctgtccctcctctagtccctcaccctctg

SEQ ID NO: 2068 - DNA, 661 bp, Homo sapiens
  misc_feature [331]..[331]: Chromosome 4, SNP identification no. = rs4602510
  misc_feature [331]..[331]: allele = c, t
  misc_feature [331]..[331]: n is a, t, c or g
actagtcatgtttgtaagccataggatgtagattagaattcaggttacacgaagtgtaggcattccagaaatatgtttccttgaaatgattttgatgcatgcacgctgtaaaatctgttatttttttaagaaaaggtagctaaaagaaatgccaataaatgccatcattgcaggtgctgaactttctcaaatttgaagtaattttagccagtaagtaagttgttatgaaaatcaagattttacactaattttcccttctattttcagagttctttccttagtaggaacttgttaaaggattttctacaggtgcatattcacttctcttacngtacaacaaaagggaaccaatacaaggaaaaatgaagcgtattgttaaatatcaactcctgataattggaggcctgaagtaagccttggcagaccagaaatgacaagattctatgaagttcaaataaaacatactggaggtcaattaaaacaaaaaaacaaaaacaaaaacaaaaaagacaggtagatgagaagcctaaaggtgaacccacattttcagtgccacatttgtcatttacatgtcattaaacttataacgcaggtctctttaggtaagttttcaagatttgattttctacttcttaatttaactttatgaatggtaaaattt

SEQ ID NO: 2069 - DNA, 661 bp, Homo sapiens
  misc_feature [331]..[331]: Chromosome 4, SNP identification no. = rs12506923
  misc_feature [331]..[331]: allele = c, in linkage disequilibrium with rs4602510, respectively
  misc_feature [331]..[331]: n is a, t, c or g
caaccaacaaattacaagttctgtgacattgggcaaatctattaacttctatatgcctccatttcttcatctgtaaatggagataatagtgaaagctactcaaatataaattgtaaagatttaattaattatcacaagtaaacgcttgagaaatgcttggtgcattgttagtgcacacgctacttattattaccaaaagaaacagaaatgactttacactcttattttatctcatctgaactactgtagtattctcttcatctccaatcctttcccttccaagttatcccacatgtattccattcagagtaatctctctaaaacatggtcnattgttcatgtcagacccatacactagaaatgtccactgaccataaaacaaaataaaaaattcttagcctggcattcaagacctctcccaatctaatttctcagtcttatttttaactgctccctttcacatatctttcatgtaaattaaattgaattccccattttctgaaatgaccctgcactttttcatctatgatctgctgccctggccctcctgagtacaatgttggttctccaactccactgtgaatctttaactgagtctggtaggatgaattaatgtattataaaaatacaataaggatatttgcctgagtatgggtagacc

SEQ ID NO: 2070 - DNA, 661 bp, Homo sapiens
  misc_feature [331]..[331]: Chromosome 4, SNP identification no. = rs6827948
  misc_feature [331]..[331]: allele = a, in linkage disequilibrium with rs4602510, respectively
  misc_feature [331]..[331]: n is a, t, c or g
gtatagagtgtttatttaccttgaatttgtagcttatctttcaagtgaggatatcagttcctgggaatcctgcctaatatagttaaagggagtagaaaatgagactctgtacatcctaagactttgaaattttgtgctatacaaatgaaatgaattattattgaaaaaggattaaaatgatctccaagttttcttttatctctaaatgtattgatgttatgactgcagtgaaaaagtgcaattaattcttacagttattcattataacatgaatggcagataatctgatgataggtttgctatatttgcttctaccattgagctgtgtttntcctaaatatggaagaaaagtctctgccttctgagagccttggagtgggcagagtacttgtgagaaaggaggaataaaaacatgggaactgaacactcaattgctaaggtttagaaattgttagtaccaaagagatctctgttagttttctattgctgctgtaacttattactacaaactgtgtgtcttaaaataacacaaatttattctcttatagttctggaggtcagaagtctgaaatgattcttatggggctaaaaacaaggtattgtccaggctagttccttatgaaggctgtaggggagaatctgtctccctgctttttccagc

SEQ ID NO: 2071 - DNA, 661 bp, Homo sapiens
  misc_feature [331]..[331]: Chromosome 4, SNP identification no. = rs7436951
  misc_feature [331]..[331]: allele = c, in linkage disequilibrium with rs4602510, respectively
  misc_feature [331]..[331]: n is a, t, c or g
ttctgggaggtgtctcccagtcaggaggcatgggggtcaggggcctgcttgagaaggcagtctatcccttaccagatattgagtgccatgctgggagatccgctgctctcttcagaaccagaaggcaggatcatttaagtctgctgaagctgcatccacagccaccccttcccgccaatcctctgtcccaaggaggtggcagttttatctataagcccctgactgaggctgttgcctttctttcagagacgccctgcccggtgaggaggaatctagagaggcattctggccacagccgcttggccatgctgcagtgagttctgcacagtcngaacttcctggaggcttccttaacactgtgaggggaaaaccgccttactcaagcttcagtgagggtggacacccctcccccaaccaagctcaatggtcccaggtcagcttcggactgctttgctggcagcaagaatttcaagccagtggttcttagcttgctgggctccgtgggagtgggacctgctgagtaagaccacttggctccctggcttcagtcccctttccaggggagtgaatgattctgtctccctgaggttccaggcaccactagggtacaaaacaaactcctgcagctagctcagtgtctgcccaaacagcagcctagttt

SEQ ID NO: 2072 - DNA, 661 bp, Homo sapiens
  misc_feature [331]..[331]: Chromosome 4, SNP identification no. = rs4323122
  misc_feature [331]..[331]: allele = t, in linkage disequilibrium with rs4602510, respectively
  misc_feature [331]..[331]: n is a, t, c or g
ttatcctcaataaaagttctataaacgtggatttcattgggcagaaaaactgctttcatgatactttattgtagtccaaagcatgttttctcaattacttcatgacatacattcaatactttatgcaatgatctgagaaaaaagttatgaagacttgaactgagtgacagacagaaggagattaagggggtgcatttgagagctatttgagagataaaatctaatgagtgactagatgaagaagtataagaaagagggagttgtcacaatgacaagttgttatgttatttgacaggaagtataggaggaaacacaatttttgttttgcttngttttagttaaaaataaaaagcttaatgtagttttgacacattggacatactcttgcagtgaattgaaggtaacagtttagggagcaagagggagggctaagtaaaaaattacaggttgagaatcattataagttgggctaaaattaaagctaatcaatatgagagaagtacagagtaagaacacaagacaaaaaatttcagtgtttaaaaaatattcctaaataaaattttgcttcataggcaaatagtagatatttttcttgcttaagacatatatattctaaccaataagatagcctggtcttttgagatctctagcatgcacaaac

SEQ ID NO: 2073 - DNA, 661 bp, Homo sapiens
  misc_feature [331]..[331]: Chromosome 4, SNP identification no. = rs4130331
  misc_feature [331]..[331]: allele = a, in linkage disequilibrium with rs4602510, respectively
  misc_feature [331]..[331]: n is a, t, c or g
gcaatacccattctaaggacagtgccacagattttgagtttgtttacagtaccaccacacttcagagttttgaattctgttttggttatctattgctgtataacccaaatcaaccaaattcttagatgcttaaaatactaacaatcactttttacttcataattttgcaatttgtgtagacttgaccaggacagcttatctgttccaagtagtgtcggatggagaattcattcccaagatggtccattcatatggcaggcaatttggcacttgctcttctctgggagaattaataattctctgcacttactgttccctgtagttgcttgcntttcttcccagattgactgctgagtttcatgaagaagaaaaaagaaaggatcacttcttttaaagactagggttgtatctggtaatgcatcactttttccgtgttctatttgtcaaaacagattcaagtgtatgaacaaatagactcacctctttgtggggaaagataattaacaggcttcttaaatccactacagtgtttaaattagcggcaattcaacatttcccgttacttccactatgttacagacaaatatattttattttcaagcaatattcctcataagtagatccaaagagaataaaattggaaatctgattttaaagaatt

SEQ ID NO: 2074 - DNA, 661 bp, Homo sapiens
  misc_feature [331]..[331]: Chromosome 4, SNP identification no. = rs12504284
  misc_feature [331]..[331]: allele = a, in linkage disequilibrium with rs4602510, respectively
  misc_feature [331]..[331]: n is a, t, c or g
caccaacatctgttgaaggctctcttctgcttacaagaccttgtaagatgccttgttgctgcatcctttggagaggatgaatactgtgccctcacaagacagaaaggatgggaaaaaacaaacccacacctccatagttttgataagggccctgctcttgtccatgagggctctgagcttctgtcttaatcatctcctaaaggctccatctcttaatactaccatattggtgattaggtttcaacacatgaattttgggagacattcatataatagtagttatgaagactaaagagaaaaatgttaatttactttaaattgtttgctctanaatggtctatctagggcactgaaattttagctaatacctgaaggatgagcaggagctgatcctgcaataaggcagagaaagggccttgcatgcttaggaaatacatgggcagatgttttaaggcaggtgtggtagcctagcacaccaaacttcatccaagagtgtttcaagaatccaggcggtaaagtatagttgtggagctggcttacttatcacctagtagtcaaaaaggatttcatcactagtggtaggtgaagcacagacagcagctggcaaacggcagcactctaatcattaaaatcctcacctgtggtgaactgagacgtttca

SEQ ID NO: 2075 - DNA, 661 bp, Homo sapiens
  misc_feature [331]..[331]: Chromosome 4, SNP identification no. = rs7685639
  misc_feature [331]..[331]: allele = t, in linkage disequilibrium with rs4602510, respectively
  misc_feature [331]..[331]: n is a, t, c or g
atggttttcttattagatttgagaaatgagggccccagataacacacgatgtcagggctaaggtctgatttaccaaggctgctgtgttcacagagtccggcggtcatttcccccgtaagggaataagtgaaattgacacatttggttgttggtgcacacctcacattggatacatggtctgtggggaagatattatactatggaaagttaagaagaagtctctgaaactaccaactatccttcctaagagtataaatttaaaatgatatcattcttcaggaacatgggggaaattagtgccacccgtaaagatctgaggctcaggaaaggnagatctcatcatttttgtttaattcattaggctaacccttgcaaaaatctaatctgacaaatcctatagatggttgtaggctattgcaatcttgactaagtgatagcttgcaaaggcaagcttaaagccagatgaaacatctgtgctagagaagatgaatgcagtctcagatacatgatgtatgattattgacttgtgaatgctgtcttttctatctcattcagaataaaggactagaaacagtttgtattcactcagaagagaaaacagtacacaattacagttttgctttgggccaccttctgacataatacagaccaaagagatcta

SEQ ID NO: 2076 - DNA, 661 bp, Homo sapiens
  misc_feature [331]..[331]: Chromosome 4, SNP identification no. = rs13112718
  misc_feature [331]..[331]: allele = g, in linkage disequilibrium with rs13119704, respectively
  misc_feature [331]..[331]: n is a, t, c or g
atggagataactggcctcataccttttctacacaatccctgcacagggttcctaacctgtggtcagtaaagaatgtcgctttctaacaggtccagcaactccaagtttatcttgggaccataagagaataggattacccaattcatatgtatttgaggatacaaatccatggcttgactcagctttaaaatatcttatctgagattctttgaggaacagactttcatcaaagccaatccaaaaggactatgtagaaataaacatttttgctgcactttatacaaataatcagaccaattatgagactaaagtttattctatgaaaaacacngttctgtcataatttgtttttgccaaaaatgagaactggacgtagaaattatgctccaaacttgatcacacatttgtcattaaatcctagtctcattgtttttaagtcttttgtctatattttagactaacactgcttattttgtgaatcaagtggtgatctcctgcagcttgtaggaaacaaaaagggatgggtaatgtaaatatctagatcaattattctgcaaattttgccaggtaataaaagtgagtagggtgcccataacacagaggttcttttcgtttgggaaaataaaacaaaggaactttatagacccccaaagggaaattc

SEQ ID NO: 2077 - DNA, 661 bp, Homo sapiens
  misc_feature [331]..[331]: Chromosome 4, SNP identification no. = rs13121021
  misc_feature [331]..[331]: allele = a, in linkage disequilibrium with rs13119704, respectively
  misc_feature [331]..[331]: n is a, t, c or g
cttctggttggaagtcccagtgggactggcatgatctaagtaaccaccttgactataatgtaaagaataacacacaggcctttccaaacaagccacctcatggaattccagacccttgtatgatgtttgctaatagtagtgtcctacaaatctgtgagaaacttggagacatctggaccaatatcccttgccacaaggatcatctgagatattggacagtgcatattatatccccaattttttgaaactccatttgtcaggtggaactttctcatttagcatgtaagattctaaacggcattgtgaatgactatcctgagtatgggtaacnctgtcccaaagatgcttctattatatgtaagaggagaaagcttctaagagatgagaaagatctgcctgtgtccctcacaagtcacaacttagaaccatcacttcaaggacaggtttatatttcctttgtggctcctggctacacttaatcctccctaggcattgaaaggaacctgcattgtagtaggagtgattcctcgcctattatttttatttattattattattatttatttatttatttatttttgagactgtgtcttgctgtgtcgcccaggccggagtgcagtggcacaatcttggctcactgcaagctctgcctcctgggttc

SEQ ID NO: 2078 - DNA, 661 bp, Homo sapiens
  misc_feature [331]..[331]: Chromosome 4, SNP identification no. = rs13123737
  misc_feature [331]..[331]: allele = g, in linkage disequilibrium with rs13119704, respectively
  misc_feature [331]..[331]: n is a, t, c or g
aatcagacaccacctcctcaaactggactataaaatttggtgcatttgccaccagctggtccttttactgctcagagaccccttcccatagagaaaactgtttctttttcttctattctacctattaaacctctgctcctaaattccttgcctgtgtccgtgtcttatattttcctggcatgcaacaatgaaccccagggcatatactccagacaaggtagtcacttcatatagtggtagatacttttttaacaaataaaatgacatagtctagctctacaaatatgctttctgacatcatcttccttcaaagaatttttttttagtgctngattttccttaaatgtataaccttattttgacacaatgtttgcctcaatactttataaaaagttgaaaagattgttactgtaaaggagagtctcaatccagacctcaggagagggttcttggatattgtgcaagaaagaattcagggcgagtccatagagtaaagttaaaacaagtttattaaaaaattaaaggaataaaagaatggctactccatagagagagtagttgagagcttgagctgctcaactaaggatacttattgttactacttgattgtatgctaaacaaggggtggattattcatgaattttccaggaaaggagtgggc

SEQ ID NO: 2079 - DNA, 661 bp, Homo sapiens
  misc_feature [331]..[331]: Chromosome 4, SNP identification no. = rs13105113
  misc_feature [331]..[331]: allele = c, in linkage disequilibrium with rs13119704, respectively
  misc_feature [331]..[331]: n is a, t, c or g
atattaaaatacccagtattccagtgcgtttagtttttaaaggccaatagtcaaagggagtttatcagagcaaaactaagaacagagggagagcttctgaatagctgaaagattaatgttttcaaagacttgttttataatattttgtcttggatttcactacattcagaaatttaactatgaaattggcatcttcctaaaataaataatttatagaaatactaactagcccagcaataattaaaacctaacaatagatacaatttaatggatttttaaatagcagtgtgtagcactgccttttctcctgcacagttccctgtgacttacnttctgattgactttccaccagtctccaattcaaatttctgctatatcacatgggaatatgattgttacaatctatataattgctatgattttgagtagtgctttttaaaatattttcttacatatataatttacattacaggataaatttaagccccattttttatatgtcccagtagaaaatcctacacagaagttgactatttgtgtaaggtggaatatgatgatgttctctgattaccctgataagataaaatgatgctatatttagctcaggataaacagaagaggaaaacaagcagtctttggaagaaaacataaatcaaagtag

SEQ ID NO: 2080 - DNA, 661 bp, Homo sapiens
  misc_feature [331]..[331]: Chromosome 4, SNP identification no. = rs13112384
  misc_feature [331]..[331]: allele = c, in linkage disequilibrium with rs13119704, respectively
  misc_feature [331]..[331]: n is a, t, c or g
caagcagtctttggaagaaaacataaatcaaagtagctctcgggaatttcaagtcgaagagaactttcatttgattgctaagtctaataccttttgggtccctttttttctccacagaagactgaaattccaaggaaaagtggcatgatagctttggctttactcaggtgcttctactgtgtttgggacgaaaagtaaggcaaaggcagatccccaaagaaagaagtgatgggcagtcctgaagaacatatctaccaaaataaggcaaaaatcaagatatttaccaataacattttcatgtgattatgcttgattttatatctaccatganctaaaactgatgtgaaacaataatattttgaaaatggcagatgttctttcttgtctgctggctgaaagactgcactgaggattctggagatcttttcttttgcatttcattgtcttgtatatggaattaaccttaagtaaataaaaataataataaataataattaagttgtggcatttcttgaaaaccctaagattttattaagaagaaaaactatgaaaatattttcgtgatgaaatttgtaattaagttaaaatataactcttcctatctcttacagattgatatattactaagccattataagtaaggctggagctatcagcttgt

SEQ ID NO: 2081 - DNA, 661 bp, Homo sapiens
  misc_feature [331]..[331]: Chromosome 4, SNP identification no. = rs13119704
  misc_feature [331]..[331]: allele = a, g
  misc_feature [331]..[331]: n is a, t, c or g
aaaggcatacaaaaggataaggaaaattatccataaacccatcacatttagatataattaacgtggaaatgaaacagggattagagaaaagatgtttttgaatcacaatttaagtggctgctctcctaactacacatatatacacatgtataaagtatatccctttatattttattgctttatgtttaattgaaataatttccatctccctggattttctcagttttagaggttttggagtcatatataaatctttcattttctgggtgactttgaaaagttgataagtctcatggagtcttcagtttcttcatctataaaatgagcatantaatacctgcatctcagtgttctaataaggattacaactaatattttttaaacagtgttaacacaataacttgcatagagcaagtatttggtaaggaatgtttgataatgttttttaattacacatataatattctatcaaatgtgtccactaagtttattctttaaattatatatttgaacatttatgttatttttaaagacattgataaataacatacctcttttatataaatagtgtgttgataatatttgttgctcttagaaaaatctatgtattagtacattatttacttttaaaataatttagcctaatgttctattacattag

SEQ ID NO: 2082 - DNA, 661 bp, Homo sapiens
  misc_feature [331]..[331]: Chromosome 4, SNP identification no. = rs13109435
  misc_feature [331]..[331]: allele = c, in linkage disequilibrium with rs13119704, respectively
  misc_feature [331]..[331]: n is a, t, c or g
atgagtgatatacaaatttattttccactttgtaatttttataattataagccttatcttttttcttctatatatatgtacttttttctccggcttctctccagatatatatatatatatatttaaatttagttgttcaatgctttttaaataatgtgtgtagatatgtgtgctggtatgtattctactgatatttattcaggttgatgttctctggcctttgtagttttgtagttgaaattttgtatttgtttaaaaaacaagtttcaaccattatctcttctagtgttttttttttgttttgttttgttttttgtttttttccctgcangttgtcttttctctttccagccttttctttgtttttttcctgggattccaaaaacaaatttgttagataattagtatttattccacacctctttggtagtacataatctttttgtaggtatacttgctttttaaagcatttctcttcatttttcagttttggtaatttctattggcctatcttcaaatttactaattcttttattagctgttgtcaggtttactgaaaaacatatcaaagttgtttttttttctgttaatgcgttttttcttattaaaatttcaatttcactctttcttaaatgctccatctctgtggtaaaattcatcg

SEQ ID NO: 2083 - DNA, 661 bp, Homo sapiens
  misc_feature [331]..[331]: Chromosome 4, SNP identification no. = rs13135110
  misc_feature [331]..[331]: allele = c, in linkage disequilibrium with rs13119704, respectively
  misc_feature [331]..[331]: n is a, t, c or g
atttgttagataattagtatttattccacacctctttggtagtacataatctttttgtaggtatacttgctttttaaagcatttctcttcatttttcagttttggtaatttctattggcctatcttcaaatttactaattcttttattagctgttgtcaggtttactgaaaaacatatcaaagttgtttttttttctgttaatgcgttttttcttattaaaatttcaatttcactctttcttaaatgctccatctctgtggtaaaattcatcgtctgttcatgtagaacctttaatatattagtcatagttattttaaatttcttctctancatttccaacatgtaggttatatgtagctttggttctcttgattgttttgtctcttgataatgttttcatgttttgtgtgtgtgtacatttatttttatttgtttcttaatttttggttgtgtggcataaatcatgtgttgggcactttgagacagaagtaagcaatgttttgagcaaaaattgttaaaaatcttttttgactaagtctttggcatttgaggtttaatcaatttagagttaaatggaatatcagttttattgcagccattactactctcagggtctctacagatcaaaatttctctagcattgctttgtgcttagggtga

SEQ ID NO: 2084 - DNA, 661 bp, Homo sapiens
  misc_feature [331]..[331]: Chromosome 4, SNP identification no. = rs13116984
  misc_feature [331]..[331]: allele = c, in linkage disequilibrium with rs13119704, respectively
  misc_feature [331]..[331]: n is a, t, c or g
aagaatggtttgcaaatgagtttttctcagtgtctgcttctccatcacctttatgctttccttgacaacttttccttagaaatgtctctcttcatactcttgttcctaacccagtgtaatattcttggtctttattaagtgcttggtgaaggacaatatgagggggctatttgttgttgtcctgtatagactcagtcttaaacaacacttgggtatctggtgtggggctttctcagtgatcctgtcccttctccagcaatggaagatccctactggtctgacccagaatggtttcatgctcctccttgagtgttagaaggttgccttcctnttctctcctttggtgtgtatttttgctctgtgtatggtaaagcttgctgcccttccacaaccccttaattatttaattccatagagcaaaatcatccagatagggctttatgccttttctggagcagctgctgcactcctcctacaggcccatacatacttcatttgcactggggactgttgtggggtggggcgggggcggggatagcattaggagatatacctaatgctaaatgatgagttaatgggtgcagcacaccaacatgacacatgtatacatatgtaacaaacctgcacgttgtgcacatgaaccctaaaacttaaagtataa

SEQ ID NO: 2085 - DNA, 661 bp, Homo sapiens
  misc_feature [331]..[331]: Chromosome 4, SNP identification no. = rs1847587
  misc_feature [331]..[331]: allele = t, in linkage disequilibrium with rs13119704, respectively
  misc_feature [331]..[331]: n is a, t, c or g
ttatgaacaaacacactgttttattaacatcaactaattaaacaatatgtgctgttttattttctttaataaaataaagaatgcctgggagttagagaacaataacctatgactttattttactaacaccgctagcagatttactcattttatgtcatccttggttttaattaaggttgtaattatttaaaatttatttttgcacttgctaaagaacacaacttattttttcaatgttaagtaatgaaaagaaagcctactaatgttagctatacatctttttattgtaatgtatctttcatttacataaaatgaacaatagttaatacanaaaaagttattacatacacacaaatggcattctatttctatttaggaagaaaaaagctggaataaccatcactctcaccataacagtaagagaaaagtctgtaaaattaaagctttaaaaaaaatcagtgaagtgaggtcacagagcaatcaatcagcttggaatctaagaaaagacatatgcctccaatgaaagaggagaaaaaaaataaaaaagcacaaaaggaatataggactgccatgtaagcagataagtgaaattcagctacaattttgaaacaaatttctagggaccaattgtatgctagtatgagaatatggaagccctgaa

SEQ ID NO: 2086 - DNA, 661 bp, Homo sapiens
  misc_feature [331]..[331]: Chromosome 4, SNP identification no. = rs7655912
  misc_feature [331]..[331]: allele = g, in linkage disequilibrium with rs13119704, respectively
  misc_feature [331]..[331]: n is a, t, c or g
cctatatcttagtatataaattttattaataaaccatttgtatgtgttatgcatttgagaatatttgttcaagaatgaatagagaagtggactcccttctgagtgtttgattatgtgataataacttcctgtgcctttgaatacaaataacaatgtttcttggtatttttttggtgtattgctttgtataatacttttaaaacacagtagatgatactccatcatcttctgattttggttatggtattatgaacttaaaatttttctttcttctgtaaggaacaagtttatattttctctctggttatatataatattctctcctttattnccatattataatacaaagcaaaaaacccacaaatttttgattatacttaatagacattatgttacatacccacatactcattctatctttctctcatttcgtaacatccatgccatttgtagggttatcctagttacaaaagtaagtctgaatcaatccaagttgaccatgaaaacctttgggctaaattattcattgcatgactatcacctggtcatataaattgactcaatatttgacatgagatatttttatgtttttctgctactctcaagtcttatttaagatgaagacttaattcattcaatttaaatatcagcttttatttct

SEQ ID NO: 2087 - DNA, 661 bp, Homo sapiens
  misc_feature [331]..[331]: Chromosome 4, SNP identification no. = rs16998224
  misc_feature [331]..[331]: allele = a, in linkage disequilibrium with rs13119704, respectively
  misc_feature [331]..[331]: n is a, t, c or g
cctgtcttatatgataccacagagtcatataactgcacagttccttggcaaataaaatgcaggtacaattccaccacttattctcctctcacccctcacacttttgctgctgtgtttgtccctcagcaagcaggccatacccttgaattgcataacaagcaagacaattcagtaaggctttcttcttcagtatctctagatccaagaaaaaatgacacatctttctgtgacaaaggatgagagaaagcaggacatcctggtgctgattaatgtctttattttgctattttttgtcagttgtttttccaaccttttcagatagataatggancagctaatcaatgcctgtgggtaagctgactttaagctgggaaactaaatggcagacttccattcttgaaggcgcttttaatctcttcaaattagtcttttggagaatagccagcctcttctgaattgaaagtgtatctgaaaaataagctccctttatggaaaccacaacctttccaactaggacagtggcccaattccacagatcaccaaccccatcccacctcctgcctcttctccagtgtccctgtatgtagataccggtggtggcagagtggacaagggaagactttgatacagccctggaaaagccctgtatacctgattgtca

SEQ ID NO: 2088 - DNA, 661 bp, Homo sapiens
  misc_feature [331]..[331]: Chromosome 4, SNP identification no. = rs13124412
  misc_feature [331]..[331]: allele = t, in linkage disequilibrium with rs13119704, respectively
  misc_feature [331]..[331]: n is a, t, c or g
cacgtgtaagtcctcaactccaggatgtattaagcatttctcaaagttttagtcatacaaattttctctccaaattttaattctccattatattttaaattattcctccaattttaattctccattatattttaaattatttctttctgtgaattatatatagacataaaaatagtaatattattattataatggagagagggtgatataaaatttacaataatgtagtctcacccaaaataatgttcatacagcaccaatatgacatttctggttgctacagatgtgagtctctgagccatgtagctaacagtgaaagagttaacatctnattgtataacctctgggaaaaagtaatcaaaacataagcaaataacgtactaaaacttttagtacattttattgtcgcgtatgacctaaaatattattcttaggtcctggaaagatgtgaattgtgacttttaattttaagaactttaatggattgatatgttttgcttgtctttaataatatgtcaggggaaagttgtgagaaacaacatcagagacaattaaaggatgttctaaaccacagtattcatgaaaattctaaggttatatttttatatttatacattttactttgtaaatcatatctacattgaaatgtttgagattaaac

SEQ ID NO: 2089 - DNA, 661 bp, Homo sapiens
  misc_feature [331]..[331]: Chromosome 4, SNP identification no. = rs7685332
  misc_feature [331]..[331]: allele = c, in linkage disequilibrium with rs13119704, respectively
  misc_feature [331]..[331]: n is a, t, c or g
tgtgacttttaattttaagaactttaatggattgatatgttttgcttgtctttaataatatgtcaggggaaagttgtgagaaacaacatcagagacaattaaaggatgttctaaaccacagtattcatgaaaattctaaggttatatttttatatttatacattttactttgtaaatcatatctacattgaaatgtttgagattaaacaaatctcaaatacactttttaagattatagatttatttcacatatttcatatctattattatattgtaatagatcatttctataattcttcatgttcaatcctcttttcgtaaagtattatgnttttcctatatactatccatggagaattcctattaaacacacgcacatattatatatattttacatgtatatttcgaagcaggaatggaagtttattaaaaagctttagaacaacaaggaaaggaaggaaagaaaagaagggaagtgcaacttgaaagagggccaggcaggagacctgagaaaccaagtgcagagcctgaccgcttgacttgggctttttatacattggcgtacttctgggattttactgggaagctactgatcagtttcaggtgttttctatgtagtaggagattgcgttccctggtaccagctgtgatcaattatttc

SEQ ID NO: 2090 - DNA, 661 bp, Homo sapiens
  misc_feature [331]..[331]: Chromosome 4, SNP identification no. = rs905772
  misc_feature [331]..[331]: allele = t, in linkage disequilibrium with rs13119704, respectively
  misc_feature [331]..[331]: n is a, t, c or g
cctgcatccctggatcacaaacacacacacacacacacacacacacacacacacacacacaatagatgatgatgatagacagatagatgatagatagatagatagatagatagatagatagatagatagatagactttcaccaattcatggagccaactcagtcctaacacctagcaagagggcaagacccacagaaccaccaccacccctctgtcagcaggaagcatttacagaagaccaaccttcagccattttcccccaaatatttggggtcttggactctttaggagggaaatgttgcagtaggtagctagtcaggtatgagcagcncaggagagggcttcctccacacacatactaggagtgttgggcgtcaggtggttgtggttaaccatttagctaaagaaataattgatcacagctggtaccagggaacgcaatctcctactacatagaaaacacctgaaactgatcagtagcttcccagtaaaatcccagaagtacgccaatgtataaaaagcccaagtcaagcggtcaggctctgcacttggtttctcaggtctcctgcctggccctctttcaagttgcacttcccttcttttctttccttcctttccttgttgttctaaagctttttaataaacttccattcctgcttcg

SEQ ID NO: 2091 - DNA, 661 bp, Homo sapiens
  misc_feature [331]..[331]: Chromosome 4, SNP identification no. = rs17047996
  misc_feature [331]..[331]: allele = a, in linkage disequilibrium with rs13119704, respectively
  misc_feature [331]..[331]: n is a, t, c or g
agaatgaacacatcagaaaggaaagaagaaataaatgaggtgggtataagaaaccaaaaatgccattaatcacttagttgtaaagtatttctccttgacaacttgttattttaaatttacttacgagaagtttaaatagaagaaattatttttggtgcagtcaggcatattttacaatactcagtttataatatgtatttagcaatacaatcttttttttacataattagggatcaagctattgcatctatgttgctttcataatgatggcataactcctcaagtgtattaaggacttctatatcatatttaaagaactgaataatctagnctctatgagcaatgtcaagattgctttacaatgtaattgattaatactgatcatataattttgtttttaagcacctgccagtttttactttttttcttttttgtatataataacattattcttttacggtcttctatatcactcctatgcctcaaataattattttttcttcaacttttaagttcaggggtacatgtgcaggatgtgcaagtttcttacataaataaacatgtgccatggtggtttgctgcatagatcatcccatcacctaggtattaagcccagcatgcattagctattcttccggatactttcccttccctcaacccc

SEQ ID NO: 2092 - DNA, 661 bp, Homo sapiens
  LOC152586
  misc_feature [331]..[331]: Chromosome 4, SNP identification no. = rs6844879
  misc_feature [331]..[331]: allele = c, in linkage disequilibrium with rs1431346, respectively
  misc_feature [331]..[331]: n is a, t, c or g
aagcatggaagtgaagaaagaaaaattgaaggatttaaaaggaaaatctaaggaagggtagtaaaaaagatctcataatgggtatagtatttggaaattttctgtggtgggtataatttttattatgtttttatattttttaagactgtcagctttagcatactggaaattgcagcgactgagttaaagtccctttctctacaattttaattatctgagtttcagtattcttgtaaagcagagaaaagtacatcttagctactcagctaacatgtgtgccagactcacagcaagcatttaataaatggtaactcttttatgtttctatganttatgtgtctaaatgtcaatttgatctctctagaaaaaagtttggttaagaaaatacattatctggaatttaggtacttgcatctgattatactgttaagataatagtgtctttataaaaatcatgccattctttttcatttagtaataaacaaactgataaactgtttaaaatgttttaaattattgtgtgctaaaaaacttgatccaacaaagtaaatccattgcttacctatgaatccaagcattgaaaactcaataaaaaaccaattatttgaactgatattacctacaaaatctgttatttttgtaaagtacatctctttagcta

SEQ ID NO: 2093 - DNA, 661 bp, Homo sapiens
  LOC152586
  misc_feature [331]..[331]: Chromosome 4, SNP identification no. = rs17005968
  misc_feature [331]..[331]: allele = c, in linkage disequilibrium with rs1431346, respectively
  misc_feature [331]..[331]: n is a, t, c or g
aagccaatggaaggaggatgagagggacaatgtgtagagagattttaaaaaagaaacaatgacagagatataaaaggctgaaggaaaaacaaagatccaggatgactcccacctttgtgactctaaaaactgggcataatgtggaccactaattaaaagcaaaacaaaacgcttaaaagattcctagattctgacacaccatttataattttaacacaaaagaaggctaatcagtttcctgggataagacctttttctgatttctggcatgtctttttctttattaagttttgagggaccaaattattacatttcccataatacttaccanactaataccccaaattataatcctttgtatgtgtatagagcttttaattttttaagattctttcacaaatgtattttattctcataatgactcttccaattatgcaatataggtgtcattatacacactagaaagttaggaaagctaagaaaaaaaggtgaaattacctgcctacaatgaccagcaaacagtacagctgggactagaatccagctctaatgatttataatcccaggctctccccctcctcattattatacctttgctaattattgtctgtaaatgtgaacatagaccatcagtggtgtgctggtaaatgtttaacaactg

SEQ ID NO: 2094 - DNA, 661 bp, Homo sapiens
  LOC152586
  misc_feature [331]..[331]: Chromosome 4, SNP identification no. = rs1431346
  misc_feature [331]..[331]: allele = c, t
  misc_feature [331]..[331]: n is a, t, c or g
tcatgttttataatgggtatgtatcacgaaaatggggttggaatagcatattgtgctagagcgaatatgggttttagacctagaaaagtctctgtgccaattttgcttgttttacttcctaacttcaaggaagtaatttattttttctgatctttaatttcctcatctgtaaaactggaatagtaacttaaaaacttggggggaaagaactgttcaaaatacatgctggaattcttcccaggctctgtacattagtggaaaagtttttggtcatttattttggtgggagcataagtggaggagtgaaggggatgaaagtcttactggctgncctctgattttatgatatatcaaatgaaaagatttttaaaaaacgaattctaatatgttccttggggaatagaaaatactggcgtagaaaaaaaaagaatggagagtttggttgtttgctttgtggtaaaagttagtaacataatatctaaatttttaaatgaatttgtgtaactttaaactacaagatcttgtgcggcaatttagtagaggtaaagggaaataacatcaagttgcagcatacacaatcatcaaaaagtttagattacagagatacacaaattttgtcctctagaaaattccatccaaagtccaaaaagcaccaaaagtt

SEQ ID NO: 2095 - DNA, 661 bp, Homo sapiens
  LOC152586
  misc_feature [331]..[331]: Chromosome 4, SNP identification no. = rs7662837
  misc_feature [331]..[331]: allele = a, in linkage disequilibrium with rs1431346, respectively
  misc_feature [331]..[331]: n is a, t, c or g
gagatgacagtaataggccctattgcattggattgtgaagattaaatgagataatgtaagaaaacatagaactcagtaagtggaacacagaatgcaatagataaacgatgtcatcagaggcatatgatacaaaacaacactacttattcccaaggaactgcctagagcagaggtcagcaaactttttttttttttttaaataaaggggcagatagtaagcatttttggctattgggttataccatctctgttgcaactactcagctctgccattggagcacaaaagcagacatagacaacaagtaaatggataagcataactatgttccancaaaactgtatgttaaaacatggagccaatgggcctggcctagagtgactcactcactggaatgagtgaggtttataggaaaggcaggtatcctgagacttagcttaatattcctgcttcaaactccaaagcttcttcttgtcttgtatacttggtgaacttgaactcatttgtcaaggcttacctcaaacatcacctgttgtataaggctattactgaccttggtctccagaaagactgggaaacagtaaaataaccaggtaagaatagatttaccaaaaacaacgagaaaagatttgccaaacatttggcatatacttaatgtatatt

SEQ ID NO: 2096 - DNA, 661 bp, Homo sapiens
  LOC152586
  misc_feature [331]..[331]: Chromosome 4, SNP identification no. = rs1431336
  misc_feature [331]..[331]: allele = a, in linkage disequilibrium with rs1431346, respectively
  misc_feature [331]..[331]: n is a, t, c or g
tagcaagaccctcatctctaaacacacacacacacacacacacacacacacacacacacacacacacacacacacacacgcagtggggcatagtggcatgcgcctggagtcccagctgctcaggaagctgaggtgggaagatcccttgagctcaggaggtggaggctgcagtgagccatgattgtgccattgcattccccgtttgaacagacatttcaccaaagaagatatctggatggcaaatagtaaaaatgttcaacatcattagtttctgggaaatacaacataaagctatgagatatcatgacattagaatggctataataggacnggcatggtcccgtaattccagcactttggaaggctgaggtgggaggcttgcttgaggccaggagtccaagatcagcctgggcaacatagagagaccccatctctacaaaaaataaaattagccaggtgtggtagcacatgactgtagtcccagctacttgggagactgagataggaggattgcttgggcccaggaggtggaggctgcagtgagccagattgcaccattgccctctagcttgggcaacagagcaagagcctgttttaaaaaaaaatggctataataaactggagtgactaaactctcatacattgctggagggagtgaaaa

SEQ ID NO: 2097 - DNA, 661 bp, Homo sapiens
  LOC152586
  misc_feature [331]..[331]: Chromosome 4, SNP identification no. = rs6851261
  misc_feature [331]..[331]: allele = a, in linkage disequilibrium with rs1431346, respectively
  misc_feature [331]..[331]: n is a, t, c or g
agtttctgggaaatacaacataaagctatgagatatcatgacattagaatggctataataggacaggcatggtcccgtaattccagcactttggaaggctgaggtgggaggcttgcttgaggccaggagtccaagatcagcctgggcaacatagagagaccccatctctacaaaaaataaaattagccaggtgtggtagcacatgactgtagtcccagctacttgggagactgagataggaggattgcttgggcccaggaggtggaggctgcagtgagccagattgcaccattgccctctagcttgggcaacagagcaagagcctgttttnaaaaaaaatggctataataaactggagtgactaaactctcatacattgctggagggagtgaaaaatggcacagccactctggaaaacagtatggcagtttcttataacattaaacatatacttacatatgccctgtcaatcctacttctacatatgaattctaaaaaaattaaaacttctcttcataccaaacacatgtacatgaatgcttatagtaacatctatttgtaattgcccaaacctgaaaacaacccaaatgcctttcaactggtgagaggataaacaatatgtccattgaacatcgatacaacgaaatgctactcagcacta

SEQ ID NO: 2098 - DNA, 661 bp, Homo sapiens
  LOC152586
  misc_feature [331]..[331]: Chromosome 4, SNP identification no. = rs2321267
  misc_feature [331]..[331]: allele = c, in linkage disequilibrium with rs1431346, respectively
  misc_feature [331]..[331]: n is a, t, c or g
acatgtagcaatggtgtcacacaattttctataataggtaagaatgtaaagtataagtttcaatatagttatatatagtactatatatgtattatatgtgtatatatacagtactatatacatatagtatataccacatgtgtaaatacgtgcataggtacaaatataaaagactggaaagaaagaacaaaatgttaaatatagtgatatgaggaaggtgggattataaatgattttttcctttattactctgtgctcttctttgttttacaaattttccatggtgtgcgtgtatcagatttgtattacagtgtaatcccattaacccccnaaaaatacatctaagaaattatctgaagaaaattatgaggaatatgtacacagatttggactaaggatatttaacataggccgtagtatttagcattatttttaaaaattggaactgaccaaagtgcccaacagtaggacatttgctaaataaattacagaatattcttttaagagttctgatggctctgatgtcaaatcatgtataatatacttaatatttgtgttatctggggaaaattgcttaatttttatttgcctctgctccttctggtgtaaatgcatacataaaaatctctgcctcagagctgttgtgaagatgtagtgctga

SEQ ID NO: 2099 - DNA, 661 bp, Homo sapiens
  LOC152586
  misc_feature [331]..[331]: Chromosome 4, SNP identification no. = rs2321268
  misc_feature [331]..[331]: allele = c, in linkage disequilibrium with rs1431346, respectively
  misc_feature [331]..[331]: n is a, t, c or g
agtataagtttcaatatagttatatatagtactatatatgtattatatgtgtatatatacagtactatatacatatagtatataccacatgtgtaaatacgtgcataggtacaaatataaaagactggaaagaaagaacaaaatgttaaatatagtgatatgaggaaggtgggattataaatgattttttcctttattactctgtgctcttctttgttttacaaattttccatggtgtgcgtgtatcagatttgtattacagtgtaatcccattaaccccccaaaaatacatctaagaaattatctgaagaaaattatgaggaatatgtanacagatttggactaaggatatttaacataggccgtagtatttagcattatttttaaaaattggaactgaccaaagtgcccaacagtaggacatttgctaaataaattacagaatattcttttaagagttctgatggctctgatgtcaaatcatgtataatatacttaatatttgtgttatctggggaaaattgcttaatttttatttgcctctgctccttctggtgtaaatgcatacataaaaatctctgcctcagagctgttgtgaagatgtagtgctgatgcacataaactaaagtttcaggatacaaaatcaacagtagagtttcta

SEQ ID NO: 2100 - DNA, 661 bp, Homo sapiens
  LOC152586
  misc_feature [331]..[331]: Chromosome 4, SNP identification no. = rs7681722
  misc_feature [331]..[331]: allele = g, in linkage disequilibrium with rs1431346, respectively
  misc_feature [331]..[331]: n is a, t, c or g
atgtctatactacacaaaacaatctacagattcaatgcaatccttaaaaaaatccaattacgtttttcacagaaacagaaaaacaacccctgcaattcatatgaaaccacaaaagaccccaaaaagccaaagcaatcttgaatgaaagaacaaagctggagacatcacactacctgacttcaaaatatattgcaaagctatggtaatcaaaacagcatggtactggcataataacagacacatagaccaatggaacaaaatagggaacccagaaattcacgcatttacagtaacttgatctttgacaaagtttccaagaacacacaatagngaaagaacagtgtcttcaataaaaacgtgtttggaaaactggatatccacatgcagaagaacgaaattagatctttatttcaactcgcataaaaaatcaactaaaaatggatgaaagacttaagtgtaagacctgaaactgtaagattactagaagaaaccattaggaaaaagcttattgacctggtctgagcaatgatttttcagatatgactccaaaataacagataacaaaagacaaaataaatgaatgggattacatcaagttaaacaagcttatgtacagcaaagtaaacaattaacagagtgaagagacaacatggattgaaaa

SEQ ID NO: 2101 - DNA, 661 bp, Homo sapiens
  LOC152586
  misc_feature [331]..[331]: Chromosome 4, SNP identification no. = rs10519560
  misc_feature [331]..[331]: allele = a, in linkage disequilibrium with rs1431346, respectively
  misc_feature [331]..[331]: n is a, t, c or g
caaagccacctgactaccacactggatggcataagtctccggcatcagctgtgagcttgttagaaatgcagtatctcaggcctcaccccagacttcagatgcagacaatcagattgtgcattttaataagattcccagttgactactatgcacattaaaatttgagaagggctgtgacagaccactttcatggttttctctttatcatcattgatactaccatagctcaagctttattgcctttagctgcactattataattgcctcttaattggtctctcatctccaatcaatgattaatcttctggaaacactgctcaaagattataantagttccctgagtgcttacttgccctggtctaccaggtcctatacaacatggccatgaacgtgacttgacctcacttcattcactaaacacctccagtagcaagaagcatgctgagatttctattcttccattaaatacttgccatgtgctatgtatgtggtaggtaaataaacatgaataaaatctggtttctgctctaaattaaattgatatgaataaaatctggctcctgacaatcagactgcaaggaatgtgggaatggtgcatatatttaaactttactaattataatatattgttaaaatggaattatcctcaaagtgccacag

SEQ ID NO: 2102 - DNA, 661 bp, Homo sapiens
  LOC152586
  misc_feature [331]..[331]: Chromosome 4, SNP identification no. = rs10519561
  misc_feature [331]..[331]: allele = c, in linkage disequilibrium with rs1431346, respectively
  misc_feature [331]..[331]: n is a, t, c or g
tcctatacaacatggccatgaacgtgacttgacctcacttcattcactaaacacctccagtagcaagaagcatgctgagatttctattcttccattaaatacttgccatgtgctatgtatgtggtaggtaaataaacatgaataaaatctggtttctgctctaaattaaattgatatgaataaaatctggctcctgacaatcagactgcaaggaatgtgggaatggtgcatatatttaaactttactaattataatatattgttaaaatggaattatcctcaaagtgccacaggcacaggaaggcaggaatgattaattcttaaggagaantgaggagtaggagaggtggagaaggtttcagagaagaaggaagacttgtgaacttgtatgtacagaagcttgcctacagcagaaagaagggaagggcattccagcctcagaaaacaacaccataagtgcatagagtgtgaaatggtatggtatgtgatatagtttgaatatctatccccaccaaatctcatgttgaattgtaatccccaatgtgggaggcatttgagtcatgggggaagatgatccctcatggcttggtgctatcctcatgatagtgagttctcttgggatctggttaagtgtgtggcacctccctgccactctctctca

SEQ ID NO: 2103 - DNA, 661 bp, Homo sapiens
  LOC152586
  misc_feature [331]..[331]: Chromosome 4, SNP identification no. = rs10519562
  misc_feature [331]..[331]: allele = c, in linkage disequilibrium with rs1431346, respectively
  misc_feature [331]..[331]: n is a, t, c or g
actaaacacctccagtagcaagaagcatgctgagatttctattcttccattaaatacttgccatgtgctatgtatgtggtaggtaaataaacatgaataaaatctggtttctgctctaaattaaattgatatgaataaaatctggctcctgacaatcagactgcaaggaatgtgggaatggtgcatatatttaaactttactaattataatatattgttaaaatggaattatcctcaaagtgccacaggcacaggaaggcaggaatgattaattcttaaggagaactgaggagtaggagaggtggagaaggtttcagagaagaaggaaganttgtgaacttgtatgtacagaagcttgcctacagcagaaagaagggaagggcattccagcctcagaaaacaacaccataagtgcatagagtgtgaaatggtatggtatgtgatatagtttgaatatctatccccaccaaatctcatgttgaattgtaatccccaatgtgggaggcatttgagtcatgggggaagatgatccctcatggcttggtgctatcctcatgatagtgagttctcttgggatctggttaagtgtgtggcacctccctgccactctctctcactcctgctttttccatgtgacatgcctgcctgctctggcctagcc

SEQ ID NO: 2104 - DNA, 661 bp, Homo sapiens
  LOC152586
  misc_feature [331]..[331]: Chromosome 4, SNP identification no. = rs7670320
  misc_feature [331]..[331]: allele = c, in linkage disequilibrium with rs1431346, respectively
  misc_feature [331]..[331]: n is a, t, c or g
catgggggaagatgatccctcatggcttggtgctatcctcatgatagtgagttctcttgggatctggttaagtgtgtggcacctccctgccactctctctcactcctgctttttccatgtgacatgcctgcctgctctggcctagccttctgttatgagtaaaagctccctgagaccttcctagaagccaagcatatgtcagcaccatgtttgtagggcctgcagaactgggagccaattaaacctcttttctttatacattacccagtctcagatatttctttatagcaatgcaagaatggcctactacagtttatcatggggaacgtangtaagtcactcagggggtaaatagaagggcaaaaggtataatgataaagcattggcaggtcactttaaatttattattagtatacttgtacccaatgtggttccaaataaagaatatctaaggtaattactagaagatgaaactaaaaacataaagtacatttcagattactccccccatgtatgctttgcaataatcaaatcaaactatgtactaagccctttaaattccctgtgagtggcccctctgtgcattaggttttattgcagaatatattagacattacaaagcgtatataagacagtttaaaggataataataaaaatgaac

SEQ ID NO: 2105 - DNA, 661 bp, Homo sapiens
  LOC152586
  misc_feature [331]..[331]: Chromosome 4, SNP identification no. = rs10857384
  misc_feature [331]..[331]: allele = c, in linkage disequilibrium with rs1431346, respectively
  misc_feature [331]..[331]: n is a, t, c or g
gctggttttgcaaaaaaaaatttcttttctcaaaagccagtgttaaagttattggcttctgtatacattgggccatgagcccatttgcttgataacataatgcagctacatcaactttattttggtttgggtttgtgggtatttttccatcccttttcttccaaaatttctgtctttaaaattcaaatatgtctcttttagtaaccatcaagttgaattttgtcatatatccaatcaggaaatattttaatttcttttttgggacacttaatgcaattagtgatatagttatgctattgtactattattttagtggttcaactagatattncaacatgaatcctcgacttaatagtcaaataccaattcttacattctcacttctcaatagttctacaagtctagtacaatttaactccatttccctctcttaccttttcttgtaattgctggcatacactgttattgtacatgtattttaaattccacaggacatttcaattattctcttgaataacccacatttggaccttggattctgcttacttacagctgcgtctgagaactcctcttctgccccatggacagtaataacaatctattttgtcggcatattcccacaaggtcatacacattggtgaaacactcccccaactggatg

SEQ ID NO: 2106 - DNA, 661 bp, Homo sapiens
  LOC152586
  misc_feature [331]..[331]: Chromosome 4, SNP identification no. = rs7688115
  misc_feature [331]..[331]: allele = c, in linkage disequilibrium with rs1431346, respectively
  misc_feature [331]..[331]: n is a, t, c or g
actctgtcttaaaaaaaaaattactataaaactttacattttgctttctaattaaaagaaatcatttattttttgttataagtgtgcttattgttcattgtgctaaaatagacatttggatgatgttctttatagaaaatgaagaggagggaaactatgtcaaatgactataaagattagtagaaatattataatgcagataaattaatatgcattcctaatctttgaaacaagcaggatatagaatattttgtgtatatgatgataaaatctagtattaactggagggctaaaacatgaagccactcccaaacttcaacctcagcactcntaccaagattaccttgtgtgcacttaagtcatacatgtgtaaataaacgaaaatttaactgaaaacaacgtaagagcaatcgtggaaggctgggttcataatttacagggttcctaagtcttaaactgaaaaatttaactacttgaatgctaaaattttacaccgcggacaactagggttaaaagatcaaatataggatacctggttaaatttgaaattaaaataaaaaagacgtaaatattttagaataattatgtcccatgcaattttttatactaatatataattgtttatctgaaattgaaattaaactgggcaacctgtaccttt

SEQ ID NO: 2107 - DNA, 661 bp, Homo sapiens
  LOC152586
  misc_feature [331]..[331]: Chromosome 4, SNP identification no. = rs2270564
  misc_feature [331]..[331]: allele = g, in linkage disequilibrium with rs1431346, respectively
  misc_feature [331]..[331]: n is a, t, c or g
agtttatcgtttttaacgaccagtagccctggccagcggtttatagcacgcgctgaaccctagagcaggaagcaaaaggtgcagaagttctgtggcaaggcggcttcccagggcgggtgtgctggggacccacgcggcaccgcggggagggggctctgcgcgctcaaccccgtccctggcattatccgccgcctccacccgccggcctcccgcagcctggccagggccatgaggaccaagcaggtgaacttgctgatcaccctggtcgccgtcgcgttgttcagcttctcttgcttctccatctacaggataactcaaaccagtaagcggngggccctcctcccgcctcctttcccgccgcgggggcttcggggctgcaggaatgcaggcggggcagggtcggcgggtgcggaggcgatgcgggaagctggcggcggccgcccgcgctggcactgggaggcccgcgtcggtgccttcccgaggccgcgcctaccccggtcagcggcggctgggctgtaacccgcgccccgacctcctcctccagggccgcgtccggcctgcacgcgcgctaacgcatctggcccagggtacccgccgctcccttttcctcaaaggttcaaggaccccgtctgtgcactgcttttcccctctcctgttcttc

SEQ ID NO: 2108 - DNA, 661 bp, Homo sapiens
  MGC10084
  misc_feature [331]..[331]: Chromosome 4, SNP identification no. = rs16998469
  misc_feature [331]..[331]: allele = a, in linkage disequilibrium with rs1431346, respectively
  misc_feature [331]..[331]: n is a, t, c or g
ttaaaaccaaatcatatttttttaaactgaaaatttgtaaaacaagttggaatgctatcagtatcatttcttcatgctcttctgtcttatacctattttcattctgattagggactattaacccaccattataatagagcctatttaactatacagtatctgaagcaagggctaagttcctaaaatactgtgtttttctcaagcagtttaccagttctgggcatatctgtattaattagtaaataaagacatctcattgtttaatatttttctgtattatttgttatcttttcaaaatctgttctttataccagtctttttaatgggaatnaatgtgctgcgtgttttaggataattgaaaaatgttctaaagtctttgcttaacctatggtttttctacaaaagttatttgatagcattaaattactagttacaagctatgagaaagaaaatgtcttaataatggaaatatatttgtacagctttggaatcttctaatgcccacgaagaagttaaacgctagaatctccaagcagtgggctgaaattggttttcagggtgatgatcccaagacagacttcagaggcatgggcatacttgggttaatcaatcttgtgtaagtgaaagtaaactttcttttcttccctaaatgaaattacat

SEQ ID NO: 2109 - DNA, 661 bp, Homo sapiens
  MGC10084
  misc_feature [331]..[331]: Chromosome 4, SNP identification no. = rs6818701
  misc_feature [331]..[331]: allele = c, in linkage disequilibrium with rs1431346, respectively
  misc_feature [331]..[331]: n is a, t, c or g
gttctaactagaataataacttgaaaccttgtctttgaatgtgcatacttttttggtagaggagtaggataaattagtttgcacaaattagttccaaggtcatagtttctctccagaaggaagaacagttcagagatgagtttccacattttttgtttccctatgatctgccttcatctccctcttttcctttgatcgcctttgttttaatgcgtcctgtgtaggaagggctggaaacgtttgtagtttagctttttagctccattgtcatcttgtacgtccaaactgtgagcagctatccgccatgattctgggaagttaccactagtcnagcaggagggctcaggattttgggacctctgtcttttgtatattccggtctaggatgtctccattctagttttgtagggccaaaattttagctggacttctggtttggtggttccaaaaaaaaatagtaacacctcaagtttgtataataaagttatgtctcaataacaactttattgaggtataatttatataacatagaatttacccatcttaaatatacacttaaatggattttaatgagctaaattgggtagccatcatcataatccacttttagaacattttcatcaccccagtgagatacaggtttacagttaatcccccttcc

SEQ ID NO: 2110 - DNA, 661 bp, Homo sapiens
  UCP1
  misc_feature [331]..[331]: Chromosome 4, SNP identification no. = rs3811790
  misc_feature [331]..[331]: allele = c, in linkage disequilibrium with rs1431346, respectively
  misc_feature [331]..[331]: n is a, t, c or g
cctgacttaagccccccaaaagagtcagtggaagtcagagtcatctcctccaggagcaggagaaataagacatgaataaagaataatctccaaaccctctataagtaaaggttgtgtactgtgcaagaagccagtcctaaggcacttccaagggaggtcaggcttgcagagcttccctgaaaaaggcaatgttgacctgacgggtagcctctgaaaaaaaatagaaaggagaaggagccagcgaggtttctcctctgcaaacacttgttgaaataaagatcaactgaggcaaataagtggcatgcatacaggcaaagatgttggggaaagnaagtcgcgtatatagaatgcattctgttggcctgactgactgggaaattgggtgatggggaagaaagagagaggtagggcaagaagttggtgagggatgaggctgtagaagccaaatgagaagcagagcctgcaaatccattatgagtgtagcttcatgttatcacctgtgtagtgctttacagactatgaagtgctctcacataaatgtcagatttaatttgatagacaatacagctttatgaatgattagatgtggagtcaaagattactctatgtttaagaacatgggttgcaagctcagtgacagtaccaatgattgtcatgaggc

SEQ ID NO: 2111 - DNA, 661 bp, Homo sapiens
  LOC442117
  misc_feature [331]..[331]: Chromosome 4, SNP identification no. = rs13348095
  misc_feature [331]..[331]: allele = c, in linkage disequilibrium with rs2610201, respectively
  misc_feature [331]..[331]: n is a, t, c or g
ggtaactattgagaccattgtcacaaaaaaatgggaatgcagatatcacttctacatactgagtccctttcttttgaaaatatacccaacattaggattactagattatatggtagttctattttagtattttgaggacgctccatactctttcccctaattgctacattattttgcatttccaccaacagtgtaggagcattcccctttctctgcatccttgccaggatttttaaattttttgtctttgagataatagccagtttaacttgggtaagatataacctcaatgtggttttgatttgcatttctctgataactaaagatgttnaacatttttcatatacctgttggccatttgtatgtcttcttttgagaaatgtctattcatgtattatgctcatttttaaattgaattatttgaaggattttactgttgagttgtttgagttcattatatattctggttattatttctttgtcagatagatagtttgcaaacattttctcccatcctacaggttgtctcttcactttgttgattgtttccttgctctacagaaactttctagcttgatgtaaatttgtctatttttgcttttgttccatgtgcttttgagatcttagccaaaaaatacctgtgcccagaccaatgtcctgt

SEQ ID NO: 2112 - DNA, 661 bp, Homo sapiens
  LOC442117
  misc_feature [331]..[331]: Chromosome 4, SNP identification no. = rs2653824
  misc_feature [331]..[331]: allele = t, in linkage disequilibrium with rs2610201, respectively
  misc_feature [331]..[331]: n is a, t, c or g
agttcaggactaaattgccccaggttgtttggtgggaatgatagattctttggtgacagctctgtcttaatggggtcccatttcagacatagtccttcattcttctcactatcgtttgctgaccctgggggttcctgtccctccctgttagtatttgtgacatgaatgggacaaagttaaacaggctttggtagaatttgcagtgagacaagaagaattttctgtgtgtaaaaggaatcaaaagagttgtagacaaatatctctgttaaatggtaataaaaatagaagataaaaatcaaacatctgcattttggaacatttttcatcaatngtgattaatttttacagtggaaagcactgtaaaatataccctggtcagcatttaaggtctggaaaacacgtctggataactgagagtttactagccgattttaggccataatatagaaattaagtccagaacttaagtgttctaattcaaaagacttacaaatggtcattatcatgcatctttgtttcctgtttacccttgaaacaaagaatcatttcactaaagtgtatgacaaaacttcatggccgaacgaaaaaaattccagaaaattgctttatctgaaggactgagtttttgctcaaacagtatttgactaggagtgctcttcaa

SEQ ID NO: 2113 - DNA, 661 bp, Homo sapiens
  LOC442117
  misc_feature [331]..[331]: Chromosome 4, SNP identification no. = rs2653825
  misc_feature [331]..[331]: allele = g, in linkage disequilibrium with rs2610201, respectively
  misc_feature [331]..[331]: n is a, t, c or g
ttaagtccagaacttaagtgttctaattcaaaagacttacaaatggtcattatcatgcatctttgtttcctgtttacccttgaaacaaagaatcatttcactaaagtgtatgacaaaacttcatggccgaacgaaaaaaattccagaaaattgctttatctgaaggactgagtttttgctcaaacagtatttgactaggagtgctcttcaaatctgtttctatgtaaatatatttcctttattttcctaaaatctgactagatgagtaaatttcatgccataacataaacgtctaccctgtagaattttcaggagtcagctgagaaaatgngctctctggagaaatgatctgtctgcactgtgtccagtcttcagtctcttttaatattaatctggactcctgaatggctcagaattatccaactgtctttcaaatgtttctagattagccagctgcaggggttgggggacagagacagtattaagtcaatccttcaaccagcttttattgagcatctaatgtatgccaggcattgttccaaatccaggtacttaatttggagttgcccctggaaacacagaggagcctgagacagacctaacgatgtgcataaaagacacacagcccacatcttaaatgttgtctactgtttaagttact

SEQ ID NO: 2114 - DNA, 661 bp, Homo sapiens
  LOC442117
  misc_feature [331]..[331]: Chromosome 4, SNP identification no. = rs17319267
  misc_feature [331]..[331]: allele = g, in linkage disequilibrium with rs2610201, respectively
  misc_feature [331]..[331]: n is a, t, c or g
tcagtcctttgattgcaaaaatttttatcaaactaaaagttattaacgacaatgaacactaattaggcacccacaagagactgagaaggaagcccaaggactctgctctgcagaatcttctggtaggagatacaaagtctcaatccaggttgaagaacaccaaatctggtttccactgcccttttccatccccaggagcttgccaacatggtcccctgtggatctgacagttcttgggccatctataattccaggaaaagctcttgatcaatagcctcagcaaggcagaaacatccaaggttccagttgagacaagtatgaacaccatctntcctagaatgaatctaacaaactcgggagccctacagcctcttgcaaaaccattctaatgaattataacaaaccaggtaaccacctttgttgtgttttgttgtcccacctatgcggtaagcttaagacccagacatctaaggaaatgttaacttacctctacagtcattcagcccttatcagtcacgaattcattcaacagacatctacttattgattacaacgtgccaaccctgggctaagctcctgagattcaaagataaatgtgagaagtttctatctccgaaggagctgactcttcagtagcagcctggaaaattaattcactaca

SEQ ID NO: 2115 - DNA, 661 bp, Homo sapiens
  LOC442117
  misc_feature [331]..[331]: Chromosome 4, SNP identification no. = rs2610204
  misc_feature [331]..[331]: allele = a, in linkage disequilibrium with rs2610201, respectively
  misc_feature [331]..[331]: n is a, t, c or g
atacaacaaacccccgaaaggattctattactgcattaagattgcttttatgtgtctttaggttctcattccaacttgaaggacctcaaactagaaatcacagagaatgcagtatgggagtagtttatacacctgtagttttactccaattactgggctcaagtgcaaaaaaaaacttttgcctctcttgtgtaagactggtaaataaaataaatgtacatttataggtttaatgttagagaaaattattaatgtagtttatatgctttcctacttaattgatgtttatgtttaatgggtgaaatagtcatctcagttgtacttgatccanaggcttctactgggcttcctttgcctttttctgcagagttaagcttgcatgttatatggacttacagttcaggttgctgattagtattgttagagagaataaacaaatttctcagaaacagaaccaaccaagtctgactagttagttaaaatccctgcagtaaatcgggacaaaaatggaagtataagtctccatctttttttaggaaggagaggaaaacacggtttaggatggtgtgcagtatagattgaggcagttaggtgagcagataacttatagaaagtttcatggtttatgattcaatatgttaatttgatttgtgtgaacttt

SEQ ID NO: 2116 - DNA, 661 bp, Homo sapiens
  LOC442117
  misc_feature [331]..[331]: Chromosome 4, SNP identification no. = rs2610201
  misc_feature [331]..[331]: allele = g, a
  misc_feature [331]..[331]: n is a, t, c or g
ttctgaatgagtttagagtcattttaatattttctttggaagatcaattctgggcatgttgaactaaaatggatattttaatgtcatctaggctaaatactgtaggaaaaaattccataggaacaattccagatattttcttgtgtatctgggggcatgtgatgtgccacagaaaggcttctgtcacattttagatatgaaatgcaactacactttgacttactttgcaagctcagaagtaaggagtggtctctaatacaactgtctcataaaagcaatgagaaggtatataaaatattttagaatcatccttggcataaaaaggatttcnaatgagcacattttataaggctgaatttatttctaacaaaaccatgtgtacaaagcattgtcatgatagtttaatgagagatggcttaagggaaaaagtgtaaaatcgtaaaatgagattgagttttacccttccagggagtcaaatgaactactttaggagtataagttaaacaccctggggggcttttgtattttcagacaactatggagaaagtgaaaatgcttatgaattaatactgaggttctttgacagtggtttgtcttgggaaccaagtgtttggcaagttagcaagtgtggaggctgggggccaatgacccggcttgggga

SEQ ID NO: 2117 - DNA, 661 bp, Homo sapiens
  LOC442117
  misc_feature [331]..[331]: Chromosome 4, SNP identification no. = rs1459153
  misc_feature [331]..[331]: allele = a, in linkage disequilibrium with rs2610201, respectively
  misc_feature [331]..[331]: n is a, t, c or g
cctcatctccttcaagtcatagctccaaatccttttgatccatcctatactctcagtactcatcacccttttctgcctgtgttctcacaccttctaactcagtagatatctcacttatttactatgttcattaagtgatgtatcctaagcacctttaacagtgcctgacacatggtactctgtaggtatttgttgactgactgaatgaatgagttattggtttattaatataaagtcaggttaattccagacaactgagttacttaatgataactcactctgtagctagctgccattaaaaataacagctacgatcataatacattcaaangtaaatttcaagggaataagcttttttgagcttattttcattcactagttgtttattataaattaaagaaatgagtgatgttaaaaatacagcactctctatataaataaatacttaaatttctaggaccagaaaataacttcctaattgtatggtataacttaggcagggtaaggttgaaaaaattcttaagactagacagtcaagcactttaccatctatctagaaattaaaatattgttaacctgaaaagctttgggatatagattttgaaaagggctatggctatcattaaactacttttctgggctagatgtaataaaactacat

SEQ ID NO: 2118 - DNA, 661 bp, Homo sapiens
  LOC442117
  misc_feature [331]..[331]: Chromosome 4, SNP identification no. = rs17319595
  misc_feature [331]..[331]: allele = g, in linkage disequilibrium with rs2610201, respectively
  misc_feature [331]..[331]: n is a, t, c or g
atctcaacttgaattgtatctcccagcattctcatatgttgtgggagggacccagggggaggtaattgaatcatgggggctggtctttcccatgctattctcgtgatagtgaataagtctcatgagatctgatgggtttatcagaggtttccacttttgcttcttcctcatttttctcttgccaccaccgtgtaagaactgcctttcacctcccgccatgattctgaggcctcccctgccatgtggaactgtaaatccaattaaacctccttttcttcccagtttcaggtatgtctttatcagcagcatgaaaacggactaatacatatgncatgccactttttttagactatcatcacatcatactaccaaaaatttcttttaaaaatataatccatatctttcagaacaaatatagaatttaatacctgccacaacagtgtgctttcctaaggaatcatgttcccacactaatacctaaatccatctactctatcagaatgtgaatgcttctactgaaatgtgcatagttattggcagactgaaaaaaaaataaagtagtgcatagtgatatccaggggatagagacaaaaacaactctaagattagagatagtggaagcagtgtgctatggtaaaagtaagggggccctgaggttgtg

SEQ ID NO: 2119 - DNA, 661 bp, Homo sapiens
  LOC442117
  misc_feature [331]..[331]: Chromosome 4, SNP identification no. = rs7678191
  misc_feature [331]..[331]: allele = a, in linkage disequilibrium with rs2610201, respectively
  misc_feature [331]..[331]: n is a, t, c or g
cacagaggagatagtttgtttctgctctgtgatatatggagtctcggggggatgattcagcagcaaggggctggaatcacgtagaggcatctttattcacagtgctggcagctaatgttggtcatcagttaaaaccccaagtaaaggtatttacccaatgcatgacatctcaggtccttggactttttcacaatggagtagcctcagagagtcaaatttctcacatggaagcccagagtttcaaaaacaaatgccccagaggacaggctatgtggccttttatgacctatcttcaaccacttctgttgtactctactggtctaagaattcntaagcccaccctaattcaaagagaggagacatagaccgatcccctaatggaaagttggttaccgaggtcacattgcagaggggtatgtgcaatggaagatattgtggtgtctaattttggaaactataatctcccacatacattatcttagaatcactgaaagttagtgtttgaaaggattaatttctttatagaacaagagccagcaaacaatagtccactgccagttttggtaagcaaggtttaactgaaatacaccatgcctatttgttagcagatttgaggagttccaaaagataccatatgacctacaaaggcaaaagtatttat

SEQ ID NO: 2120 - DNA, 661 bp, Homo sapiens
  LOC442117
  misc_feature [331]..[331]: Chromosome 4, SNP identification no. = rs2653831
  misc_feature [331]..[331]: allele = a, in linkage disequilibrium with rs2610201, respectively
  misc_feature [331]..[331]: n is a, t, c or g
gagatagaaccaggattaattgcatatagctgtaagggggcagatttcaacctagtaggaagaaatttctaataaaatgattaaagatagaatggacttcctgtatcactagatgtgttgaaatctgcagcagatgacactggagataaacatatgactcaaatggacatttgatctagctgataatttaaggcaattctacagcacaagttagcatttatgaatgctaattatgcccttttcattaattatttcatgtaatgctcacaattcaatgacagactttactgtttccccaattatgaaggtgggaaaatggcagcctagagangctaagtagcttgttcaaagccacataactggccacttccagaactgagatttgaaaacctagtagtctaacttcagtgtccacgtgtttaattgatattgtatctatagattatgcaaactctttctgtaaagggccagaaaataaatacttttgcctttgtaggtcatatggtatcttttggaactcctcaaatctgctaacaaataggcatggtgtatttcagttaaaccttgcttaccaaaactggcagtggactattgtttgctggctcttgttctataaagaaattaatcctttcaaacactaactttcagtgattctaagata

SEQ ID NO: 2121 - DNA, 661 bp, Homo sapiens
  LOC442117
  misc_feature [331]..[331]: Chromosome 4, SNP identification no. = rs10520249
  misc_feature [331]..[331]: allele = a, in linkage disequilibrium with rs2610201, respectively
  misc_feature [331]..[331]: n is a, t, c or g
actcagtctttttccacacttcctgctgtggaagagttgatttcttaagatcctgggacaggtgtttattgttgcctttttatgttcaatgttatagagctccagcctgtggagatctttccatatgttgataatgtagtttagactgtccactgcccttaccagctttatattacccacacatatttctgaaggcttgatccaaatcgttactaaatatcccatcaagttgaaattaatactatgagtaatcctgaactcaattacagcaactgaatgttgctttaataattgcacttattccttcctggacttccattgaccttaatcnccatttgttcaaccattctcgcttgggtgacattcctcttagtgaaagaagttggaagcaaatataaaggaaaacataagcatttctctttctctctttcaatattacacttcaaatcaagatatgtatctgtattactcaggggtctccagagaaaccaaaccaagggaagagagagattaattttaaggaattggtccacacgattgtggaagcttggtaagtccacaatcttcagagtaggtgggcaagctggagactcagggattctgctggcagaattccttcttgctcagtagaggtcagactttgttctattaacaccttcat

SEQ ID NO: 2122 - DNA, 661 bp, Homo sapiens
  LOC442117
  misc_feature [331]..[331]: Chromosome 4, SNP identification no. = rs2610188
  misc_feature [331]..[331]: allele = g, in linkage disequilibrium with rs2610201, respectively
  misc_feature [331]..[331]: n is a, t, c or g
agcaatatcatactaaatgggcaaacgctggaagcattccctttgaaaaccagcacaagacaaggataccctctctcaccactccaacatagtattggaagctctggccagggcaatcaggcaagagaaagaaatagagtattcaaataggaaaagaggaagtcaaattgtctctgtttgcagatgacatgattgtgtatttagaaaaccccaccgtctcagcccaaaatctccttaagctgataggaaactttagcaaagtctcaggatacaaaatctatgtgcaaaaatcacaagcattcctatacaccaataatagagagccaaattntgagtgaacgcccattcacaattgttactaagagaataaaatacccaggaatacaacttacagggatgtgaaggacctcttcaaggagaactaactataagaaccatccaagaacatgggagactttaaatttttttctagtttcaggataggagctaaaactgaagtcaaatctcataaaagccaaattgtacaggctgcttcccaggtcctgaaaatgttaacttagagtaaaagggatagaggttaaatggtaaaggagtagagctgggtctatgaaccgaggtctgtctggtcgaggttcatgctcctcaccataatgtttcttct

SEQ ID NO: 2123 - DNA, 661 bp, Homo sapiens
  LOC442117
  misc_feature [331]..[331]: Chromosome 4, SNP identification no. = rs12641678
  misc_feature [331]..[331]: allele = g, in linkage disequilibrium with rs2610201, respectively
  misc_feature [331]..[331]: n is a, t, c or g
aggcaaacgcaactcgcccttgtttatgtcagaaaaagatatcagctgaggaaaagcattaacaaaaccaaaatgactagtttgatatctgaaaataaaatcaccaacaaggttataaagtatggtggtgatgaatgggaaatctatactccctcaaattgacctttctctcccgatgactgtaaatcactgtactctcttaaagctgcccagcatacaagagcttgtggcacgataaccttggacaacaacagcagcaccacttctctctcctgctcttaaaactgcagggttcagatgctctatttgaaaccatcactgagttcagggncatggtggcctatcatgggttttctcccaaaaagcaggaaatgatagatcttccctcaaaactcagccctcataaatggctaggacttttgtgcagaggcaattctgaaagcaataactttctctaattcttccttacaatataacctaaagggcaataaggctgtctaatacttttgctcaaaactaaagatgattcacatactgcaattatatgtttgcttctctcctgacttggtcacagtttaaaatataatacctcaggacaggcatagtggctcatgcctgtaatcccagtgcctcaggaggctgatgcaggaggatcacttga

SEQ ID NO: 2124 - DNA, 661 bp, Homo sapiens
  LOC442117
  misc_feature [331]..[331]: Chromosome 4, SNP identification no. = rs6852770
  misc_feature [331]..[331]: allele = a, in linkage disequilibrium with rs2610201, respectively
  misc_feature [331]..[331]: n is a, t, c or g
ctccattttagtgccagttgagatacagaaagtagttctagttgctattttgtaaactgagaaatggtcaaaaacaaaatggcagctttgtggtgtatggatgcttctgggtgttctaattctgaaaacagtttctagaaataaaattttgcagattacttacaacttggacagatataatttgtaatctaagacccctgtcatgggcatttagaaacatggggattttattttctgcctgtttgaaagtctgggaaataaaacaaggtctattaataataattggaataaatgctatagcaccttttagttcaaccacagtttgtttgantgcttgctgtggatgttcttgtgagggaaccaaactcttgataatctctttgggtgatgattagaaaatgctggttgtgattttttaaaaatatcaaatggattaatgataatcatctagaaataaggtcgtacttcattttatacctaagttgtgatgacatgaggcaccattggcttgattaccaggaagaacaccattcagattgtcccccaaccatctgtagacattcccaaaagcctccatcgcatatgcttgtgcacccacttgtcagaagcatacccatgctgcaccgccccggatttgcttcttttgtttctgctttcgctt

SEQ ID NO: 2125 - DNA, 661 bp, Homo sapiens
  LOC442117
  misc_feature [331]..[331]: Chromosome 4, SNP identification no. = rs2653844
  misc_feature [331]..[331]: allele = c, in linkage disequilibrium with rs2610201, respectively
  misc_feature [331]..[331]: n is a, t, c or g
ttacccattttaaaaattgggccgttttacttattattaaaatttgagaattctttatgtattatggatacaaacctttggccagaaatgtgatttgcaaatatctcttttcagtccttgtctttttattctcttaacagtgcctttgaaaaataggtggttttaatttcaatgaagttcaatttgtcaatttttttctatggtgtcatacctaagaaatttttgcttaatctcaaaaaatttttcttctttgtttttgtattctagaaatgttataattgtatcctttacatttaaagtctatgattgattttgtattaatttttgtatntggtgcaagatacagattgatgtttatttacttctctggatatgaacatctaattgttctagcatcaattgttgaaaaaataatgttttctccaatgtatacctttatacctttatgtaaatcaactgaccatttgaagaatccatttctgggctctctcttctcttccagaaatagattcttgcatatatcaatcaggttgtgtgtttgttgttgctaagttgtaggagttctttctatattctggatattaagcacttatcagatgtatgatttgcatttttttctctcattctgtgagctggattttcattctgtgaacagtgtcct

SEQ ID NO: 2126 - DNA, 661 bp, Homo sapiens
  LOC442117
  misc_feature [331]..[331]: Chromosome 4, SNP identification no. = rs17254079
  misc_feature [331]..[331]: allele = c, in linkage disequilibrium with rs2610201, respectively
  misc_feature [331]..[331]: n is a, t, c or g
atgctccaaacaacagtttctatgtggagaattatcctgttcagcaatccattttggttatggaaaagcagccaacatggtttgcccaggataagcaaggacaaacaatgagaaagatgaattgccgggcacgaaaagggagaagaaattttaacattctggtacagccccacaaaagagacgtaagagagagatttttgagttgagcagaaccatggcaggaagctaaaagacagaaggaggaaattttagccagggagaaattccctttagcagccaagggaaaagaatccaaggggtcaaatacttcatcttacattatcatctatgntgttttgttatctaagtctctgctactgcctgaaaatcttcagtaaaagttatgcccagttgatgcaccgagagacatttgagagatgagggaaaatacctgtgcaccccaccccattcaagtctctgcaggacagaaggtagacagcaagctgggggcaagatgccaggaggagagagggatcacaaacagaaaactgaagtgaaggatgaatgtgtgaacacccctgggaatccacagaaatcttcaggaggacagggacatgcaatttgaggttaaagtatttttatttaaacctcaaaaaaacaagaactccagctaacacctggc

SEQ ID NO: 2127 - DNA, 661 bp, Homo sapiens
  misc_feature [331]..[331]: Chromosome 5, SNP identification no. = rs17449766
  misc_feature [331]..[331]: allele = a, in linkage disequilibrium with rs3909867, respectively
  misc_feature [331]..[331]: n is a, t, c or g
ttctccaaggaccaactaacagggttgagataaatattatccattttatcccctcctgcatctgctgtaatgtaggatggcctgaaatgaaacacccatgtggtttgaccctccccagttgctattgctcatcctataataagcagtaacacaaatcctagcctagtgattccccagtgaatcctttcctggccatcttaaggcaaaaaaagagccttgtgttttgacggggaaattctttagtacagaaaaaaagtgaggagagaaagttcaatatgcttccctctgtttccctcctactctcatatctgcatcccatgcaaagcattcncctttttcttagattctatcttcctccctcaagaacagcttttacctccccgtttttttttttctttttctacttttggcccaaatcatagtactgaaaatgtaaaacctgcagttttgggtatgttaccaaaggaaacagttttacttaaaatcttgtttttgccaaaatattttcaaagtagctggagagctgtcaaaccacagtggctctcagctgcgtttccttctagcatttccccaggttctcccagcacagcactcagtaattggatattatttgaggagaagggaaaaaaatgctgcacgagagagtttgtagatttaagaa

SEQ ID NO: 2128 - DNA, 661 bp, Homo sapiens
  misc_feature [331]..[331]: Chromosome 5, SNP identification no. = rs3849702
  misc_feature [331]..[331]: allele = g, in linkage disequilibrium with rs3909867, respectively
  misc_feature [331]..[331]: n is a, t, c or g
ttataaagaaatatggtagagtaaatatataattacagaaattcccttgttgatggcccaggaaagatgactgaaggggaggtgaatgaaaagccagaaaaactaaggagagtcacaattttgttttttcctggcttaaaggaatgtgagagaaatacctcaggaataattatctggaactgactgtctataatagataaaagtttggcaggagaaaacattggaataagaggaaactgccactccccaaaccactggatactttttcatagtagctaaaaagcatcacattgtatagaaaaccactaaattttgagtttatctccaacantccctcaaatgagaggagaaatggctggaaaatggtgagttaagcaattgttgttttcatatatccaaagactcagtgcagcgaaactggtggactcaccctaagatggggaaatgatccaaagttcccccacaaatagacagtataagatctagtacaaaaggtttaacaaacttccaaagaaagagattaaagataaaatccttgaatagaactgatgcatagctctagtccctctctcctccatgctaccactccccttctccaggtaactaaaaattctaacataaaatccagccaataagatcaagggggatttacaagaaggac

SEQ ID NO: 2129 - DNA, 661 bp, Homo sapiens
  misc_feature [331]..[331]: Chromosome 5, SNP identification no. = rs7717608
  misc_feature [331]..[331]: allele = c, in linkage disequilibrium with rs3909867, respectively
  misc_feature [331]..[331]: n is a, t, c or g
tttaaaggacttttttttttaaaaaaagacttcaacttccagtttcaactccaatacataatgagcttggaagttgacactcttgtccttacaagaagaaaaacattgaacaaaatgcaggtcattgactcttcttggatctgtcaatgaggtttcaaggcaaactgtcatcctacaatctgaagagacagacaaacacagagaattacagctgagattagtttacctgaagtagaagccactgaacccttaaactggtaggaaaaactaaatagtgattgggcaaattggtggaggctgagtgtggaagagagaaactcttgggggttanagtgttaaggggctcctgctctttcatggcttttacctccagaaacactaccaggttcccacagtgcggagcccagaaggaaggtaaaaataaccacctgaaacacactcagaacattcttcaccacaaagtactcatagaaaaatactttaccagagctcagtcccacctaggggaagggcaattacccaacttcagtcctctctagactttctgtctcatctaagtgagacaaaagctaagaaatacctgtgaagtttccagcccaaggacacaggcctacaaaaagacagatttgataataatattatagaactcttctccagtccc

SEQ ID NO: 2130 - DNA, 661 bp, Homo sapiens
  misc_feature [331]..[331]: Chromosome 5, SNP identification no. = rs7736123
  misc_feature [331]..[331]: allele = a, in linkage disequilibrium with rs3909867, respectively
  misc_feature [331]..[331]: n is a, t, c or g
aaactaaatagtgattgggcaaattggtggaggctgagtgtggaagagagaaactcttgggggttatagtgttaaggggctcctgctctttcatggcttttacctccagaaacactaccaggttcccacagtgcggagcccagaaggaaggtaaaaataaccacctgaaacacactcagaacattcttcaccacaaagtactcatagaaaaatactttaccagagctcagtcccacctaggggaagggcaattacccaacttcagtcctctctagactttctgtctcatctaagtgagacaaaagctaagaaatacctgtgaagtttccancccaaggacacaggcctacaaaaagacagatttgataataatattatagaactcttctccagtccctccaacaccctacctcatgaaaaagtttcaaaagaaattaaggctggaaagtgcctactttactgctctctaatcacacacacacacatacactcatcttggtggttctgtttctctgactgaaacctgaatgatacagaatttagaactgtcacaaaaaaggtaagtatatgaagtaatgcatgtgttaattagctcaatttagcccttccaccatgtatacatattccaaaatgacatgtgcacaataaatacatatatttt

SEQ ID NO: 2131 - DNA, 661 bp, Homo sapiens
  misc_feature [331]..[331]: Chromosome 5, SNP identification no. = rs1896648
  misc_feature [331]..[331]: allele = g, in linkage disequilibrium with rs3909867, respectively
  misc_feature [331]..[331]: n is a, t, c or g
tatattttgtcttaaaatttacaggaaagactgctgttaaaaacacttaggaaatgaaatgttaaaatccctcctaaacattacagatgcttatgactggccactaggttgagagaggtggaaggggaaagggctgttggccaaatgttcctatttagaagatactttcaaattatagtctttgttatgtatgtgcatcacttatttaatgctggcttgagtggaaaactgaagtcctatttgaaatacgcagtgtttctagatgtttaaaagtgtgttaaaagtaaagggctaaagtcacatcctttacttatttttttttgttatttcntaagagtggttgcatttggggagtggctgcatttagatatgagattgttaaagttgatgttttggagagtatgctgactgttcactgggtggtggcaggtggagggaggagaaaggatgaggagagaaggattatgtgcccatgagttaggttagtccagagggttgaaccattgtactctatgtgcattttagttaatattgctgtgtttaaaggataaacaagtcctaatgctcaaagtatgttataagtagaggtagtaaaatcactcctttataaatgaatctttgttagtttttaggaagcactgtcttctgggagtgacttttc

SEQ ID NO: 2132 - DNA, 661 bp, Homo sapiens
  misc_feature [331]..[331]: Chromosome 5, SNP identification no. = rs1366265
  misc_feature [331]..[331]: allele = g, in linkage disequilibrium with rs3909867, respectively
  misc_feature [331]..[331]: n is a, t, c or g
cctcttggaggtaggcatagttctttacttagtcactggaatgctggaagatggagaagaggaagggtgaatggaagggctctttgctagtatctccatatctacaaggtggttttagattataaccataggtctatatgtgcatatttagtaaagtgcctgtgtttactgggatcaaaattcattattattttacaacatctagactttatagatgtctggaggtgacagtacatgataaaaagtagagttagagaattagccagtttgtaaacatctttttgttataattgatagaaaagatgcatcttggacaagggattgttaaatnatttctgagcagtatatgtgagaacttgtggattaggttggcagtagaggggcaaaaggaagcacaaagggagagaagtatgagatgtgttcttatttacattctgacaaaagctattgatgtatgtgcatgtctttggctggactataggaatacattaagtaatcaatgaaataataccttcttgctaatattttaatggtaaggtctcataataaattttcttaaaacattatacttagtatatcctgttgctttgtgtttcattttaaattgagctttaagggaatgcggtattttaatcagaattctgccaatgcttttatctag

SEQ ID NO: 2133 - DNA, 661 bp, Homo sapiens
  misc_feature [331]..[331]: Chromosome 5, SNP identification no. = rs9292479
  misc_feature [331]..[331]: allele = g, in linkage disequilibrium with rs3909867, respectively
  misc_feature [331]..[331]: n is a, t, c or g
aaagcacagaaactcaggatgatcacatagagaaaggaaggagacacctcacctctgccacacccttgccgctcacaatcaaaccccctaggagctaggagggacttcttcctgtgaagaaaagcaagcaagaggacccagaagcccctatcacagctgtggacaccttcagtcttcactgctggacaccgctgccatcctcgcaggttctgagcccaactgagggagctccctggagtctaaatcctgggctacgcccagagaaaaagcagacactgtgccccacccctctgtggcctgtgctgctactactctgtgccctctcagaatntgagccactgctagggtgtggcctgctctgggagtgagtagccactgaatctctccatcctggaggtttagccagcactataccacgctcagtagcgagccatcatggggcaaagctgatgctataacctgaccactagggccaagctaccacagaatgactttgtcccctatcctagtcgctggtttaccctctccttagggctgagcagaagcgatgtcccacctctggtgacttgaagcctagaaattccagagcagtcatacccctggtgccacagctgaggcagcatcccacccccaggactacccagcctccttcacatcagag

SEQ ID NO: 2134 - DNA, 661 bp, Homo sapiens
  misc_feature [331]..[331]: Chromosome 5, SNP identification no. = rs9885222
  misc_feature [331]..[331]: allele = a, in linkage disequilibrium with rs3909867, respectively
  misc_feature [331]..[331]: n is a, t, c or g
ggagggacttcttcctgtgaagaaaagcaagcaagaggacccagaagcccctatcacagctgtggacaccttcagtcttcactgctggacaccgctgccatcctcgcaggttctgagcccaactgagggagctccctggagtctaaatcctgggctacgcccagagaaaaagcagacactgtgccccacccctctgtggcctgtgctgctactactctgtgccctctcagaatctgagccactgctagggtgtggcctgctctgggagtgagtagccactgaatctctccatcctggaggtttagccagcactataccacgctcagtagcnagccatcatggggcaaagctgatgctataacctgaccactagggccaagctaccacagaatgactttgtcccctatcctagtcgctggtttaccctctccttagggctgagcagaagcgatgtcccacctctggtgacttgaagcctagaaattccagagcagtcatacccctggtgccacagctgaggcagcatcccacccccaggactacccagcctccttcacatcagagcagtcacatccccttggtgccacagctgaggcagcactttgctcctaggcaccccaggtctgctgcacaccacagcagttgcgccccttagcaccac

SEQ ID NO: 2135 - DNA, 661 bp, Homo sapiens
  misc_feature [331]..[331]: Chromosome 5, SNP identification no. = rs13362102
  misc_feature [331]..[331]: allele = g, in linkage disequilibrium with rs3909867, respectively
  misc_feature [331]..[331]: n is a, t, c or g
agaaattccagagcagtcatacccctggtgccacagctgaggcagcatcccacccccaggactacccagcctccttcacatcagagcagtcacatccccttggtgccacagctgaggcagcactttgctcctaggcaccccaggtctgctgcacaccacagcagttgcgccccttagcaccacagctaaggcagtgacccactccctgtgatccagggactccactgactcatgtagccaggctttccggggccaagcagacatggtgactcacatcctagggaatcagagccttggctgaactgtggcactccacagtccaggacaaacngtcatagtctcctgcctacctggagctggactagggtcccatagcctgaactgctgagcaccctgcctctatgggaagtggagtcattgctgcactgctccccatcaccccacttcccccttgggcacagccacagtgacatattgacattcctgggttcttactgctgttgcacttgacctcacagagcctggactactgtcatgtcccatcatcctagggcccagagtcaccacagcatggtactttatcacccagagtccgagctgtcactatgctctcttggatcctcagtactgaactgcagctgtgccttgctcctggggacca

SEQ ID NO: 2136 - DNA, 661 bp, Homo sapiens
  misc_feature [331]..[331]: Chromosome 5, SNP identification no. = rs13357779
  misc_feature [331]..[331]: allele = g, in linkage disequilibrium with rs3909867, respectively
  misc_feature [331]..[331]: n is a, t, c or g
gaggcagcactttgctcctaggcaccccaggtctgctgcacaccacagcagttgcgccccttagcaccacagctaaggcagtgacccactccctgtgatccagggactccactgactcatgtagccaggctttccggggccaagcagacatggtgactcacatcctagggaatcagagccttggctgaactgtggcactccacagtccaggacaaacagtcatagtctcctgcctacctggagctggactagggtcccatagcctgaactgctgagcaccctgcctctatgggaagtggagtcattgctgcactgctccccatcaccccanttcccccttgggcacagccacagtgacatattgacattcctgggttcttactgctgttgcacttgacctcacagagcctggactactgtcatgtcccatcatcctagggcccagagtcaccacagcatggtactttatcacccagagtccgagctgtcactatgctctcttggatcctcagtactgaactgcagctgtgccttgctcctggggaccaaaccctgctacagtgtgtcttgctctgggagtgagtagccactgcacctctctgtcctggaagtttagccagtactataccacaatagcaagccatcctggggccctccagag

SEQ ID NO: 2137 - DNA, 661 bp, Homo sapiens
  misc_feature [331]..[331]: Chromosome 5, SNP identification no. = rs3909867
  misc_feature [331]..[331]: allele = c, g
  misc_feature [331]..[331]: n is a, t, c or g
ctatgggaagtggagtcattgctgcactgctccccatcaccccacttcccccttgggcacagccacagtgacatattgacattcctgggttcttactgctgttgcacttgacctcacagagcctggactactgtcatgtcccatcatcctagggcccagagtcaccacagcatggtactttatcacccagagtccgagctgtcactatgctctcttggatcctcagtactgaactgcagctgtgccttgctcctggggaccaaaccctgctacagtgtgtcttgctctgggagtgagtagccactgcacctctctgtcctggaagtttagncagtactataccacaatagcaagccatcctggggccctccagagcactcattctttcccagagctatgccagtgttgtgcccctccccaccaggctcagaaccacagctatatcacagccccttgggcccaagctcctggggtgtgcctcagagcagcagaccccaggttagtgggagaacagcattcactcatgctttggagagtaaactggcacctcaagtccctggcgctacattagttttataagacctcaagcccaggaaaccagctttgcagctgctctgaatatctatgccctggattctagtgccattgtcacttatatggc

SEQ ID NO: 2138 - DNA, 661 bp, Homo sapiens
  misc_feature [331]..[331]: Chromosome 5, SNP identification no. = rs13361251
  misc_feature [331]..[331]: allele = c, in linkage disequilibrium with rs3909867, respectively
  misc_feature [331]..[331]: n is a, t, c or g
ttcagatccagaaaactcaaaagtttccaaatagattcaatccaaagaggtcctctctgaggcacaatataatcaaactgtcgagagtcaaagacaaagaaagcagcaagagaaaagcatccagtcacatataaggaaatctccattagactaccagtggatttctcagcagaaatcttgcaggccaggagagaatgagataatacattcaaagtgccaaaagaaaaaaatttcaagcctggaacattatacccaaggaagttgtcctccagaaatgaaggaggaataaagtccttcacagagaagcaaaagctgagagaattcattactnctagacctgtcttaaaagaaatgctcaacagagttctttaaatgtaaatgaaaggatgataattgctatagtgaatagatataaaagtgtaaaactcactggtgaaggcaaatacatagtcaaatccagaatactctaacactgtaatgtagtgtgcaaattattttaagtcaaaataataaaaaataactgaagctacaataagttgttaagtgatattcaatataaaaagatgtaaattgtgacatcaaaaacattaatttcaggggagggtaaaagttgagagtttttctttgcaacagacattaagttgttatcagctgaaaatag

SEQ ID NO: 2139 - DNA, 661 bp, Homo sapiens
  misc_feature [331]..[331]: Chromosome 5, SNP identification no. = rs13354580
  misc_feature [331]..[331]: allele = c, in linkage disequilibrium with rs3909867, respectively
  misc_feature [331]..[331]: n is a, t, c or g
aatccagaatactctaacactgtaatgtagtgtgcaaattattttaagtcaaaataataaaaaataactgaagctacaataagttgttaagtgatattcaatataaaaagatgtaaattgtgacatcaaaaacattaatttcaggggagggtaaaagttgagagtttttctttgcaacagacattaagttgttatcagctgaaaatagtagattataactgtaagatgttttatataagtctcatggtaaccacaaaatgaaaaactacagcagttatacaaatgatgaagagaaaggaatcaaagctttacactacagcaaattatcaantcacaaagttagacaacaagagaggaagaaatgaacaaaggagctataagaaaacaagtaaaatggcagtagtaagtccttagctatcaagaataatcatgaatgcaaatagattaaattctaaaataaaaaatacatgctgtggctgaatggctaaaaaaaaccccaatatccaactatatcttacccacaggagacccatttaaactttaagatacacataggctgaaagtgaaggaattaaagaagatagtccacacaaattgtaaccaaaaaagaacagaggtggcaatactcacaacctgtcacaagaacaaaggaaggtctcta

SEQ ID NO: 2140 - DNA, 661 bp, Homo sapiens
  misc_feature [331]..[331]: Chromosome 5, SNP identification no. = rs13359120
  misc_feature [331]..[331]: allele = a, in linkage disequilibrium with rs3909867, respectively
  misc_feature [331]..[331]: n is a, t, c or g
aagaaaacaagtaaaatggcagtagtaagtccttagctatcaagaataatcatgaatgcaaatagattaaattctaaaataaaaaatacatgctgtggctgaatggctaaaaaaaaccccaatatccaactatatcttacccacaggagacccatttaaactttaagatacacataggctgaaagtgaaggaattaaagaagatagtccacacaaattgtaaccaaaaaagaacagaggtggcaatactcacaacctgtcacaagaacaaaggaaggtctctatttaatgataaaggggtcaattcattaagaagacataactgttataancatatatgcacccaatattggaacacttaaatatataaacaaatattaatatatctgaaggaagagatacattccaatacaataatagtaggagatatcaacaccccactttcaacattggatatatcacccagacagaaaattaataaggaaatactggatttgattgcagttttgaacaaaatgacctaacagatatatacagaactctccatccaacagcagaagaacacacatttttctcctgcatgcatggaacacactccaggatagaccgtatactaggccacaaaacaagtcttaacaaatttaagaagctcgaaatcctat

SEQ ID NO: 2141 - DNA, 661 bp, Homo sapiens
  misc_feature [331]..[331]: Chromosome 5, SNP identification no. = rs1582920
  misc_feature [331]..[331]: allele = c, in linkage disequilibrium with rs3909867, respectively
  misc_feature [331]..[331]: n is a, t, c or g
tttgttgaatgcttttctcttgtcaattgagatgatcatgtagcttttgtccttcattctgttaatgtgatgtatcatattgattaatttgcatacgttacaccagtcttgcatgctagggataaatcttacttggtcatgatgtgtaatcttttttatgtgttgtcggattcagtctgctaatgttttattgaggatttttgcattaatgttcattagagattggcttgtagtttttttttcttgtgatctctgtgtctgggttaggtatcaaggtgatgctggcctcataaaatgtgtttggaaatattccctccaattctatttttgnaagagttaaaaaagtattgttattcttctttgaacatttggtagaattcagctgtgaagccatctggtcctgggctattctttgttgggaagttttttattgtttcttcaatatctttatttgttatttttctctttaagctttgtagtccttacttatcttggtaagttgtattcttctaggaatttatccctttcctttaggttgtccaatttgttggcatataattgtacatgatagtcccttatgatcctttttatttctgagacatctgttgtcatttcttcacgttaatttttgattgtatttatttgtgtcttctctcttttt

SEQ ID NO: 2142 - DNA, 661 bp, Homo sapiens
  misc_feature [331]..[331]: Chromosome 5, SNP identification no. = rs13360237
  misc_feature [331]..[331]: allele = t, in linkage disequilibrium with rs3909867, respectively
  misc_feature [331]..[331]: n is a, t, c or g
aaaacttcccaacaaagaatagcccaggaccagatggcttcacagctgaattctaccaaatgttcaaagaagaataacaatacttttttaactcttacaaaaatagaattggagggaatatttccaaacacattttatgaggccagcatcaccttgatacctaacccagacacagagatcacaagaaaaaaaaactacaagccaatctctaatgaacattaatgcaaaaatcctcaataaaacattagcagactgaatccgacaacacataaaaaagattacacatcatgaccaagtaagatttatccctagcatgcaagactggtgtaangtatgcaaattaatcaatatgatacatcacattaacagaatgaaggacaaaagctacatgatcatctcaattgacaagagaaaagcattcaacaaagcccaatatcctttcttgataaaaatcctcaacagtttaggcacagaagaaaagtttctcaatgtaataaagactgtgtatgaaaaatgcacagctaacataatcaactggaaaaaactgaaagcttttccagtaagattgaggcaaagatttccactctcagcacttctgttaaacatagtactggaagtaccaacaaaagcaatcagataagaaaaaaaaataaaaggcata

SEQ ID NO: 2143 - DNA, 661 bp, Homo sapiens
  misc_feature [331]..[331]: Chromosome 5, SNP identification no. = rs10074444
  misc_feature [331]..[331]: allele = g, in linkage disequilibrium with rs3909867, respectively
  misc_feature [331]..[331]: n is a, t, c or g
ctctgccaagcaaacgcacatcaacgctaaggaggggcagtatggtaattttaaaacatctctataaattctttaacgcttttcccacaaaaggtgatctaattctctgtcccttaaatatgggcatgtcttagtgatcacttctaatgaatacaatgcagcagaagagacactgcatgaattccaaggctaggctcaaaaaggtgtcctactccctgattctgactctctctcaggcagttcttgcccttagaactcaggtaccatgtaatgaggaagccttatccacatggagatgtgtggctggcaactccaactaaggtctctaagnccatagccagtatcaaccacagacatgtgaacgagttagtcttccaatgattccatctctcagcctcctggatgataccccagaaatcataggctagggccattctgcccatgctgttcccggtccaaactcgacctacaaaatccataagcataatgaatgtttgtttcatgccactgagttgtgagatactttgttacaagccatagagtctagaacactagacactgaaattgtaagaatttctgtgggaagtttccgaaggaatatggggggagcactggcatttgtgacagtccctgatggtatttgttgaccaagggattgtga

SEQ ID NO: 2144 - DNA, 661 bp, Homo sapiens
  misc_feature [331]..[331]: Chromosome 5, SNP identification no. = rs10074451
  misc_feature [331]..[331]: allele = t, in linkage disequilibrium with rs3909867, respectively
  misc_feature [331]..[331]: n is a, t, c or g
aggggcagtatggtaattttaaaacatctctataaattctttaacgcttttcccacaaaaggtgatctaattctctgtcccttaaatatgggcatgtcttagtgatcacttctaatgaatacaatgcagcagaagagacactgcatgaattccaaggctaggctcaaaaaggtgtcctactccctgattctgactctctctcaggcagttcttgcccttagaactcaggtaccatgtaatgaggaagccttatccacatggagatgtgtggctggcaactccaactaaggtctctaagcccatagccagtatcaaccacagacatgtgaangagttagtcttccaatgattccatctctcagcctcctggatgataccccagaaatcataggctagggccattctgcccatgctgttcccggtccaaactcgacctacaaaatccataagcataatgaatgtttgtttcatgccactgagttgtgagatactttgttacaagccatagagtctagaacactagacactgaaattgtaagaatttctgtgggaagtttccgaaggaatatggggggagcactggcatttgtgacagtccctgatggtatttgttgaccaagggattgtgaatagcatttctgcctcacagatgattggacag

SEQ ID NO: 2145 - DNA, 661 bp, Homo sapiens
  misc_feature [331]..[331]: Chromosome 5, SNP identification no. = rs10074513
  misc_feature [331]..[331]: allele = t, in linkage disequilibrium with rs3909867, respectively
  misc_feature [331]..[331]: n is a, t, c or g
tgatctaattctctgtcccttaaatatgggcatgtcttagtgatcacttctaatgaatacaatgcagcagaagagacactgcatgaattccaaggctaggctcaaaaaggtgtcctactccctgattctgactctctctcaggcagttcttgcccttagaactcaggtaccatgtaatgaggaagccttatccacatggagatgtgtggctggcaactccaactaaggtctctaagcccatagccagtatcaaccacagacatgtgaacgagttagtcttccaatgattccatctctcagcctcctggatgataccccagaaatcataggntagggccattctgcccatgctgttcccggtccaaactcgacctacaaaatccataagcataatgaatgtttgtttcatgccactgagttgtgagatactttgttacaagccatagagtctagaacactagacactgaaattgtaagaatttctgtgggaagtttccgaaggaatatggggggagcactggcatttgtgacagtccctgatggtatttgttgaccaagggattgtgaatagcatttctgcctcacagatgattggacagactcatgggatagaataatttattggaaagaacattggccatggagtcatgacctgggttca

SEQ ID NO: 2146 - DNA, 661 bp, Homo sapiens
  misc_feature [331]..[331]: Chromosome 5, SNP identification no. = rs6870782
  misc_feature [331]..[331]: allele = c, in linkage disequilibrium with rs3909867, respectively
  misc_feature [331]..[331]: n is a, t, c or g
tgctgcttcagctacccagaactctgatctctgcccctatgctcagtgggaccactgtactctgcttgactccagctttctgttctgcaatcagaaaattgttctcaggcagagaactggcaattgtggaccccacttcatgagttcccctcctttcaaagatcgcaggcttaaaactgtcagttacttgagacgtttatgaaagaagtctagctgggcaccatttaattcataaatgctggaagctatcagtttttaagcagagaagtaaagtaacctatttgtactttagaagggtcactcaggtttcaatggaaagtgaattggtagnggaaaagactggtgcacacagacaacacatggcaataggagtaatcctggaaaaaattacctatttaataaatacatatttagtgatcgctatatgcaagttactgttctcattctagtattaactcattctagtattaactcacttaaccatcaccaatcccatgatataatagtattattatctccattttataggttggaaaacggagggacagacaggctaagtaatttgaccaaaaagcagagtttgggattgaaaacaggtggcctgagtttggagtccatgatctttaaaaccagacagtgctgtggtaatggtagcctaatg

SEQ ID NO: 2147 - DNA, 661 bp, Homo sapiens
  misc_feature [331]..[331]: Chromosome 5, SNP identification no. = rs1813207
  misc_feature [331]..[331]: allele = g, in linkage disequilibrium with rs3909867, respectively
  misc_feature [331]..[331]: n is a, t, c or g
ttcataataacagatattttgtttcatttattgttccaagaatggcaaaacttcatctttttttttttttttgtattctgggtttattttttcctctccagttcatttcagttctttatctcagcaactgcaccaaattgcattgtaacaaaaattgtcaggacttttttaaaagatgaaaattaattcagtgatgtatgcttttgactgatattactttagttcaattttatagctagggaagtgggttcagaggcaaatgacttcataagttaaaaggcaaattctcagcgatttcctggccattgctctgaggaccattgttgactcnctcttgttgaatataacccatataaaaatagagtctaagctttttttgcagggggatggagtccccctctgtcatccaggctggagtgcgatgacacaatctcagctcactgcaacctccgtctcccgggttcaggtgattctcctgcctcagcctcccgagtagctgggattacaggtgcctgctaccatgcccagctaatttttgtatttttagtagagacggggtttcatcttgttggccaggttggtcttgaactcctgaccttaggtgatctgcctgccttggcctcccaaagtgctaggattacaggtgtgatagtctttttta

SEQ ID NO: 2148 - DNA, 661 bp, Homo sapiens
  misc_feature [331]..[331]: Chromosome 5, SNP identification no. = rs1319324
  misc_feature [331]..[331]: allele = g, in linkage disequilibrium with rs3909867, respectively
  misc_feature [331]..[331]: n is a, t, c or g
ccacagataaatgtaaacagtgcttttttaaaaacataatttttatggcatattttaatctgagtagttgtttatcactaaaattcagaagacactcttaacttggtacacatgacatgttgacctagacccagatgtcagcacacaacctatctgactatttttattttaacctcagctgccattttccctgacctctctaatggggttatttcataataacagatattttgtttcatttattgttccaagaatggcaaaacttcatctttttttttttttttgtattctgggtttattttttcctctccagttcatttcagttctttanctcagcaactgcaccaaattgcattgtaacaaaaattgtcaggacttttttaaaagatgaaaattaattcagtgatgtatgcttttgactgatattactttagttcaattttatagctagggaagtgggttcagaggcaaatgacttcataagttaaaaggcaaattctcagcgatttcctggccattgctctgaggaccattgttgactctctcttgttgaatataacccatataaaaatagagtctaagctttttttgcagggggatggagtccccctctgtcatccaggctggagtgcgatgacacaatctcagctcactgcaacct

SEQ ID NO: 2149 - DNA, 661 bp, Homo sapiens
  misc_feature [331]..[331]: Chromosome 5, SNP identification no. = rs6871174
  misc_feature [331]..[331]: allele = g, in linkage disequilibrium with rs3909867, respectively
  misc_feature [331]..[331]: n is a, t, c or g
tagttcaactgaagaccttttattcacaaatgccaagaattctggaatggaaatatttttctgagatgcaaaattaacttccaggatgtaaatattttttacttttaaaaatctgtcacaggatgtattttttagggcaacatatatgttttgaagtcaggtatttttacctaagattactccaaatgcggttacaactggtacaatcatttgcaataaaactaattcatctaattcatatgtctaatgaagaattgaattaccagccaaattacattttctatgtaatatgccatctttgaaaactgtttttcgtaatctagggggaccnaacacatcaaatacatgtcatattattagagaaaaaatacaagctaaagtgtctgaatttgtaggtaaaatacaaattcagacgatgtgatgtcaaatacagacaagaataattggaaaagtttcgtggcagaatagtgtactttaattaaacactgaggaagaatcagaaggtgatcaccagaataaaatttcataaaggcaagccagttaaactcccaggattccagggatgaaggtaggaggaagaatgaggtgttttcactctttgacttcactgaagaggaaatttgaatgagaactgaagtgtctgaaaatgaaaattatattc

SEQ ID NO: 2150 - DNA, 661 bp, Homo sapiens
  misc_feature [331]..[331]: Chromosome 5, SNP identification no. = rs6872810
  misc_feature [331]..[331]: allele = g, in linkage disequilibrium with rs3909867, respectively
  misc_feature [331]..[331]: n is a, t, c or g
atttagaatgccaagattgtgcacaaatatgctatttaaaattctagaattgcatttgttaatccaattaagtctagctttgccagacacaggggctgaactccacttcaaatcatgtagctgaaatatactcaaaaaatttatgtaaagagaaacccattctaattccacaatacctgtttctaaaatgactgcaaatactcaagttactaacatttctttggaaatgattattgctatatcttcaatcactcctttacacacacacacacacacacacacacacaaaagatgacatgaaatgaacaaaataggtaggaaactgttagtnttgcaaatgtattttatttaccaaaccattataggtttaaacttgtattcataccttgactcgtacattctcattcataagcacatatcttatctatttaacttcattaaatcatctgattttctgtttaagtccatttctaatattttttatgcttctgatgaagtctttcactctctcacatgaatagtgggtacattttatcatcctaagaagttggcaagctccttgaaaagacagaccatatcatatgtttattttatatcgccttgatgccaactactgtcatggtaaatcctcaatgtgttgatttgattttcattaattcaa

SEQ ID NO: 2151 - DNA, 661 bp, Homo sapiens
  misc_feature [331]..[331]: Chromosome 5, SNP identification no. = rs6859404
  misc_feature [331]..[331]: allele = t, in linkage disequilibrium with rs3909867, respectively
  misc_feature [331]..[331]: n is a, t, c or g
ttgaacaatgagaacacttggacacagggtggggaacatcacacactgggcctgtcatggggttgggggagggggcaggatagcattaggagaaatacctaatgtaaatcatgagttaatgggtgcagcataccaacatggcacatgtatacatatgtaacaaacctgcacattgtgcacatgtaccctagaacttaaagtataataataaaaaaaagaaaattgagactgtttaaaataaaacaatatacaaaggtggggagataggtttataccttgaaattctgaaatccttaatttccttttaagcataacatattcaacatatgantatatctgcaatgtccagaaattgatccaaagaaatttctaaatatataaaagccagaagaataaaagagtgaaagaaatacagaaaactagagatttaaccacaactttggaagatggaaaatagatgattgagtgacacctgacataacagagcaggtcaagttcaaactctagtgccagcaaaaagtagcatcaactagaggcaggataatttgtactgcaaaaccctaaaacaggaggacctaaacaggaggattaatcaggagtgtgaataaagagtgtattagttcattttcacactgctataaagaatacctgagaccgggta

SEQ ID NO: 2152 - DNA, 661 bp, Homo sapiens
  misc_feature [331]..[331]: Chromosome 5, SNP identification no. = rs767344
  misc_feature [331]..[331]: allele = a, in linkage disequilibrium with rs3909867, respectively
  misc_feature [331]..[331]: n is a, t, c or g
atcacttcccaccaggtctgtccctcaacacatggggtttacaattcgagatgagatttgggtggggacacagagccaaaccacatcaaagagttcccctaaaccccatctctcacttcatgcagtagaataaacacaacgacatgataaatgattgaaaaacaaaatatcagagtattcaaaacaacacagaaagttagatgacaatagagcaatgccttctaaactaaggggaaaaaaagatctgtcacccagaattcaacatgaaattatcaataaaaaataaagataaaataaacatatttccagacatgtaaagtcaaaacattanctctatgacttctttcttaggaacctactagaagatatggtgcacacagtaaataaataaagaatggggtttcaaaaaatggaaaagaaaaagtacgagaaataagggatctagtatagaagaaagctacacggcattcctggaatgatggtttagtgcagtgccaggatgtgaggaagttgcaggataacaggcaacagactgagagaacaacccatccagactggagcaaaagaaccaagggatgtggaagggatagcttttcaagaaaaaaaaaaaatagaattgacagtttgcctaatgcatttgacattatttttaaaaatgtaa

SEQ ID NO: 2153 - DNA, 661 bp, Homo sapiens
  misc_feature [331]..[331]: Chromosome 5, SNP identification no. = rs4568374
  misc_feature [331]..[331]: allele = g, in linkage disequilibrium with rs3909867, respectively
  misc_feature [331]..[331]: n is a, t, c or g
tcactatcacaagaacagcaaggtggaagtctgcctccacggtttaatcacctctcaccaggcccctcctccaacactagggattggattacaatatgacatgagatttgggtgggaacaaagagccaaaccttatcattctcttaatttctttattgactcattagttatttaggagcatgccatataattttcatgtatttggaatattttcaaagtttttcttattgttgatttcaagttttatagaattgtcaaaaaatatttgatatgatttctatcttcctatatttgttaagacttgttttgtggcctaatatataatatatcnaagagaatattccatttgccattgagggcaatgtgctttctgcagctgttggatggaatgttctgtaaatgtctgtacattccatttggtcaatcatgtagtttaagcccaatgtttctttgttgaattctgtctagatgatctatccattgttgaaagtggggtggtgatgtacctactttcattttattgccatctatgtctccctttagatataataatatttgctttatatatctgggtgctgatatggtttgggtctgtgtccccacccaaatctcatgtcaaattgtaatccctagcgttggaggtgggggctggtgggagatg

SEQ ID NO: 2154 - DNA, 661 bp, Homo sapiens
  misc_feature [331]..[331]: Chromosome 5, SNP identification no. = rs6886558
  misc_feature [331]..[331]: allele = t, in linkage disequilibrium with rs3909867, respectively
  misc_feature [331]..[331]: n is a, t, c or g
tatctagatcaatctagatagattctattgcttctgtttctctggagaactcagactaactcatggggaagctttttcttactatagaatgcagctaataaatatagatttggcaagagccatattggtggtttacatgaatgaatgctaaggctcctcagtgaatgcaaagtgaaccgctcagtgaatgctaaggctgctgggtggaactttgctacaaaaaagtatattaacatgatcttggaatatcttcccccccaaatacttaccaattaccaagaggaaaaatggtgactttacagtagagaaatctggtaggcactaatttgcntagtgatcagggttagccgcactggtagtgggacaaatagacattgttcatacccataatcctgaattgagaagaacacagcatcacttctgtagtatgactgctaggaaatcataacttgagactggttccaagtaaatattaatatcagatgaacccaggttgtagaacacccttcaaaatgaaaggccttactatttaaaactgtgcagagcatgaaagccagggaacaattacggagctgttctgggtggaggaacctaaagagatacgagaactaaaagtgacacataatctgtattggatgctggatcagagacacaagtggta

SEQ ID NO: 2155 - DNA, 661 bp, Homo sapiens
  misc_feature [331]..[331]: Chromosome 5, SNP identification no. = rs6886601
  misc_feature [331]..[331]: allele = g, in linkage disequilibrium with rs3909867, respectively
  misc_feature [331]..[331]: n is a, t, c or g
aatatagatttggcaagagccatattggtggtttacatgaatgaatgctaaggctcctcagtgaatgcaaagtgaaccgctcagtgaatgctaaggctgctgggtggaactttgctacaaaaaagtatattaacatgatcttggaatatcttcccccccaaatacttaccaattaccaagaggaaaaatggtgactttacagtagagaaatctggtaggcactaatttgcctagtgatcagggttagccgcactggtagtgggacaaatagacattgttcatacccataatcctgaattgagaagaacacagcatcacttctgtagtatgnctgctaggaaatcataacttgagactggttccaagtaaatattaatatcagatgaacccaggttgtagaacacccttcaaaatgaaaggccttactatttaaaactgtgcagagcatgaaagccagggaacaattacggagctgttctgggtggaggaacctaaagagatacgagaactaaaagtgacacataatctgtattggatgctggatcagagacacaagtggtaccattggaaaaatctgaatgagtctgtgaattggatagtgttattgtatgactattggtttcattgtatggatgcatttggttatgctggagtgtgttct

SEQ ID NO: 2156 - DNA, 661 bp, Homo sapiens
  misc_feature [331]..[331]: Chromosome 5, SNP identification no. = rs4397140
  misc_feature [331]..[331]: allele = a, in linkage disequilibrium with rs3909867, respectively
  misc_feature [331]..[331]: n is a, t, c or g
aagtggttggggtgtctcaagaggctgattgtggagactagttgtctagagactcaagccaaagttaaacttttcactgtgcttctgaaagcaaccagttcagctttgcaggtgtgctatgcacttgctgggctctccaattgggtgccacaattggtaggaacacggaggtaccaccaagatccacacactggtcactgtgagctccaccttcattctttgtttctacttgactttgaacagtttagctatgtcattaccctcagtgtatcccataagatgacgaaggaaacatctcagaatgctagggacactggatgactgcctccanttcttttttcccactataaaaactgtgggtccaggggaatcttctctgtctggcactgtgccaacttcaagggggttgagggggtagtgacacagctgaagtgagatttttcttttcttttcttttctttttttgagacagagtgttgctctgtcgcccaggctggagtgcagtggtgtgatctcagctcactgcaagctccgcctcctgggttcacaccattctcctgcctcagctcccgagtagctgggactacaggtgtctgccaccatgcctggctaaatttttctattttttagtagagacggggtttcaccatgttagccagga

SEQ ID NO: 2157 - DNA, 661 bp, Homo sapiens
  misc_feature [331]..[331]: Chromosome 5, SNP identification no. = rs10043142
  misc_feature [331]..[331]: allele = t, in linkage disequilibrium with rs3909867, respectively
  misc_feature [331]..[331]: n is a, t, c or g
atcagagggcagtgacataatatattcaatgtgctgaataaagacaaaataaagacatttccagataagcaaaaactgagagaattcaatgttatcagatccacctttcaagaaatacatttttacaaagttctctaggctaaaagtaagtgatcccagatggtaatttgaatttgcatgaataaacaaagaataccaataaaaataataatataattatgaaagaaagtgtgaatggacagttttacccctttcttttaaataatttaaaaagcaattttataaactaataggtatgttgtgggtctttaacacagagatttacaatttntgacaataacagtatagaggaggaggtaggtgggagcaaagttttattgaaataaggaaatgacaccagatagtaatttaaattcacaggaacaaatgaaaagaattacaaatgataaatcaaaagattaacataacacactccataattatatactgtatccccttttttcctcagcttctttgagacacttacttaaagtaattataaggaagtattatagggattataatatatgtagatgtaatatacatcacaaaatagcactaaaaggagaaaagggactggagctaatcagaagcaatgtttttatatgttactggaattaac

SEQ ID NO: 2158 - DNA, 661 bp, Homo sapiens
  misc_feature [331]..[331]: Chromosome 5, SNP identification no. = rs9292484
  misc_feature [331]..[331]: allele = a, in linkage disequilibrium with rs3909867, respectively
  misc_feature [331]..[331]: n is a, t, c or g
ttaccgatctctgcctcacagaaccaagggataaacttttcaaattcctttggtagaaaacccaagtatatatcataatattcaagtgttttctccatagaaataaagtttgcaatatgagtgaattcactatcaacagcctgctcagatcaaaatcaggtgaaagcctgtaacacacttttgtgactcctcttgtggcaatttgagatttcagggggaaacattctccaaaactaacagaaaacataactccagtaatctacaaaaaataatttttcttatctgtattttatctgatatactcctaggtgacagagaattcacttccttngataatcacagggaaaactgattcttctcctttaagaagaggtggtacttgtatctgataaacatgaattaagattgtaaccctagatccatagattaaataagatctattagaatcattttgattttgaaaatgtattcctgttcttacttcatatacattctctagcagtaggagtttaaaaaaaaatcaaatggattgcctgctataataagtgaatttttaacatgggttatgttatgttgaaggatagctgctttctgtttggtacagaattaagcataaggaaggggatgacaagtatgctctttcccatgaagtagtctactg

SEQ ID NO: 2159 - DNA, 661 bp, Homo sapiens
  misc_feature [331]..[331]: Chromosome 5, SNP identification no. = rs6889270
  misc_feature [331]..[331]: allele = g, in linkage disequilibrium with rs3909867, respectively
  misc_feature [331]..[331]: n is a, t, c or g
ctttcttgggataaccctttcttgattatgatgcattaacttttcaacatattgttatattccatttgctaaaatttttaatttttaaatctgtgttaatgagagatattggtctgcagttgtcttttattgtaatacctttgtctagttttggtattagggaagggttgaactcatggaatgagttgagaaatattctctctttggttttcttgagacatttgtgtaaaattgctattgtttgcttctttaatgtagaattcaccagtgaaattttctgagcttggaatttatttatttgtgcatgtgtttgtgtgtctgtgtctgtgtnatatatgtaaatataaattcagtgtctttaaaaaacatagggctatccatgttatctattctcttgagggactttggcaatttttgtctttcaaggaaatttcccatttcatctaattatcaagcgtattcataaatttgttttaatactcccatattcttttaaagtctctaagatttatagatatgaccctctctttcctgatattggtaatttgtgcctttttctttatttatttgatcaatatagctagagatttgacaacttcattgattttctctaatcaaactttggtttcaggctacaaattttctctattttcctaaattc

SEQ ID NO: 2160 - DNA, 661 bp, Homo sapiens
  misc_feature [331]..[331]: Chromosome 5, SNP identification no. = rs6859917
  misc_feature [331]..[331]: allele = t, in linkage disequilibrium with rs3909867, respectively
  misc_feature [331]..[331]: n is a, t, c or g
atcattatgaaatgaccttctttagctctagaaatagcacatggcatttactttgcctggtattactatagccactctagctttcttagattaatgtaggcataatattactgccctccagtcttttacttttaacctacacatgtctttatatttaaagttagtttctcacagacagcatataattaggtatcactttttatcaatctggcaatatttgctttttaaattgggctgattagaccatttacatttaatgtgattattgtgtattagcttagaggctgccatcttgctatttgatttcaatttgtccatacttttttatttncctcttttgccttattttggattaactgaatatttttatgattctttgttatctacagcattggctatatatattttttcttttgttcctttagtagttgatttagggtttagtatagatctttacattattatagtcaacattcagttaatattacaccacatcttcataggaaaggaattttacagcagtatgctattctggacttcgtactatcactatacatattacttctacatgtgttatatagttatattgttattatcattgttttaaatagtatattatcttttaaattcatttttaaaataagacaaatgtttttatact

SEQ ID NO: 2161 - DNA, 661 bp, Homo sapiens
  misc_feature [331]..[331]: Chromosome 5, SNP identification no. = rs10044411
  misc_feature [331]..[331]: allele = g, in linkage disequilibrium with rs3909867, respectively
  misc_feature [331]..[331]: n is a, t, c or g
acagtccttcagagctttttgaagtagagagtgaagaaggtgaggttaaagcagcagtgggacagatgggcagatcactgtgaagactttggcttttactcttgaagagatggaaagatattaatggcttttgaacagaagagtcacatgatctgacttaagctcactatgactccagtgttaagaatagtttacaggaaagcaatagtaaaagcaacagcatcaataaaaaaggtggtgcaacaatcaagtacaagatgatagtagctaggatcagggaaataagagtggaaggaagtgattggacttcagtataaattgtttgataacngcctcccagcctctgcataagccctctgttctcaaaaggagtaggctaaagttctcatcttttggagaaattggggaaacatggagaaaggagtgaaccaagacagaaaaatagtaatcaactttgagaagtgaagaggcaaagggtgagtctctgaatcccaaagagtctcttggctatttctcactaatgtcttttatagaaatataattttttccttgcccaggatccaattcaagattatatattggatttagttgtcaggtctcctttattctagaacaatgtctcagtctttaataaccttgatattttgtagaatacccctca

SEQ ID NO: 2162 - DNA, 661 bp, Homo sapiens
  misc_feature [331]..[331]: Chromosome 5, SNP identification no. = rs10041597
  misc_feature [331]..[331]: allele = a, in linkage disequilibrium with rs3909867, respectively
  misc_feature [331]..[331]: n is a, t, c or g
ttctcatcttttggagaaattggggaaacatggagaaaggagtgaaccaagacagaaaaatagtaatcaactttgagaagtgaagaggcaaagggtgagtctctgaatcccaaagagtctcttggctatttctcactaatgtcttttatagaaatataattttttccttgcccaggatccaattcaagattatatattggatttagttgtcaggtctcctttattctagaacaatgtctcagtctttaataaccttgatattttgtagaatacccctcagtttaggtttgtctgatgtttcttcaagtatagattcacatttttgctttcngcaggaataacagaaaatatgtgtcttctaggtacatcatagctggaagtacatgacatttgtcctatcactaacaatgctgacttatattatttggttatgatggtgtctgaaagtttgtccacgataaagttactatttttccttttgtaattaataagtatcttatggggtgatactttgagattatgtaaaaacttgtttctcatcagcatatttccactcactaatttgattgatgattcttgactgaaacatttattactatggtggatgtttcaatattttttgctaattccatcattcatctatatttactacttaatattt

SEQ ID NO: 2163 - DNA, 661 bp, Homo sapiens
  misc_feature [331]..[331]: Chromosome 5, SNP identification no. = rs10060905
  misc_feature [331]..[331]: allele = a, in linkage disequilibrium with rs3909867, respectively
  misc_feature [331]..[331]: n is a, t, c or g
gcctcatttatcctgttagtattccatcatccccccacaccctattgatttcatccattccttcatttattttaggatgtgcaacatcatcttggtactaaatgtcagaagtatacaaatacgtatagagaactatctctcccccgaacccatgtattctacctcattccttctctctctcttgctctcactctcatattcctaatcatcattggtggcaactagctcattattttttagttttagtttatgttccttgtgtttttctctgtacaaataagcaaatatgtatacatttctatttcccttttccttaaataaaaattatagntgttagatgctcttttgcattttgctttctaaaaattcataaaacagtataccacaagttattctatatcagaatagaggtcttccttattctttttaagctgtatagtactacattggatgaacagtctctaatttgctcaacttctctcctacataaaggcatttaggttatttccaatatgttgcaattacaaaaaaatgctgtagtaaacaactttatgcgtgcatttttttttgaattgttgaatgaaaatcttcagaataaattcctagaaaaggtgtctgcattgaaaggtaaatgtctaaatacttttactagatactgcca

SEQ ID NO: 2164 - DNA, 661 bp, Homo sapiens
  misc_feature [331]..[331]: Chromosome 5, SNP identification no. = rs10073022
  misc_feature [331]..[331]: allele = a, in linkage disequilibrium with rs3909867, respectively
  misc_feature [331]..[331]: n is a, t, c or g
tgtccttgcgatagtttgctgagaatggtggatccatgtctctggtgctagggataggaacaatgggagcttctttctgagtgaaataccttcttgagagctgaacactcagttgatagagggcaacagtcaaaggtgtcctgggcttgtttctctcactgtgaaactctcagaccataaggtaggtctgagaattacctaggctaatgaaggctccagtattctcaacagtaccacaaccaaggtacagcctcggtcccatgagttggggctgggcagaagaaaggagcctctagatcttagctaaattcacccacaacttagcatcagnagtatgtaggagggggaaagaataagaaatgattatatcctgccacatcataaagtaatccagatgccaaaaagaaatttggctttagtttagtggcatcaatttttacaataactgtaacttctctacttcacagtatcatttattctttctccagagcatagctattttcagagctcacattcatccctacgcactagaatggctaaacctgttgttaaaatatttaaatatgtttgtataagttggcaaatagccgctatctgaagttttccaggtgattcaccaccaccctagtctcccaggtccttccctcaggattctagtgat

SEQ ID NO: 2165 - DNA, 661 bp, Homo sapiens
  misc_feature [331]..[331]: Chromosome 5, SNP identification no. = rs10057997
  misc_feature [331]..[331]: allele = g, in linkage disequilibrium with rs3909867, respectively
  misc_feature [331]..[331]: n is a, t, c or g
accttcttgagagctgaacactcagttgatagagggcaacagtcaaaggtgtcctgggcttgtttctctcactgtgaaactctcagaccataaggtaggtctgagaattacctaggctaatgaaggctccagtattctcaacagtaccacaaccaaggtacagcctcggtcccatgagttggggctgggcagaagaaaggagcctctagatcttagctaaattcacccacaacttagcatcagcagtatgtaggagggggaaagaataagaaatgattatatcctgccacatcataaagtaatccagatgccaaaaagaaatttggctttngtttagtggcatcaatttttacaataactgtaacttctctacttcacagtatcatttattctttctccagagcatagctattttcagagctcacattcatccctacgcactagaatggctaaacctgttgttaaaatatttaaatatgtttgtataagttggcaaatagccgctatctgaagttttccaggtgattcaccaccaccctagtctcccaggtccttccctcaggattctagtgatccccagtgtccaatgaataaaggtatattcacagcacaggacgtacaggactctgcctcagtgctatagctgtgtctattttgcgtg

SEQ ID NO: 2166 - DNA, 661 bp, Homo sapiens
  misc_feature [331]..[331]: Chromosome 5, SNP identification no. = rs13436219
  misc_feature [331]..[331]: allele = c, in linkage disequilibrium with rs3909867, respectively
  misc_feature [331]..[331]: n is a, t, c or g
tggctatttttttttcttttgtaaggagtagagtagcacataattataaagatttcaatgaattatgttgagaaacttttattatttgaattctggtctaatttaataaatctgggtcccaaatactcattaattcctcatgatctgaatgccactccaaggatacacaatcttagtgtcatatcagcaagagctgggaaggtgagagaggagaggaaagagtctaaaaatctctctatagggaattcttatttgaaagccagtctaaaaacaaaggttttttttatttgtttgtttgtttgtttttgagccagttgtagcaatgtcctangtgaggaacacttgggggcccactgagagaggtacaatgtcaaaggaaaaacaaggtgaagaatcaatgtgaaagaaatttcaacaaccaaagagatagtaatttttaaacagctatatccaacgtgttatatatgctgtgattgccttcgcagaggtcactgaaaccaaagtccagctcaggggacatttgattgctgattcaaaaggatgcatcataagattaagatgttatgtacaaatcaagaaatggttccaaaacaagaaattaagtatgctgagaaattcagtatctgttgactatctgagatttttcaatcaatccctaaaa

SEQ ID NO: 2167 - DNA, 661 bp, Homo sapiens
  RAI14
  misc_feature [331]..[331]: Chromosome 5, SNP identification no. = rs10056835
  misc_feature [331]..[331]: allele = t, in linkage disequilibrium with rs10045171, respectively
  misc_feature [331]..[331]: n is a, t, c or g
ctctcttcgataagaaatagcataaaagagaaaaaagtattttcctataaccctcaaaccttactgtgtatttatcttaaactacttgtttatttatttgatcttccttaacatagatcattaagtacatgagtagtatgattttgctttatggtttgctgtatgtagtactcttccttgccataattaaagctgtatatttgattaagtatttgtgtgtgtttgtgcatgagcatgtatttgtttatatccattcttacgttggcagtgttgtggagagagcactgactttggagccagatagacatctcacaggaactctatcacttangagttgtgtaatctctgaacctcagtttccttactataaaatggagatggtattagttaactgttagagtagttatgagtataaaatgaaataataatgtaggttgggtgccctcagaagcaggctctgagacaaggatttaagtgcaagtagttttatatcttttcttttttctaacatgtcaaatgatggttattgtgtaattactgtgaaacacaaagtggtaatatatattacttagggatgtatacacacatacaatgcaagtaatttctatagccggtgatcccaggaagcgtaagaaaggaagaaacctctatttttaaggtg

SEQ ID NO: 2168 - DNA, 661 bp, Homo sapiens
  RAI14
  misc_feature [331]..[331]: Chromosome 5, SNP identification no. = rs10045449
  misc_feature [331]..[331]: allele = t, in linkage disequilibrium with rs10045171, respectively
  misc_feature [331]..[331]: n is a, t, c or g
ctcactgtagcctcaacctcacagggtcaagtgatcctcctgcctcagcctctcaattagctgggactacaggtatgcaccactgcacccagctaattttggttttgttttgttttgttttgtttttgtaatgatggggtcttgctgtcttgtcctagtgatcctcccatgtcagcttcccaaagtgttgggattacaggcatgagccaccattcccagccttctattttctagagagctttcgtggtaattttgcgctggaatctacagttgcctgtctgtctagaggcttgattttggccttcaaggtctttcctctggctctgccccncttacctacatcctgtctccccgctgtttcttctggaagtggagctgtctgctcccgccctccccacaggtcagaacgtccacctgtgcacccaggttctatgtccaatccaaaatgccaccctccctggttctcttccgcctttttgacttttcttctctttgaaatactagaaatcttgatttagaacccattatattcgattattttattctatttatttagagatgggtcttgccatattgcccagacttgatttgaacgcttggcctcaagtgatcctcctgcctcagcctcctgagtagctgggactataaggcatgcactacc

SEQ ID NO: 2169 - DNA, 661 bp, Homo sapiens
  RAI14
  misc_feature [331]..[331]: Chromosome 5, SNP identification no. = rs6874651
  misc_feature [331]..[331]: allele = g, in linkage disequilibrium with rs10045171, respectively
  misc_feature [331]..[331]: n is a, t, c or g
gtctcttcctgatcacagtcactcctttcttggaaatgaagattttttaaaaggaaagaagggagtcgtgggtgtattagggagaaaatacccttggggcagggcagtgatctttgacacatttcctaacctctctgagcatcagtgcttccatctgtgaaatgaagatgttggaccagttattcttctgcaacgtcctaacactctggtattctggggtgtggctaatgctggtagggtcgtgtatggtcatttctttgtgtgagcgttggtggcttgcttcatttggggaagtgaatattggttgcagaggcaatggaaggaactgatnatggtaacagacgccctggtggtgaagaaggcaagaaagactggtttgagagaaattttcagtgaatgaatatgcctgagaaattgaagtcttgtaaaagtagccagtgagtttgtatttcctcccaatatctatttcagccggtaatcagaaaccagaataattgtgtttgttattattctgaaagatagaaggagctttctgggttataacttaagagtttttgaatagcaacagttcaagcctcctttggcttaagagccttgagaattatcccagccttgtcccatggtatttattttgggaaggtttgcacaacttgttgagtgg

SEQ ID NO: 2170 - DNA, 661 bp, Homo sapiens
  RAI14
  misc_feature [331]..[331]: Chromosome 5, SNP identification no. = rs10045171
  misc_feature [331]..[331]: allele = a, t
  misc_feature [331]..[331]: n is a, t, c or g
acatggtgaaaccccgtctctactaaaaatacaaaaatcaactgggtgtggtggcacatgcctgtaatcccagctattcagtaggctgaggcaggagaatcacttgaacctgagaggcggaggttgcagtgagccaagatcatgccactgcactccagcctaggcaacagaataagactccatctcaaaaaatattcaaaaacaaaaaaaagtcactacactcccaaatcattgtatgcaaagttttattgtaatgtgaaatcacttataaaataaattttgactgtaaatagatattacacatagattgctgcacaaatacagaaatagntgcgtgagtagagccaggtaagctaaaataattaaacgttagagccaagggaaccattagaaattatttgacttgatccccagcctttacaatggaggaaatttaggcacagagaggttaaaatgacttcccaaaacacacagataattatgttatggctgatttgcaactagtactgaagtattcctatttgttgatatgtccccctcactcagccaggttattaagaggtctggaatcagaccaacttgggtttaaatatcagctatcggactttccagttgaatgttaccctggatttcaatgatagatccttcccagcgagaaaat

SEQ ID NO: 2171 - DNA, 661 bp, Homo sapiens
  ARFRP2
  misc_feature [331]..[331]: Chromosome 5, SNP identification no. = rs6875937
  misc_feature [331]..[331]: allele = g, in linkage disequilibrium with rs448666, respectively
  misc_feature [331]..[331]: n is a, t, c or g
aaaaccttcaagtcactaaatgatacacacaggaagctcagtaactccttcggggtaaattttattttaaatttctatttagacacatatgagaaggcatactagtactccacacattagttttaaaagcattggcccatggcaaatattcaaccctgactctatccttacttcatgggatggcataagacaggagtatcctccaaaatttctgacctccctaacattaatagctaaaatgactattctcgctaaagtaacattgactgaacatttcctaaacaaaacaattatgagcatcattctcaactaccaaaaacatcttaatagntgcaaaatattaaatcataaataaaaataatcacatataagctaactcactatcctactaaaccttgatagcataaaaatcagcttaaaataatcattaaattttattacaattaagtgctattataaataacatgcttgttttagtagtaaagtatcgcttaactaaagtgataaaagggggaaataattatttaaatgaattactatcaataccttatttaattcaaaagaattcagtggtttgtgcatttcactaaaacatcagatttaatttactgttatttttaaaaagtaaacgatatttacagattaatagcaagtatttaaa

SEQ ID NO: 2172 - DNA, 661 bp, Homo sapiens
  ARFRP2
  misc_feature [331]..[331]: Chromosome 5, SNP identification no. = rs6896454
  misc_feature [331]..[331]: allele = a, in linkage disequilibrium with rs448666, respectively
  misc_feature [331]..[331]: n is a, t, c or g
agaattcagtggtttgtgcatttcactaaaacatcagatttaatttactgttatttttaaaaagtaaacgatatttacagattaatagcaagtatttaaaattttacaattttaaattacaatttatataaaaataaatgatcagaataaagtcagatgctggaatagtcatacatgtattaattcctatattataccattatttttagttcctgaaaataagttggctttttgtcatctcatccctttgctatgatttcgctggataattatgcactgaagttcattactcaaagcatccagttgttgaacagaatcaaaatcacccaanccaataaccacagagtaaagaattgaaagaaaattggatataaccatggatcttaacagaaacaagtaacaagcaaatagggcccaatattaagtgctaatgcaaaattccattgccttcttttcacttgcaaacctacacaatgtcaacattttctgaaactgattttgaataatccctcttattttcaagtataggaaaattaagatatattgatgagaaaaaaaattctatcatttccctttctaaatgctattttcaaatgaacaagatagatagatacctgtagaaaattgggcagtgagtacaggcagtgatgtaaactgtatt

SEQ ID NO: 2173 - DNA, 661 bp, Homo sapiens
  ARFRP2
  misc_feature [331]..[331]: Chromosome 5, SNP identification no. = rs9686938
  misc_feature [331]..[331]: allele = t, in linkage disequilibrium with rs448666, respectively
  misc_feature [331]..[331]: n is a, t, c or g
agaaataaccatgacgtctttctactgtctagagaacaaatcaaagaattgtatttcatgagcagtgccttccaattaaaaaagaagaataaaggaaagagaaaagctcatatattctgttgagtgtgtagcaaatacatagtaccactgtggctatttaaacaattgaggctaatggaactaaggagaacttctaatgcaactgaaattgatgcaatggtacactttaatttttaagtgtttctcttaaatattctatgcaatagggattgagtgctcatttgattaacttattgcagggatggttgcgcaagaattaaatgtgctttgnctggacattgacaatgaaatgaatctgaatatacttaaatgtgatatatactgttgctttgggtcaaaagttttttcatgagaaaatatcaccaattaactaaaatcaaagagaaaatgtcattttctcctcatttaggttcttttaggaatacattaactatattatcagtgcagcacctgtctttattaataatagatgtaaatgttggttctctgagctgtcaaacttacaactcaaacttcctaaagtaaatcgataactataatacatgactataataatgtagaactgtgagttctgcaaaatatctaataagttttgagtacc

SEQ ID NO: 2174 - DNA, 661 bp, Homo sapiens
  ARFRP2
  misc_feature [331]..[331]: Chromosome 5, SNP identification no. = rs7709659
  misc_feature [331]..[331]: allele = a, in linkage disequilibrium with rs448666, respectively
  misc_feature [331]..[331]: n is a, t, c or g
acagtttatcactttggaagttataggcttttttcaaaatcccctttaattgcttattagttctatagctctataaaggcaaatagcctcatcctgctcataggaactttagggaagtgctttacaatctccagccttcaagacattgagacaatgaaaaggcctttttttttttttaagtatatgtgtttcgcagtagcttaaatagacatttaccagatgtaaattttatcaggctttgtgttgaagagatttcttcaagtggtgattgttgactctaactgtaatgtattttatgatctctccagatagaataggagggaaaaatganaatattaacccttcctctacctgctattagttaatcctaacaaatactctatgaaacatacatgctatagccaaaaaatacacactggtccgctatactagaagcaaaagaaatcagaatgggttaaaaaaaacaaggcaactagcctaatgatacgtacaatgaatttggccttcatttttctaggctctgggtttgcttttcacaaaaactggaatcaagttcctctaggcggttgacttaatgatttgaaaacagtagtataaacaaaacatgaagccacatgggagagacgaggaatttatatatgcaaagtcaacacatacttta

SEQ ID NO: 2175 - DNA, 661 bp, Homo sapiens
  ARFRP2
  misc_feature [331]..[331]: Chromosome 5, SNP identification no. = rs448666
  misc_feature [331]..[331]: allele = g, a
  misc_feature [331]..[331]: n is a, t, c or g
tgtgtctttgttctgtttaatttagtcttgcaggttttcttttactcgtttacttcacattttctgccatttcagtcacatacgtatagcccagttttgacaaccccatatgacctcttcagtcagcactgcatacttcacattcctttatcttaatttatacatatctttgtcctgacaattccccaattgtagaattaattgtttttttctcttggtctttttgtgttttgctctattatttgccccttctttatcaccttcccatatgctttctggaaacagtcatgctagttggcagtatatcttgctatcttaacaggaaaatttnaatggatagttcctaggatgcatcatatttttgtaactgtacaatcaatcagctaatatccaaaatacagtaccctggttatgcttattaatatttggagccgactgggcacagtggctcacgcctataatcccagcactttgcgaggccaaggcaggcagatcacttgaggtcaggagttcaagaccagtctggccaacatggtgaagcctcatctctactaaaaatacaaaaattagtcgggcatggtgtcatgtgactgtaatcctagctactcaggaggttgaggcaggagaatcacttgaacttaagagactcaaatatatatat

SEQ ID NO: 2176 - DNA, 661 bp, Homo sapiens
  ARFRP2
  misc_feature [331]..[331]: Chromosome 5, SNP identification no. = rs440325
  misc_feature [331]..[331]: allele = t, in linkage disequilibrium with rs448666, respectively
  misc_feature [331]..[331]: n is a, t, c or g
aaatgtctgaaactctttacccttaattaacgtacagtctaattggagagacaaaacatgattaaagaaaagttaatagatgccacaagggtagattgtaattattttctgcattaatggggctttgagttcagttggcaaaaaccgttatggactgcagtgggctgagccagcttcctgaggcggggggtgctggagctgagactagaatacctgtttatctttttacagcactttgaatagcattactttgcattaccaagttacttctttttgagattctaacactgatttcaagtaatcattcatatgcgacaacactccatatgantgttgttcttcagtgagatttgttgcactttgtctgacaaaaccacctttaggatctactttgttcccagccaatattttgctgcagctcaatttgtaggtcattggtcccatcctgaatttgctgctacaaaattcacttccaaaatacttggacttttttattttaataaactacttgattgccaaggctaattagaaaagagagctacttaagtagaatttaatttaataaacattcatagaacacttacagtatgaaaaggactctgctaggcctccatgtaaacaacaaattatagctgccctcaggaagctttctgtctgctag

SEQ ID NO: 2177 - DNA, 661 bp, Homo sapiens
  misc_feature [331]..[331]: Chromosome 5, SNP identification no. = rs2194236
  misc_feature [331]..[331]: allele = c, in linkage disequilibrium with rs12515791, respectively
  misc_feature [331]..[331]: n is a, t, c or g
gcactttttctcacttaccacatccaataactcctgtgactttaaaattctcttctgagtcctttttccctttctctccagtggataccttgacacccacctctgatttaccccagtcctcttctctgcttcctaaacctaaatgaagtatcactgtgtcccagaagatgaacttcatcagaacagggtgtccccacatgaagccgctaacagagcttgattcataaatggaatcaagccaatgattattgaatgaggtcagaggttggaattagagtagggttttctgctcttagcatggtgacctacttgcaactcaaactagaggaanccctcactgaaatagctaagtctgaagtttttaatctaaaatatctccatgtcagtttaaacctgttttctctcctgcaggtagatcttaaggccttgtatgtctatttttcaaagatcagtcctggcagtcaagatgaagatttgtaactacttaactagatgagcttggacaggtcacctgttccttccaggctcctgtttactcagccaggggatagagttcaactaatccctaccatgattaagggtcactcaccttttccaaaaagggctttgctgggtcttggggttttaaagcaagataagacatccactgaaaatggtaaat

SEQ ID NO: 2178 - DNA, 661 bp, Homo sapiens
  misc_feature [331]..[331]: Chromosome 5, SNP identification no. = rs6864386
  misc_feature [331]..[331]: allele = g, in linkage disequilibrium with rs12515791, respectively
  misc_feature [331]..[331]: n is a, t, c or g
atagacagtttagtttggggaagtctaactggtgcaaatcagggttcagctaggagcttctctgcagattattgcttcccaactccccatgtggtgttggtggaagttgatttgcagctccatccagtgtaattgctccctcattctggtccctaagactggcataaagatgtgccaactacagagggaagcaaatcccaaaaaagtgtttgggcacttgctttcttgcctgcttcttatgagatcatcacctattgggataatatagaaactattcaaattgctttcttgtaggtattccactgaaagttggaaacatcttgaatgcccntgatttataattttgatctcttctttcaaggcttacatataaggaagccttaatccaagctggcaattgattcaaggcagcttgcaaggaaacgagaaactcagaaacaagaaactataaaataaagccaatgaaaaaagtggctatcatataccatctagataataatgcttcctatctcatccagacttgagattctgactctatgctgtttaaattgagaaagacaggcatgtaggtactctgggcaggctaatatggattcatgcattctacatacctatttaacacctactatatattagggatgctagagaaatattatccctg

SEQ ID NO: 2179 - DNA, 661 bp, Homo sapiens
  misc_feature [331]..[331]: Chromosome 5, SNP identification no. = rs1900164
  misc_feature [331]..[331]: allele = c, in linkage disequilibrium with rs12515791, respectively
  misc_feature [331]..[331]: n is a, t, c or g
ggtttttaacttctctcaaaatcttaaagttataacaattattcttaggtgcttttaaagtttctactttaaaggtcatttaaaaaaacatattcaaaaacacatttcctaactttgttgctaagtaactagaaatacaattcattttatattgatttttaaggagtaacagatttaattttaactttaataattgataggcagatttgtgttttacatacacaaccacaatctgccgatgaattgtttctttctctccattctttatattttttctctggttatgctgtccgggttctctagtataatgtagaatagaagctgtgatagntgacaccgttgtcttgtttctgaccttaaagcacacttaaagtttcacaaatgaatatgtttgctttaagttttttgtagatacccttcatcaatcggaataaattcccttttactcttagattgccaaccatgaatggtgttatggactgaataatgtctcccccaaatttatatgttgaagccttaacatccagtaccttagaatgtgaccaaatttggagacagatcctttaaagaggtagttaaaatgaggctgttagagtaggccctaatccaataatcctagggtcctaagaagaggcaatttggacatacagagagacaccag

SEQ ID NO: 2180 - DNA, 661 bp, Homo sapiens
  misc_feature [331]..[331]: Chromosome 5, SNP identification no. = rs4865565
  misc_feature [331]..[331]: allele = a, in linkage disequilibrium with rs12515791, respectively
  misc_feature [331]..[331]: n is a, t, c or g
cccaggctggaatgcagtggtgtgatcacagctcactatagtctcgatctcctgggcctcccacatcagccttgtaagtagctgggaccacataatgtttaaattttttgttaatacaggatctcactatgttgcctaggctagtctcaaactcctggcctcaagcgatcttcctgcctctgcttcccaaagtgctgggattataggcatgagccaccgtgcctggcccagagacagtttacttttaaatcaattgcttaaacctgacgttactcttcttagaaagaaaagagggcatttaagaaaaaaaaaattgcataagaattaactnttatcttaataattaattaactaatgggttcatgaaagacactaacacattcatgagagccaagcttttccaatgctttccctgtctccttgccatgaccttgaagtctttgcctgcatcttgtgtttaatgccatgccatgtagactgattcattgtaatgctttgtccttgagaagcttttcttcaaataggaatctctaacataattgtggttttttatgtacctgagtagtgttgaattctctgggcaaatgagagctagagaagacagtactgtatgcttgctgccaaagtacatcagtgaatggacgtgttctggacgtgctta

SEQ ID NO: 2181 - DNA, 661 bp, Homo sapiens
  misc_feature [331]..[331]: Chromosome 5, SNP identification no. = rs7701690
  misc_feature [331]..[331]: allele = t, in linkage disequilibrium with rs12515791, respectively
  misc_feature [331]..[331]: n is a, t, c or g
agggaagcagtggggctctatttgctcaaacctctcaggaaaaggctacaattactgtgtggatacaggaatatcacagttatgagtggtattgttcatagggcatttcacaagacaaagcaataataaaatacttagttcttaggatatcaaaggttattttgtgaaaatgatttgacataccacaatcctaaaacttgacaaactactctcaaaatgttttaagaattatgtgaacccagaaacaaatgtgaaaactgttttcacacaggaaagcctccactgaggattatgaatcttatgaaagacaaatgccctattttgagtacanggtgatatagttggtcaccttcaggtatgcttatttatgttttgcaggattgcagtaatggttaaatagtagaccaaattagcatgtctgggtctcctcaagtcttatgtttccttcagtggtcccatatgagttactaaaatttccagttttatgtagaatgcagcataggttgaccataaacacaactttgtatcattgtccaaagttgtaaaacagagattgtcactgcagggtcatgcaacagaaagggaggaaatgctgttttgtaccatatcaaaaatgataagctacattttccgaaggactaaaatatccctcttattgaga

SEQ ID NO: 2182 - DNA, 661 bp, Homo sapiens
  misc_feature [331]..[331]: Chromosome 5, SNP identification no. = rs4141522
  misc_feature [331]..[331]: allele = a, in linkage disequilibrium with rs12515791, respectively
  misc_feature [331]..[331]: n is a, t, c or g
cagaaagggaggaaatgctgttttgtaccatatcaaaaatgataagctacattttccgaaggactaaaatatccctcttattgagaacagaaagaagggcaagaatgacttgtttaaaacctgcaagttgataaggagcgatgtcccagcctttacaacatcatggatgtaaaccttgagaaaggaacaggaagcttgtttacaaatgaacaaattcctgcttttgtaagagaaaattcaagctgtggcacattttttaaattaatagatgtttttaataaattggtacctaggagggattcatcatgttcactgtgcttgacaagtacanaattaagcgagttaaatcagctccaaagaaaaaaaggctgtgtaggcaacccatcaaatgactgaaagctggggtagtcccttcagtgggcgaactgcttatgctacctgaatagactttgctcagaaaagacttctattgaaagaaccacaggtgtgaagttaatatgcgtttgtaacagttttcaatcaaatgcctcatcaaatagggtagtttaacacttgacgcataaatttgcatcagaatcatagcatcaactaactgggagaaaatggcagttaactgtgaagctgtcctgtgtaataggtgctctgcaatgcaataggctca

SEQ ID NO: 2183 - DNA, 661 bp, Homo sapiens
  misc_feature [331]..[331]: Chromosome 5, SNP identification no. = rs1445829
  misc_feature [331]..[331]: allele = c, in linkage disequilibrium with rs12515791, respectively
  misc_feature [331]..[331]: n is a, t, c or g
tgctggaggtagagatatggtcaagatgtttaatcaaagtgaatggaattaggaagtaagccatccctatttttcctaggattgtattacttaggcttagcttgctctgcttttaaagtcaccttggttctaaaacatacaggataacagaaactagaatttaatatggaaacaaccatcctatgataaaacaaactaggtttgctatacaccaatcaagggcttaggggagaaatcagaacttagagtgggtggaagcaatgaatatggagtaccatttcctagtctcctcatgaaaaatgggccaccagtgtttgatgccaagaagctnattgttacttaaactctatcttcctggagaacttacaaaagtagtatgttttaattgcagacaatttggaggatgctaacaagcttaaaatttttttaaattaaggatcacacccaaatataaccatcatgtttatgttgtcggctggaagtaccagtcccttttaaaggtttttcacagaaaactgtgcaatacagatggagactaacttagcagatctaaggagaatggagattgggcaggaaggtttcagggtccatgaactgtatgatagtgactctcctacaatccatagactctttagagcaggtcctgatagtgacccaatgg

SEQ ID NO: 2184 - DNA, 661 bp, Homo sapiens
  misc_feature [331]..[331]: Chromosome 5, SNP identification no. = rs2032874
  misc_feature [331]..[331]: allele = c, in linkage disequilibrium with rs12515791, respectively
  misc_feature [331]..[331]: n is a, t, c or g
cctcaagaacatcattagtatgataacacttccactgcccagactgacggggccagagggccacactgctaacccctgaaattaaaaaaaaaaaaacaaggtaggccccctatcttaaatcacatagaatggtagcagtgtttcatgtcctttctaggtgatggagtcacggtctcataatacagcaccaaccattaattccataaacatacagcatgtcatgaagtccagggtctgatgttgtggacaagtgcaagatttctagagaaaatatacattgtcttgcttatgaaataagattatgcatttaaaatttcaaaaatattcgatntcaaagaataaaagagttaagagaaagcctatgattaaaagccaagtgactgatagggaatttcaggagaaaaaaaaacagaataaatcagagtagtcagggatggcataatagaattgggacttaacacaaaacacttatttaacactttctatgaaatatgccttctgagaactcactggtgaaatcaaacccagatcctggcctcttgatacttgtatgctttttgggtgtacagttgctcaatggacatataaagtacagagtgatgagtgtcacagtaacagacacaggacttacctaacccaccacagccgtacccacaagcac

SEQ ID NO: 2185 - DNA, 661 bp, Homo sapiens
  misc_feature [331]..[331]: Chromosome 5, SNP identification no. = rs6886606
  misc_feature [331]..[331]: allele = t, in linkage disequilibrium with rs12515791, respectively
  misc_feature [331]..[331]: n is a, t, c or g
tggacaagtgcaagatttctagagaaaatatacattgtcttgcttatgaaataagattatgcatttaaaatttcaaaaatattcgatctcaaagaataaaagagttaagagaaagcctatgattaaaagccaagtgactgatagggaatttcaggagaaaaaaaaacagaataaatcagagtagtcagggatggcataatagaattgggacttaacacaaaacacttatttaacactttctatgaaatatgccttctgagaactcactggtgaaatcaaacccagatcctggcctcttgatacttgtatgctttttgggtgtacagttgcncaatggacatataaagtacagagtgatgagtgtcacagtaacagacacaggacttacctaacccaccacagccgtacccacaagcaccactgggagccagaggacagacctgctttacctgtaacctccaccaatggtgcccacacacattgtccagtggcctcaggactgacctatcctacttgcacccatgcaccctttgcaccactggcacgcatgcactccgtctggaggcctggggattgatccaccctggccacagcagccagcacccatgcacaactttagggggggcctgatgacaggcatgccctgctcgctgccactact

SEQ ID NO: 2186 - DNA, 661 bp, Homo sapiens
  misc_feature [331]..[331]: Chromosome 5, SNP identification no. = rs1373985
  misc_feature [331]..[331]: allele = a, in linkage disequilibrium with rs12515791, respectively
  misc_feature [331]..[331]: n is a, t, c or g
tgttaggtctgtagtgcagagtaagtctgatgtgtctttgtagatttcctgtctagatgatctgtccactgctgaaaggggggtgttgaagtccccagcttttattctattggggtctgtctttctttagctataataatatttattagcatatagatttacaattgtatatcctcttgctgaattgatctctttgtcattatataatgatcattttgtcactttttgttttttaacttaaagtctagtttgtctgatataaatatagctactcctgcatgcattttgtttgtgtggtatacttttttccattccttcactttcagtctangtgtatctttacagatgaagtgaatttcctgtaggcagcatatagttggtttaaaaaaaaaaatcagccagtctgtctcttttaactaggaaacttaaactgtttacattcaaggttgctatggataggtgaggacttactcctgtcattttgttaattgttttctgattgttttgtatatcctccattctcttcttcttattttattgttttcctttatgatttggtagttttttgttatgagagtatttgactcttttctctttctcatttgtgtatctgcactaccagtgatttttatactttggtgtgtttctatgatggtagatg

SEQ ID NO: 2187 - DNA, 661 bp, Homo sapiens
  misc_feature [331]..[331]: Chromosome 5, SNP identification no. = rs1823050
  misc_feature [331]..[331]: allele = g, in linkage disequilibrium with rs12515791, respectively
  misc_feature [331]..[331]: n is a, t, c or g
atttgatatgattttgatttttaaaaatttgttaggacttgttttttgtcctaacatatggtctatactggagaatgttccacgtgctgatgagaagaatgtgtattccgcagctgttggatgaaatgttatgtaaatgtctgttaggtctgtagtgcagagtaagtctgatgtgtctttgtagatttcctgtctagatgatctgtccactgctgaaaggggggtgttgaagtccccagcttttattctattggggtctgtctttctttagctataataatatttattagcatatagatttacaattgtatatcctcttgctgaattgatntctttgtcattatataatgatcattttgtcactttttgttttttaacttaaagtctagtttgtctgatataaatatagctactcctgcatgcattttgtttgtgtggtatacttttttccattccttcactttcagtctatgtgtatctttacagatgaagtgaatttcctgtaggcagcatatagttggtttaaaaaaaaaaatcagccagtctgtctcttttaactaggaaacttaaactgtttacattcaaggttgctatggataggtgaggacttactcctgtcattttgttaattgttttctgattgttttgtatatcctccatt

SEQ ID NO: 2188 - DNA, 661 bp, Homo sapiens
  misc_feature [331]..[331]: Chromosome 5, SNP identification no. = rs2407507
  misc_feature [331]..[331]: allele = a, in linkage disequilibrium with rs12515791, respectively
  misc_feature [331]..[331]: n is a, t, c or g
ttgtccttgggttttcatatctccccattagaataatctggcttggtctgtgtttctgaaaaaagcatctcatcccatatggctatttccttacatttctttctactatcaaaatatctttatacctttctccctccaaagtgtcctttattgacttactaagacaataattttataatataatcaaaatgtttgttagcagagctatattataactttaggagtccatagacacccttgggggccccttcctcggcacaaaaatattaaaaattacattttacaattgcattgggatgaaaataaatataagccaaatctgactcattantatactttcattattatttttccctccaattttaagataaattaaaatgaaaattatttgcatgggcttgtatgcccctggcactgtgccccatgggcaggctttaggccatccaggtgccgactcttaggaaactttcattctacaaatacagacataaagatagatcatgtaatagcctttgctttttaccttcgtggtagctgtagccctctgtgtctacctaattgttagaggtcatttccataatgaatggtagctgaaaatgccagatgcaattgaccctctgtatccatggattctgtatctgtgggttccacatttaaggat

SEQ ID NO: 2189 - DNA, 661 bp, Homo sapiens
  misc_feature [331]..[331]: Chromosome 5, SNP identification no. = rs2407508
  misc_feature [331]..[331]: allele = a, in linkage disequilibrium with rs12515791, respectively
  misc_feature [331]..[331]: n is a, t, c or g
tatcaaaatatctttatacctttctccctccaaagtgtcctttattgacttactaagacaataattttataatataatcaaaatgtttgttagcagagctatattataactttaggagtccatagacacccttgggggccccttcctcggcacaaaaatattaaaaattacattttacaattgcattgggatgaaaataaatataagccaaatctgactcattaatatactttcattattatttttccctccaattttaagataaattaaaatgaaaattatttgcatgggcttgtatgcccctggcactgtgccccatgggcaggctttnggccatccaggtgccgactcttaggaaactttcattctacaaatacagacataaagatagatcatgtaatagcctttgctttttaccttcgtggtagctgtagccctctgtgtctacctaattgttagaggtcatttccataatgaatggtagctgaaaatgccagatgcaattgaccctctgtatccatggattctgtatctgtgggttccacatttaaggattctaccaactctaataaaaaatattcagaaaaaagtcatctgggccaggtgcagtggctcacgcctgcagtcccagcactttgggaggccaaggcaggtggatcat

SEQ ID NO: 2190 - DNA, 661 bp, Homo sapiens
  misc_feature [331]..[331]: Chromosome 5, SNP identification no. = rs2113004
  misc_feature [331]..[331]: allele = t, in linkage disequilibrium with rs12515791, respectively
  misc_feature [331]..[331]: n is a, t, c or g
aattgcttgaggccaggagtttgagaccaacctgggcaacatagtgagaccctgtctctgcaaataaacaaaaaaattagccaggtgtggtggtgctacctgtaatcccagatacttcaaaggctaaggtgagagaattgcttgagcccaggagttaaggctacagtgagccatgattgtaccactgtactccagcctggatgacagagctagaccctgtctctaaaaataaaatgaagaaattattctgtattgtaagatgacaattctcactaaattgttttataagccactgtttaaaaatgaaacagtgaaattccaaataaattgnctacggtactttttgtaaaatatttattgaagtataatatacatacaaaaagtacatatatcttaagtgtgcagctcttaagtttatctgaaataaaaatggagagaaatataccataaaatttcaatagaaaggaattttacaatgttttaactagcactgtactatagaaatcagcaaaaaagaataataaccctaaaatcaagctccagagtgcataaataagtatatgtgataaatgcagcattccaaattggtgagttaatggatttttaaatcaagctccagagtgcatatataagtatacgtgataaatgcagcatttcaaat

SEQ ID NO: 2191 - DNA, 661 bp, Homo sapiens
  misc_feature [331]..[331]: Chromosome 5, SNP identification no. = rs17513501
  misc_feature [331]..[331]: allele = c, in linkage disequilibrium with rs12515791, respectively
  misc_feature [331]..[331]: n is a, t, c or g
gtatcccactgaacatatgaattttaaaaataaatgtaaataaatgaaaccagaaaagaactagaataacatatagtttaaaactcaggatgaataggtatgacatgaaaaatagaaatcacaatggaaaagatcaataaatttatctacatacatttaatacttctttatgacaaatatcataaaggtaaaaggcaaatgataaactaggagaaagtgtttgctatcttgatgatgtttgagctggtgtctttgataggaatagggtatattctattgcttgcatgtgtagattctagagtcagatggtttaaatatgaattcccacttncagctgtcttaggttgggtttcctaggagcattggctgagagaaagattcttatacaagtgatttattgagaaattcctctctagtaaaacctagagaagtgagggaagcaggacaggacaggacaggagaataagctagcaaaggtaaaggttcagctacctacaaaaaaaaaaaaaaaaccaccaccaccaccatcacaacaataacaaaacacttcaagtcctatagaagttaaaggtgaggaaaaagtaaaaccgaactttagacaagttaaatttaagggccaggcgcagtggcttatgcctgtaatgccagcactctgtgaggc

SEQ ID NO: 2192 - DNA, 661 bp, Homo sapiens
  misc_feature [331]..[331]: Chromosome 5, SNP identification no. = rs10038818
  misc_feature [331]..[331]: allele = t, in linkage disequilibrium with rs12515791, respectively
  misc_feature [331]..[331]: n is a, t, c or g
gaataacatatagtttaaaactcaggatgaataggtatgacatgaaaaatagaaatcacaatggaaaagatcaataaatttatctacatacatttaatacttctttatgacaaatatcataaaggtaaaaggcaaatgataaactaggagaaagtgtttgctatcttgatgatgtttgagctggtgtctttgataggaatagggtatattctattgcttgcatgtgtagattctagagtcagatggtttaaatatgaattcccacttccagctgtcttaggttgggtttcctaggagcattggctgagagaaagattcttatacaagtganttattgagaaattcctctctagtaaaacctagagaagtgagggaagcaggacaggacaggacaggagaataagctagcaaaggtaaaggttcagctacctacaaaaaaaaaaaaaaaaccaccaccaccaccatcacaacaataacaaaacacttcaagtcctatagaagttaaaggtgaggaaaaagtaaaaccgaactttagacaagttaaatttaagggccaggcgcagtggcttatgcctgtaatgccagcactctgtgaggcaaagcagtaggattgtttgagcccaggagttataagccagcctgggcaatgtggcaaaacctc

SEQ ID NO: 2193 - DNA, 661 bp, Homo sapiens
  misc_feature [331]..[331]: Chromosome 5, SNP identification no. = rs10940380
  misc_feature [331]..[331]: allele = c, in linkage disequilibrium with rs12515791, respectively
  misc_feature [331]..[331]: n is a, t, c or g
gagggaagcaggacaggacaggacaggagaataagctagcaaaggtaaaggttcagctacctacaaaaaaaaaaaaaaaaccaccaccaccaccatcacaacaataacaaaacacttcaagtcctatagaagttaaaggtgaggaaaaagtaaaaccgaactttagacaagttaaatttaagggccaggcgcagtggcttatgcctgtaatgccagcactctgtgaggcaaagcagtaggattgtttgagcccaggagttataagccagcctgggcaatgtggcaaaacctcatctatacaaaaacacaaaaattagtcagtcgtggtagngcatgcctacagtaccagctactctggaggctgaggtgggaggattgcttgaacccaggagtttgaggctgcagtgagccataatcccaccactgcactccagcctgagcaacagagagagaccctgtctcaaaaaaataaataaacaaataaaaaaatttagccaggtttatttgagcaaaaaagtacttcatgaattgggtagcactcagaatcagaactgcaagagagcttcacccagcaactgtggacaggtagtatttatagacagagaaagatagtgatgatatacagaaacagcttgattgattacagccagctgtgtgtttg

SEQ ID NO: 2194 - DNA, 661 bp, Homo sapiens
  misc_feature [331]..[331]: Chromosome 5, SNP identification no. = rs6887141
  misc_feature [331]..[331]: allele = a, in linkage disequilibrium with rs12515791, respectively
  misc_feature [331]..[331]: n is a, t, c or g
acttcatgaattgggtagcactcagaatcagaactgcaagagagcttcacccagcaactgtggacaggtagtatttatagacagagaaagatagtgatgatatacagaaacagcttgattgattacagccagctgtgtgtttgccttatttgagcatggtgtgataaggccttatatgtacatggtttgatcagttgccagcctataattggctgaagctcagctctggtgactggctgagacacagctatttgttacaagaatatactcttaagttaggttacagtttgtaagttagattgcagtttgccatttagggactctcaagatntaaaggcaactttaagccaaatttaatttattttcacaagctgaagtctagccttagcccatcgtaatgaaagattagaggcaaacatggtaccactttaagggtgtcaaagcaaatgaaatatggcctgagaaggactccatacttctatatttgagtccttgtggatgaactgtaacctagcttaatagtcagacaagatcgaaaaccgaacttagaagtatgcgcctgtaacaataactgagtcttggcttatcccagcagccatacttcaaccactcatagaccgctaattgttctgtgttcaaacaaggcaaacaccaacctgta

SEQ ID NO: 2195 - DNA, 661 bp, Homo sapiens
  misc_feature [331]..[331]: Chromosome 5, SNP identification no. = rs6891736
  misc_feature [331]..[331]: allele = t, in linkage disequilibrium with rs12515791, respectively
  misc_feature [331]..[331]: n is a, t, c or g
attgattacagccagctgtgtgtttgccttatttgagcatggtgtgataaggccttatatgtacatggtttgatcagttgccagcctataattggctgaagctcagctctggtgactggctgagacacagctatttgttacaagaatatactcttaagttaggttacagtttgtaagttagattgcagtttgccatttagggactctcaagatataaaggcaactttaagccaaatttaatttattttcacaagctgaagtctagccttagcccatcgtaatgaaagattagaggcaaacatggtaccactttaagggtgtcaaagcaaangaaatatggcctgagaaggactccatacttctatatttgagtccttgtggatgaactgtaacctagcttaatagtcagacaagatcgaaaaccgaacttagaagtatgcgcctgtaacaataactgagtcttggcttatcccagcagccatacttcaaccactcatagaccgctaattgttctgtgttcaaacaaggcaaacaccaacctgtaatcaatccagctgtttctgtacctcactgctgatttctgtacatcatttccctttttttcctgtaaatcttcttccactacgtggttgtgttggagtctctgtgaatctgctgtgat

SEQ ID NO: 2196 - DNA, 661 bp, Homo sapiens
  misc_feature [331]..[331]: Chromosome 5, SNP identification no. = rs6450188
  misc_feature [331]..[331]: allele = g, in linkage disequilibrium with rs12515791, respectively
  misc_feature [331]..[331]: n is a, t, c or g
ctttaagggtgtcaaagcaaatgaaatatggcctgagaaggactccatacttctatatttgagtccttgtggatgaactgtaacctagcttaatagtcagacaagatcgaaaaccgaacttagaagtatgcgcctgtaacaataactgagtcttggcttatcccagcagccatacttcaaccactcatagaccgctaattgttctgtgttcaaacaaggcaaacaccaacctgtaatcaatccagctgtttctgtacctcactgctgatttctgtacatcatttccctttttttcctgtaaatcttcttccactacgtggttgtgttggantctctgtgaatctgctgtgattctgggggctgctggtttcatgaatcgttcattgctcaattaaactcctttaaatttaattcagctgaagtttttcttttatcatggtggcatcagaagtgggatctaaagtagggcttctagcgacccccaggagcactgagtgaacatgcaaggtacctgcaggacccacttatgtccactgatctctcagagagactggggatcatgggtaaggttcctctcatattttggagctccatggatttgttttttgagctctcggagtttctttgagcaaatttctgatccaaactgggtttggaagtc

SEQ ID NO: 2197 - DNA, 661 bp, Homo sapiens
  misc_feature [331]..[331]: Chromosome 5, SNP identification no. = rs6450189
  misc_feature [331]..[331]: allele = t, in linkage disequilibrium with rs12515791, respectively
  misc_feature [331]..[331]: n is a, t, c or g
tcctgtaaatcttcttccactacgtggttgtgttggagtctctgtgaatctgctgtgattctgggggctgctggtttcatgaatcgttcattgctcaattaaactcctttaaatttaattcagctgaagtttttcttttatcatggtggcatcagaagtgggatctaaagtagggcttctagcgacccccaggagcactgagtgaacatgcaaggtacctgcaggacccacttatgtccactgatctctcagagagactggggatcatgggtaaggttcctctcatattttggagctccatggatttgttttttgagctctcggagtttcnttgagcaaatttctgatccaaactgggtttggaagtcatgacagaaacaggactgggtccaggaacagatctgatcttttgtgttgtggcttggcccccagggctatggtatggtgagctgggtcactagggctgctcagggtaagggaatccagaagcctggcataccagcaaaagggtaaaaatttcttaccattcagatttctggcttccctctctctgtgcaaaccagttgaatgaatggtaaaaactactgtttattctcctctgtaaagttttgattaatgcaaaaaagaattctgaagctagccttaagctgtagcgaatctt

SEQ ID NO: 2198 - DNA, 661 bp, Homo sapiens
  misc_feature [331]..[331]: Chromosome 5, SNP identification no. = rs10940382
  misc_feature [331]..[331]: allele = c, in linkage disequilibrium with rs12515791, respectively
  misc_feature [331]..[331]: n is a, t, c or g
tgtcgtgtgtgtaatgtttatataaagagctctaattaattggcttaaacaaaaataagtgcttaaatcaaatattttgaaagaaaaataaaaactgtaatgccttttagtttacataactgtactaatctttaggaaataagaacagctttaaaaattattggcaaaatttaaacatttggtctaaattatgcaggtcagatattaagtttactaaatgctttcaggtcataatcagcttctttgacttttgaaagttgttcaatttacttaccttggatatgttagattctagatgaggcctgaggacatgtggaattagccatgcacnctagctatgcaaagaaggttgtaaagaagagagattttatataagaaagtatattgtatggtaaattcttgtccgaaagtaaaatgactggttgtttaaaaagagggatatttaggatgagtcagaaagtccaagcatgtcatagattgtctgcataagttgtgaaataatttatgaaacgcatttatccaagaaacgtacaacttaaaggtgattagggctcctaaatgcttcataaaatgccactatgactcttaactgtacagcatgcctgcttaacagctatgtaaagcctgtgacacgtggagttagatgctggaaagagtcaga

SEQ ID NO: 2199 - DNA, 661 bp, Homo sapiens
  misc_feature [331]..[331]: Chromosome 5, SNP identification no. = rs7703956
  misc_feature [331]..[331]: allele = a, in linkage disequilibrium with rs12515791, respectively
  misc_feature [331]..[331]: n is a, t, c or g
acttaccttggatatgttagattctagatgaggcctgaggacatgtggaattagccatgcaccctagctatgcaaagaaggttgtaaagaagagagattttatataagaaagtatattgtatggtaaattcttgtccgaaagtaaaatgactggttgtttaaaaagagggatatttaggatgagtcagaaagtccaagcatgtcatagattgtctgcataagttgtgaaataatttatgaaacgcatttatccaagaaacgtacaacttaaaggtgattagggctcctaaatgcttcataaaatgccactatgactcttaactgtacagcntgcctgcttaacagctatgtaaagcctgtgacacgtggagttagatgctggaaagagtcagaccttacctgaatttttgtctgggtcctaggttccacactggtacgtaattagaatcacttactaaccaggcttttcagcagaggtaaaaatcactaagggttaacagtataacatgtatatgagactactgaacaaaacagtttacatgcaaggtgtgtaaggaaagtagaatatacttttggtaaaagattattagaagtcatgggaatttgaactttttgcctagattaaacagttaaaggattgttttaaattaaataaagctaa

SEQ ID NO: 2200 - DNA, 661 bp, Homo sapiens
  misc_feature [331]..[331]: Chromosome 5, SNP identification no. = rs2407510
  misc_feature [331]..[331]: allele = g, in linkage disequilibrium with rs12515791, respectively
  misc_feature [331]..[331]: n is a, t, c or g
aaaaaaaaaaaaattaaccttgcaaaaaattctatgagtgaaaatactgactaaatttaaaggggtattatttggtttttccataaattgaacatcaaaataaaagcacaacaggtttttcttagagcactaatctgccctttaacaaaaattgtaaaggattataaaaggtttataaagttcttattttatgatcaaactaattaagattgaatacatttgtctgtaaggttttattaagaattgggtttgacatcaataatgcactaatgcaacagtgacatttggcttatttggtataaaaatcatgggaagcattaaaataatgttnaatcttcaggttatattttagtgatgatattaatatattttccaaaattatatatatatatatatatagggatttctaaaaccctaatatgtctgagtatatgatatcaatcataattaaggttataatgttaagttattgtagaccagagagataacgaaatttccttgtcaattgtgtttttaactatcactatttaaactcatttctacaattaattgcttaatgctcttgcagtttctaaaaactccataagcacacaaaaatcccagaatatgatgtcttttaagaggtcatgaaaggatagaaagaaccctgaaaagcactctt

SEQ ID NO: 2201 - DNA, 661 bp, Homo sapiens
  misc_feature [331]..[331]: Chromosome 5, SNP identification no. = rs10940384
  misc_feature [331]..[331]: allele = a, in linkage disequilibrium with rs12515791, respectively
  misc_feature [331]..[331]: n is a, t, c or g
ctggtattcattcaatgttaagtatggactcatgaagaatcaggatggctgccttgtccttcctgagtccttaaagcttttgttattaaaggttctgcattccatgacttgtcatggaaaagataaaatgatccaaattgaatatattgatgtggtgatttataaatcgcagaaatagttgaaagccaatgtttggttccatattcctgggaagacaataaaaatttcaggtacatttggctacctgataggccatttaaacatttataaaggaattttattcaattgtcattttcagtgcatgttttctggttatataaaagctttcccntgtaagagggctaatgttataacagtagattattatgccacagtatattttcactaggtaaagaaagctctttatggttcactgaggacaaccccttcacagtctagaacccaaagattggacatcagatgcccaaagatttggacacccaaagagaacatcagaaaaagaccatccttgccattcacactacagcaaaactttgggaccttacactttgggttcataatctcacaactgagaagggtccctccacactcttggaactgtacacctattgtaacccttaaggtaaagctaaccaggacagtttctccccagaataagatg

SEQ ID NO: 2202 - DNA, 661 bp, Homo sapiens
  misc_feature [331]..[331]: Chromosome 5, SNP identification no. = rs7701628
  misc_feature [331]..[331]: allele = t, in linkage disequilibrium with rs12515791, respectively
  misc_feature [331]..[331]: n is a, t, c or g
agtctctgtgaatctgctgtgattctgggggctgcccaatttgggaatcattcattgttcaattaaattcctttaaatttaattcagctgaagtttttactttaccaggtgtaggatgtcccttttcacaagtcagtcattgattattggccatcttggcatttgactccctttggggataattttccagagaaggatggaaaattgagttgttagccacaaacaatcttagcccctggaggatgggagtgctagatggattaggtgatttagggatagtactagtagcatcttctacagtaactaagtcatcttgattaatttaattaantctttaaagcttttgttttctcatttatgagaaaaattgtatggatgctatagaggtgtaagggaaatcacaaaaaatggtttctgtcagaaacatagcctaacaaaagcactcaaatgtttgcatttagagagtattatgagcataaatattcactattagcaaagtgggaaaatgacgaagactggtactatacaagggaaaacatacaattgtccaaaatatagaactgtttattctttcactgcaaacttaaaatgcattaccatttatttcctgttaaagatacaaaatccaagataatgctcagtgttggcaaggtgtccatgt

SEQ ID NO: 2203 - DNA, 661 bp, Homo sapiens
  misc_feature [331]..[331]: Chromosome 5, SNP identification no. = rs968813
  misc_feature [331]..[331]: allele = c, in linkage disequilibrium with rs12515791, respectively
  misc_feature [331]..[331]: n is a, t, c or g
aataatacatgctctacagctatgctgtccaatacactagccatcagccacatgtggctactgagcactagaaatgtgtcaagtctcaatcgagatgtgtggtaagtgtaaaacaaacctcagatttcaaagacttagcatgaaaaagaacataaaatagttcattactgattttaaaatattgagtacatgttaaaatgataatgtttgatatcttgggttaagcacaaatctattattaaaagtaattttacccagttttgctttttaaaatgttgtttctagaacatttttaattacacatgtggcttgcatttgtagtttgcattgnattgctgttgaacagccctgctctaaagagtcctatggtttctaacagggttcttactagaaagaggtgaagaattaccaaactctgctggaattctctagaataaatttttactttaattgatcttggaaaaaatggattttttttcttttattttagtgtctgatttaaatttctttatacaaattcagtatcatttttttctctcttccataaaggcgcagcacagatggttcagagaaaccattattctacataaagtcttttttataaaatgtggttacatgaaattcagtttgattaaaacaaagggagccattcctcaaacac

SEQ ID NO: 2204 - DNA, 661 bp, Homo sapiens
  misc_feature [331]..[331]: Chromosome 5, SNP identification no. = rs12515078
  misc_feature [331]..[331]: allele = g, in linkage disequilibrium with rs12515791, respectively
  misc_feature [331]..[331]: n is a, t, c or g
acagtgaggaggctggtgtggctggaatggagtgagccatgggggaggagtagaaattgtgatcagtggtattgagagccacatcagttgtgtgaaccctcaaaagcactgtggttcttaccctgagtcacacaggaatccagggaaaggttttgagcagagagatgtggacaaatctttatcttagcaggatcattctagcagctttgtacaagtaggctgaagaggcacaaggacagaaatgaaccacatagtaggatatttaatataggtgagagtcattggcagcttcagccagagtggtagcttggaaaggtaagaagttgttcanaatctagatataattgaagacagagttggcaggttctattaaatataagagtggggtttgaggaagttgaggatgactccaaggtttttgatttgagcacctagattgatggagtctggaagattgtaggaacatcaggatttggaggcaaggccagaatcttgcttttcatcttgtttgagatgcctattagtcatctaagtggacatgtcaagcaggccattggataacaagtctaacaaattgggcatttaattgcatggaagaaacaccagaaatgagtcacagggaagcatctgactctctgtgtgaaaagcaggataatttctt

SEQ ID NO: 2205 - DNA, 661 bp, Homo sapiens
  misc_feature [331]..[331]: Chromosome 5, SNP identification no. = rs2194235
  misc_feature [331]..[331]: allele = g, in linkage disequilibrium with rs12515791, respectively
  misc_feature [331]..[331]: n is a, t, c or g
ggcaaggccagaatcttgcttttcatcttgtttgagatgcctattagtcatctaagtggacatgtcaagcaggccattggataacaagtctaacaaattgggcatttaattgcatggaagaaacaccagaaatgagtcacagggaagcatctgactctctgtgtgaaaagcaggataatttcttcaaacctcaatttcctcatcattgaaatgggagtaacaaccagtgttgtgaaggtttaataagatgataaaaggacctagcacagtttttttgagcaataaacagtaaatattattaataattacttactatttttacattttcctncctgagtagaatctacagaaaattaagtcacttgacctaccatttagtttccttgtcctaagaataaaggaatctctgagtatttttaatgggcttggtgacttacaatttcttatagctgtcatataggtctagggtaaagatgcaatttttttcctgttttatagatgaggaaacagacttagaagtaaaataactttcccaaagttacacaactagtgtcatcttcgaagatcagtttttcaattatttttaatttaacacattgcatctttaagaaccttctcaaatatatctactttttactgacaccgattttaaaaaatgaac

SEQ ID NO: 2206 - DNA, 661 bp, Homo sapiens
  misc_feature [331]..[331]: Chromosome 5, SNP identification no. = rs6870110
  misc_feature [331]..[331]: allele = g, in linkage disequilibrium with rs12515791, respectively
  misc_feature [331]..[331]: n is a, t, c or g
agagttaaaattgatcagaattaaatgctcttcactgtctaagccttcctctggagttttaatccttcaatagactccagagcttcaaaatagctacatccgatatattctgccagtgaaattgttgtctaggtggggtgacagattcctggtgcttcctactttgtcacttcctcagaatcctccctttttatatgtgtcgtgtcactaaagatatgcattttagttaaatttgaaaatatagatcaatgtggtatggtagccagactccaagatggccccacctccagatattcatactcttagacagtctcttactacattatacctnagttgtcttgtatgtacaatgaatatgcgaaagtaatgtgttaatgctgacaactagtttataaaagatacagcaggctgggaatggtggctcatggttataattccagcactttaggaggccaaggtgagtgatccacttgaggccaggagtttgagaccagcataggcaacatagctagaccctgtctctacaaaaaaaaaaagtagaaattagcttggcatggtggcatgtacctgtactcctagctgctcaggaagctgaggtgggaggattatttgagcccaggagttcaaggctgcaatgagccatgattgtaccactgcactc

SEQ ID NO: 2207 - DNA, 661 bp, Homo sapiens
  misc_feature [331]..[331]: Chromosome 5, SNP identification no. = rs12515791
  misc_feature [331]..[331]: allele = c, t
  misc_feature [331]..[331]: n is a, t, c or g
ttgagcagcattattcacaatagccaaaaggtagaaacaacccaagtgtccatctatggatgaatggataaacaaaatgtggaatacacagataatggaatagtatttaaccttaaagaggaatggaattctgatacatgctacaggttgagcatcacaaatctgaaaatttaaaatttgaaatgctccaaaattcaaaacttttcgagtgctaatgtaacatgcaaaggaaatgttcattggagcattttagggtttgggatgctcaactgggtaattatataatgcaaatattccaaaatctataacacttctggtcccaggcattttngataaggcatattcaacctgtggaacatggatgaaccttcaagacatgatgctaaatgaaataatctagacacaaaacaacaaatactgtatgattcttcttacaggctatacctagaatagtcaaattcatagagacagaaagtagaagattggttatgggaatgagggaaaaaattaaaggggacttattttttaacttttaagttcaggggcacaaatgaaggtttgttatataggtaaacttgtgtcatgggggcttgttgtacagattatttcatcacccaggtattaagcataatacttattagttgtttttcctgatctccct

SEQ ID NO: 2208 - DNA, 661 bp, Homo sapiens
  misc_feature [331]..[331]: Chromosome 5, SNP identification no. = rs26579
  misc_feature [331]..[331]: allele = g, in linkage disequilibrium with rs254778, respectively
  misc_feature [331]..[331]: n is a, t, c or g
ctgggagtgctttaacctctgccgccattccgcttcgtcttttcctgcaataacacctgctgccacggattgagtacacctgaccagatgtagtcaaaataaaaggtcaagaaaagaaaaggaaagccccacctttcttaattccgtttggaaagagccagagctgccaaatccattacataatgccagttcaagctgacacctgtgcctgccctggagctagatcaggttctggcgactgctccaacctggaacgccggctcagtagcgcccaagccgaaggcgaaggggaagaggaacgaagtgtgggatggggggcggcccctcattnggggttcaggtagggattggattctgcagggaatgctccaagggttgctccctaataatttgggactgcgataaaaaaaaaatagccgcagtttcgaagtcccagagctttatcaggaagcattggacgcccctttctcctccagactggggcgggcttccagggatgccccctccgaccccgtcaccagcggaggactcatctgccgcggggctgccggaagctctcactcccgccagccccctgggtgctattgatgcggaccttggaggtgcctgcggcgtggcctaacacgtggacgcggcccataacccgccccggctgctgctt

SEQ ID NO: 2209 - DNA, 661 bp, Homo sapiens
  misc_feature [331]..[331]: Chromosome 5, SNP identification no. = rs27732
  misc_feature [331]..[331]: allele = a, in linkage disequilibrium with rs254778, respectively
  misc_feature [331]..[331]: n is a, t, c or g
gtcattatattggtgtcttacagaactgaaatttttcattataagtaaaaaggagatacaggtggaagattattgaaatcaaataaaaatcttatagccctggaaagaaaaaaaaaggaaagctatggttaagaagcaagagtagaagctgtgagtagttactaccagtacagaaagcttgaaacagacttgtattcccaccccaatcaatgcttctcacaggagcacattgaatcctctgttatgttaattctggcaatctctatgtcttctgggtcctaccatcaaacctctgaaagcaattcaaatattttgccactccctttgaccntttattttttaaatctgagattagaattgtggaacacatagtggattgatataaagaggaaaatcaagcaccaggaataaagattataaaagagttagctccttgaaggttgttggtaatagaccaatcatgccaacataaaaaaattaaatactactttaatgaaatttcatacttttaataaattactttcatcttgttagttctgatctagaatatctttgtatttaacataaatgagataaaattataaagagattcatcctctattttccattataacatgcataaagtaagatttcaaaaatttaaataaatgtgtcagaatat

SEQ ID NO: 2210 - DNA, 661 bp, Homo sapiens
  misc_feature [331]..[331]: Chromosome 5, SNP identification no. = rs410671
  misc_feature [331]..[331]: allele = a, in linkage disequilibrium with rs254778, respectively
  misc_feature [331]..[331]: n is a, t, c or g
agtaagatttcaaaaatttaaataaatgtgtcagaatattcatggaaagtattcagctgtgagattatgtacttatttgaataaagtgtctttttacaatatatttggattcttctatttctccacttcctccttttttcctcctctctcatcctcatttttctcctcctcatccattttccctttctcttcctcccattcattttgtcattggaatctatttctgagacacatgagaaaatgaacctcattagtttattttttccttaaaatggtatttttgaaaaaaaaaagcagaagatgtcaccttcaactgaggatgatatgccantttgaatagcatatcctctgactgttgcagacattcagaactatgtgtgccatcccaaagaaggtcttcaatggcagctattttttaaaatgttgttttacagtcacattcgatttactattagattatcctcgaattaaaatagctgataccataatactaaatactaacattttaaagctattgttatgatgtgtttaccattgccattacttttaaaaccaaggaaagcacagtctggtaagacacaatcagcagtgagatacaatcacaacaccacataagagaaatgtaatgtatcatagctagccctagaaaaataacattcat

SEQ ID NO: 2211 - DNA, 661 bp, Homo sapiens
  misc_feature [331]..[331]: Chromosome 5, SNP identification no. = rs34959
  misc_feature [331]..[331]: allele = g, in linkage disequilibrium with rs254778, respectively
  misc_feature [331]..[331]: n is a, t, c or g
tgaattattcattagtctaaagtaaattaacatttagaggcaggtgacacacattttcttgaacaattattatcactaatcatcattttccacagtaatttgtatgctctcattattagctcttgatttctatgtaaatcctttccataaaactgccacaagatggaagtttttttattggctctctttacctcttgatatatttcttggcattttggcattcctcatctggcacttgatggctgggttttcagattaggctgactgttgacatgcccatataaaacattctttcattgagcatattgcatttatacaggaggccaccttntcccaccttctgccatattgtgcccatatttttttatgtcaattgtccaaacattgactctcacattttcccccttttgatttttcattgtgcaccacatttgacactttaactacttttactagttgtccatgccttgtcacaaagactgaaactgacacaggttttgcctaaacagttgccttgaataagtacatttgtcatatggatatccccttcaaatcctttagaacaccttggatacttttctgctaatcttttcttacagttatttgggctccaggactcagctacgtgaagggaactatcattctttgtaacagttatttc

SEQ ID NO: 2212 - DNA, 661 bp, Homo sapiens
  misc_feature [331]..[331]: Chromosome 5, SNP identification no. = rs639725
  misc_feature [331]..[331]: allele = a, in linkage disequilibrium with rs254778, respectively
  misc_feature [331]..[331]: n is a, t, c or g
cttatttctttcctttagcagcaaaccagaggctggcataactggtacacgctccaggtggcaaactagccaaaatggggcttcatctgttttgttcactgtggcaccctaagctgctagaatggtacctggcacagaagcaacttccaaaaatatttcatgaattagtgaatgaattatatgaataaagtattccatgactgttgggacctttaaactggtttaaaaaatagcttaatatgttaatacatttagatctattttatctatggtaatccctaataccatttaatataagaatgaaccatcatttttcatttcctctactganggacagttaatttgcatgtatcaacatgggaaaaccttaaaaacataagttttggagaaaaagcaaatgtctagatacataaatatgtagtacaagatttccaaaatgcacaggagaaatatatattaacttttagagagtggctacctgtggaaagaaagaaaaggagagtagacaggattagaaggtggagggataatttttacttatttattttctttaaaaaggctacatgaaaattaagatctttcaaatgtgaatggtggttaataaatttttgatattctgtaattttgttagcatttttctgcacatttgaattattttaca

SEQ ID NO: 2213 - DNA, 661 bp, Homo sapiens
  misc_feature [331]..[331]: Chromosome 5, SNP identification no. = rs454214
  misc_feature [331]..[331]: allele = c, in linkage disequilibrium with rs254778, respectively
  misc_feature [331]..[331]: n is a, t, c or g
aacataggtgaaaaaggaagctattaacctgctactaaggtcttgttgaaagccgtgcaagcattgtgaatctctgccttgccattcccattttagttcaggtcaactccaacttgatgattaacaagctaggaatgcccaacaggcattatgagtcaaatggaaatggtatatcaagagtaccggcagcctggccatggcagcattttggttttacatgaaaaagtggcagctacccctgtggggacttccttatccctgactccaccatgtgtagcaaaaccaatagttcaatggaattctattcacagaggttttcctaaatattccngcctagctcactgatgatttaactaaattaaaagctgatagtatctactaggaggcagtaatcatccagcttcaatggcagactggaagactgtggtaaggacctgtcaccacaatgagttgaattgaaagccattatccttgccttacacaatacttctgagggccacacatgttgtatttttactgattctttgtctgtagtcaatagcttagacatctggtctggcagaataaagacagccctgtttaagggcaacaaactaaaaacaaattgtggttgctgatcgaataatctgggtcactcagtacatacctttgtaaagattca

SEQ ID NO: 2214 - DNA, 661 bp, Homo sapiens
  misc_feature [331]..[331]: Chromosome 5, SNP identification no. = rs410216
  misc_feature [331]..[331]: allele = g, in linkage disequilibrium with rs254778, respectively
  misc_feature [331]..[331]: n is a, t, c or g
agaagaaagaggcactggatgttgggtggctgaaagctcacaagacaaaatgtagtgatatagacaaggacaaaaagagagggacccctggacctaagcactctccagatgccagaggtgcacagagaaggaagcagcactggggctaagatatccatcttagagtcaagggtcaaggggaatgaaaaggctaaaaattatgtttcttcctactattcccaccaatggactagcctcaccagcaaccctgcacctcccaacctcacagctggggaatagcatgatctgggtactgctactgtaccccttgatgagcatgcgttagactccntgacctgtatccctgtagggaaaaatgcacctgaattcaactgatggagtctaggcaaagttcacagtagacaaataaactaaagtgaccttatgggtggggcatttatgctaccactatgtactattgtgacttccacatctgaacatgtaatgaaattaaggtggtatgtgcctatacttccctgttccatcagtgatagacaggacccatacaggaatcactacatgcaccctccctttagggtggtcaagaacaataaaaacccagagggagaaaagaaatcacagcttcagttaaagacttaaaggctgccagattctcagagag

SEQ ID NO: 2215 - DNA, 661 bp, Homo sapiens
  misc_feature [331]..[331]: Chromosome 5, SNP identification no. = rs1659074
  misc_feature [331]..[331]: allele = c, in linkage disequilibrium with rs254778, respectively
  misc_feature [331]..[331]: n is a, t, c or g
gtggcagaaacatgtttcttttttaaaaaggaaggacaaggctcccacagttttcattcgaagatatgaaaagaccccctggaatccagtagctaatgttcttgccgaagtggtagatggggtatgggtggaagtgggtaagagttccccactgttttacttgttaatgaggataaacaatgagagctaaaattgaagcaagctacagaaatggtgtcttagctgttgctcactctcctacaaatggccagaggaagggatattaacattacaaaaggaacagaaaactccagctaaaagatagtgtggctgtggctatggagtcaaacanttcctaaaactgaaataagtgatgtcagaaatagggattttgctcatcaatatagacctttaggtaaactgcaaacattagaagtttggttgcaccatgagcaggcagcctctcaaaagcaaaagtgaacagggctggccatgcctgtctacctggtctctgctatagtcaaacttgcctagcaagaagaaagaggcactggatgttgggtggctgaaagctcacaagacaaaatgtagtgatatagacaaggacaaaaagagagggacccctggacctaagcactctccagatgccagaggtgcacagagaaggaagcagcactggggc

SEQ ID NO: 2216 - DNA, 661 bp, Homo sapiens
  misc_feature [331]..[331]: Chromosome 5, SNP identification no. = rs254776
  misc_feature [331]..[331]: allele = g, in linkage disequilibrium with rs254778, respectively
  misc_feature [331]..[331]: n is a, t, c or g
tcctcaaacactgatgtttgcttgtgttgggtgtgcacagccttgtggtggtgacagacaaaggacagcaaaagccaacatgggaaatcttttgctatcatagagttcattttccaagacaaatatccacgtagataaaatcaagacttcttttctactgttgattgtatcaatctaattcatgttcatgaactatatatatgttatgtatgtgtgttatatatgtattatgcgtgtgtgcatgtaaatgctgaacgtcaattagaattatatacacatatttgatcaaatgcattaacaacaaatagtttctaatgctttatgaaaaatntttgttttaatgtttgacatctttttttcttaataattaagagaatattgcaatgtctactgtcctcctcccatttaagcatttttttctattgatcatatgtacttttctctgaaattcatacactcatgaaattccactgctagcttcagaggacttaagcagataggccttgcacttaatttcactaagtgcacctcaaaatgtacccgggccttttatttttatttgtgttgtcctttatttaaccctcaaagacgaatggctgaatgatcaattttataagaaggtgctttaatattaccggttgcattgactgtcactcttggt

SEQ ID NO: 2217 - DNA, 661 bp, Homo sapiens
  misc_feature [331]..[331]: Chromosome 5, SNP identification no. = rs254778
  misc_feature [331]..[331]: allele = g, a
  misc_feature [331]..[331]: n is a, t, c or g
gaagcagcctttggaaagaaaatgccagtgtgtagagcaaacctcaggactgataggctcgcctctaggattctccaggcacagatggcctcagctgtcagttctggatgacacgaccacaaccttaaggttagcagtttgcttctctattgactacactaactggccaaagagccttacttaagcaagcagttttctataattaaatcacaaatattaatttagaattcatcctataaggtttaatttactctgcctagttaataatcagtttatcctatcagccatctaatattaagactataaatctagagatcttggctgaatttcngttgcttccttgctcattgccattgtaacctgctcccctatgaccaacccagctatagtattagaacacagaaagcatgtcattcttaccaactcctgtgtccataacaatcagctgaaattgcatggagactatgttactttttggtactttcaaattcatcagctaaatttccaagtaagatttgggaggctgaaaataatatttttcactattttccatcttttcattcttcccatttactatcctggtttatgtgctttgcatgtgaaaaagattatttgagcaaatcaaaaaacattttctttactttagagttctactggcaat

SEQ ID NO: 2218 - DNA, 661 bp, Homo sapiens
  misc_feature [331]..[331]: Chromosome 5, SNP identification no. = rs40504
  misc_feature [331]..[331]: allele = g, in linkage disequilibrium with rs254778, respectively
  misc_feature [331]..[331]: n is a, t, c or g
ctctcatttgtaaaaataaacgagtatatcatatagaatatttctggaataaatgtttgaagaaagtaattgtttctgtaactatcacttctagaaaagcctgtgttttgatatatttagcactagtagtgtgaagctttgggatgaatacctgcacagctcggctttctctgtaagtggagtaggtgctttgagcattagtaaagtaggatcctaccaaattatcttttgggaacgtgatattcctaaagaaataaaatagcatactgtggtcatcataggaaaaatcagaactttgttgacttcttttaccattattttacagagtagncttgtgtttactttgagtaacttgtgggagagtagggctcccaatcttttcagtgattagcacctatcaagttttaatggagcctcagcaaccctctgagttagtgataaactctgtgacttggagaaaatcagtgcttagagggaataagtaagttgacaaatgttacttagcttgtaaggggcattgttggtttaattattaaccaagacctctcaaaaaaactgcacccttgtcacagtgtcatcaagtaggttaaataagatcatgtaggtcaagtccattgtagtgaaggaactgttagtgtcttgcccccactcacaggccaac

SEQ ID NO: 2219 - DNA, 661 bp, Homo sapiens
  misc_feature [331]..[331]: Chromosome 5, SNP identification no. = rs34316
  misc_feature [331]..[331]: allele = a, in linkage disequilibrium with rs254778, respectively
  misc_feature [331]..[331]: n is a, t, c or g
gcttgcgtatattgcatcactgttaccagtattcaagcttcatattaccaaaaatcttttaaaataggattagatataacaatactcgcagccgtgtaaaatgccacttatggatcttttacttgcaatgaagaatgttgcctaaaatgttactctaggacgggttatgtaaaataatactccctcagggctctgccctaaagtctggaatacaaaggatttactgtgattaaaaaccatactagctttgcaaatacaataaatggtaaattacagataaggtataagggtaaagatagaccaagattgtttacagaaagtgactcatcanaatcaaaattgtgcttcttctcattaaatcatcttttaaaaattctcagattatcccttccctatcttgccaccactttataagaattcagtagtgggaacaagagatgactggcatccattttcaagtgattctgttctcttcatgttcttataaaactattgtcagaactgctataaatagccaaggcttctgctggtactttagcttactttatcttcagcattaaaaattcactttttctttgttgctgaggcaaattgcaggttaaaaaactaatatggctatttcttcatattttcatgtaatgaccctttcccacccactggt

SEQ ID NO: 2220 - DNA, 661 bp, Homo sapiens
  MEF2C
  misc_feature [331]..[331]: Chromosome 5, SNP identification no. = rs254780
  misc_feature [331]..[331]: allele = g, in linkage disequilibrium with rs254778, respectively
  misc_feature [331]..[331]: n is a, t, c or g
ctctcagtggtcataatgacattgttagtgccaactaattctctccactggaaagcagcataattacatacattagtaagtaggcttgctttcctttgtttaaaatgggtgtgtctgtatggataattcttcacttggattcttcctcagtaaaagagagtaccatgctcttttgacaatatagtcaagtaatcctgactctagctctggaagtcagtgtaattagtgtaagaagagtaaaagcatcttaaaattgatgcgagcaatgccactatggtttatcctgatcaaagtcattgtgattgctaatctacacttaagggcttaatanttttttcctctagaattccaagtttctaaattttcccagattttggaaaaaggaaaaattattctctctgggaatatatgaggattaaggattataaacacagtaaaatcacactacatccttcttggcaacaagctttccttaggcaacaccagattcatcaactaatgccaatgataaataagaggagtggtagcctaagaaccgcacgcatcagggagtgactaacattaataaaattgaggtcattgtggaacacaaagtattttcatctcatgtaactgcaaaaggatgaagaaagtcaaattatcagttttaatggagtagaaa

SEQ ID NO: 2221 - DNA, 661 bp, Homo sapiens
  MEF2C
  misc_feature [331]..[331]: Chromosome 5, SNP identification no. = rs34321
  misc_feature [331]..[331]: allele = c, in linkage disequilibrium with rs254778, respectively
  misc_feature [331]..[331]: n is a, t, c or g
tagagccaggaaaattctttattccagaaatcaaaagacgatttcctcaaacatcagaatgaatcactaagtaactttgaaccaagataaaatagtctaccattatgaatccttttgaaatacaggtgttccctctccccattttaacaaggcttatttaattaaaacttttggaaaattagtaaactgatagactataaattaataagctacaaataaatagctccaaatataaacaggtgtttgaaaattatatacagtcagtgtagtttcttgatataaatgctaacactgctttgattatataagatcataaaagctagagaaaganacgcttattaaggaaacaaataattctcctttatattattctctacattagctcatctatttattaataggagaaggaaagtaattctttgccagtaggtggtgcttttgtacaaaacatcactcaaagataaactcgtttctgactaattttatatcactatacatcttgagtttgtattgcatctcccaaaaagccagccccaagttacttcactttttttctgaaatatatactttttctctcagtggtcataatgacattgttagtgccaactaattctctccactggaaagcagcataattacatacattagtaagtaggcttgc

SEQ ID NO: 2222 - DNA, 661 bp, Homo sapiens
  MEF2C
  misc_feature [331]..[331]: Chromosome 5, SNP identification no. = rs34320
  misc_feature [331]..[331]: allele = t, in linkage disequilibrium with rs254778, respectively
  misc_feature [331]..[331]: n is a, t, c or g
aagctaagtaagcaacacaaatttatttgctatagggagagagatggctgacagaggaacttgccatcaagagttaatgaaagtcctttgaatactaatatttgatttagtgtaacactaagttttagtgtttttctaaaccaccacctataaaaagggcagcctgttttctggaagcatttccatacgtcaactttgttgatgtgggtgttcagtacatactgagagagataactctgagtagagatgacttataaaaggttaggttaaatatagtttgatagtctaatttccaggcggaggcagtaaaaattttgaataaaactatccngtcatgtttgatttctgaacaattatgggaaagggtaggagttttcccaattcaaaagcatctgtaatagatgaaaatttgcatagaggacttgatatgggtaacttgcatatctggcttctatctccccacccacctctttatcacccacccacacatatgcagtatttcacaattatcagggtctataattattcgtgtctatattttgttctcaagtagaccaacatgcttatatctgaacctagcatatatgcagttaagttattttaatgctacttttttcttttcaagaaaatacttctttgttaacagagactagccattcta

SEQ ID NO: 2223 - DNA, 661 bp, Homo sapiens
  MEF2C
  misc_feature [331]..[331]: Chromosome 5, SNP identification no. = rs187270
  misc_feature [331]..[331]: allele = c, in linkage disequilibrium with rs254778, respectively
  misc_feature [331]..[331]: n is a, t, c or g
taatgaggtactttataacatagtatttttacaatatttatgtcctcaacacgctgacaatgagaaagtactttccacaatttctaaatgaactttctcctgttaattagcaaatcctttcttagatgtattgcaatgattatatctaatacatcgcatgcctacacactgcctcaattcatctttccatacatttacttcatgaaaatagctatctctcaaaagcaaattaaaatcctaggcattttaggaacaaaggttatattttacatcaaaaaagaattgtagcacctctaaggaagataaataaataagaaattttaaatagagnttatatccccagaccctgtcatttttctttcttctgggtctgcatgcctaagatgaagataatgttatgggaccaaattcaacaacaaagagacttacatcagtgttctacaaattagctttgcttaagagcaagaacgtttaaaaccaagattcggtagacaaatttagatcattctgcaaacacatttatttcttttttctttctctgctctgtggcaagcttcagggtaaaacagtcctgtgagctgattagtttattatggcacagtgcagattaattttgaatatcaaccaaaaacatcacataatatgcaacattcccttcaga

SEQ ID NO: 2224 - DNA, 661 bp, Homo sapiens
  MEF2C
  misc_feature [331]..[331]: Chromosome 5, SNP identification no. = rs190438
  misc_feature [331]..[331]: allele = c, in linkage disequilibrium with rs254778, respectively
  misc_feature [331]..[331]: n is a, t, c or g
tctctacgtcccataagcagagtaataataggtaatgaggtactttataacatagtatttttacaatatttatgtcctcaacacgctgacaatgagaaagtactttccacaatttctaaatgaactttctcctgttaattagcaaatcctttcttagatgtattgcaatgattatatctaatacatcgcatgcctacacactgcctcaattcatctttccatacatttacttcatgaaaatagctatctctcaaaagcaaattaaaatcctaggcattttaggaacaaaggttatattttacatcaaaaaagaattgtagcacctctaagnaagataaataaataagaaattttaaatagaggttatatccccagaccctgtcatttttctttcttctgggtctgcatgcctaagatgaagataatgttatgggaccaaattcaacaacaaagagacttacatcagtgttctacaaattagctttgcttaagagcaagaacgtttaaaaccaagattcggtagacaaatttagatcattctgcaaacacatttatttcttttttctttctctgctctgtggcaagcttcagggtaaaacagtcctgtgagctgattagtttattatggcacagtgcagattaattttgaatatcaaccaaa

SEQ ID NO: 2225 - DNA, 661 bp, Homo sapiens
  MEF2C
  misc_feature [331]..[331]: Chromosome 5, SNP identification no. = rs34318
  misc_feature [331]..[331]: allele = g, in linkage disequilibrium with rs254778, respectively
  misc_feature [331]..[331]: n is a, t, c or g
ttgtctaacttgatgaattacttaacattctcccagaaaattaacataacagtgccattgacagagccttgcttgtatttagctattatttctggtaactggtttgcatttcccttttccgtgtaaaaaaaatatatatatatatctggtgaacttcactaggctgatgttctaggataagaaaaacattttcttttaaggctttcaatttatagttggaaaaaaatcagacactaccatcggtcaatctctacgtcccataagcagagtaataataggtaatgaggtactttataacatagtatttttacaatatttatgtcctcaacangctgacaatgagaaagtactttccacaatttctaaatgaactttctcctgttaattagcaaatcctttcttagatgtattgcaatgattatatctaatacatcgcatgcctacacactgcctcaattcatctttccatacatttacttcatgaaaatagctatctctcaaaagcaaattaaaatcctaggcattttaggaacaaaggttatattttacatcaaaaaagaattgtagcacctctaaggaagataaataaataagaaattttaaatagaggttatatccccagaccctgtcatttttctttcttctgggtctgcatgcctaa

SEQ ID NO: 2226 - DNA, 661 bp, Homo sapiens
  MEF2C
  misc_feature [331]..[331]: Chromosome 5, SNP identification no. = rs13158247
  misc_feature [331]..[331]: allele = c, in linkage disequilibrium with rs254778, respectively
  misc_feature [331]..[331]: n is a, t, c or g
tgcgaaaatggaaatgcttcacggaggccttgagaaaagtttgtttttttttttttttttttttttttttttttttagcattttctacagtaaactctctgagaaattccaacaaagcctatgtctttttgcccacattttaaacagtgattcagggcagcagtaggggaaaaaaaagtaaatatacattgtagcttttcattcagtaaatacctcaaaactaaaaaaattgattttaaaagccttctatttttctcttggaatatttcctgttatttggaaattacgccattttagaagattagtcacatattttaaggtgtttacatantgaaatgtaaaatattttgaaccatgatgacacttcttaaattcatatttttagagcatcaagttatttttaagaacaaataaattctgctttttgctagtgaatttctgctgtttttagcatattgtgccagctagcattttggagccgtataataaccatttctgtttccagccaccaaattgttattctttggacataatatagattcaggaatgcaagactgtggatcctaaaccagtgatatagaaacctatgatttgaaaatcaatgatgaatacatgcgtgtggtttactgctaagaagagcctgcatttaaaccggctggga

SEQ ID NO: 2227 - DNA, 661 bp, Homo sapiens
  MEF2C
  misc_feature [331]..[331]: Chromosome 5, SNP identification no. = rs618298
  misc_feature [331]..[331]: allele = a, in linkage disequilibrium with rs254778, respectively
  misc_feature [331]..[331]: n is a, t, c or g
aagaaaaaaaaaaacctagtcctcaaattagatagctacagcatgtggtatgcagctactgccaagaaaatcagtgttcactttccatatacaaaaccaagcaaattatagataaaccattaccttgataccattctctaggggctcatgttgaagtgggaaaggcaggtcaaagacaagacaaatgaaaaatgttacaggttaagtcaggatgttgtaaaatatgccttcgacccctttggtttgacttcattcttaaggagtttgatttccagaggaaaaaaagaaaattttaggttataacttcctagagagtgttttagcagatttnagagccctttgtttatcctgatttctgacttcacaaattgtatcctttttattctctatccttctatatctacagtaaagtactgtgaagattggtttctttactcatatcccattgatttaacctaatagtgtgaaggataagaaaaccttggttgtttttaatattaaattcaagccgttaatatttccccctgaaatactagttttattcagaatttgtctttttttctcaaagcagtcttttctctttatacacctattaggttcctcttccctatctttggcatcatgataagattttatttggagataacacagaaaggaaagc

SEQ ID NO: 2228 - DNA, 661 bp, Homo sapiens
  MEF2C
  misc_feature [331]..[331]: Chromosome 5, SNP identification no. = rs616391
  misc_feature [331]..[331]: allele = c, in linkage disequilibrium with rs254778, respectively
  misc_feature [331]..[331]: n is a, t, c or g
cttaacctgtaacatttttcatttgtcttgtctttgacctgcctttcccacttcaacatgagcccctagagaatggtatcaaggtaatggtttatctataatttgcttggttttgtatatggaaagtgaacactgattttcttggcagtagctgcataccacatgctgtagctatctaatttgaggactaggtttttttttttctttaatcttgataaacttggtttgggttaaaaatatcattgttacttaatttcataaataataataataaagcaatgccgttagttatttacttatgttttgggtgaactcccaaggtaaaactgcnaatgaattcagaatttttaattcagaacaattcaaactaatggaacaatactttcaaaacagaacccaactattaacctagatttttttcatttgctgcttaataatattttaaaaataatataaaaattatatctttatactaacaattagttttcttatttgagggtaattaagtatctttctccctttcttgaatattgcaatcttaagttatgttttcctgggcaacaaaaaatgcaaacttgttaaagccaactttttaaactaaatttttaaccacttcactgatattttaagtcactaagtaagaattgcagagaagtctttc

SEQ ID NO: 2229 - DNA, 661 bp, Homo sapiens
  MEF2C
  misc_feature [331]..[331]: Chromosome 5, SNP identification no. = rs625970
  misc_feature [331]..[331]: allele = t, in linkage disequilibrium with rs254778, respectively
  misc_feature [331]..[331]: n is a, t, c or g
cagatgccacttagtctcaagcttagctgtcatgtcctactcataaactcagccatcttccccttctttctcatgccaaccagtatcatatgtcaggctgaatatatccgtgctgatgtcagagaatcacataacaccagaggaaaacaaggccagccagaatgttgctacattttcagagaagaaaaccaaagcaaaaaggccaaaatatagcttccaaattttgcatattgtcattgaaattcaaggtttcagataaagtttgaaactcttgaggccaagtggcgagactgcaattacgttactttttagcagctgcagtttttttctnaatcaagtcatctcactttgttaaaaaaaaaaaaaaagtgagagggagggagagtctcatgaggcaaggaagtaaattgaacatttattttgtgcctataaatactaaaagaccaaaaaggtaagcatgctttttttcagctcagttttatcataaagtgtagcatctttcccatccagtgcctgagccatccttttctcatcataccatcatccagtaagtttctagaacatcctaattcatctccctgctttatattgcatcctgcttcagtctccccaggactgcttgttctttcttaaaaccttaagctaactgtaggtcatcatt

SEQ ID NO: 2230 - DNA, 661 bp, Homo sapiens
  MEF2C
  misc_feature [331]..[331]: Chromosome 5, SNP identification no. = rs599402
  misc_feature [331]..[331]: allele = g, in linkage disequilibrium with rs254778, respectively
  misc_feature [331]..[331]: n is a, t, c or g
aaagaaaattggtttacaaatacatttttataaatatatctatttgagggtagagtttctctgttctgatgctggctcttcactaattcactgaataatgaagaaaaagtattagacctacacagtgattagcaaacaagatgaataacactagcttcctattttatatatcttttgaaaattaggtcgagccaaattagtgtgtaaactcacgtagtattttgctggacatggaaatgaaattttttccctcaaaaaatactttgtggtttgtagcctcaaaatgagagaaccagatcaaatccagaccaatgtttcttggatccaagtntctaccaaacactatgattagaaagaatggtgaggactgagaattgggtggtcacaaagaccaagatataatataagaaaaatggtttagatgttatgatgttttacccaatatctcactgcaccgatttgcttgccattatggaaacagctagtagtggttctgaaagtcattaaaagtagtaaaaaagggccgggcgcggtggctcacgcctgtaatcccagcactttgggaggccgaggcgggcggatcacgaggtcaggagatcgagaccatcccggctaaaacggtgaaaccccgtctctactaaaaatacaaaaaaattagccg

SEQ ID NO: 2231 - DNA, 661 bp, Homo sapiens
  MEF2C
  misc_feature [331]..[331]: Chromosome 5, SNP identification no. = rs2431391
  misc_feature [331]..[331]: allele = c, in linkage disequilibrium with rs254778, respectively
  misc_feature [331]..[331]: n is a, t, c or g
agcaatcctcccacctcagcctcctaaagtgttgagattacaggcgtgacccactgcatctggccttcgttacagtttaagcaaatgtttattatttccaatcagataatattttggaaataccgtatcaaattcaaaaaaatgagcatgagtttatcaaataggaaagtgaactgcattctagtatgatctgaaaggaatacatgtggttactgaaaattcatacgaaaattttcaaatatattcaaaagtcaagagaatggctcaatgaagtcctttgtatacatttcccagactcaagattaaaattttttatttggatgaatttaantgtattttctatataaagcttctgtaacaaaaatagtaatacatgtttggttttaattgtaaggcagatatataagtattctacaggaaaattcctccatgaataaactattttcatacagctatgtgtatgtaggatacattaaaaatttcctatagagtacttttaaaaatatgaaatgcaaatatataatggtttgctgtatgtgacttagaaatacaattatttttgatgctgcttctggaaacataaaggaataattttgttatattcaatacgcattgacttggttcctactgttagtttagcaaatcaagagaacattcttcc

SEQ ID NO: 2232 - DNA, 661 bp, Homo sapiens
  MEF2C
  misc_feature [331]..[331]: Chromosome 5, SNP identification no. = rs2247885
  misc_feature [331]..[331]: allele = t, in linkage disequilibrium with rs254778, respectively
  misc_feature [331]..[331]: n is a, t, c or g
catacctgtgttacctgcacttggaggtcgatgtgttacaccaggagacatactattcctctgcagagaagggtgagccagtggcaataggttggggtttcccagtgagctgacagggttgctgtacaccaaactgttgtggctggacactgggatggagactggcatctcgaagttgggaggtggaacagcctgcaggaacagaaaacaaaacaaaggtaaaagaaaagaattaataacagaagctcttcaagacagacagcccttatttttccaagaaaaattctacattccaaactactttgtgtctagaagaccattaagaagagcnctcaagacgttcagatcataaattgatttcttaaatgtgcttagaactccttctttgcaaccattaaaaaatgtttcacttttgtttaaaacaaagccccatttcattagactccattgtctttggattccattctattaagtagtaattgttcatttgtgatatctgaatctggtgccagaaatgactgcaagatcaaaggtgcctgattgtgatgacttcacagagaaaaaggattaaaatgcaaaccgaagcctttgatttaattgcttattgaagcatatttatgtagaagtttaatgatagaaaatcatctccaagcatgtgcat

SEQ ID NO: 2233 - DNA, 661 bp, Homo sapiens
  MEF2C
  misc_feature [331]..[331]: Chromosome 5, SNP identification no. = rs647983
  misc_feature [331]..[331]: allele = t, in linkage disequilibrium with rs254778, respectively
  misc_feature [331]..[331]: n is a, t, c or g
gtgagccagtggcaataggttggggtttcccagtgagctgacagggttgctgtacaccaaactgttgtggctggacactgggatggagactggcatctcgaagttgggaggtggaacagcctgcaggaacagaaaacaaaacaaaggtaaaagaaaagaattaataacagaagctcttcaagacagacagcccttatttttccaagaaaaattctacattccaaactactttgtgtctagaagaccattaagaagagctctcaagacgttcagatcataaattgatttcttaaatgtgcttagaactccttctttgcaaccattaaaaaangtttcacttttgtttaaaacaaagccccatttcattagactccattgtctttggattccattctattaagtagtaattgttcatttgtgatatctgaatctggtgccagaaatgactgcaagatcaaaggtgcctgattgtgatgacttcacagagaaaaaggattaaaatgcaaaccgaagcctttgatttaattgcttattgaagcatatttatgtagaagtttaatgatagaaaatcatctccaagcatgtgcatagcacatataccttaattatcattttttaaagtctatgttttaaaagtaactctaaagataataggcatttt

SEQ ID NO: 2234 - DNA, 661 bp, Homo sapiens
  MEF2C
  misc_feature [331]..[331]: Chromosome 5, SNP identification no. = rs1705565
  misc_feature [331]..[331]: allele = c, in linkage disequilibrium with rs254778, respectively
  misc_feature [331]..[331]: n is a, t, c or g
ttccattctattaagtagtaattgttcatttgtgatatctgaatctggtgccagaaatgactgcaagatcaaaggtgcctgattgtgatgacttcacagagaaaaaggattaaaatgcaaaccgaagcctttgatttaattgcttattgaagcatatttatgtagaagtttaatgatagaaaatcatctccaagcatgtgcatagcacatataccttaattatcattttttaaagtctatgttttaaaagtaactctaaagataataggcattttaacatacaagattcaacagagcatgtatcattcaataattcacattttgaagtggnaattcagaaaacactatgcttcatattttggtgtgtaccgccactgacaaatggcaagacctgtatctcaattgtgaaagttggcaaatatttagtgaactgaagctgtgtggatgtctaattagattaatccaggtttcaatgattgatttttgagtaattattttgtcaatttaagcaaaatcatgtttatgtttctgctgtactaactagatgaacataggaacataattgtagctacttttttttaagcattacgagtaaaaatactctttgaatataatgccagagaactcatatggtatcaaaacatatggcattcttaatata

SEQ ID NO: 2235 - DNA, 661 bp, Homo sapiens
  MEF2C
  misc_feature [331]..[331]: Chromosome 5, SNP identification no. = rs651666
  misc_feature [331]..[331]: allele = a, in linkage disequilibrium with rs254778, respectively
  misc_feature [331]..[331]: n is a, t, c or g
taattcacattttgaagtggcaattcagaaaacactatgcttcatattttggtgtgtaccgccactgacaaatggcaagacctgtatctcaattgtgaaagttggcaaatatttagtgaactgaagctgtgtggatgtctaattagattaatccaggtttcaatgattgatttttgagtaattattttgtcaatttaagcaaaatcatgtttatgtttctgctgtactaactagatgaacataggaacataattgtagctacttttttttaagcattacgagtaaaaatactctttgaatataatgccagagaactcatatggtatcaaancatatggcattcttaatataaaatggacatatatatggaataggatttatagaaggcattaaggcattcccttgggggttctcaataagttattgtgcaaatttaaatgcatatgtgcttgaggctcagttggttgttttttttggtcccattttgtttttactattgtttgcccttagtgctgacatccactttctgttactgtttggttggctggcctgcatcatacatctttctgtgtaatatttctctgtttatcttggtgatgatcacaatacttttctttgtttatgtttatgctcccttattattaatttcccatttttcttt

SEQ ID NO: 2236 - DNA, 661 bp, Homo sapiens
  MEF2C
  misc_feature [331]..[331]: Chromosome 5, SNP identification no. = rs681446
  misc_feature [331]..[331]: allele = a, in linkage disequilibrium with rs254778, respectively
  misc_feature [331]..[331]: n is a, t, c or g
atctcaagcgctttcattttaactcctcccttgatcctacatacaacattatttctctctcttcacagcccattattttgaagaaaatacatactgtttctttccacttcctcccttcccttttactctcaaccaacttgcacccgcctctcattcattcagcccctttcctaacttctgctggttcctcagacggaggtgttttctcttgctgtgaagcccagcatgaaccatggcgaacccagcatgaggaaatgctgctcgacacagttccaaatcacccatgaattattttatgtaattgaggaatatgggcataaattacaatatnctaacaggtgactgcaatattaaattttctgttttaaaagggaaactcttcaaactgggtcttcgaaatagaaaaacagtcttgtaatgtttttaaagaggtggagacactctctacatacaaagggcagagtgtccttgccctgctgtaaatgttttagcagctgtggaaactttcaacaaaattgacttccagcaactcagagcgatgtgcaaaaactgggcttttcatcgtgaagactgaagcacttactaaagagatggagactctgtggcatagctcggagctgggtggctccttctcacagctctgcccgtaaactctaatgtg

SEQ ID NO: 2237 - DNA, 661 bp, Homo sapiens
  MEF2C
  misc_feature [331]..[331]: Chromosome 5, SNP identification no. = rs679232
  misc_feature [331]..[331]: allele = c, in linkage disequilibrium with rs254778, respectively
  misc_feature [331]..[331]: n is a, t, c or g
tcctgaccttaggtgatccacccgcctgggcctcccaaggtgctgggattacaggcgtgagccactgcgccacgccatttgggccaatttttagttcttatgatctgagtttatcttgctatataatacattggtgtggagcagctgtgcattaaggtttgtaagtgtaggatgttaaggcggagtaccttaggtgtgtcagatagtaagaatcccctgcacagttggaataaagacagatgtatgcagtactgctgatcactcaatggaagcgatcatataggtggagttttaacccctaaagttctggaagaatgcacattggatcttntttctcatactttagggagagagacatgtaatacacacctgtattccctcacaggatttcagcctgttacgtaaagagttcaagatcaagatacgtgatttcttaaggggtgcagtggtgtgtggtaggggctgaaaaaccacattagagtttacgggcagagctgtgagaaggagccacccagctccgagctatgccacagagtctccatctctttagtaagtgcttcagtcttcacgatgaaaagcccagtttttgcacatcgctctgagttgctggaagtcaattttgttgaaagtttccacagctgctaaaacatttacagcaggg

SEQ ID NO: 2238 - DNA, 661 bp, Homo sapiens
  MEF2C
  misc_feature [331]..[331]: Chromosome 5, SNP identification no. = rs664366
  misc_feature [331]..[331]: allele = a, in linkage disequilibrium with rs254778, respectively
  misc_feature [331]..[331]: n is a, t, c or g
ccagatatttaagagaaataactgcatgtattattttgttgtccacatatataggaggaaagtacatactttttattagattctgtcatcaatcaaataatgttaattttgtggctgaaaggggtgaaacccaaggctcacataccttctaaataactaatgttagtgtctgaaccttaattgtatacaagctcctcagtaggcaatcagttccttttgaaaaaagttcattttttgtaagttagcaaaacagcctaaacctgagaaatgagagagactgaagtgaaaatatgttttggtgattacaagtgcagatatgtggggacaaagntcgaggccaaattcacaactgcactcacaagataaattaatactttaccatagtagctgcacactcaaacctgaattgaattaaattgaacactttaaaacttatttacaaaatgtgtgcatattaaaatttctatccttataaatacctatctgcttcttttgttaaatgaaatgtcagcagtagaacttttgttgaatcagaattattaatacactgtatcatgaaggaaagctaagtgctataaattcttaagggtttcataaaactattatatgcacacattcatagtgggcactttatgaaatggagtatttagtattatatgta

SEQ ID NO: 2239 - DNA, 661 bp, Homo sapiens
  MEF2C
  misc_feature [331]..[331]: Chromosome 5, SNP identification no. = rs618741
  misc_feature [331]..[331]: allele = c, in linkage disequilibrium with rs254778, respectively
  misc_feature [331]..[331]: n is a, t, c or g
cacatacataaacaaatcatctttatcaaatgtccagaaaaatcatcttagcatccagaggaccactggcagcacctgacatatagtagcagttagtaaatatgtatcaaggggtctggaccctactacagcctttgcctccagccagccagacagccttggtcaagtcaagaaacctccacatacattaacattgaagtggaaatgtgtgttccattcattcatctagcatttattgagcaactacagtaggtcagactgctctctggtgaaactccaaagtgaataaagcaaagtgctttgttaaggacctctcaatctagcagagggnaaaaagcacataaaggatcaataatgtatgattaagactatagtgggaaaatgtgtagaataaaatgagtgcctgaatgaaggagaaactgattcagcctgagcgatcagaaagtctaaagagaggagacaatgtgtcagctgctctttgaaggaggaacagatattggtgggctcattcctgaaggagagcccagcttgagaagggatgcagaaggaaaggcatgcagcgtttgcaccattattcctcacccactgtgggcatgaggaagggccggatgatgcttggcggtctcatccagactagagtatcaataattagcaccatttg

SEQ ID NO: 2240 - DNA, 661 bp, Homo sapiens
  MEF2C
  misc_feature [331]..[331]: Chromosome 5, SNP identification no. = rs700588
  misc_feature [331]..[331]: allele = a, in linkage disequilibrium with rs254778, respectively
  misc_feature [331]..[331]: n is a, t, c or g
actgtcagaacctagaaaccaactggctctcaatttagtgttcttagtattattttttgactttaacctagaaagcagtccttacgttaattaaaatgttatgcattactgtgcttgcacttatcagaatttctgatggttcttaatgtaacattacaaatgacagtgcctgcatactgctcaataaacagttgactgggtccatattgagctgaacttcagcccctaaaatccatagttatctaaaagagggaaggaacactaactaacagaaagaaagatgcactttgtgtgaagagggttggttttctagtccatccaggaacaagtntggggaccttggataaggctattcatgtctttgtttacggtattcatctgaaaaatagggatgataaactgtgctaaagaataagttcaaagagatactgtcgaatgtagggagataattaattataaaatcgttgaacttcttagaaaaaattatcaaataagcaacactgttatctaaaaaataatataagaaatctgatatgcttcacttgcaccaaccaacccacacacaaaatttgaccaagtccagttttttctcctgattaattttaccaaatgtaagtttctactgtaagttaaaatgacaaaaaaataaaataaaacaagt

SEQ ID NO: 2241 - DNA, 661 bp, Homo sapiens
  MEF2C
  misc_feature [331]..[331]: Chromosome 5, SNP identification no. = rs165945
  misc_feature [331]..[331]: allele = g, in linkage disequilibrium with rs254778, respectively
  misc_feature [331]..[331]: n is a, t, c or g
aagtaatggcacaaatgttctaaagtattcttcttcagttttattttgtttaattcagtctgtcattagaaaggctcgcgagctttaggcccgatgattactctcggtgggaggaagcagtgcctctgcagacttgtgttctagacaagcgttcctttatacaatgacggggcctgccatcgtaaatgaaaggctctttaaagagcagcgagggactcttttaagcagactgctaccacgtgcttgtaaccctccagcataacttgcgaggatgagacagcagtgtgttctgccgcaaaggggactattgtcctcgttagcctcaagcaanttgagcctccgtttcgctgaaatacagtagtatttccaaaggattttcaagcagtagttcctaaaattctgaacatgataaaaggattaaaataaggggcttagagtgtggaatttagaactctaccaacccctcaccctaagtcaacatcccaaatcccaaaataaaactccaaatcttatgcattggagggaaaataataaatcacagttagatctaaattaaataatcgaatgcacattaatgaaacgagtgtttattaacaaactcataaaagtttgagttttaaaatttgtgacagctgaattctgatgcatttgtctgcatgag

SEQ ID NO: 2242 - DNA, 661 bp, Homo sapiens
  MEF2C
  misc_feature [331]..[331]: Chromosome 5, SNP identification no. = rs160044
  misc_feature [331]..[331]: allele = c, in linkage disequilibrium with rs254778, respectively
  misc_feature [331]..[331]: n is a, t, c or g
tatgttactgtaaaatacaataaaagtgtcacagaaaaaaatctgtttcaggagcatgattaaaaattggtaccatgtgaaagagggtaagactgcctaactgatggaggtatttcaagggtaaaaaaaaaatgccgacggagagactgaaactgtagtgttagcataagctagaagctggtagtgataaaaatggtgaggagtagttaaaaataatttggtcagtaacatatatttgaaaacaggtcccacaagcataacatttaggaaacgacttctccccatccttgtcataaatcctctgcaaacgtcctgtgtgatctttccttcntgtccacaaactatcctctctgcatcagctcactcctgctctggtatcattctctagccccttgttggcttctgaaggctcctttgtgctcctgctctacctgttccacttttccatccatctcctcaatacccttttaaaataaaaccctcatgaaatgaaggtttaggtaacattctttattgtgctacacagtacaagagttgttttgatagaaatcacattaactataatagctaatggttcaaagagcctgagtcttaataggaatagctaataggtaaatttattgagcacttattatttggtgggtgctttacatttattgct

SEQ ID NO: 2243 - DNA, 661 bp, Homo sapiens
  MEF2C
  misc_feature [331]..[331]: Chromosome 5, SNP identification no. = rs167345
  misc_feature [331]..[331]: allele = g, in linkage disequilibrium with rs254778, respectively
  misc_feature [331]..[331]: n is a, t, c or g
tttgtggtcattcacttaaaggtttataatataggataaatatcctgtatgaaaatggctttcattttattcatagtaaatgagattttgaaacacatccaaacattttaacattgtgctgacaacaacaacaaagaaaacacccacacaagatattaataacttaaaacatataggcaaggactatcggttaattcataccattttaaatctgaatttgataaacatagaggcagatggtgttataatttttttctagaatgccaatgataatgtctgtgtgatacaattaatctgttgtgaagactttacacattcaaatgctcagttnggcattaaagacttgtatatcatgaatgcctgcaatttgactctatttttcttcacactaggggagagtggatttagttaggctatgtaaggacagctgggtagtttgtataacgttaaatatcaaataatggtcctgggagaaattatagtactgctgggtcccaaccatctcatatggatcatggaacctgcagagaagacgtttctggactgtggaagagaagagtgttttgcctacttttcggttacactgaagaaggctacacagtagccctggggacaaccaccagactgtaatttccccacaaatgtagacactcatgtcctc

SEQ ID NO: 2244 - DNA, 661 bp, Homo sapiens
  MEF2C
  misc_feature [331]..[331]: Chromosome 5, SNP identification no. = rs304153
  misc_feature [331]..[331]: allele = a, in linkage disequilibrium with rs254778, respectively
  misc_feature [331]..[331]: n is a, t, c or g
acaggaaagttgccccattgagtgacatttaagacgttttctaaaaatagatggacagtgtctagcaacatcaaatatatgatgcaattatgctttgtgggtttttcatattttaatgtgatttcaatatgttataactatttttatatgtatttgtcaaatgtgtgttatttctataactctttagaattttgaaccacctccaacatttaaaattacagctggagcaatagtttttgatgagcactgtgtggtcataatgttactcaacatacatattatgagaggcagaactgagctgcagtttagtagagaggcgtgaggcaaaagngaatggatagtcttagtatttaagcagcacttaatccaccagaagtaattatatcataatagcttctgcaattaaataatcaccaaaaactaaaaaaaaaaaaaatacccaaggtgataaagaatttggaaattaaattaaagaaatcagaagacagctaatggtcagaccgaatgtgtaacagccttcctgttccaagaactttgaattggagccaaacaatctattaaatagccaggacattggcttagcattacataatacatgtgggaatttatcaggtccgttgtcagacaccagctaaaataaacagggaaattctgagcagtg

SEQ ID NO: 2245 - DNA, 661 bp, Homo sapiens
  MEF2C
  misc_feature [331]..[331]: Chromosome 5, SNP identification no. = rs304161
  misc_feature [331]..[331]: allele = g, in linkage disequilibrium with rs254778, respectively
  misc_feature [331]..[331]: n is a, t, c or g
gtggaaacttccctgtaaatagaaggatttgtagtagaccataatttgaggagataaggagaagaaagagaaagagcataacgagaaggaaaaagaggagtggcaaggggaggagggtaaggataatggccagggtcataccagagctggttaggtgtgttttagaaacctactcaaggtactttgaaggaaagcaaaatgactgcttcaagctttggggatgagatatctgtgtaattctcatctgtaattctcagatgagaattctgtgtaattcttaacttcatcataagtgaaaatgactctcctgacccattatcaggaagacaantcttttgggtttctttttccgggaattgtgaagaatatatactgatttatacagtatacatttacctggttttccttgtgaacacattcatttgtagaaagtagaaaaaaaaaaaccaaaaacagctgctgatgatcatccagtaaattataatagtaaagacaaatatctaacttacattctattcccctgctggcacagggaagtaaactcatttttgccatcaagaataagaaaatgtgagatgagttgaagaacactcattttaaaaataatttgtagattccaccaactcctgaacatcacattttctacatagaattttaagtt

SEQ ID NO: 2246 - DNA, 661 bp, Homo sapiens
  MEF2C
  misc_feature [331]..[331]: Chromosome 5, SNP identification no. = rs304160
  misc_feature [331]..[331]: allele = c, in linkage disequilibrium with rs254778, respectively
  misc_feature [331]..[331]: n is a, t, c or g
gaaaagatttttttctcttttttgacatggcaaaatttatcattttcataaagattcattttaaggcagttgaaatttccaagtccattctggaattctccatagtaaatttagtgaaacacaaaatattcatattaactaatttatttcaaagggacttggtagaggttttgttatgcttattgtttttctatttcatacgatacaaaagacaaatactcttatataattttgaaagttagaatcctcaggattgtgaccaaataataatttggtatgtgaactagttacttgatggaaatgtccgcttttttagcatataagagtaatntgcacactctttccttttcagaacacttattactggacccacaaacatacctgagggacacggacataaaaattatcctagaggtgtcttcactttgaaaggcagtatttgccaacagattcgttcttactgaattacaaatctcagagatttcctgtttaccagaagtcctcttggagtgcatgggatatagaagcagccattttgagcattcgctttgcaccatcaactgcctagcatctgaaattgaagtcagtcttacataggtaggtaggtagagatagatagatagagagagagagagagagagagagagagagagataatgtg

SEQ ID NO: 2247 - DNA, 661 bp, Homo sapiens
  MEF2C
  misc_feature [331]..[331]: Chromosome 5, SNP identification no. = rs304159
  misc_feature [331]..[331]: allele = a, in linkage disequilibrium with rs254778, respectively
  misc_feature [331]..[331]: n is a, t, c or g
ctctttttttttttccatattgttgacgtttgtaatggcactgtttctaatccactatcttttattatatgttagagagtcattgattacttgctttcatcctcatataatagaaatatctaaatattacagtcacagattccacagacatgtaatatcagaaaacatgaaagtgagttagctttcttgttttactagattttttttctttcagtaaagctaggaaaatattattaattaattagtttagttttcatcaaacctggtgattggccggattcttaatattgtagcacccaaatacaggtaggaattaaagatctgaagaagncaacaataggaaagatgaattttaatggatcagatttcaaagaacttgtaaatattacaagatatttcttataaaatatactatgtagcatagaggattgcacaaatggtcaaagaacacttcatcagaaatcacaagccttaaaaagaagtatctggttgactaaagaaagatctgtatgaggaatggaaatctgaatgtattatgagaataggagaaatttcaaatagtataaaaataaaagttctaagaaataaggcttaaagttggataaggagaatcaaaattaaaagatgatttttatgaatttgtttaaccaaaagcaacaac

SEQ ID NO: 2248 - DNA, 661 bp, Homo sapiens
  MEF2C
  misc_feature [331]..[331]: Chromosome 5, SNP identification no. = rs244754
  misc_feature [331]..[331]: allele = g, in linkage disequilibrium with rs254778, respectively
  misc_feature [331]..[331]: n is a, t, c or g
atctaccttattatgactagaataattataagaattaaataatatgcataaagcacttagcatattgcctattatcattactatgtagagagatagaaatgtgtgaaaatgggagtttttaccttaaggatgtaatttttcatccgtgtaagattacccaatattctataaaataagagatgttacataactagaaagttgtagccattcaaccatttttctggaactagctttattatcctctactaaaatggttttggccactataactttggtctttcaaatacagatcattattaagtttttaaatccagcagattctctccacaangtctttctgctctttacctttgaggagtttttttaaatggcaaattattctatatcatctttttaaaagttatgacaattaaagatttaaaatctcagctaaaatattatatatggatttttagttacattttatgcccaatcgctagttgtaagcatagttgtaagcgtgctgaatgaagtttatttgcactttgtgtattcccactttttagttatgtactttataagtggaatttatttgactctaacttttgtaatttagataatcattgtttgtgttcaaattcaaatgtgaggaactttgaatgcatttgtgatccaagtcatt

SEQ ID NO: 2249 - DNA, 661 bp, Homo sapiens
  misc_feature [331]..[331]: Chromosome 5, SNP identification no. = rs10067492
  misc_feature [331]..[331]: allele = g, in linkage disequilibrium with rs26396, respectively
  misc_feature [331]..[331]: n is a, t, c or g
tgagccgaggagttcgagactagcctggccaccatggtgaagccccatctctactaaaaatacaaaaattagccaggtgtgatggcacacacctgtaatcccagctactgaggaggctgaggcaggagaatcgcttgaatccaggaggcagaggttggagtgagctgagattgtactactgcactccagcctgggcgacaaagtgagactctgttttaaacaacaacaaaaacagcagtattgatataaagtctttttctccaataagttttcatttaaaaatacatatacatactttgggaggccaaggaggatagattttgtgagtccnggagtttgagaccagcctggccaacatgccaaaaccctgtctctactaaaaatacaaaaaattagctgggcatggtggtgcatgcctgtaatgtctgtagtcccagctaatcaggaggctgaagtggggagaatcacctgagcctgggagatcgaggctgcagtaagccaagattgggcaacagagtgagacactgtctcaaatataaaaaataaaaatatatatatacctacattttttttttgagacagagtcttgctctgtcgcccaggctagagtgcagtggtgcaatctccgctcactacaagctcagcctcctgggttcacgcc

SEQ ID NO: 2250 - DNA, 661 bp, Homo sapiens
  misc_feature [331]..[331]: Chromosome 5, SNP identification no. = rs9314132
  misc_feature [331]..[331]: allele = t, in linkage disequilibrium with rs26396, respectively
  misc_feature [331]..[331]: n is a, t, c or g
aacatcaaatgctgatgatgctgagaagttggctcaccggtgcaatgatgctggaaatgtaaaacggtaccgttattctggaaaacagctcagcagttttatataaaactaaacatactatcaccatatgacccagcaattgtgctcttgggcatttataccagagcaatgaaaacttatctttacacaaaaacatgtacactaatgttcacagcagctttattagtaacagccaaaaactagaaacaaccttcgatgggaaggaaacccattgatatacacacagcttagataaatctcaagggaaggatgctgagtgaaaaatgtcaancttaaaagttgcatattatatgattccgtttaaatagcattcttgaaataacaagattatagagatggagaatatattactcatttccaggggttggggatggaggagatgtatgtggttattaaagggcaatgcgggagatctttgtggtgacaaaactgttctgacaggggtggtgaatatgcaaaactacacatgaaataaaattgtctagaactaaatatacacacacacactcgagtacatgtaaaactgggaaatctaaataacatcagtagatgataacaatgtcaattcctggtcatgatactgtactataattctgtaaga

SEQ ID NO: 2251 - DNA, 661 bp, Homo sapiens
  misc_feature [331]..[331]: Chromosome 5, SNP identification no. = rs9314133
  misc_feature [331]..[331]: allele = t, in linkage disequilibrium with rs26396, respectively
  misc_feature [331]..[331]: n is a, t, c or g
aaagacagcatttaattattctgagtcagttatctagtttaaagaataaattcttcactatcaaaaacaatgcaccactatctttatgaattttctttctgctaaacctctcttccttttagatatctatattctagagctattgatttttgaggttcctctcatgcaaacttgggagcaaattcattgtcaactaccaatctggaacccaggaaagagttgagcttttgaaaccaggattccatgtcatttactagctacttgcttccaagtttccttactaaaaaaaaaacgggaataaaaataattccttttctatcttcctgacaangctatttgcaaataaatgaaagaattcacctaaaacataaagtatattccacacattatataagtgctatttgatgtacatttgagaagacacttgatagaagagatttacaatacagatatttgatacagtttaaaaactaacttttaacaacatgaacaacccaaaatgaaactattctatagaactaaaatcttaaatctgccaaattccattagagttgaaaattaacctatatatttggtttgaagcaatatgataataatgtgaaaccagtcagtcaaacacaaagaaaagacttgtacaattaaataattttaagctagttta

SEQ ID NO: 2252 - DNA, 661 bp, Homo sapiens
  misc_feature [331]..[331]: Chromosome 5, SNP identification no. = rs10072003
  misc_feature [331]..[331]: allele = t, in linkage disequilibrium with rs26396, respectively
  misc_feature [331]..[331]: n is a, t, c or g
agatacattcacaatttttacttttttctctatggcaaaattttctttatcatccataccctgctgctacctaaaattgcatgcacagaaagagtattcccaagggataaaaaaaagtttttcacattaacttaagcaaagtaattaaaaatataaatttagtaaaacagacatgtttttgagtaagttttttccaacatgtggtgaggcatgtatgtataactgtatttatgaatacggttatactgtacataatacagtacattaagaatttgacatgttttttcctttatgatactgagaatatataatttagcctatttccattttncccctggctgccagaaagctgagagtcaaacaaaccagctgctcattatataactatattagtctctttttgaacaaatttgttttattttctgtgccaacttctagagtactgtctagtagtaattcattagttttatggtgcatatgttacacatcataacctttttcaagtctcttttagataacaggtaggatacaataaaagggcagacatatttatttaagatcaaggaggtaagttgttattttactaaaacttaacagaaattgacaaatacttttatatgtcttgaaaaagtgcttaaagccacatttcatcaaataaaat

SEQ ID NO: 2253 - DNA, 661 bp, Homo sapiens
  misc_feature [331]..[331]: Chromosome 5, SNP identification no. = rs10070790
  misc_feature [331]..[331]: allele = c, in linkage disequilibrium with rs26396, respectively
  misc_feature [331]..[331]: n is a, t, c or g
gtttctgaggagaccaggggtactgtgacagacaaggagatgttcagcaatggtgggtagcacaggaaatggagctctctaggcagcatgatcacagaaagaattgccattggcagcccgtatttttcaagaggaaattaaaggacacataaaatcagagaagaaagtggggagcagaaagggtttcaggagcagaaagtacattgagtaccaatttgacagccagtcaccataaaagatatgagtttggatccaaatgccgagttgatagagcgctaaggcagcttagaatcttcaacataaacacagcagagaggggtataaagtgacngagctgagatgtaaacaataattcctagacccagatttcaacagcagcagtatagctcttggtgggaagaataaatattttatatgtatagaagtaaaaatgatatgtgtgttaattcccaaagagggattaaagacctttctctaacatagtaccaatgtgtaaatgttctccaagacttattttattaagcacacattcctgggaaggtgataaagctagctattagattgcattctgaagatgctcaattattttctttatatgtggtcccccgcctttctaaaatctctacactgggccaaataggagaccactgagcttagtatg

SEQ ID NO: 2254 - DNA, 661 bp, Homo sapiens
  misc_feature [331]..[331]: Chromosome 5, SNP identification no. = rs10044143
  misc_feature [331]..[331]: allele = c, in linkage disequilibrium with rs26396, respectively
  misc_feature [331]..[331]: n is a, t, c or g
gtttgtcactgaggaaattaaactgagcaaaaacaagttatttttcacaaagccaacttgttaagatttaatactttgtaatactgataagattatatctgctaaacaaattaatttagcagtttagaagtatctaagaaaacctaaacattgtataacccataataatctgactattcagcgtttattctatagaaatccccacttaggtgggcatgatgaagcatgtacaaggatgttcagtgcagtatatttgtaaaagcaaaagctggaagcaacatagatcatcatcaattgagcaatagctaaataggtatcctgtttagcctangaattgacaatgaggtcaatctgtatggactaacacagtaagatctctacgacatattaatgaaaaaaaatcaaattgctaaaaatgtatgataaaacatcaactgtgtagaacatcacacactcacaccaaatcacatatatatacacatatgcatacaaaggagagatatatacatatatacataagtttttgtagatatctctctatattatatttatgtacatagctctctttatccatatatgcatgcatatagagttgtcccttggtatccacgtgggattggttccagttcctcccacagataccaaaatctacagatgctca

SEQ ID NO: 2255 - DNA, 661 bp, Homo sapiens
  misc_feature [331]..[331]: Chromosome 5, SNP identification no. = rs10037505
  misc_feature [331]..[331]: allele = t, in linkage disequilibrium with rs26396, respectively
  misc_feature [331]..[331]: n is a, t, c or g
ctctagcccaggacattaatttgttaatttttctcttatagtttttgaacgtagataatacataattaacataatgtggcattttagggacagcttcctaagctttcattagccattaaacataaatacaaattttaaaatataaccaacatttcattttaattcttttaattattaaacaccttattttagtattttgctaaaagtcacaaattccatttcaatttggtatctacctaattttaatgcaatccaaaaactctacaacatttcttaataaaagttaattaacaggggagtatagattaaacaacatccccagaatacatangataaaggcttaatatccaaaatatataaaggaactcaatagcaagaaaacaaaccaattaaaaaataggcagaggatctgaacagacatttctaaaaagaatatatacaaatggccaacaggtgtacaaaaaaatgctcaatatcaccaatcagcagaaaaatgcaaattaataccacaatgagatttcactgcatacctgttagaatggctattatgaaaaagacaaaagattgctgggtgtggtggctcacatctgtgatcccagcattttgggggtttgaggcgggtggatcacttgaggtcagggggtcaagaccagcctggcca

SEQ ID NO: 2256 - DNA, 661 bp, Homo sapiens
  misc_feature [331]..[331]: Chromosome 5, SNP identification no. = rs12186368
  misc_feature [331]..[331]: allele = c, in linkage disequilibrium with rs26396, respectively
  misc_feature [331]..[331]: n is a, t, c or g
aggtgccaagaaaataaaatggggaaaaaatagtctttcaacatatggttgggacaactgggaaaattgtatatcttcatagaaaaaattaaagttggactcctaccacatattatataaaaaattaactcaaaatacatcaaagaactaaaggtaaaagctaaagctataaaactcttagaagaaaacacaggtatgattctccaggaacttgaattagacaatggtgtctgacacaaaaagcacagcaagaaaagaaaaaataacggtacttcatcaaaattaatgtgaaataatttgcgtttcaaaggataccaacaagaaagtgaanaggcaccccacagaacaggaaaagctatttgcaaatcatgtttgataagggacttgtatctagaatatataaagaacttttacacacaatacacacaatatttacacacaatatttagcacaataataaaagctaaataatgtaaaaactaatgagccaatttaaaaatgggcaaaggatatgaacagacatttctccaaagaagataaacacatggccaataagcacatgaaaagaagatcaacatcattatccattagggaaatgcaaatcaagaccacaatgaaataatatttcacactcactaacataactacaatcaagaaaatg

SEQ ID NO: 2257 - DNA, 661 bp, Homo sapiens
  misc_feature [331]..[331]: Chromosome 5, SNP identification no. = rs10066762
  misc_feature [331]..[331]: allele = t, in linkage disequilibrium with rs26396, respectively
  misc_feature [331]..[331]: n is a, t, c or g
aaaaaaaagttctagaacatatgtattatccttagttttgatgctatttcaatggactattcttgcttatctagaaatcaccttcttgaaagtcaccaatgatccattaatcagcaaagccaaagaactctcaattttcaatccacttttctaatctataccatccaacactatttaccattccttccttctttaatctgtttcttctcatgaccctgttctgtcatctctttgcctttcttctcctgcaattgctccacatatctgtttccttcaaatgtatgaagacacaacataaacagacctttatcactcttacttccaccacaantcttgagcttgatttccccacaagaacatcccactaatcccatatagcatgaccaaaagggaattgtatcatccccaattgtcttccaacattcttgactttggctaatagcatcactattcttccagtaactaagtcaaaacattgaggggagaaagttttgccgcctcctcttgtcctcttttcctcttccctggccaatcagccatgaaacaccagttacattactcagaaattctttcttatcaatagtctcaacttagtccatggtctctgaactatttgtgttttcctaagaaatatttccctttgcctggcccctctcttttc

SEQ ID NO: 2258 - DNA, 661 bp, Homo sapiens
  misc_feature [331]..[331]: Chromosome 5, SNP identification no. = rs10058958
  misc_feature [331]..[331]: allele = c, in linkage disequilibrium with rs26396, respectively
  misc_feature [331]..[331]: n is a, t, c or g
caacatggcacatgtatacatatgtaacaaacctgcacgttgtgcacacgtaccctaaaacttaaagtataaaaaaaaaagattgtctcaaacatctcagatcaagaaagtcttatctcctaattgtctctttgcccataaccataatcacactcatatgtatgtaccatgatcacgtccatcttggagcttttatcctttcttcccttttgcttggaattcctaccttcctctcttctccaagcaatagctaaacctcaaaacccattttcaagtctcatctcctccctgagaccctccctgatcaattcaattaactgatttcttattncttgtctgttaaaacatgatataaatggaaatacagaaatatgaatagatttgaaaattatttaagaggtagcaataaagatggatttttgtgatagactgatttccttccctttctgtcttctttcataagagaatgtcattttaggggctgggagatcatcatgttatcatgtaaaaaacaataatcagctgtctggcagagaggagaggccatacaatacaattctggccaatgacatttaattggattgagcaattactcaaaaacggagcaaactcagctttattttcctccttttttttctttgttagccttgttgctattttt

SEQ ID NO: 2259 - DNA, 661 bp, Homo sapiens
  misc_feature [331]..[331]: Chromosome 5, SNP identification no. = rs10069998
  misc_feature [331]..[331]: allele = t, in linkage disequilibrium with rs26396, respectively
  misc_feature [331]..[331]: n is a, t, c or g
tatcctttcttcccttttgcttggaattcctaccttcctctcttctccaagcaatagctaaacctcaaaacccattttcaagtctcatctcctccctgagaccctccctgatcaattcaattaactgatttcttattccttgtctgttaaaacatgatataaatggaaatacagaaatatgaatagatttgaaaattatttaagaggtagcaataaagatggatttttgtgatagactgatttccttccctttctgtcttctttcataagagaatgtcattttaggggctgggagatcatcatgttatcatgtaaaaaacaataatcagcngtctggcagagaggagaggccatacaatacaattctggccaatgacatttaattggattgagcaattactcaaaaacggagcaaactcagctttattttcctccttttttttctttgttagccttgttgctattttttgcttttttagccttgttatttttttctttttagcctttctgctttttttctctccttttttctgcctgaaatatggatataatgttagagatggagcacctatcttgtaaccataagaaggccacaaagaatagggtaaaaaaaatttgaagaactaaactctgaaatctttgagccagcaaccacctacct

SEQ ID NO: 2260 - DNA, 661 bp, Homo sapiens
  misc_feature [331]..[331]: Chromosome 5, SNP identification no. = rs10075123
  misc_feature [331]..[331]: allele = g, in linkage disequilibrium with rs26396, respectively
  misc_feature [331]..[331]: n is a, t, c or g
ttgtctgttaaaacatgatataaatggaaatacagaaatatgaatagatttgaaaattatttaagaggtagcaataaagatggatttttgtgatagactgatttccttccctttctgtcttctttcataagagaatgtcattttaggggctgggagatcatcatgttatcatgtaaaaaacaataatcagctgtctggcagagaggagaggccatacaatacaattctggccaatgacatttaattggattgagcaattactcaaaaacggagcaaactcagctttattttcctccttttttttctttgttagccttgttgctattttttncttttttagccttgttatttttttctttttagcctttctgctttttttctctccttttttctgcctgaaatatggatataatgttagagatggagcacctatcttgtaaccataagaaggccacaaagaatagggtaaaaaaaatttgaagaactaaactctgaaatctttgagccagcaaccacctacctctcaaactctagttaagggaggtaaacaaaacttataaaatatctagtttgtgggagggagttctaaacacagacactttgactaacattagcctctacacacttttaatacctaaagaattcaaaacaaaaatataca

SEQ ID NO: 2261 - DNA, 661 bp, Homo sapiens
  misc_feature [331]..[331]: Chromosome 5, SNP identification no. = rs10079049
  misc_feature [331]..[331]: allele = g, in linkage disequilibrium with rs26396, respectively
  misc_feature [331]..[331]: n is a, t, c or g
agtcacataaacagttttatgtatatctgttcacattttaaaagcacataattaatatacatagactgtgcttcatatatattgaaagaaatttattgtaaagaattggatcacttgaccatagaggctggcaagtccagagtctgcagtgtgagccagcaggctggaaacccatgagagacgatggtgtggatgaagtctgaaggcagtcctttggagatttctcccttgctgagggcatcttttcattctattcagtccttcaactgattggatgaggcccaccctcattatggaggagaatccacttacttacttatttactcatcancttaaatgttcatctcatccaaaaacccaaaacaccctccaagttgacatataaaattaattatggctgggtgtggtggctcacgtctataatcccaacattttgggaggccatggtgagtggatcacttgagcccaggagtttgagaccagcctgagcaacatggcaaaaccccatctctacaaaaaatacaaaaattagccaggcatggtggtgcatgcctgtagtcccagctactcaggaggctgagtagggagaatcacctgaaccgggaagtcgaggctgcagtgagccacgatctcaccactgcactctagcgtgggcatcaga

SEQ ID NO: 2262 - DNA, 661 bp, Homo sapiens
  misc_feature [331]..[331]: Chromosome 5, SNP identification no. = rs10050382
  misc_feature [331]..[331]: allele = t, in linkage disequilibrium with rs26396, respectively
  misc_feature [331]..[331]: n is a, t, c or g
gataatttgctcttaatttttttctgatgcatgacctgttttgtgaccctattccctaagagatggatgaaagtatatcatctctaattttattttttaaatttccacaggtgttgggggaacaagtggtatttggttacataagttctttcgcggtgacttgtgagattttggtgcacccatcaccactgaacccaatttgtagccttttattatccctcacccccttcccaccatttcctcccaagtccccaaagtccattttccctccctctttaccccacctctctgacctcgccataatctggacccaaggatatttattgttaangtgtttgttcttgttttttgggggaaagcatgttgtatatatttaaatagagtattgtggctacgttaatttttttaattatttaattgaaagagaacctcctcttctgagttcgcctccctctgccttgaacatgtattttagtccactaagcaataccaaagaatacttaaatgagcaaaactaagtgagcaaaaatagtatgaagaatctctgtgtgacaggtgcaggatttttcattttcggagtaaatcttggtaagtggccacacatccactgccaatgctttctgtaattcttctcccagtcaactaagctctctgtcacaat

SEQ ID NO: 2263 - DNA, 661 bp, Homo sapiens
  misc_feature [331]..[331]: Chromosome 5, SNP identification no. = rs10043529
  misc_feature [331]..[331]: allele = c, in linkage disequilibrium with rs26396, respectively
  misc_feature [331]..[331]: n is a, t, c or g
caaaaagaaaagattacattccatacagagaggagatgctggatgaaaagctctcatccagacccctctcccagcctctgtcagcctcttagacaaatagactcaggcccattaagccttggaggccaccgaggcagaatttgatttatttatttagttttaagaaaaaataagaacctgacactttaaatcctgctacaactggtaaattcaagctcagaagatgtgattaggctatgtctcatgtgtcttctcagctctttttttctgccttattcccaatccccccgaaattaaagcagaacagacatcgtgactgtttaatcacaanaccttatagttatgtcctgaaagatcatggttaacattagtgaaagaaaagcttgggatgtgtgtagttgttctgctccagtataaatggaaagcttaaactatttttctagccctaatagaatcaatcatcacccatttcacgatgaaacccaagacaaagctcagaacctaaacagccttcagaattcagaaaagataaacgggagaaatgagagcagtcaaagagagatcagatttccatctgagacagacttggtattagctaaaaggcaactttataggaatcataggaatcataacaaatagtttataacatcttctagaatca

SEQ ID NO: 2264 - DNA, 661 bp, Homo sapiens
  misc_feature [331]..[331]: Chromosome 5, SNP identification no. = rs10058143
  misc_feature [331]..[331]: allele = t, in linkage disequilibrium with rs26396, respectively
  misc_feature [331]..[331]: n is a, t, c or g
tcccacacaaaaaaattcaaggcccaaatagcttcactagtaaactctaccaacattaaagatgaaaaatattatttctacacaaactcttccaaaaaatttgaggaagaagaaatacatcccaactaattctatgaagccattatttccctgataaacaaagacattataagaaaactatagaccaatatagctcatgagcatagattcaaaatttaaaacaaaattttagcaatatataaacaatatataaaattaatattattatcaggcagtgttttcctcagaaatgccaggttcatttaacattaatttcaaaaatcaatgtaantcactatatcaacaaacacaaaaataaaatccacataataatttcaatagatgcagaaaaagcacttgacaaaaaatcagcatttattcctgataaaaactctcaccaaacaaataataaaaagaaactccctcaatttaataaaagacattataaaaaccagcagctaacatcataatgaagagagactaaatgcttttttcctaagattagcaaaagaaaaggacgtgcattcttatcacttctattcaatatttttctggaagtttaagccagcacagtaaggaaagaaaaagaaataaaaggcctctagattaaaaaggaagaagt

SEQ ID NO: 2265 - DNA, 661 bp, Homo sapiens
  misc_feature [331]..[331]: Chromosome 5, SNP identification no. = rs10050581
  misc_feature [331]..[331]: allele = c, in linkage disequilibrium with rs26396, respectively
  misc_feature [331]..[331]: n is a, t, c or g
aagcacttgacaaaaaatcagcatttattcctgataaaaactctcaccaaacaaataataaaaagaaactccctcaatttaataaaagacattataaaaaccagcagctaacatcataatgaagagagactaaatgcttttttcctaagattagcaaaagaaaaggacgtgcattcttatcacttctattcaatatttttctggaagtttaagccagcacagtaaggaaagaaaaagaaataaaaggcctctagattaaaaaggaagaagtagaaacactttctttctttctttccttactatgctggcttaaacttccagaaaaatgcanatcatgaatgtatacgcctgaacttaaaataaaagttagaaattttttttaaaaagtgtattgtgcaataataatgaaaatgtaactgtatcacattgtgataattattccatctgctcatttaataaatacctattgcttattcaccaaaaaaggaagaagtaaaactgtctttattcacagatgacataatcatctttgtggaaaatctgatgattctacaaaaatgctactaggtcagtgcagctcatgccttgatgtcaaccttgtaagagctggagtagagaacctagttgagcctccctgagctacttctgactacagtactgt

SEQ ID NO: 2266 - DNA, 661 bp, Homo sapiens
  misc_feature [331]..[331]: Chromosome 5, SNP identification no. = rs10064420
  misc_feature [331]..[331]: allele = t, in linkage disequilibrium with rs26396, respectively
  misc_feature [331]..[331]: n is a, t, c or g
ctggcaaattgcagtggaacacaagagaggaaaataaatgctcactaactcctttgattcattaataaaacatgatgagaaaatgtataattataattcttgatatttctcttcgaaaattcattttcgtgatcccagcctctttttttgctttattctgtgaaacatctagtgggacttgtagagattggaatgggcaattggcaagctgcaagtagcctaagaaatagcatttaccttgggtaattcaccatgatccagagccttgtttttgactctgctaagacagagcctgattccttcagcatgccacacgagatgctgggccaanctgcaaaccataactgacatatggatctgaatattcacattgatatgaccagtacattctctgcagtagcaaatctatgaaaggccaactcataaaccaaatgtagcagaagcagcatgaaatcggaacaagggaaatttgttagtgattcaaaattttagaagaaacaaacatccatcgccatgtgagaaagtcacaagaattgacgttcccatgccggtctccttgggcagttcttaggccagcctctccacagtttctttctctgactctccgctacctgcaaggaggtttcagtctgagcagccatctgtctttggattggtatat

SEQ ID NO: 2267 - DNA, 661 bp, Homo sapiens
  misc_feature [331]..[331]: Chromosome 5, SNP identification no. = rs10066492
  misc_feature [331]..[331]: allele = t, in linkage disequilibrium with rs26396, respectively
  misc_feature [331]..[331]: n is a, t, c or g
gctttatgttgattttatacttttgcatgggggctaacactgtttccaacttttttcataacacctcattgttactcctaaacatcacaaaaaattacgcagatgccaaatcaatgtgtcactcatatcagagttcacttgctcagtccaggatccaggaccagcctcagagaggttggaccacaggcacacatagctcattcaggaaaagcagaactgccgtcacaacctttataaccgaacatgcagcaggaatcctggaacaatgcatgatcactagtcgcctgataccaagcctcatattcttccaattagtccttaaaattattcncattctcataccaactacattaatcatacaattcctggatgactacagacccctaagccctcactattccaccaccttccacactgccaccagcatacatacacaagcacaccgcgtatatgcagcacatctaactcagcacaagccttgctcggtataatctcaattcccttgtattctctggggagagatgaatggcatcctttttgatttcagtatacatgtagctatgacaaatttccatctttcagggaatttacaaaagctttttggctatcatgcatctaactgtaccacccaaaacagattttctcaaaaaggggagaaaaa

SEQ ID NO: 2268 - DNA, 661 bp, Homo sapiens
  misc_feature [331]..[331]: Chromosome 5, SNP identification no. = rs10057040
  misc_feature [331]..[331]: allele = c, in linkage disequilibrium with rs26396, respectively
  misc_feature [331]..[331]: n is a, t, c or g
cctaaacatcacaaaaaattacgcagatgccaaatcaatgtgtcactcatatcagagttcacttgctcagtccaggatccaggaccagcctcagagaggttggaccacaggcacacatagctcattcaggaaaagcagaactgccgtcacaacctttataaccgaacatgcagcaggaatcctggaacaatgcatgatcactagtcgcctgataccaagcctcatattcttccaattagtccttaaaattattctcattctcataccaactacattaatcatacaattcctggatgactacagacccctaagccctcactattccaccacnttccacactgccaccagcatacatacacaagcacaccgcgtatatgcagcacatctaactcagcacaagccttgctcggtataatctcaattcccttgtattctctggggagagatgaatggcatcctttttgatttcagtatacatgtagctatgacaaatttccatctttcagggaatttacaaaagctttttggctatcatgcatctaactgtaccacccaaaacagattttctcaaaaaggggagaaaaaacttggtctcacatctcactgttacacaaacgtaacatttggtctcgtagaagaaacattaaaaaggccattgagc

SEQ ID NO: 2269 - DNA, 661 bp, Homo sapiens
  misc_feature [331]..[331]: Chromosome 5, SNP identification no. = rs17349336
  misc_feature [331]..[331]: allele = g, in linkage disequilibrium with rs26396, respectively
  misc_feature [331]..[331]: n is a, t, c or g
tctctctctccacccacctcttttcttcattttaattgagagagactacatattagaaaatatcctagtaggatattttatactataaaattatttaccatcttttattctaaaccaaccagagattctaattttggggggtactttgttttaaattcatttatttttatgaaaccttattgagcacatactatataataaggtattgctctaggtacagttataactattgaaatctagctttattaggaaaagaaacttttaattagccaaatatcttctctattattatccttcatattcagtaaaccctatccatgtgggaaatgtncatccaaaacattgacatcagtctttccacacaagtcaagatctttctcacatctcagtatggcagctgctttgcaggacaatgtcatatttgtaactcaacttatggtctctaaaatgaggataatgccattatttttagaacattaagaagtctgcataggaagataactgtacaactcatttcctttaaaccatagcagcttgaaaaacacatagacttggagattcctctgaattcacaagagccagaagttttaaactacacctagagcctcatcctgctaaagcttagccaatattttagtgggggaaagcatctcaaagacca

SEQ ID NO: 2270 - DNA, 661 bp, Homo sapiens
  misc_feature [331]..[331]: Chromosome 5, SNP identification no. = rs10515223
  misc_feature [331]..[331]: allele = c, in linkage disequilibrium with rs26396, respectively
  misc_feature [331]..[331]: n is a, t, c or g
gacttaaagaggagaaagaggtagacatgtgaggaaaaagagggacgttcagcactctgaaaagagtcatcacggaacctggggaaccacagcatgaatggagcatagagtctgaggaagtagtgttgagaaataagataggtaggagccagaccacaaagggtctaatatgtcattacagggatgttagactttgtcctgagagcaatgaggaatcagtgacattttaagaaagcaggagaaaagaaaattctggctctagttggagaacacgttagataagacaaaactggagagagagacaccattttagtaatccactcgagatganagggactgaaaaccaaggttgcttctgaataaaaaggtgaacgagtccaagagatattaaaaaggtaagatgggaagaatttggtgatggattggaagtggcaagcagggaaagttaagactaagttaaataaagagatgaatgaataaagaatgagaactaaacaagatggccagctttctgtcttgggcaaccaagacaatggtgataccatttactgtaagaggaaacacagagagtattcgaagacgattctccactggtgcctcgcctttcacatattgacactaactggatgccggtgttctagaaaatcatctctaggatgtt

SEQ ID NO: 2271 - DNA, 661 bp, Homo sapiens
  misc_feature [331]..[331]: Chromosome 5, SNP identification no. = rs13356273
  misc_feature [331]..[331]: allele = c, in linkage disequilibrium with rs26396, respectively
  misc_feature [331]..[331]: n is a, t, c or g
agctttgctcactgctagcgcaacagtctgcgatcaatctgtgacactgcagcttgacgggaggagggacatctgccattgctgaggcttaagtagctcacagtgtaaaccaagctgctgggaagcatgaactgggtggagcacaccgcagctcagcaaggcctactggctctatagattccacctctgggggcagggcatagcagaacaaaaggcagcagacagcttctgcagatgtaaacgtccccatctgacagctctgaagagagcagaggttctctcagcatggcgtttgagctccaagaacggtcagactgcctcctcaagtgtngcctgactgggaaacccctcccagtaggggctgacagacacctcaaacaggcaggtgcccctctgggatgaagcttccagaggaaggatcaggcagcaatattagctgttctgcagcctccacctgtgatacccaggcaaacagggtctggagtggacctccagcaaactccaatagacctacagctgaggggtctgttagaaggaaaactaacaaacagaaaggaatagcatcaacaaaaaggacatccacaccaaaaccccatctgtaggtcaccaacatcaacatcaaagaccaaaggtagataaaaccacaaagatggagagaaac

SEQ ID NO: 2272 - DNA, 661 bp, Homo sapiens
  misc_feature [331]..[331]: Chromosome 5, SNP identification no. = rs3104738
  misc_feature [331]..[331]: allele = g, in linkage disequilibrium with rs26396, respectively
  misc_feature [331]..[331]: n is a, t, c or g
ctaagcaaactatcacaaggacagaaaagcaagcaccgcatgctctcactcatacgtgggagttgaacaacaagaacacatggacacagggcggggaacatcacacaccagggcctgtgggagagtgggggcctgggagagggatagcattaagagaaatacctaatgtaaatgacgagttgatgggtacagcaaaccaacatggcacatgtttacctaagtaacaaacctgcacgttgtgcacatgtaccctagaacttaaaagtataataaaaaaataataaaataaaaataatgaagataagcaaagggcacatttatttgtagcctnttacgaaatgttgagttccctaagctcaagttttctgtgtgattcagatgtacagcaactacctgagccactctgcatcgccccatgggacttgggggctgagggaatgaacatgaatgtgaagctcatattattgttatgtcaggaatcataaagtcctttgtttctaatccaggaacttcgtgttgtgtgtcagtatacatgaaactgtggtggctaactggttagcttgcaagtataataacatttcagacccttcacagtttttgacagaggagaggagacggtttttatgtttagtataatgcaaagaaaataagatttagagtc

SEQ ID NO: 2273 - DNA, 661 bp, Homo sapiens
  misc_feature [331]..[331]: Chromosome 5, SNP identification no. = rs154064
  misc_feature [331]..[331]: allele = t, in linkage disequilibrium with rs26396, respectively
  misc_feature [331]..[331]: n is a, t, c or g
tttcattttctactttttccttatagctttattattatatttttaaagtgcataaatatgtcttaacactactaataggtaggcttacatggaaaatgctgaatctcctcagtatgtagtatatgagctactcaacaaatatctgttaaatcagtcaaggactagttgataagaatagcttattttattcactcactaattcatgcatccttattgagatgttattatgctccaggcactgaactaggaagcagagatttagcaaagaaagcccatgctctcatgaaacttacttttggtaaacacagatttagcaaacacagacgagaanttcggacagagacaagtgctataaaacagcagaagcaagaaagagcatgggcggctggtgaggtttaggagaagcttctatgagaaggggttactttatctcccacctggcaatagaaaggggccagcaatcaaatatctgaaataagcactttgcaagcagaagggaaagcaagcgcaaagaccctgaagtgagaacaagcttgaccattagaggaacctaaagaatgtcagtatgcctacttctcatagaaggtgggagggacgagaatagtcaagaggttcaggttgaagaaggaggcagaggccagatcatgcaggtactcatagc

SEQ ID NO: 2274 - DNA, 661 bp, Homo sapiens
  misc_feature [331]..[331]: Chromosome 5, SNP identification no. = rs255991
  misc_feature [331]..[331]: allele = c, in linkage disequilibrium with rs26396, respectively
  misc_feature [331]..[331]: n is a, t, c or g
tcttatcttgctaggggattccctatattaatattatttatgtttgctcttgaaatatccctgggaatacactgtagttgagaaggaaccagaatttaaaacaagcaaaatttctcttatagtaataataagtaatatatggtgcttactattatagtacctggctctgttctaagcagtttatgtatatttagtcatccaatcctcacaataattctataaacaacagtaataatagatactattatccacaattaatagataaggaaactgaggtgcaaagagattcagaaacttaccccaaatcacatatctagtaagtgttgagtgnatataattaaaaacaaaatcttttcccaacccagaaaacttctccacaaaggtagaagagaaagaatacaattttattattgaataagcatcaaagcagaatatcatacatcacaggcaatctgctaagagattacaaagacagaaagaaatcgtaccctttttatatttatatagccaagcagatacaacccatacatacatgttctcaagataaacaatgactagtcctcaaggaaggggacttgacagcaccatttgtcatgcacagttcatcctaaattagcctggtattggggtgaccatgtgtgttactaattggctttaccca

SEQ ID NO: 2275 - DNA, 661 bp, Homo sapiens
  misc_feature [331]..[331]: Chromosome 5, SNP identification no. = rs154065
  misc_feature [331]..[331]: allele = a, in linkage disequilibrium with rs26396, respectively
  misc_feature [331]..[331]: n is a, t, c or g
aaagacaaagattcactgtggaaggttaatataagggggtacataatatagctgtgtgtactgtgtttgcagtacattgtttaattgtgtcttaattaattttctattaaatgtaaactagtgtatgtcatgtgttatataccttcttcttgttttgaatggaattattaaacttcttgtaatcagagatcaaattataccaggtagatggttgtcccaccccctggcagtgttcttacagagtatgtgggtaaaaattcttgtacggttatgaataaaagggatattttagaaatgaagttttgtttctaaaaaggatggtaattttcangcacataaaactaagaaaatccaccttatgtgttctcacctccattttatcctcttgcatattctgctagtggccatgtaaactgctgtacttattgtattagttgctgattttcattttccaacataccaagtactctttccttgaatgatttatgttagacagcattggctcatggcaacagacagttttagaaaatcatcatctggaatgtatataaaatgatcttgtttgtcagtctacctaggttgttaatgtcaaattagatgggcaaattgccaaattattgttagaattgagctatatttgctacagtgcttaatccttggg

SEQ ID NO: 2276 - DNA, 661 bp, Homo sapiens
  misc_feature [331]..[331]: Chromosome 5, SNP identification no. = rs464242
  misc_feature [331]..[331]: allele = t, in linkage disequilibrium with rs26396, respectively
  misc_feature [331]..[331]: n is a, t, c or g
ccttctttacggtcccattagactgtccaggctcttcttatatatttcctgctctagtcttagaaatagccatgttttcaaggattcctgttttcttttacttgagaatagtattagatgacaagatctgggcactaagtgtgctcattgctattgggaagcatttttaatggcatagaacaatgttcattataatctgaggttttaaaaacacaaaattggacaaactgtgatatgaattgtatgtgtatataatctatgaatataagttcattgaaagattaaaaaaacaatgtaggcattcatttatcaaagagttgtgggatttttnaaaaatagttttctgttgtcttcaaattctagatcatgaattatataccttataattagaaaaaatagcaagtggtttttttaacattaaaattattttttaaaaagtaaaatgagacagatcttgttaattttactcatctcctcagactatatttttagtactcatgaagtgcctgtatcccacaagctctcatcatatacacaaggaattgagccagaaactgttgtcaacatctgttttgaggagagtttgaggacagtaatgtaatgatggaaatttcctggcaaaccacaatattgttaaatgtccttaccagtattgaaatta

SEQ ID NO: 2277 - DNA, 661 bp, Homo sapiens
  misc_feature [331]..[331]: Chromosome 5, SNP identification no. = rs466024
  misc_feature [331]..[331]: allele = t, in linkage disequilibrium with rs26396, respectively
  misc_feature [331]..[331]: n is a, t, c or g
tgtgtgtgtgtgtgtgtgtgtgtgtgtgtatgttttctggagcacttccttccttctttacggtcccattagactgtccaggctcttcttatatatttcctgctctagtcttagaaatagccatgttttcaaggattcctgttttcttttacttgagaatagtattagatgacaagatctgggcactaagtgtgctcattgctattgggaagcatttttaatggcatagaacaatgttcattataatctgaggttttaaaaacacaaaattggacaaactgtgatatgaattgtatgtgtatataatctatgaatataagttcattgaaanattaaaaaaacaatgtaggcattcatttatcaaagagttgtgggattttttaaaaatagttttctgttgtcttcaaattctagatcatgaattatataccttataattagaaaaaatagcaagtggtttttttaacattaaaattattttttaaaaagtaaaatgagacagatcttgttaattttactcatctcctcagactatatttttagtactcatgaagtgcctgtatcccacaagctctcatcatatacacaaggaattgagccagaaactgttgtcaacatctgttttgaggagagtttgaggacagtaatgtaatgatggaaa

SEQ ID NO: 2278 - DNA, 661 bp, Homo sapiens
  misc_feature [331]..[331]: Chromosome 5, SNP identification no. = rs686420
  misc_feature [331]..[331]: allele = g, in linkage disequilibrium with rs26396, respectively
  misc_feature [331]..[331]: n is a, t, c or g
tacctgccctcaccccaccccattttccatactgtagtctttggagggaagtcactgtgcacagcttatccttaaaaggtgaaaagttaagtcccacctctttgaaggttgagtatttacataaattatttggaattcagcacagagttgtctattctctcccattatttattcaatcatatatttatatcagtgtggactaatggatatttattttatactttggattataacccaatattactgtatttatttctttgctcagattgttctggcacaggccattgggaacgctttcatttcgacccagtgcccctttgatatactcccntctgtgtgtgtgtgtgtgtgtgtgtgtgtgtgtgtgtatgttttctggagcacttccttccttctttacggtcccattagactgtccaggctcttcttatatatttcctgctctagtcttagaaatagccatgttttcaaggattcctgttttcttttacttgagaatagtattagatgacaagatctgggcactaagtgtgctcattgctattgggaagcatttttaatggcatagaacaatgttcattataatctgaggttttaaaaacacaaaattggacaaactgtgatatgaattgtatgtgtatataatctatgaatataagtt

SEQ ID NO: 2279 - DNA, 661 bp, Homo sapiens
  misc_feature [331]..[331]: Chromosome 5, SNP identification no. = rs154062
  misc_feature [331]..[331]: allele = c, in linkage disequilibrium with rs26396, respectively
  misc_feature [331]..[331]: n is a, t, c or g
cttctccccttcccattgcaatttgcttttgcttatatcatttgcttattatatcatttgcttattatatctatattgccatatacttgggataaaggctgtctacccttaaaggtgctgtgtgtgtgtcttttcttctcccctcgcacgtttccagcacagaacaaatgaccaggtaataacccagagggtttactgtaattacttaagcattcctctattattggaaatgtgagcaatttccaatttttctattaaaagtaatggagtgataaacaattctaaatatatttttggttcaattctttgattacaaccttgcaatagattnctggaagttcattctacctttttaaaaagttaaaataacacatattatgcacagtagctaacccaaagaagctgaagtcccattagactgtgaaacttttccgaggtagattctattcctctagatagtaaggaaaatatccgaaatttgttcccagccctattcattgatttctgcatccattcaataaatatctgagtaactgctatccatcagacaaataaactgttggaaagccatttaaccactttgagaccttgtactctgatccataataaacaccaaatggtcttcacagctgaagaccatttcctgatccttgcaatgaag

SEQ ID NO: 2280 - DNA, 661 bp, Homo sapiens
  misc_feature [331]..[331]: Chromosome 5, SNP identification no. = rs154063
  misc_feature [331]..[331]: allele = a, in linkage disequilibrium with rs26396, respectively
  misc_feature [331]..[331]: n is a, t, c or g
acttcccctgattgcttcaaaatgttcatctgtcaccaagcccttcaaaatttgttgccactgtttctatgacatctgattgtttcttcctaaaatttacagatctcttcaagaaattcaacaatgatgtcaatcagacggagttcttgtaaatgttctctgcaatggagatgtacatctagccaatttattgggggtggattgggctgccctgggagatacacccatgaggaagtaaggaatcaagattggacagaaggagaagttaacccacaatgtggtttcaaatgaggcctccttcagtcctacagggagctctggggctgggacngcagagtttccccacatagaggcaagagggctgggcctttatagccccccatcaaccagccactggccacttggagggacattactttgggagaggctgtgtcctgaggccaacggcaatgcctagtaggggcacagctgtgaagccatcacagtccatgtcccagcagccagagtatgggcccatctcgagatgatgggatctgggcagagacaggtcagccttcactaactctttgcctgttcatttaccttcatgagtcgagctgaaattaagggaatctaactcttgaaaatcaatcctacaatccacagacacatttttttgatc

SEQ ID NO: 2281 - DNA, 661 bp, Homo sapiens
  misc_feature [331]..[331]: Chromosome 5, SNP identification no. = rs27768
  misc_feature [331]..[331]: allele = a, in linkage disequilibrium with rs26396, respectively
  misc_feature [331]..[331]: n is a, t, c or g
aatcactcccaatgtcactcactgccaagcatggtctttcccacaggcaggcacagctgtgaggaggatgtgtgcctagagatgctgacagccaccagtagagagtctgcctgagagagatgtccaaagcgaagcaattctgggagaaggaaagaaagaaaggtggcagggggtggtggggtaaagacagagacctgatgactgaggcctggatccagcctgctctgggtcttttcaggtgtgaccaatacactctcctttgaagcctaatccaggaagagttgagctcctgtatcttgcaatgaaaggctcatgaacagcccgtccctgntgcctgggctctactccatccatcctattagacatctccgttcctacccaccactcctcaaatgttcccagtatcatgtggggaactactgtgtgcctttttagctcccaagcatggcccagctggcaggacatgaggagtcagccccagcagcagctcagtctccttggccttctgtacaacaagcttcagtccaagaggtgttcacattccaccctcagctctacccagcttccttttcataggctgctgccccaagcagagaatcgggcttccaggcaaggagctataagttaggcctgtggttggcttattttaaaggaagcaatc

SEQ ID NO: 2282 - DNA, 661 bp, Homo sapiens
  misc_feature [331]..[331]: Chromosome 5, SNP identification no. = rs460363
  misc_feature [331]..[331]: allele = t, in linkage disequilibrium with rs26396, respectively
  misc_feature [331]..[331]: n is a, t, c or g
aaatgtgtattgtttgttaacataatcatgggttaattaggaagactttccgttgaacagatctaaagcatggtaaaggggatttaatttgttcatattttcctgtatattttctcagacataaaatctaaattttatatttccatgtatagccaatattcatatttatgaaacagatttgcagcaatgttctcaagcaagaaggaaaagttaaagtgtgttaaagctcaccattacatttgttatacaatgttataggagggaaaagaaggcaatgtcaaaatatttcatggagactgtagtctgtcacacaatcaaaattgaagtggcnacataagccagcctacttgctattctgagaacgctcagggtatggattctagcacatctagcaaatatgagtgatcagaaattgtaccaagccctgcccgactgaggtttgccaatctctgctttgacctccccagccagctactacaatgaccaatatgaacatggactgctttaagcatccaaccattactgccatctggactaggaaatagcatctagtaaaaattttcatgacagaagccatgcccaagtctaaagggtatcaagaacctatgtattcttttatctgctattatggaaaaatgtgatgtagtctttctgttgttct

SEQ ID NO: 2283 - DNA, 661 bp, Homo sapiens
  misc_feature [331]..[331]: Chromosome 5, SNP identification no. = rs459730
  misc_feature [331]..[331]: allele = t, in linkage disequilibrium with rs26396, respectively
  misc_feature [331]..[331]: n is a, t, c or g
taggatcgaatgaaaataactaataggagttggtcagatttcttcagggtggagggaaggcagggatgtggcagacagttctgggcagaaggaaccacagcaggaagcacttagaggaagattgcctgggcagtggggatttggtgattaagagggaaggtgtgtgtgtgttgggggagatgggtctgggattagtggcagggaccagattatgcagaaccttgcagatcttggggagattttggactttagcaaggactgaagcaattttgagaacccagatgctcagccttgaagggaagaaccatcttcaggagacttcatgtccttngtctgggaatagctttcctttgcttctatgtgtggaaccacattgtactcacaaagttgtcttgtaaagagatagggaagtaggttggagctatgttttccttattaggatatgacattttaaaaatgtcgacaaaaatagaaatacctagaggatgaaagtgtctttccccctggaaaaacatgccatttcattgcttttttattgagtactattggaaagtaaatgaaggcaagaaatgcaatctgatgtctcattatcagtgctcaggggagagatttctcctagacagcacatttccgagcctaggtagagatgaaaattagataa

SEQ ID NO: 2284 - DNA, 661 bp, Homo sapiens
  misc_feature [331]..[331]: Chromosome 5, SNP identification no. = rs461059
  misc_feature [331]..[331]: allele = c, in linkage disequilibrium with rs26396, respectively
  misc_feature [331]..[331]: n is a, t, c or g
catctcccccaacacacacacaccttccctcttaatcaccaaatccccactgcccaggcaatcttcctctaagtgcttcctgctgtggttccttctgcccagaactgtctgccacatccctgccttccctccaccctgaagaaatctgaccaactcctattagttattttcattcgatcctaaatgcttcttcagggaaacctgatctgatcctccctctctcaagattgggttgggacttcttatcatacaattcattcctacaattctctgtactcctctgattcagttatcacaattgtaattggtaacaatttgcatattttttaangtaatggatgtttcttctataagatcgtaagctctatgtgagcaggaactgtcttattatcaaggtattaacaagatactatgtctaccacaacatagatatttcataaatatttgaggaagggagaaagagaaagatggttactaaaatcgttggtacttaattggaaggagatcttccagctacacatacatatttggggttggtttattatatagaacattttaactgaatattctccccattccaagacatctggaaaacagctacaagacaatactcatgagcagatgtaggggatcgatcaaggtggtgggagtaattataaag

SEQ ID NO: 2285 - DNA, 661 bp, Homo sapiens
  misc_feature [331]..[331]: Chromosome 5, SNP identification no. = rs458978
  misc_feature [331]..[331]: allele = c, in linkage disequilibrium with rs26396, respectively
  misc_feature [331]..[331]: n is a, t, c or g
tgtgcccacagatgatcacaggttgttggtcttaggaccacatgagtaagctatttagataaactcctctacattcctgtgtatctataccccaagcttttaagagaattcagctgccttcagccaaatcttttactgaagctatgcaaacctcctggccttccaagaaggttcgtgtctatttcctataactttatctttataattactcccaccaccttgatcgatcccctacatctgctcatgagtattgtcttgtagctgttttccagatgtcttggaatggggagaatattcagttaaaatgttctatataataaaccaaccccanatatgtatgtgtagctggaagatctccttccaattaagtaccaacgattttagtaaccatctttctctttctcccttcctcaaatatttatgaaatatctatgttgtggtagacatagtatcttgttaataccttgataataagacagttcctgctcacatagagcttacgatcttatagaagaaacatccattacattaaaaaatatgcaaattgttaccaattacaattgtgataactgaatcagaggagtacagagaattgtaggaatgaattgtatgataagaagtcccaacccaatcttgagagagggaggatcagatcaggttt

SEQ ID NO: 2286 - DNA, 661 bp, Homo sapiens
  misc_feature [331]..[331]: Chromosome 5, SNP identification no. = rs467144
  misc_feature [331]..[331]: allele = t, in linkage disequilibrium with rs26396, respectively
  misc_feature [331]..[331]: n is a, t, c or g
aagatcataactcctagactaaatatggaatgtatagcattatttttcagaggagtttaacaacatgatttgaagtcatgatacatgtatagaactcacaagaagaaagatctgaaaatattcacttatgaggtctcaaaactgagcctgcaaataaacaaactaacccactctcattcactggaaacttttcttcaactaatggtggcaccttcctctagccttctctccaaaacaatggaaagacctatcagcaaggctggtgataagggacagtcagactcaatcacaaatcatgggtttgggtaccaagcatgtatttagcactggngtggtgatgtggcctcactaatggtgaagcagtgggtagcctggaaattatggccttggtagcaatcagatgtctgtcaatatctagctttgccacttactaactatggacaaaaccaggactgccgaaaagttacttagcctctctaagaatttcccatacataaaatgcaactaacactatctctttgtcaaaactgctgtgaggtttaagtgagacaatgtacataatctataaatgtttctttgagatgctgtacatagaatgcctaagagatagatatatttcgtttatttcccctaaaactatgcctttcaggggacaagaaag

SEQ ID NO: 2287 - DNA, 661 bp, Homo sapiens
  misc_feature [331]..[331]: Chromosome 5, SNP identification no. = rs460102
  misc_feature [331]..[331]: allele = a, in linkage disequilibrium with rs26396, respectively
  misc_feature [331]..[331]: n is a, t, c or g
gaaagatctgaaaatattcacttatgaggtctcaaaactgagcctgcaaataaacaaactaacccactctcattcactggaaacttttcttcaactaatggtggcaccttcctctagccttctctccaaaacaatggaaagacctatcagcaaggctggtgataagggacagtcagactcaatcacaaatcatgggtttgggtaccaagcatgtatttagcactggcgtggtgatgtggcctcactaatggtgaagcagtgggtagcctggaaattatggccttggtagcaatcagatgtctgtcaatatctagctttgccacttactaantatggacaaaaccaggactgccgaaaagttacttagcctctctaagaatttcccatacataaaatgcaactaacactatctctttgtcaaaactgctgtgaggtttaagtgagacaatgtacataatctataaatgtttctttgagatgctgtacatagaatgcctaagagatagatatatttcgtttatttcccctaaaactatgcctttcaggggacaagaaagcagaatgacagaaataagatgaggctatagaatatagaaaatgaaaaattataggacttttaacgtataacatatgtctaataataatatcaataacaaaaata

SEQ ID NO: 2288 - DNA, 661 bp, Homo sapiens
  misc_feature [331]..[331]: Chromosome 5, SNP identification no. = rs462526
  misc_feature [331]..[331]: allele = c, in linkage disequilibrium with rs26396, respectively
  misc_feature [331]..[331]: n is a, t, c or g
ggtagcctggaaattatggccttggtagcaatcagatgtctgtcaatatctagctttgccacttactaactatggacaaaaccaggactgccgaaaagttacttagcctctctaagaatttcccatacataaaatgcaactaacactatctctttgtcaaaactgctgtgaggtttaagtgagacaatgtacataatctataaatgtttctttgagatgctgtacatagaatgcctaagagatagatatatttcgtttatttcccctaaaactatgcctttcaggggacaagaaagcagaatgacagaaataagatgaggctatagaatanagaaaatgaaaaattataggacttttaacgtataacatatgtctaataataatatcaataacaaaaataatgatggtgatttagtagggtgcctggtaaggaataatttttttttaagtagaactgtcatttaaaagttgctagttacttgggattatattttcctaaactgggttcctcaggcacaacctacttcaggcagcctattctgtagtgtttaaaggcacagactctggtgacatagacctgggtccatcatacagatgtataactttgggcaagtcagttaatctcctgtggttcagtttcctcatttgtaaaatgcagaag

SEQ ID NO: 2289 - DNA, 661 bp, Homo sapiens
  misc_feature [331]..[331]: Chromosome 5, SNP identification no. = rs448433
  misc_feature [331]..[331]: allele = t, in linkage disequilibrium with rs26396, respectively
  misc_feature [331]..[331]: n is a, t, c or g
caggcacaacctacttcaggcagcctattctgtagtgtttaaaggcacagactctggtgacatagacctgggtccatcatacagatgtataactttgggcaagtcagttaatctcctgtggttcagtttcctcatttgtaaaatgcagaagacatcaacctaagtgttgcagtaaataaatcagttaatatatatacaacacttagaatagtgccttatacataataaatgttacatatgtttagctattattaatattagttatgaagtgtcattttaaaatggcactgggtaagaagctccacatgttggttggcctcaggccagaggngagatggcacaactgagcagagagaggccagctcagggtaggctggggaggaactcatcagcaagtcagacctcacctaatgcagctttagaagatagactgcgggccgggcatattgactcatgcctgtaatcccagtactttgggaggctgaggtgggtggatcacttgaggtcaggagttcgagaccaacctggccaacatggtgaaaccccatctttactaaaaatataaaaagtagccaggtgtgatggcaggcacctgtagttccagccacttgggagactgaggcaggagaatcgcttgaacccaggaggtggaggttgcagt

SEQ ID NO: 2290 - DNA, 661 bp, Homo sapiens
  misc_feature [331]..[331]: Chromosome 5, SNP identification no. = rs465847
  misc_feature [331]..[331]: allele = g, in linkage disequilibrium with rs26396, respectively
  misc_feature [331]..[331]: n is a, t, c or g
tactaccctgtctttgaattagcttttgttaaatcacaatgtgcattttttttttgagagagagagtcttgctctgtcgcccaggctagagtgcagtggcacaatctcggctcactgcaacctccacctcctgggttcaagcgattctcctgcctcagtctcccaagtggctggaactacaggtgcctgccatcacacctggctactttttatatttttagtaaagatggggtttcaccatgttggccaggttggtctcgaactcctgacctcaagtgatccacccacctcagcctcccaaagtactgggattacaggcatgagtcaatangcccggcccgcagtctatcttctaaagctgcattaggtgaggtctgacttgctgatgagttcctccccagcctaccctgagctggcctctctctgctcagttgtgccatctcgcctctggcctgaggccaaccaacatgtggagcttcttacccagtgccattttaaaatgacacttcataactaatattaataatagctaaacatatgtaacatttattatgtataaggcactattctaagtgttgtatatatattaactgatttatttactgcaacacttaggttgatgtcttctgcattttacaaatgaggaaactgaaccacagga

SEQ ID NO: 2291 - DNA, 661 bp, Homo sapiens
  misc_feature [331]..[331]: Chromosome 5, SNP identification no. = rs397826
  misc_feature [331]..[331]: allele = t, in linkage disequilibrium with rs26396, respectively
  misc_feature [331]..[331]: n is a, t, c or g
aatgtcttattttctgttaatgttgccatgctaatgtctcgcagtggctctatttgaaaaacatttcttacactattttattactttcttcatcctcttaattatatctggattatatcctgaatggtgtatttacaaatgcccatttcatattttaaaatctattctttttctaggagcatatatctgatgtgagtttcagataatttcatttgtatttggtaccagaaatttgttgtgtgagctggttttgcatacgtgtacatgaaaatatttattgtgttatctattgtggtagggcttgctctttactaccctgtctttgaattancttttgttaaatcacaatgtgcattttttttttgagagagagagtcttgctctgtcgcccaggctagagtgcagtggcacaatctcggctcactgcaacctccacctcctgggttcaagcgattctcctgcctcagtctcccaagtggctggaactacaggtgcctgccatcacacctggctactttttatatttttagtaaagatggggtttcaccatgttggccaggttggtctcgaactcctgacctcaagtgatccacccacctcagcctcccaaagtactgggattacaggcatgagtcaatatgcccggcccgcagtctatctt

SEQ ID NO: 2292 - DNA, 661 bp, Homo sapiens
  misc_feature [331]..[331]: Chromosome 5, SNP identification no. = rs3095925
  misc_feature [331]..[331]: allele = c, in linkage disequilibrium with rs26396, respectively
  misc_feature [331]..[331]: n is a, t, c or g
tgaaatgggcatttgtaaatacaccattcaggatataatccagatataattaagaggatgaagaaagtaataaaatagtgtaagaaatgtttttcaaatagagccactgcgagacattagcatggcaacattaacagaaaataagacattacactaggcagccacccacgacataggaaggctctgctgtctcagatccatttgttcctaattcagttattcaccagctctcattttgaggtgatctcaaaaaatgagattcttgtgattatgagaatatatttttatgatcctaaaagtatttctcttcctcaaattagaaaaaaaaaangaactatatcaatagagaaactcaccaaaatgcatccctattttttacctgtaaggatcattttgtgagagttaagtcaggccatgcttgaaaacactaatgattgatattagttattgtgacatctggggttgaaaggattaagggactaattcaatgagtgctcttccatggtggctgtaagtatgatacacacttacaggagaatgattattctactgaagaaaaggcattccttatatattatagattttacatatgttataattaattacaaaacattatatatatttttatatatggcactccatatatagctatatagataga

SEQ ID NO: 2293 - DNA, 661 bp, Homo sapiens
  misc_feature [331]..[331]: Chromosome 5, SNP identification no. = rs462862
  misc_feature [331]..[331]: allele = a, in linkage disequilibrium with rs26396, respectively
  misc_feature [331]..[331]: n is a, t, c or g
ataatttttacaaatggctttagtttatctagtctgaatagatgtacgaaaactagttcagcaaaagagaaaattataaaacaattggaagacggcatttgtggttagtaaaccactatggtatgtgttctacaaaggaaatgaataatcttactttgaatttaaaatattttatatctatctatctatctatatagctatatatggagtgccatatataaaaatatatataatgttttgtaattaattataacatatgtaaaatctataatatataaggaatgccttttcttcagtagaataatcattctcctgtaagtgtgtatcatanttacagccaccatggaagagcactcattgaattagtcccttaatcctttcaaccccagatgtcacaataactaatatcaatcattagtgttttcaagcatggcctgacttaactctcacaaaatgatccttacaggtaaaaaatagggatgcattttggtgagtttctctattgatatagttcattttttttttctaatttgaggaagagaaatacttttaggatcataaaaatatattctcataatcacaagaatctcattttttgagatcacctcaaaatgagagctggtgaataactgaattaggaacaaatggatctgagacagca

SEQ ID NO: 2294 - DNA, 661 bp, Homo sapiens
  misc_feature [331]..[331]: Chromosome 5, SNP identification no. = rs464971
  misc_feature [331]..[331]: allele = g, in linkage disequilibrium with rs26396, respectively
  misc_feature [331]..[331]: n is a, t, c or g
agggaaaataaagaaaggacaatcaggcaatttttttattagtagcttttataatatattttttcatggcaaaatttaaataattgactcctatgatgtttgtgacattttgtgttgctttgacatatgccttatacacacgtatgcacacacagagaggatacctttaccaggcatggtttatgcacatgcctactctttcatgcatatcatatttttcactggagtcaaagataaccagaagaatgccaatattcttccacttctaaatttaatcatccactttaatagtaataaagtaatagtattacatttaaatgatgaaataatntttacaaatggctttagtttatctagtctgaatagatgtacgaaaactagttcagcaaaagagaaaattataaaacaattggaagacggcatttgtggttagtaaaccactatggtatgtgttctacaaaggaaatgaataatcttactttgaatttaaaatattttatatctatctatctatctatatagctatatatggagtgccatatataaaaatatatataatgttttgtaattaattataacatatgtaaaatctataatatataaggaatgccttttcttcagtagaataatcattctcctgtaagtgtgtatcatacttaca

SEQ ID NO: 2295 - DNA, 661 bp, Homo sapiens
  misc_feature [331]..[331]: Chromosome 5, SNP identification no. = rs464001
  misc_feature [331]..[331]: allele = t, in linkage disequilibrium with rs26396, respectively
  misc_feature [331]..[331]: n is a, t, c or g
ttcttatattgaaatgtaaaattgattttgatacaagaataatttcgctattttgatagttgcttttgaatagtattttcaccacaccacactgggactccagatgttttccaaaatatcttttgggattggaagagattttagagacaagctctgggtcaccacagaacagttgcctcctgcgccctgtggggccaaacccccaaatcagcagggaccacgctgtctctagctgagagcagacgtgggctgcaccttctcttttcttctttgttttcctctacttctaaagaaagcttcaggtgaggaacagtaatggggtttggctgtnattgtgactttgcccagtcctgtctgaccttgtatacacaccagttcaactcaatagcatttcaagtggaaaaaaaacttgaccatttgggtcatcccctcagcctctctctgctccctttggcccactatgcagcaaaatgttctacactcaggctggtgcttttgtgatttccttgctttctctgtgggaatcagcagaataagacagaagggaatagtcagagatgggagggagacctgcagttggcagaatttctcaggcctcatgctctctgcctctgggcttttcaaggaagatagagcattttagagtgtatttatacctatt

SEQ ID NO: 2296 - DNA, 661 bp, Homo sapiens
  misc_feature [331]..[331]: Chromosome 5, SNP identification no. = rs463961
  misc_feature [331]..[331]: allele = a, in linkage disequilibrium with rs26396, respectively
  misc_feature [331]..[331]: n is a, t, c or g
atagatattctctcaaaatagaaatgatattctatccattcctgttcttatattgaaatgtaaaattgattttgatacaagaataatttcgctattttgatagttgcttttgaatagtattttcaccacaccacactgggactccagatgttttccaaaatatcttttgggattggaagagattttagagacaagctctgggtcaccacagaacagttgcctcctgcgccctgtggggccaaacccccaaatcagcagggaccacgctgtctctagctgagagcagacgtgggctgcaccttctcttttcttctttgttttcctctacttntaaagaaagcttcaggtgaggaacagtaatggggtttggctgtgattgtgactttgcccagtcctgtctgaccttgtatacacaccagttcaactcaatagcatttcaagtggaaaaaaaacttgaccatttgggtcatcccctcagcctctctctgctccctttggcccactatgcagcaaaatgttctacactcaggctggtgcttttgtgatttccttgctttctctgtgggaatcagcagaataagacagaagggaatagtcagagatgggagggagacctgcagttggcagaatttctcaggcctcatgctctctgcctctgggc

SEQ ID NO: 2297 - DNA, 661 bp, Homo sapiens
  misc_feature [331]..[331]: Chromosome 5, SNP identification no. = rs458663
  misc_feature [331]..[331]: allele = g, in linkage disequilibrium with rs26396, respectively
  misc_feature [331]..[331]: n is a, t, c or g
ctgaaaactgccaatagatattctctcaaaatagaaatgatattctatccattcctgttcttatattgaaatgtaaaattgattttgatacaagaataatttcgctattttgatagttgcttttgaatagtattttcaccacaccacactgggactccagatgttttccaaaatatcttttgggattggaagagattttagagacaagctctgggtcaccacagaacagttgcctcctgcgccctgtggggccaaacccccaaatcagcagggaccacgctgtctctagctgagagcagacgtgggctgcaccttctcttttcttctttgntttcctctacttctaaagaaagcttcaggtgaggaacagtaatggggtttggctgtgattgtgactttgcccagtcctgtctgaccttgtatacacaccagttcaactcaatagcatttcaagtggaaaaaaaacttgaccatttgggtcatcccctcagcctctctctgctccctttggcccactatgcagcaaaatgttctacactcaggctggtgcttttgtgatttccttgctttctctgtgggaatcagcagaataagacagaagggaatagtcagagatgggagggagacctgcagttggcagaatttctcaggcctcatgctc

SEQ ID NO: 2298 - DNA, 661 bp, Homo sapiens
  misc_feature [331]..[331]: Chromosome 5, SNP identification no. = rs463261
  misc_feature [331]..[331]: allele = t, in linkage disequilibrium with rs26396, respectively
  misc_feature [331]..[331]: n is a, t, c or g
caggcaaaacaagaaaacctcctacatatacctgttagctgaatctttatggtgcttgatgccagggtggctacatatttggagaaatagttataatgaaggaggttgggatccaagggctctgttggaaattttcattcttaatcaaggtagtgtgctgcaaacatgttaaaatatgcatcctctctcctgtgcaaggctgatctgtgcatggcaaatggtccatttctgaaaactgccaatagatattctctcaaaatagaaatgatattctatccattcctgttcttatattgaaatgtaaaattgattttgatacaagaataatttngctattttgatagttgcttttgaatagtattttcaccacaccacactgggactccagatgttttccaaaatatcttttgggattggaagagattttagagacaagctctgggtcaccacagaacagttgcctcctgcgccctgtggggccaaacccccaaatcagcagggaccacgctgtctctagctgagagcagacgtgggctgcaccttctcttttcttctttgttttcctctacttctaaagaaagcttcaggtgaggaacagtaatggggtttggctgtgattgtgactttgcccagtcctgtctgaccttgtatacacaccagt

SEQ ID NO: 2299 - DNA, 661 bp, Homo sapiens
  misc_feature [331]..[331]: Chromosome 5, SNP identification no. = rs463587
  misc_feature [331]..[331]: allele = g, in linkage disequilibrium with rs26396, respectively
  misc_feature [331]..[331]: n is a, t, c or g
gcagagcctatggagagggagaggtcaaagataaaggagaaagggggataattgatgggagaaggttcctaagtacatgggttggggtgggtcccacaggccatgggagggaggtctcccttagcctttagccagaagaagcaccccttttccattgcagatggaaggagacagtgtggacgtggatgcagggaggtctgtaggcttggtggtaacagtttgagggtgttctgtctggcggccacttcctagttttgaagtgtgattaggatttggacatagggagatattgaaagactgttgcctaagcacaaaggcaaataagtgtccngtgtatgcaaaaaatgggaagtcagtagcgggactgaaagctagggtgtgggcagaggggtagtgagaatgaaggtgagagtgaaggtgtggccagatatgagggctgagacgtgtactctccaaccctggaggcaattgagcagggtagtgactgggtcaacctgagccttaggagggcgaagctgatgtggaaacaggagaacatgtggaggccacagtagtctcagtgagagcttgcagctgggctgtgctctgaccttggtgacagaaagatggaaagatttgcgggatcaggggattggctgaatgtccagggaagggggagtaa

SEQ ID NO: 2300 - DNA, 661 bp, Homo sapiens
  misc_feature [331]..[331]: Chromosome 5, SNP identification no. = rs443272
  misc_feature [331]..[331]: allele = t, in linkage disequilibrium with rs26396, respectively
  misc_feature [331]..[331]: n is a, t, c or g
cattctcctgcctcagactcctgagtagctgggactacaggcgcccaccaccatgcccggctaattttttgcatttttagtagagacggggtttcatcatgttagccaggatggtctcgatctcctgacctcgtgatccgcccgcctcggcctcccaaaggctactgttttgttttatcatctgtatagagccaaattgcttggccactctccctgtccccacctccacaatttccacatacccccgcaaccactgcagcctcaccttcatctcaccactcatttctcctggctggtgaactcatcccattagtttgtaaaatgtattgangcctacatgtcatattgatgcttacatgtattgccccagacaacacatgcctagcacttgcccagcacttgggggaaggggaagtggggagaggagaaaccagatatgacctctctgagtcagaagttctaactgatagctaaattcatgccagagatatattttatttaacctatgatgcttttaaaaatatattatttatttgacaaaaattcaggaatctaaagacttcacacaaaaatctgggatttggcttctattaaagaatctagaagctctggcaacacggtttctttcccaggtgccagtattcagctgagaagcagctgc

SEQ ID NO: 2301 - DNA, 661 bp, Homo sapiens
  misc_feature [331]..[331]: Chromosome 5, SNP identification no. = rs457568
  misc_feature [331]..[331]: allele = g, in linkage disequilibrium with rs26396, respectively
  misc_feature [331]..[331]: n is a, t, c or g
tcccattattaaactttttatattgattgcgtgttgggataacattttggatatattaggttaaattaaatataatattaaagttagttttacaagtaaaattacatatgtgtctcatacttgtatttttattggataacactgatctaaagcagggatttcaaactccaaactccaatgcccacaggggccaccaaagtaaagacaaggagccaagagggtttggtggggccatggtggaccagggagcccctgccctctggaaggagcagctgcttctcagctgaatactggcacctgggaaagaaaccgtgttgccagagcttctagnttctttaatagaagccaaatcccagatttttgtgtgaagtctttagattcctgaatttttgtcaaataaataatatatttttaaaagcatcataggttaaataaaatatatctctggcatgaatttagctatcagttagaacttctgactcagagaggtcatatctggtttctcctctccccacttccccttcccccaagtgctgggcaagtgctaggcatgtgttgtctggggcaatacatgtaagcatcaatatgacatgtaggcgtcaatacattttacaaactaatgggatgagttcaccagccaggagaaatgagtggtgagatg

SEQ ID NO: 2302 - DNA, 661 bp, Homo sapiens
  misc_feature [331]..[331]: Chromosome 5, SNP identification no. = rs27688
  misc_feature [331]..[331]: allele = c, in linkage disequilibrium with rs26396, respectively
  misc_feature [331]..[331]: n is a, t, c or g
gagtgaggaatgaatacgttgcatttttttagtattttaacaaaagcatgtagtgtttatgaatgctgaacttttatttttttctctttaaataaattttgttaaaattgctttcacaaaggataaactatttttgaaaagaagtaggaaaattattcagtgtatgttagatatgttttgaaacatagcaagaggaatctattcattgggataagattcctacaacatatctgtaagccctgataaaaagtggaaaaaaaattttctacaattaagtctatacatgaagtgtatcttgctttattagctgagcttttaaataaagcacatntttaacaaaatgattcaaaaacatgacttgggttgatttttgcaatttttcagatgtttttactatgacttcaaagaacacaactccatcttaaagaaggcacagatttaaaaacataattcctattataaacgactaaagtcactgaagaaaactaataatatcaaaatcaagcccctaaaacaatgttagtagctttatactggtctagcttcagaaatgacccctttcatattgaaagtgagagagggtagatgagaccttaggacattttggagcagggtggaaagtggagtttgatgtgtgatagcattcatgaaaagtgctcgg

SEQ ID NO: 2303 - DNA, 661 bp, Homo sapiens
  misc_feature [331]..[331]: Chromosome 5, SNP identification no. = rs26393
  misc_feature [331]..[331]: allele = t, in linkage disequilibrium with rs26396, respectively
  misc_feature [331]..[331]: n is a, t, c or g
aaattgggtgaaggtcacacaggagctctatgtagtatgtttgcaacttcctgtgagtccataattattttaaaatttaaagtataaataaaagcaaacaataataaagcatgtttttttgaaaaaattgtgtgctgctgaaagttttcctttggaaccttaataattagagaatgaaacagtcttagagctacgatggcctaccctttctttgtagctctgttctggccaaccccacctaattcctgaggaagcctctgagaagcaaatgagggaaaagtcaggactggtgaggcagagtccacattagggcaagctcacaactgcaaangtaaacacagaggctgtgaagcactctccacacagaataagaaaagccaaccacatttgcctttatggaggtacctccccaccgggtgaaagcagaagggttggcatttttcactggcttttccttcctcttcactccagtttcctttctctgtattttatttctgtgttagtccttacttttcaaagtttcaggtaaaccttttaaagtttcagttaaaactcttcagctaaattataaatatcatagctaagtctaactgtgtaagctggtggtggcttaagtgttaactctctctggagtatttatgagctttatatatgggagctt

SEQ ID NO: 2304 - DNA, 661 bp, Homo sapiens
  misc_feature [331]..[331]: Chromosome 5, SNP identification no. = rs27767
  misc_feature [331]..[331]: allele = c, in linkage disequilibrium with rs26396, respectively
  misc_feature [331]..[331]: n is a, t, c or g
ccaaccacatttgcctttatggaggtacctccccaccgggtgaaagcagaagggttggcatttttcactggcttttccttcctcttcactccagtttcctttctctgtattttatttctgtgttagtccttacttttcaaagtttcaggtaaaccttttaaagtttcagttaaaactcttcagctaaattataaatatcatagctaagtctaactgtgtaagctggtggtggcttaagtgttaactctctctggagtatttatgagctttatatatgggagctttataaaactgaaaatctccatcaaaataagtagaaaccttcattaangacttggccattcaaggtagtgttagtcttacaaagcgagctacacaccaacttcagaggctttcgctccaaacctgcatcaatcccttattaaatcaatatggagatcattttcaaaagcccaaggcaaactgtcttttctacaccaatcaagctgaaagcaccaagaccacaaaaaactacctgaatataaagctgctctgaaagcacaaaaagaaactggactacccagaaatcttattctctagagagaacaagaggaaaaatattttgtttctagtttgttataattgtagactggagataatgctacacaattcaaccttaaat

SEQ ID NO: 2305 - DNA, 661 bp, Homo sapiens
  misc_feature [331]..[331]: Chromosome 5, SNP identification no. = rs26394
  misc_feature [331]..[331]: allele = c, in linkage disequilibrium with rs26396, respectively
  misc_feature [331]..[331]: n is a, t, c or g
ccactcaggtggtaggcaagaagtggtgaccacagtgacattctagatacaggacattttgaagacagaactgacagctgggcatggtggctcttgcctgtagtcccagctacttgagaggctgaggagggatgatcacttgatcccaggaatttgaggctgcagtgacctatgactgtgtgactgtactccacatgggtgatagagcaagaccccgtctcagaaataaacaaatacataaaattaaagatagagctgagaggatttaccatagtttggacatggggtactcaagtactatgttaaactgtttgcattatttatcatacanagctctcattgcaaccccatttcatagatgaagaaaccaaccctgaggcatatgaagagacttgcaaggtcactcattgagtaattagcagatccaacaatagaagccaggtccatgggcttccaaagccacatggcttctttaattttaaaatatatgcataaatagaataaataatggaaagaagcctcaaaagatgaactgatccatgcccttgccctaggtgagcaataagatgaccttggacagaaccaaaacttacactcaatgagatcaaggatgtaaatgcaagcacgaaaacaacatttctggaactaattgagttaaagg

SEQ ID NO: 2306 - DNA, 661 bp, Homo sapiens
  misc_feature [331]..[331]: Chromosome 5, SNP identification no. = rs26395
  misc_feature [331]..[331]: allele = t, in linkage disequilibrium with rs26396, respectively
  misc_feature [331]..[331]: n is a, t, c or g
cccgtctcagaaataaacaaatacataaaattaaagatagagctgagaggatttaccatagtttggacatggggtactcaagtactatgttaaactgtttgcattatttatcatacatagctctcattgcaaccccatttcatagatgaagaaaccaaccctgaggcatatgaagagacttgcaaggtcactcattgagtaattagcagatccaacaatagaagccaggtccatgggcttccaaagccacatggcttctttaattttaaaatatatgcataaatagaataaataatggaaagaagcctcaaaagatgaactgatccatgcncttgccctaggtgagcaataagatgaccttggacagaaccaaaacttacactcaatgagatcaaggatgtaaatgcaagcacgaaaacaacatttctggaactaattgagttaaaggccaattaaacggcacttcaggagccccactgtcagtgcagtcttggctgctgtcccagctcccagcactaggtcagatatcttcaggccctcatgttctctcccagtctctgaaatgggataataatatttgtccacctgacccatctcacaaggacccaattcaaagacaaatgtaagcagcatttttaatgagtaaagcctgtccaaaaga

SEQ ID NO: 2307 - DNA, 661 bp, Homo sapiens
  misc_feature [331]..[331]: Chromosome 5, SNP identification no. = rs26396
  misc_feature [331]..[331]: allele = c, t
  misc_feature [331]..[331]: n is a, t, c or g
tggctaaaaagttttctcggatcctgattagcctgtaagtccatctcccaggtttattctcaatctcaacttctgccttcatccacagttaaatctctaaattctggccatgagggtatgtagacattacagatactgttttccacttttgatagatagagcaactaggaaaccaaggcatgaggggacttggaccatatgaagttagtggtgggaccagtgaggtatttacaggtagcaccatcttttaggggaccttaggcttaagccatccttactccccaccactctcagtgtttgcagatctgtttttcattcaattctacaattnggcagattggatccaacagtgatttaaacgctccaagacagagaattgctagtctctgtgaggctatatcagatgatagcctgaactccaaagacattaggtctggaattttacatccttggctctggctagacagagcatatgggcactctgcacttttctctcagcatttggttaagaaactaattttaggcaataaagttgctgctataaacaaacaaaattgtactcgccatttatggggactgttatctataaataagacctctgagcattaatgatattggatatatggcaagacctgtggggacagtttcatattgcaatagc

SEQ ID NO: 2308 - DNA, 661 bp, Homo sapiens
  misc_feature [331]..[331]: Chromosome 5, SNP identification no. = rs154058
  misc_feature [331]..[331]: allele = c, in linkage disequilibrium with rs26396, respectively
  misc_feature [331]..[331]: n is a, t, c or g
ttcataggcaagtctgcactcacaggatctggtctctcaccttgatcagagcccagggacttccagatgattcagcctttccttggctccaactgtctgtcaccccagacatctgtcatttgccttattttgcccctgccccccatcaggtacctataactgagcctctgctgcaaggccacccaggcctactggctgtcagttcagcatccataacactagaaatgaggtaggctcaggaaatctaaacatccaatgtcaggggctcttcctgccacctacagagcaccacctagtttttggtcatgtggttacatcctaaattggtttntaactgctgtgtcctggtggaacagacaattggaatccttgctcttctctatctctatccctccatgctgtgcgcccctcatcccccatccctaaccttccctccatcccctaagactgtgccttagtatccagacaggatgggtttatcattcagggccacggcaggaaacataagacacattgaaataagaagatttgatatgtttaattattttcaaaggtatgacaaagtttagagcagtaactctcagaatgtcgtctggcgacctgagactctttcagggatctgcaaggtgaaaactatttttataataatactaagatgtca

SEQ ID NO: 2309 - DNA, 661 bp, Homo sapiens
  misc_feature [331]..[331]: Chromosome 5, SNP identification no. = rs154060
  misc_feature [331]..[331]: allele = a, in linkage disequilibrium with rs26396, respectively
  misc_feature [331]..[331]: n is a, t, c or g
cataaatgaatttaaaggtaaaaaacaaacagtgaataatatttgcaaaatatataccaggcagattaaatacagaaattataaagaactactcaaattgataagaaaaagacaaataactcaacagaaaattaggcaaaggatattaacaagaaatttgcaaaagtgaaatctcaccagcaaaaagaaaaaaatgagaatttaaacaccactaaaatatagtttaaaaaaattattcacagggagtaacaagatataaagtactttgattagcatcagctgttggtataggggtgagaaatggatgtcacggtcattacttatggaagcntgagttgttcagccacttaataggccaatttggcaacatctacttaaatgcacataatttatgactgcaattctactgctagatatcttttccatgtaacactgcacaaacactaggagatatgtataaggattctattgcagcattgttagaaatagcagcaagggttaataattacaaaaagtgaagggagaactatgaatgctcttcaagacagaaatgtaacaaattgggatttatttacaaaattctatgtagcagtcaaaaagaaagggatggtttgatatttttatataaaaatgtttactaaaacattgttgagccaaaaaa

SEQ ID NO: 2310 - DNA, 661 bp, Homo sapiens
  misc_feature [331]..[331]: Chromosome 5, SNP identification no. = rs252941
  misc_feature [331]..[331]: allele = g, in linkage disequilibrium with rs26396, respectively
  misc_feature [331]..[331]: n is a, t, c or g
atttggcaacatctacttaaatgcacataatttatgactgcaattctactgctagatatcttttccatgtaacactgcacaaacactaggagatatgtataaggattctattgcagcattgttagaaatagcagcaagggttaataattacaaaaagtgaagggagaactatgaatgctcttcaagacagaaatgtaacaaattgggatttatttacaaaattctatgtagcagtcaaaaagaaagggatggtttgatatttttatataaaaatgtttactaaaacattgttgagccaaaaaaagcaagctacaaattgatatttacattntaatagcccactggtattaataaatacataaatttgcaaatgagaaattattggtacaataaaaaataatacaccagaacacattgagattcatctccacggtggcaaaatagttcgacattaggaaatttattaaaataatatcccctattaattgctcaaattatatccagtaatactcagaagacatggaacagattcaacattatttcctaatttaaaatttaaaatcttcgtagatagagatggataattccttaacatgatatgataatatatgtataagaccccaaagccagtaatatccttcatagcaaagcaataagagaa

SEQ ID NO: 2311 - DNA, 661 bp, Homo sapiens
  misc_feature [331]..[331]: Chromosome 5, SNP identification no. = rs153289
  misc_feature [331]..[331]: allele = t, in linkage disequilibrium with rs26396, respectively
  misc_feature [331]..[331]: n is a, t, c or g
caaaaagaaagggatggtttgatatttttatataaaaatgtttactaaaacattgttgagccaaaaaaagcaagctacaaattgatatttacattttaatagcccactggtattaataaatacataaatttgcaaatgagaaattattggtacaataaaaaataatacaccagaacacattgagattcatctccacggtggcaaaatagttcgacattaggaaatttattaaaataatatcccctattaattgctcaaattatatccagtaatactcagaagacatggaacagattcaacattatttcctaatttaaaatttaaaatcttngtagatagagatggataattccttaacatgatatgataatatatgtataagaccccaaagccagtaatatccttcatagcaaagcaataagagaagcaatcttgtgcgtgtcaagaacaagacatatcattagggagactagatgtcaaataaggaaatggctacttaaaagtgtctacatgagtgagccaatgcatttacataagaaaatgaagtaagatttgtaaatgttggaaagaacaggaaaatttttcatgacttattgatgatatcatatgtacttgaaaaactccagagaaaaaaatatagaaacaataagaaaagccagta

SEQ ID NO: 2312 - DNA, 661 bp, Homo sapiens
  misc_feature [331]..[331]: Chromosome 5, SNP identification no. = rs153290
  misc_feature [331]..[331]: allele = t, in linkage disequilibrium with rs26396, respectively
  misc_feature [331]..[331]: n is a, t, c or g
aattgctcaaattatatccagtaatactcagaagacatggaacagattcaacattatttcctaatttaaaatttaaaatcttcgtagatagagatggataattccttaacatgatatgataatatatgtataagaccccaaagccagtaatatccttcatagcaaagcaataagagaagcaatcttgtgcgtgtcaagaacaagacatatcattagggagactagatgtcaaataaggaaatggctacttaaaagtgtctacatgagtgagccaatgcatttacataagaaaatgaagtaagatttgtaaatgttggaaagaacaggaaantttttcatgacttattgatgatatcatatgtacttgaaaaactccagagaaaaaaatatagaaacaataagaaaagccagtaggggagtcagcaacaaaattacaaaagtcagtcaatagtttatcaatagctttccttcctacaaataaaaagattataaaataaaatagaaaaaaaaacattaaaaataaccaaaaaataaaaaacaagtgaaaaaggttaagataaatccaagagctatatgaggaaaggtttaaaactctattgtggggcatggaaaaagactcgagtaaatgaaaaacgcctggatggggagactcaatattgaa

SEQ ID NO: 2313 - DNA, 661 bp, Homo sapiens
  misc_feature [331]..[331]: Chromosome 5, SNP identification no. = rs154055
  misc_feature [331]..[331]: allele = t, in linkage disequilibrium with rs26396, respectively
  misc_feature [331]..[331]: n is a, t, c or g
tcctgctaatgacaagattttcttctttttatggctgaatagtattccattgtctattgtccacattttctttatctattcatctgttgatagacacttaattgatcccatagcttggctactgtgaacagtactgcaataaacaagggagtttatggcagatatctctggcatactgatttcattccttttgtatacatacccagtagtgggattactggatcgtatgatagttctttttttaattttttgagaaactttcttactgttttccatcgtcattgtactaatttgcattcccaccaacagtgtataagagttcccgtttctnctcatcctcaccagcatttgttatattttgtctttttgatgatagcctttctaactggagtgaggtgataactattgcggttttgatttgcatctccctaatgattagtgatactgagcatttttcatttatctgttggccatttgtatgtcttcttttgagacatgttcattcaggactttggcccgtttttaaattagattttttttttttttttttttttgctattgagttccttatatattctaaataactccttgtcagatgtattgtttgcaaatattttctcctgttctgtaggtttccttttcctctgttttttgttttttt

SEQ ID NO: 2314 - DNA, 661 bp, Homo sapiens
  misc_feature [331]..[331]: Chromosome 5, SNP identification no. = rs255950
  misc_feature [331]..[331]: allele = g, in linkage disequilibrium with rs26396, respectively
  misc_feature [331]..[331]: n is a, t, c or g
ctttttgatgatagcctttctaactggagtgaggtgataactattgcggttttgatttgcatctccctaatgattagtgatactgagcatttttcatttatctgttggccatttgtatgtcttcttttgagacatgttcattcaggactttggcccgtttttaaattagattttttttttttttttttttttgctattgagttccttatatattctaaataactccttgtcagatgtattgtttgcaaatattttctcctgttctgtaggtttccttttcctctgttttttgttttttttttttattttttgctgtgcagaagctttttancttgatcaaatccccatttgtctatttttgctttttgcctgtgctttcagatccttgtccagaaaaaaactatcaatataacttgtatatgtaatgactgaaaaacatttcagtttggaaaccaggtggtcaacttgaattaaaggtaacccttccattttactgtagtagacgtgataaagagggattgcatttttttcagccaaggcattgttttttagcgtttttggattattcttgtgattcgttctctcttgtaagaataaatcacaagaataatccaaactaagtaaacaaacaactaagaagataaaaagtaaaaagagtgac

SEQ ID NO: 2315 - DNA, 661 bp, Homo sapiens
  misc_feature [331]..[331]: Chromosome 5, SNP identification no. = rs255951
  misc_feature [331]..[331]: allele = g, in linkage disequilibrium with rs26396, respectively
  misc_feature [331]..[331]: n is a, t, c or g
tttttaaattagattttttttttttttttttttttgctattgagttccttatatattctaaataactccttgtcagatgtattgtttgcaaatattttctcctgttctgtaggtttccttttcctctgttttttgttttttttttttattttttgctgtgcagaagctttttatcttgatcaaatccccatttgtctatttttgctttttgcctgtgctttcagatccttgtccagaaaaaaactatcaatataacttgtatatgtaatgactgaaaaacatttcagtttggaaaccaggtggtcaacttgaattaaaggtaacccttccnttttactgtagtagacgtgataaagagggattgcatttttttcagccaaggcattgttttttagcgtttttggattattcttgtgattcgttctctcttgtaagaataaatcacaagaataatccaaactaagtaaacaaacaactaagaagataaaaagtaaaaagagtgacttttaaggcaataatttcaactttcaagcaaaaaaaatgcaacaagaggaaccaataattcaattcagcatacacattctgagcacttcaaaatgcagagaactgtcctaggggctaagcagacatagaaatgaatgaaacctaatctttgccctca

SEQ ID NO: 2316 - DNA, 661 bp, Homo sapiens
  misc_feature [331]..[331]: Chromosome 5, SNP identification no. = rs2937098
  misc_feature [331]..[331]: allele = c, in linkage disequilibrium with rs26396, respectively
  misc_feature [331]..[331]: n is a, t, c or g
gctttttatcttgatcaaatccccatttgtctatttttgctttttgcctgtgctttcagatccttgtccagaaaaaaactatcaatataacttgtatatgtaatgactgaaaaacatttcagtttggaaaccaggtggtcaacttgaattaaaggtaacccttccattttactgtagtagacgtgataaagagggattgcatttttttcagccaaggcattgttttttagcgtttttggattattcttgtgattcgttctctcttgtaagaataaatcacaagaataatccaaactaagtaaacaaacaactaagaagataaaaagtaaanagagtgacttttaaggcaataatttcaactttcaagcaaaaaaaatgcaacaagaggaaccaataattcaattcagcatacacattctgagcacttcaaaatgcagagaactgtcctaggggctaagcagacatagaaatgaatgaaacctaatctttgccctcacagagtatacattctagaaaggaagctaagacacatgcataaataagtatttaataaaaaatgacatatgttctaagggctagaggagaaatagctgcttcttaacatgtccaaatctgaccttctgatctttcccatctaatctatttatctgcagctttccca

SEQ ID NO: 2317 - DNA, 661 bp, Homo sapiens
  misc_feature [331]..[331]: Chromosome 5, SNP identification no. = rs255952
  misc_feature [331]..[331]: allele = a, in linkage disequilibrium with rs26396, respectively
  misc_feature [331]..[331]: n is a, t, c or g
gtggtagtaatagagttgatgagagttgggcaggttctaaatgtattttgaagatagagccattgtaattttcttatgtattaaatatgcttagcctgagaaactagaaggatggagttgccatcaactgaggttgggaaagctgcagataaatagattagatgggaaagatcagaaggtcagatttggacatgttaagaagcagctatttctcctctagcccttagaacatatgtcattttttattaaatacttatttatgcatgtgtcttagcttcctttctagaatgtatactctgtgagggcaaagattaggtttcattcatttctntgtctgcttagcccctaggacagttctctgcattttgaagtgctcagaatgtgtatgctgaattgaattattggttcctcttgttgcattttttttgcttgaaagttgaaattattgccttaaaagtcactctttttactttttatcttcttagttgtttgtttacttagtttggattattcttgtgatttattcttacaagagagaacgaatcacaagaataatccaaaaacgctaaaaaacaatgccttggctgaaaaaaatgcaatccctctttatcacgtctactacagtaaaatggaagggttacctttaattcaagttgaccac

SEQ ID NO: 2318 - DNA, 661 bp, Homo sapiens
  misc_feature [331]..[331]: Chromosome 5, SNP identification no. = rs255954
  misc_feature [331]..[331]: allele = c, in linkage disequilibrium with rs26396, respectively
  misc_feature [331]..[331]: n is a, t, c or g
aaggaattgggcctggagatatcctgaggaaatgcattttagatagaggaatggccatcgcaaagaccttaaggcacaagtgggcctagtatattcaaggagtagtggtagagaagaatcagagaaaaaatgagaggtcagattatgtagggtcttgtcagcccttataaggactttgacttttacactatgtgaaataagtagctattgggagttttgggcataagcatgacatgacgtattttacatctttaaaagatcattctagttactgtgctcagaataggctccagggtgataagagtagaactggagagagcaattcaaaagntattgtaaggctggcgtggtcagtcacacctgtaatcccagcaatttgggaggctgatgcaggaggattgcttgagcccaggagttcaagaccagcctgggcaacatgataagaaccccgtctctacaaaacaccatttttttctaattagccagatgtggtgacatgcacctgtggtcccagctacctgagaggctgaggtggaaggatcgcgtatgcccaggagttggaggctacagtgagccatgattacatcactgcactccagcatgggtgaacagaatgagaccccatctttaagaaaaaaagaaggaaaaagctattgcagta

SEQ ID NO: 2319 - DNA, 661 bp, Homo sapiens
  misc_feature [331]..[331]: Chromosome 5, SNP identification no. = rs255955
  misc_feature [331]..[331]: allele = c, in linkage disequilibrium with rs26396, respectively
  misc_feature [331]..[331]: n is a, t, c or g
tctactctcttagtgattttcagcaatacaatgtattgctattaactatagtcaccatgtcgtacaatagatctcttgaacttagtcttcctaattgaagttttgtatcctttgaccaatatcttcccaaactccaagaccctccagcccctatcagcccctggtaactaccattctactctatttccataaattcaacttttaagttgaccctgtcctctagggtcatccattttgttgcaaatgatgtgatttccttcattttaaagactgagtagtattctattgtgtatatatgctgcattttcttcacctattgatccactgatgnacacataggctgatttcatatcttgacaattgtgaataatgctacaatgaacacaggagtgcagatatgtctttgatactctggtttcatttcctttggatatatacccagaaacgggattgctggaacttacttttagtggcagaaggcagacaagaaaccataaacataaaaaatgtaagaattagattttatgtgagaaacagtatgaaaaggaaaagaaaaggaacaggatgaagaagatcaagagtgcagttagcagaggtcgtgatgggaggggagttctagttgctgttttctatagagtggtcatggttggccttgctgaga

SEQ ID NO: 2320 - DNA, 661 bp, Homo sapiens
  misc_feature [331]..[331]: Chromosome 5, SNP identification no. = rs255956
  misc_feature [331]..[331]: allele = c, in linkage disequilibrium with rs26396, respectively
  misc_feature [331]..[331]: n is a, t, c or g
gaagtgcattacccaaagtcataagttagaaagtggcagaacctgaaactcaggtttttgcaagtacagatgctgcctgccctctactttttactgctactcaagaggccaataaatgaagaattttcaatgaagtataaatattttaagatttttttattgcttaatatttaataaagattgcttatactataaaatgtttcttacgcatgtttggcattctcacttagcaaataaaatcttttcctgagtccatcacactatttttataaccaggcattgtaaaactttttatgagataattgctttaataattattctattgaaggtnatggtagctttcgaaatgtaatcaccaaatccagttatcatttctcagttcttatcctcctcttttctttacagcatttgacactgttgaacatcccctttcttcttgaaaaccttcctttctgtgaagtggcatgcttgtgattctgagctctccaacaatcctttgtatcaacctttttcattttccttctacacccaagctttgtctgtaattgccttcttttgccttcatggatttccccctggcaatacatacatatatattcagctattaggattattctgatggctctcaaatatagctttaacttttccttctagctccaga

SEQ ID NO: 2321 - DNA, 661 bp, Homo sapiens
  misc_feature [331]..[331]: Chromosome 5, SNP identification no. = rs255957
  misc_feature [331]..[331]: allele = a, in linkage disequilibrium with rs26396, respectively
  misc_feature [331]..[331]: n is a, t, c or g
aggcaaatgttattaaacctgtatctgacagaagagaaaactgagactcagggagttgaagtgcattacccaaagtcataagttagaaagtggcagaacctgaaactcaggtttttgcaagtacagatgctgcctgccctctactttttactgctactcaagaggccaataaatgaagaattttcaatgaagtataaatattttaagatttttttattgcttaatatttaataaagattgcttatactataaaatgtttcttacgcatgtttggcattctcacttagcaaataaaatcttttcctgagtccatcacactatttttataacnaggcattgtaaaactttttatgagataattgctttaataattattctattgaaggtcatggtagctttcgaaatgtaatcaccaaatccagttatcatttctcagttcttatcctcctcttttctttacagcatttgacactgttgaacatcccctttcttcttgaaaaccttcctttctgtgaagtggcatgcttgtgattctgagctctccaacaatcctttgtatcaacctttttcattttccttctacacccaagctttgtctgtaattgccttcttttgccttcatggatttccccctggcaatacatacatatatattcagcta

SEQ ID NO: 2322 - DNA, 661 bp, Homo sapiens
  misc_feature [331]..[331]: Chromosome 5, SNP identification no. = rs255958
  misc_feature [331]..[331]: allele = c, in linkage disequilibrium with rs26396, respectively
  misc_feature [331]..[331]: n is a, t, c or g
attgaccctagaatgaagagatttgtagtttacgcttcttacattatttcatttattctccccaataagcctgtgaggtagataaggcaaatgttattaaacctgtatctgacagaagagaaaactgagactcagggagttgaagtgcattacccaaagtcataagttagaaagtggcagaacctgaaactcaggtttttgcaagtacagatgctgcctgccctctactttttactgctactcaagaggccaataaatgaagaattttcaatgaagtataaatattttaagatttttttattgcttaatatttaataaagattgcttatantataaaatgtttcttacgcatgtttggcattctcacttagcaaataaaatcttttcctgagtccatcacactatttttataaccaggcattgtaaaactttttatgagataattgctttaataattattctattgaaggtcatggtagctttcgaaatgtaatcaccaaatccagttatcatttctcagttcttatcctcctcttttctttacagcatttgacactgttgaacatcccctttcttcttgaaaaccttcctttctgtgaagtggcatgcttgtgattctgagctctccaacaatcctttgtatcaacctttttcattttcc

SEQ ID NO: 2323 - DNA, 661 bp, Homo sapiens
  misc_feature [331]..[331]: Chromosome 5, SNP identification no. = rs1543898
  misc_feature [331]..[331]: allele = g, in linkage disequilibrium with rs26396, respectively
  misc_feature [331]..[331]: n is a, t, c or g
agcaactgtgaaggcgatagaggtgttaattagctcaattgcagtcatcatttcacaatgcatgcatatatcaaaacatcagtctgtacctgctcaatatgtatgattttcatgtatccagtatacctgaaaaaaaaaaaaaagtgaggcctagggactcagaataagcccatcccttcccatacttccagacctccatctgcaggagtgaggaaaggactccattttcttttatcccctttctatccttatattcttgcaacactcccagtctcaccactctctgccttatgacctgtagaccacatgcaatagaatcgccttgggtggntgttccaaacagatgcccaggcccttctccagaccactgacagaatttctggggaggggtctctggtatctgcatttttaccaagctccccaggtgattctttggcccactgtggtttcagaaccattgtccccagcgtctgaaagacagagaatttgcagatttctccttgtaagtgtatagtactttacagtttgcaaaccacttttatacatcatctcattagatccctaggaccatcaaaggagataaggtgagtattgacattttttaaaaaataaatgagacaatgagtatgtggaatgcctgatgccctggtcaagccatagc

SEQ ID NO: 2324 - DNA, 661 bp, Homo sapiens
  misc_feature [331]..[331]: Chromosome 5, SNP identification no. = rs187652
  misc_feature [331]..[331]: allele = g, in linkage disequilibrium with rs26396, respectively
  misc_feature [331]..[331]: n is a, t, c or g
aataacaaaatattgtatatttgaaatttgctaagagggtagatcttaagtgttttcaccacatacacacaaaaaatagcaactgtgaaggcgatagaggtgttaattagctcaattgcagtcatcatttcacaatgcatgcatatatcaaaacatcagtctgtacctgctcaatatgtatgattttcatgtatccagtatacctgaaaaaaaaaaaaaagtgaggcctagggactcagaataagcccatcccttcccatacttccagacctccatctgcaggagtgaggaaaggactccattttcttttatcccctttctatccttatantcttgcaacactcccagtctcaccactctctgccttatgacctgtagaccacatgcaatagaatcgccttgggtggttgttccaaacagatgcccaggcccttctccagaccactgacagaatttctggggaggggtctctggtatctgcatttttaccaagctccccaggtgattctttggcccactgtggtttcagaaccattgtccccagcgtctgaaagacagagaatttgcagatttctccttgtaagtgtatagtactttacagtttgcaaaccacttttatacatcatctcattagatccctaggaccatcaaaggagataag

SEQ ID NO: 2325 - DNA, 661 bp, Homo sapiens
  misc_feature [331]..[331]: Chromosome 5, SNP identification no. = rs255959
  misc_feature [331]..[331]: allele = a, in linkage disequilibrium with rs26396, respectively
  misc_feature [331]..[331]: n is a, t, c or g
catgaaaagtgatagttggtatggaggacaagcaaatattccctttctcctgggcataaaagtgatctctctcccaggtctccttctggttacatcttagcctttgattgatagcatggtaggtatgtcagttcaaaaggagacaaccatctttgttgatttcacagctaagaactgacctggcaatagttgttgttttaaccagcacaaatctcctttctgcccctgaggtatatcgtttatttaagcacaggacagtacttttcccttaatataaaatggaactatgttatagttctatatagcaacacaaagacagtgtggatgggtnctaagataaaaacaattaatgaaacaaacccatgtggaatcaaagtgtaagtccatattgcactgaatgaagtatttctccatggtaaaaatttccaaataattttcatcttctttgaaatcttttctctccttatcgtagatcatcaagaaatttcaaatacatttcagggaagataaataagctgtatctttctctcaggagtgtataaattcacttttagaccttcaagttccccagtttgattttacaagcgtgtgataatttccttctgagaaaaagtcccaggaattttattgtacttttatccttcacttctttttgtctgca

SEQ ID NO: 2326 - DNA, 661 bp, Homo sapiens
  misc_feature [331]..[331]: Chromosome 5, SNP identification no. = rs255960
  misc_feature [331]..[331]: allele = t, in linkage disequilibrium with rs26396, respectively
  misc_feature [331]..[331]: n is a, t, c or g
atatattgttatttgtttaaccatcttcctccatctcatgttaaagcacatctgcattttacagatttggtgaaaagaatgaccatcaccactaagagtattgtgtatcatgttttattttgaatcatatacttgaacattttcccattatgacctaaaaagtagagccactcggtatagatctttggcaagggaaaatagaatgcttctatgtgctcctttagacaggaaaggtcctgtttcaaattataaaacatggacatgtgtggtgtaatagaattgcagacaaaaagaagtgaaggataaaagtacaataaaattcctgggactntttctcagaaggaaattatcacacgcttgtaaaatcaaactggggaacttgaaggtctaaaagtgaatttatacactcctgagagaaagatacagcttatttatcttccctgaaatgtatttgaaatttcttgatgatctacgataaggagagaaaagatttcaaagaagatgaaaattatttggaaatttttaccatggagaaatacttcattcagtgcaatatggacttacactttgattccacatgggtttgtttcattaattgtttttatcttagcacccatccacactgtctttgtgttgctatatagaactataacatagttcc

SEQ ID NO: 2327 - DNA, 661 bp, Homo sapiens
  misc_feature [331]..[331]: Chromosome 5, SNP identification no. = rs395031
  misc_feature [331]..[331]: allele = c, in linkage disequilibrium with rs26396, respectively
  misc_feature [331]..[331]: n is a, t, c or g
cctcataactctcatagccctcgttatttcctaagtgactaaaacagtaagcatatcttttgttgaagtatttagccttctgtccttggctcctgaagcagctttagaacagcttcagagagataaaggcgggaggcagtcttttgttataatgctggagtgcattagacctcagaagcgagcctcggaaaacagaaaccctctctctgaccttctcctgccctcctttcgcctgctccctttctccccaagggaggccacagacactaaagatacggttgaatcttcccctgcctttctgtcttggagctggccataaactatcttttcngtttgtaggtcataagacccccattttggaaagggtcctgccctgtgccctggagaaaggaatgctgcaaagagaggccaagaagaatctgaacagagaggccttgctgggcttccccactcagcctattagattagatcagactctttttgtccagtcacatttctgcatggtcgtccctgcttcactcatgcccatccagtgaagtctccataaaaggcccaagacgacgaggtaaggagagcttccagatagccgaacacatggaagttcctggatgttggcacaaccgggaagggcatggaagctctgccctgcatctcttcacct

SEQ ID NO: 2328 - DNA, 661 bp, Homo sapiens
  misc_feature [331]..[331]: Chromosome 5, SNP identification no. = rs440044
  misc_feature [331]..[331]: allele = g, in linkage disequilibrium with rs26396, respectively
  misc_feature [331]..[331]: n is a, t, c or g
ggttcccttataggcatttttcatattgagtagagtggagactatatctcaaacttcatggaaaggacaagtattaaccctgatgtcagtggaaacacaaaatcacccaaaaaacaaggaaagaaaatcagtagtctacaatctacaaagtccagggaactcaagcagctataagtggtcaacaagttggtattccaggagatgcgtgagattagtatcagtgaattacttctactgtggtgtactgaactgcaagggatgctagctggagattatattgtcaggcaggtaccttaagtgaggccagttgacctcagctgaagtggctcanacccgctgtgtggaaaaaactcaaactgcttttcctctgctctcctaccacaacaatcaacacaaaagacatctgtaaccaaatgtgtgtgggttttcccatacacaccaagcaagcaattctgcagtagacaccagctgtatgtcctccaacccattttaactcagtgacgctatccacctggagctagtgtcagatcctataggttgagggttcattcccataaaatcttcccctctgcacttccaatgccaactgcaagcccaggttgttttacttgtgcttctgactgatcagctataaattggggttccctcaaccccttttggg

SEQ ID NO: 2329 - DNA, 661 bp, Homo sapiens
  misc_feature [331]..[331]: Chromosome 5, SNP identification no. = rs429877
  misc_feature [331]..[331]: allele = t, in linkage disequilibrium with rs26396, respectively
  misc_feature [331]..[331]: n is a, t, c or g
aacccacacacatttggttacagatgtcttttgtgttgattgttgtggtaggagagcagaggaaaagcagtttgagttttttccacacagcgggtatgagccacttcagctgaggtcaactggcctcacttaaggtacctgcctgacaatataatctccagctagcatcccttgcagttcagtacaccacagtagaagtaattcactgatactaatctcacgcatctcctggaataccaacttgttgaccacttatagctgcttgagttccctggactttgtagattgtagactactgattttctttccttgttttttgggtgattttgtntttccactgacatcagggttaatacttgtcctttccatgaagtttgagatatagtctccactctactcaatatgaaaaatgcctataagggaaccatgctttaatttctactcttttgtcttaaagggcaaatctaattcaatattttcaaaaaaattctgttagactttaagcttcaggaggccagggcacatgtgtgttttattcaccactgtataggaatcacttagcaaagcgttgatagaacaatggctcaacatttagattcttgagtcaggctgcctagttgaaattccaagtttactactatgagttgtgtcatctttggac

SEQ ID NO: 2330 - DNA, 661 bp, Homo sapiens
  misc_feature [331]..[331]: Chromosome 5, SNP identification no. = rs383223
  misc_feature [331]..[331]: allele = a, in linkage disequilibrium with rs26396, respectively
  misc_feature [331]..[331]: n is a, t, c or g
tatttatcttcatcaaactgaagaatacaaaactttgacataggctactcttccttggttactgttttgctatttttatgatggtttcataatatatgtcagcaagataaagtttatatgatgatactgattcataagttatctttattttgaataatcttctattactttgggactatttcaaatatttatcctaaaagctacctttctcctcttgagtaaaattaaattcacattttagggtatttttaaagccataaatattacatcttagggttttcttttcctttccttttcaagtttattccaatgagaaatgacctttcaatgntgagtgatgccttgaagagacagtttcttgtcctttgactttttctttaccggaatggatattagggactgatttctttctcctactgcttgtagcatcctggcctcttttttactacttgctcatctttaaaaaatgttttttgagttacttcaacatttgtaactacaagaactaatcttcactattttcccctacatttgatacaattaaatgatttttatgagagaaataagaaatctgtttatattgttgccagtaacctagatcctgagaaattcttggttctcctgccttttcactatctttcttcttgttattactcttgtt

SEQ ID NO: 2331 - DNA, 661 bp, Homo sapiens
  misc_feature [331]..[331]: Chromosome 5, SNP identification no. = rs417558
  misc_feature [331]..[331]: allele = c, in linkage disequilibrium with rs26396, respectively
  misc_feature [331]..[331]: n is a, t, c or g
taggctactcttccttggttactgttttgctatttttatgatggtttcataatatatgtcagcaagataaagtttatatgatgatactgattcataagttatctttattttgaataatcttctattactttgggactatttcaaatatttatcctaaaagctacctttctcctcttgagtaaaattaaattcacattttagggtatttttaaagccataaatattacatcttagggttttcttttcctttccttttcaagtttattccaatgagaaatgacctttcaatggtgagtgatgccttgaagagacagtttcttgtcctttgacnttttctttaccggaatggatattagggactgatttctttctcctactgcttgtagcatcctggcctcttttttactacttgctcatctttaaaaaatgttttttgagttacttcaacatttgtaactacaagaactaatcttcactattttcccctacatttgatacaattaaatgatttttatgagagaaataagaaatctgtttatattgttgccagtaacctagatcctgagaaattcttggttctcctgccttttcactatctttcttcttgttattactcttgttttcatatacttctctataatgtattttaaatagagaaatt

SEQ ID NO: 2332 - DNA, 661 bp, Homo sapiens
  misc_feature [331]..[331]: Chromosome 5, SNP identification no. = rs371175
  misc_feature [331]..[331]: allele = g, in linkage disequilibrium with rs26396, respectively
  misc_feature [331]..[331]: n is a, t, c or g
taacttggattgctagagttccttttgttcctattgtttttatttccaaaaattaagaataacaatttatttaaatttaactataatttctctatttaaaatacattatagagaagtatatgaaaacaagagtaataacaagaagaaagatagtgaaaaggcaggagaaccaagaatttctcaggatctaggttactggcaacaatataaacagatttcttatttctctcataaaaatcatttaattgtatcaaatgtaggggaaaatagtgaagattagttcttgtagttacaaatgttgaagtaactcaaaaaacattttttaaagatnagcaagtagtaaaaaagaggccaggatgctacaagcagtaggagaaagaaatcagtccctaatatccattccggtaaagaaaaagtcaaaggacaagaaactgtctcttcaaggcatcactcaccattgaaaggtcatttctcattggaataaacttgaaaaggaaaggaaaagaaaaccctaagatgtaatatttatggctttaaaaataccctaaaatgtgaatttaattttactcaagaggagaaaggtagcttttaggataaatatttgaaatagtcccaaagtaatagaagattattcaaaataaagataacttatgaatcagta

SEQ ID NO: 2333 - DNA, 661 bp, Homo sapiens
  misc_feature [331]..[331]: Chromosome 5, SNP identification no. = rs584592
  misc_feature [331]..[331]: allele = a, in linkage disequilibrium with rs26396, respectively
  misc_feature [331]..[331]: n is a, t, c or g
ggactatttcaaatatttatcctaaaagctacctttctcctcttgagtaaaattaaattcacattttagggtatttttaaagccataaatattacatcttagggttttcttttcctttccttttcaagtttattccaatgagaaatgacctttcaatggtgagtgatgccttgaagagacagtttcttgtcctttgactttttctttaccggaatggatattagggactgatttctttctcctactgcttgtagcatcctggcctcttttttactacttgctcatctttaaaaaatgttttttgagttacttcaacatttgtaactacaanaactaatcttcactattttcccctacatttgatacaattaaatgatttttatgagagaaataagaaatctgtttatattgttgccagtaacctagatcctgagaaattcttggttctcctgccttttcactatctttcttcttgttattactcttgttttcatatacttctctataatgtattttaaatagagaaattatagttaaatttaaataaattgttattcttaatttttggaaataaaaacaataggaacaaaaggaactctagcaatccaagttaggaataaaattccatttatatctttgggtgccacaaacttaggatgta

SEQ ID NO: 2334 - DNA, 661 bp, Homo sapiens
  misc_feature [331]..[331]: Chromosome 5, SNP identification no. = rs441595
  misc_feature [331]..[331]: allele = c, in linkage disequilibrium with rs26396, respectively
  misc_feature [331]..[331]: n is a, t, c or g
tctataaaaagatgttgaataaatgaactctcaatttccttgcaaatgcaaaatttcagtcttcaaaattcagtcttcaactgaatatgtgctataaacataaccaattatattgctgtggtatttataaggagttataaaaatagcatagagtaataaaatagaatacactttaactggtgatcactctattgaaaaatgttagttgaaaaacgtacttccttgaaagaaacatttctctcccttaatattaaataattatttagatatactttgttaggtggttgatgttttaagacttaataaagtgttagcactttaataattatanttttcatccattaatggggatataaattttataatactttacatttcaatccaacacctatattttctcatagaactaaatagaaaatgttgctatacagaactccacactttaagaaaatatttgcaaactaggcatttgataaaatattaatatctagaatccataaggaacttaaacaaatcaacaagaaaaaatcaaccccattaaaaagtgagcaaggagcatgaaaagacacttctcgaaagaagacatgtaagtgtccaaaaacatgaaaaaatgttccacatcattaattatcagagaaatgcaaattaaaaccacaaggag

SEQ ID NO: 2335 - DNA, 661 bp, Homo sapiens
  misc_feature [331]..[331]: Chromosome 5, SNP identification no. = rs255969
  misc_feature [331]..[331]: allele = t, in linkage disequilibrium with rs26396, respectively
  misc_feature [331]..[331]: n is a, t, c or g
ttcccttttggttgataaattatatggtcactctattagaagtgttagaaagattatactcaaaattgttaaaatcatgagatatattggaatttaaatgaaatagttaagttatttggtaaattccttcccatcatgccttgataatgacagatcatgaggttttagtgtcttcatacttttttgcccagaattataaccaatgttctttggctaaaggtagattttcaccattcttctacaagccaggttttaggctattcttatcctttgctgaacaggacctagaaaccaccatgatacccatgctgtatcccagtgttcaaacctnttgtcagtgatagagaagggctaataatcagaacgtcttgcccatctcagtaaattccagatccccacataggcatactttcttgaaaataaatgcagtcacttaactctcttgtcttagtccttcaatctttaatttcctcctcaaatctgatcagatacatacttcctaacatcaaaataatagacagactagattaaaatggggttgtttcactcaattagctattaaaaattatttattttagtgcaatttttatagatagaagggtggaaatttgagaggatcaagttcaattctttcactttacagacgtggaaactgaggcat

SEQ ID NO: 2336 - DNA, 661 bp, Homo sapiens
  misc_feature [331]..[331]: Chromosome 5, SNP identification no. = rs255970
  misc_feature [331]..[331]: allele = c, in linkage disequilibrium with rs26396, respectively
  misc_feature [331]..[331]: n is a, t, c or g
tccctggaccagcagcagcagcagcatcacttcacaatttagaaatacagatactcaggccccattccatacctactgaatcaggaactctgagagtggggctcgtcaatccattttaacaagtccttcaggtgattctgatggctactacagtgtgagggccactggtccagtggtataaaatcttctagatctgggagcatcactgcatttcaatagggtgaaatgagtgtttgtgacttgaatcagagtggaaaagttacttcatatggaatagcccatctgagaacacaggaaagttactgttgagtgaccatccatcttgttttcngggacagtcctggtttagatacattgccctggcaattataaatagcatccctgttctgtcttgaaagtgttcccttttggttgataaattatatggtcactctattagaagtgttagaaagattatactcaaaattgttaaaatcatgagatatattggaatttaaatgaaatagttaagttatttggtaaattccttcccatcatgccttgataatgacagatcatgaggttttagtgtcttcatacttttttgcccagaattataaccaatgttctttggctaaaggtagattttcaccattcttctacaagccaggttttaggctat

SEQ ID NO: 2337 - DNA, 661 bp, Homo sapiens
  misc_feature [331]..[331]: Chromosome 5, SNP identification no. = rs255971
  misc_feature [331]..[331]: allele = g, in linkage disequilibrium with rs26396, respectively
  misc_feature [331]..[331]: n is a, t, c or g
gatatttatttttcccagtcaataggaaattagaagaaaccctttacaaggaatcaaagaaattagtaaagtaagactgttagggacaaatacactgataaatggagtggcagtgtggggcagtaggcagttagaacccaatggtcaaaaactagaaaacacgacacaagaacaaagaaaggcacagctatctgcgattaccactaagtatagtgcagtgcttctcaaagtgtggtccctggaccagcagcagcagcagcatcacttcacaatttagaaatacagatactcaggccccattccatacctactgaatcaggaactctgagantggggctcgtcaatccattttaacaagtccttcaggtgattctgatggctactacagtgtgagggccactggtccagtggtataaaatcttctagatctgggagcatcactgcatttcaatagggtgaaatgagtgtttgtgacttgaatcagagtggaaaagttacttcatatggaatagcccatctgagaacacaggaaagttactgttgagtgaccatccatcttgttttcagggacagtcctggtttagatacattgccctggcaattataaatagcatccctgttctgtcttgaaagtgttcccttttggttgataaattatatg

SEQ ID NO: 2338 - DNA, 661 bp, Homo sapiens
  misc_feature [331]..[331]: Chromosome 5, SNP identification no. = rs255972
  misc_feature [331]..[331]: allele = g, in linkage disequilibrium with rs26396, respectively
  misc_feature [331]..[331]: n is a, t, c or g
tgaaagtaggtttattagctgaaattacatttcttttctgtgagaaaggcccactttgccactgagtttgttccatcatatttttagtaaaatccctacatctcagtcaaatatgaactgacactgtgctgtataaaggggatggtccaagaagatggcaatgacttgactgatgtgagtattgtgtgaataactaataatttccctaagagtagggttgataacaaatatgggttggatactatgaattaatgtcacatcttcattttcttaataaataaatatctcttatatagcaatgtttctaaggcaatgtcattgtaatcctttntttaattttacagatatattttagaatacatgttgtccaagtgactattacagttatctctcacttattttatatttatatggaaaaatacctttttacagcccagttgtgagacagaaaataaataagcaaggcatgtaaatagtcaaaatagatacaactcaagcttttactttatgtgacagctcagagggaaactccaatacatgttggttgaataaacagatgaatgagtgaatgaataagcttacttaataatttattttaaagataattctaataagcttggatatttatttttcccagtcaataggaaattagaagaaaccc

SEQ ID NO: 2339 - DNA, 661 bp, Homo sapiens
  misc_feature [331]..[331]: Chromosome 5, SNP identification no. = rs255973
  misc_feature [331]..[331]: allele = g, in linkage disequilibrium with rs26396, respectively
  misc_feature [331]..[331]: n is a, t, c or g
ctcacacctaaaatcctagcactttgggaggccaaagcaggcaggttgcctgagctcaggagttcgagaccagcctgggcaacatgatgaaaccctgtctctactaaaaatacaaaaaattagctgggtgtggtggtgcgcatctgtagacccagctacctggaaggctggggcatgagaattgcttgaacccgggaggcagaggttgcagtgagctgagctcgcaccactgcactccagcttgggtgacagagcaagactctgtctcaataaataaataaataaaataataaaaataaaaataaaagaaaaaccagtctcaggcatgtcntatagcagcatgagaacggactaatacagtgagagtcttggggctttttgatattattgagtgacagcaaagatttggggcccagatgtgcctgactacaaagcccagctcctttttggttgctcactgctctgcactgtgctgacagcatagcactagttcaactgcactagtctcagatgctctgtgttgatatcccaggcagagtgtacccaacagtggggcctatcttttccctctcagcgtataagcattattgaccttttatcaccactccagtgtcagtttttattagaacaacttcctgttgtcaaaggaattttcagtgga

SEQ ID NO: 2340 - DNA, 661 bp, Homo sapiens
  misc_feature [331]..[331]: Chromosome 5, SNP identification no. = rs255977
  misc_feature [331]..[331]: allele = c, in linkage disequilibrium with rs26396, respectively
  misc_feature [331]..[331]: n is a, t, c or g
tgttgttagcactttggttgtggcccatgtttggggtaaagggaagaagagaaagaacagcagttacttcagagaagatatgagtagtgattgagcgtcagtctgggagcaagaatttagaggaaggagaaatggaaaaatgtatgtcccttctcctagaatcctcagaaatattgaggaggagctggacttctctcagcacgtgagtcatttcatttagattatgaaagaaaggataaacccagaaagtgagtgatatggtttggctgtgttctcacccaaatctgatattgaattgtagttcccataatccccatgtgtcatgggaggngccagatagagataattgaatcatggtggtgagtccccccatcctgttctggtgagtgagttctcaggagatctgatggttttataaggggcttttcccacttttgccccgtacttctccttgctgctgccatgtgaagaagggcatgtttgcttcccctttagccacgattgtaagtttcctgaggcctccccagtcctgtggaatcatgagttaattaaacctctttcctttaaaaattacctagtctctggccaggcgtggtggctcacacctaaaatcctagcactttgggaggccaaagcaggcaggttgcctgagctcaggagt

SEQ ID NO: 2341 - DNA, 661 bp, Homo sapiens
  misc_feature [331]..[331]: Chromosome 5, SNP identification no. = rs385186
  misc_feature [331]..[331]: allele = a, in linkage disequilibrium with rs26396, respectively
  misc_feature [331]..[331]: n is a, t, c or g
aaaagtgggaaaagccccttataaaaccatcagatctcctgagaactcactcaccagaacaggatggggggactcaccaccatgattcaattatctctatctggcacctcccatgacacatggggattatgggaactacaattcaatatcagatttgggtgagaacacagccaaaccatatcactcactttctgggtttatcctttctttcataatctaaatgaaatgactcacgtgctgagagaagtccagctcctcctcaatatttctgaggattctaggagaagggacatacatttttccatttctccttcctctaaattcttgctcncagactgacgctcaatcactactcatatcttctctgaagtaactgctgttctttctcttcttccctttaccccaaacatgggccacaaccaaagtgctaacaacacaagactctcaaatgtaacaaggtttgactaagttttgactacaactaagagtaatcccacacagtgcagaaaccagctttgaattgaacacagcttccactgtccctagaaatacacagataatttgcaatcaaaggagggtctttttcttcctcaggctctgacttgccaccaggtggccagcctactctgcctgtaaaagactctccattctattccttcct

SEQ ID NO: 2342 - DNA, 661 bp, Homo sapiens
  misc_feature [331]..[331]: Chromosome 5, SNP identification no. = rs255978
  misc_feature [331]..[331]: allele = c, in linkage disequilibrium with rs26396, respectively
  misc_feature [331]..[331]: n is a, t, c or g
gttgtccgctggcgacttgagtagaggacaggatttctggaagactgaggaaggaatagaatggagagtcttttacaggcagagtaggctggccacctggtggcaagtcagagcctgaggaagaaaaagaccctcctttgattgcaaattatctgtgtatttctagggacagtggaagctgtgttcaattcaaagctggtttctgcactgtgtgggattactcttagttgtagtcaaaacttagtcaaaccttgttacatttgagagtcttgtgttgttagcactttggttgtggcccatgtttggggtaaagggaagaagagaaagaacngcagttacttcagagaagatatgagtagtgattgagcgtcagtctgggagcaagaatttagaggaaggagaaatggaaaaatgtatgtcccttctcctagaatcctcagaaatattgaggaggagctggacttctctcagcacgtgagtcatttcatttagattatgaaagaaaggataaacccagaaagtgagtgatatggtttggctgtgttctcacccaaatctgatattgaattgtagttcccataatccccatgtgtcatgggaggtgccagatagagataattgaatcatggtggtgagtccccccatcctgttctggtgagtg

SEQ ID NO: 2343 - DNA, 661 bp, Homo sapiens
  misc_feature [331]..[331]: Chromosome 5, SNP identification no. = rs255979
  misc_feature [331]..[331]: allele = g, in linkage disequilibrium with rs26396, respectively
  misc_feature [331]..[331]: n is a, t, c or g
gtggctgttggctaatactactcagtggtgctcgtgttaattccctttccagtagaaatttcttgtggttaatatcagcagctaccatgtagcaagcatcatgcgggcttttacatttactctttaaaacaaccatgtgaggtaggtgaggaaaccaaggctcagataaatccattggcttgtatacacatggctattgtcatcggaaagattaaatattactcaaaaggatgaccacagtcactgcattaacattccaagacagcaatataaatcaatttcatgagaggaaatcctatttttggttgtgtaaaggaaccaactaccagtnaaggatggagtctgagaaactaaattgctgtgcataataaagtaaaagaaacatttaggttgtccgctggcgacttgagtagaggacaggatttctggaagactgaggaaggaatagaatggagagtcttttacaggcagagtaggctggccacctggtggcaagtcagagcctgaggaagaaaaagaccctcctttgattgcaaattatctgtgtatttctagggacagtggaagctgtgttcaattcaaagctggtttctgcactgtgtgggattactcttagttgtagtcaaaacttagtcaaaccttgttacatttgagagtcttg

SEQ ID NO: 2344 - DNA, 661 bp, Homo sapiens
  misc_feature [331]..[331]: Chromosome 5, SNP identification no. = rs255980
  misc_feature [331]..[331]: allele = t, in linkage disequilibrium with rs26396, respectively
  misc_feature [331]..[331]: n is a, t, c or g
gctctgacttgccaccaggtggccagcctactctgcctgtaaaagactctccattctattccttcctcagtcttccagaaatcctgtcctctactcaagtcgccagcggacaacctaaatgtttcttttactttattatgcacagcaatttagtttctcagactccatccttcactggtagttggttcctttacacaaccaaaaataggatttcctctcatgaaattgatttatattgctgtcttggaatgttaatgcagtgactgtggtcatccttttgagtaatatttaatctttccgatgacaatagccatgtgtatacaagccaatngatttatctgagccttggtttcctcacctacctcacatggttgttttaaagagtaaatgtaaaagcccgcatgatgcttgctacatggtagctgctgatattaaccacaagaaatttctactggaaagggaattaacacgagcaccactgagtagtattagccaacagccacagccagttgctgacatgccagactgaagcggagggcaccacattctggcacagtcactgcatttcctgatctccctagatgccacattttctggcaaatacatagttagaaatattaggcaaatcctcacattccagagctgaaaatatcctcccccc

SEQ ID NO: 2345 - DNA, 661 bp, Homo sapiens
  misc_feature [331]..[331]: Chromosome 5, SNP identification no. = rs255981
  misc_feature [331]..[331]: allele = t, in linkage disequilibrium with rs26396, respectively
  misc_feature [331]..[331]: n is a, t, c or g
catccaaaaaggacacaggagagaaaagagagagaaagaacaagggagaaggagaaagagagaagaagagagaaaaagatgagaggagaggtgagggaagagaatagggaggggacgggaggaaaaagaaacctttgtctagagagccttgggtggctttgatgagaggatacttgggaacaaggagtaggctgatgggacttgattcaagttgacctcctagtttttgctttaaagttggctcttaggagatttttcattaccattaactcatttgtcagctgaaataattttcagatgatctgtaaccaacctttgtttcactgggaantaaaaatccttgtaaaactgtgactgcagtttattctcagagcaaatatatgatggcaggcaatggattacagaagcgtgtggcacatagctgggctcctgtccaggtctgttctcctccctgagagaaagaagcaaacaacataagcgagatggaacaccatcccttactgttggggtggggggaggatattttcagctctggaatgtgaggatttgcctaatatttctaactatgtatttgccagaaaatgtggcatctagggagatcaggaaatgcagtgactgtgccagaatgtggtgccctccgcttcagtctggcatgtcagca

SEQ ID NO: 2346 - DNA, 661 bp, Homo sapiens
  misc_feature [331]..[331]: Chromosome 5, SNP identification no. = rs255983
  misc_feature [331]..[331]: allele = t, in linkage disequilibrium with rs26396, respectively
  misc_feature [331]..[331]: n is a, t, c or g
ttctttgagtctcagtggaaatcttccttgagctgagagcctcacacagaaagaaagtattttgtgctgaaaaacaaacagacttgatataggacagacctgaaattgaatcctgtctattcatttactgattgtagccacactcaagtgccttcctttctctgagcatcagttttctgtctttaaaatgggtataatatccatctcattgttttgttggcagaataattcagattatgcatgtaaagtacatagcagagggtctggcacttggttggtgcagagtacatgtacctcaaaacatgtagaccaccccaattttagatgagtncttgggtcatggtcaggggaaggtctgtaagactaggagtgatcttggaacatccaaaaaggacacaggagagaaaagagagagaaagaacaagggagaaggagaaagagagaagaagagagaaaaagatgagaggagaggtgagggaagagaatagggaggggacgggaggaaaaagaaacctttgtctagagagccttgggtggctttgatgagaggatacttgggaacaaggagtaggctgatgggacttgattcaagttgacctcctagtttttgctttaaagttggctcttaggagatttttcattaccattaactcatttgtca

SEQ ID NO: 2347 - DNA, 661 bp, Homo sapiens
  misc_feature [331]..[331]: Chromosome 5, SNP identification no. = rs255984
  misc_feature [331]..[331]: allele = t, in linkage disequilibrium with rs26396, respectively
  misc_feature [331]..[331]: n is a, t, c or g
atccatttttatagagactaactgctgtataggagttgatatgccaagtaatttttctaattggtaaccagatcctaaaaggtgaaaatatgccaaggatgcaattctctttgggtttgcacagattacaaagagtttttcattctttaccactgattaatagattaatagattggtggcaaaggatgaatatctgaattgccactgttcacggtaggattgggctccacaatcagtgtcatgaagcttctcaaggaacatagatattaattgcccatgtattaccagatagctgttgcgccattatcaaattagttaacatagtgaaccnttactgcttcaacaggaatgccacactgtcttcagtttggtagaaatgtatgcaatttgaaatatttcagactgtgagaagttccacactgaagacatggttaagcaggaggacctctagggctccttccaactccagaattctttgagtctcagtggaaatcttccttgagctgagagcctcacacagaaagaaagtattttgtgctgaaaaacaaacagacttgatataggacagacctgaaattgaatcctgtctattcatttactgattgtagccacactcaagtgccttcctttctctgagcatcagttttctgtctttaaaatg

SEQ ID NO: 2348 - DNA, 661 bp, Homo sapiens
  misc_feature [331]..[331]: Chromosome 5, SNP identification no. = rs255985
  misc_feature [331]..[331]: allele = g, in linkage disequilibrium with rs26396, respectively
  misc_feature [331]..[331]: n is a, t, c or g
atgatggattattttataatttccattttatgaatggggaccaagagagacagaggttaaatgtttcattatccacctagaaagaaacagaggaaagattttaatctgaaccttccagcttcaaaactcattgctatttctgttatacagtgtgtgttctaccttgcctagcagcagggcttcagataattattttaaatgaatgcatttgaaaggtcctgttgtcagaactggtgttgaaaaagcaataaccaccagaagacaaatgaaagagggccaaaccataaactgtacaatgtttttcctggcatctctgttccaaatgattgtntgtattggctccaggaataatatcatatttcctaataaatggctaaagctgaaattattgcaaattttatgcagaacactattcctaatggtgggaggaatgcatatttttctctttcagttacatttgtccttttaaattgtctggaaagaaaatccatttttatagagactaactgctgtataggagttgatatgccaagtaatttttctaattggtaaccagatcctaaaaggtgaaaatatgccaaggatgcaattctctttgggtttgcacagattacaaagagtttttcattctttaccactgattaatagattaatagattgg

SEQ ID NO: 2349 - DNA, 661 bp, Homo sapiens
  misc_feature [331]..[331]: Chromosome 5, SNP identification no. = rs255986
  misc_feature [331]..[331]: allele = g, in linkage disequilibrium with rs26396, respectively
  misc_feature [331]..[331]: n is a, t, c or g
tactttagaaagttatcttttgtttatttgaggagcaaaacttctcaacctagagtaagtacaggatgggtgggatttgtgccccttggtggaatgtgagtgtcatttctgagagagcaggggccgcgatgctgctttcttcatcaacccctcgttgtcatcatcactattttcagcattgccccttaccatttactttcacagtcaccatcactttttaatcttcagcacaacctcatgatggattattttataatttccattttatgaatggggaccaagagagacagaggttaaatgtttcattatccacctagaaagaaacagaggnaagattttaatctgaaccttccagcttcaaaactcattgctatttctgttatacagtgtgtgttctaccttgcctagcagcagggcttcagataattattttaaatgaatgcatttgaaaggtcctgttgtcagaactggtgttgaaaaagcaataaccaccagaagacaaatgaaagagggccaaaccataaactgtacaatgtttttcctggcatctctgttccaaatgattgtttgtattggctccaggaataatatcatatttcctaataaatggctaaagctgaaattattgcaaattttatgcagaacactattcctaatggtg

SEQ ID NO: 2350 - DNA, 661 bp, Homo sapiens
  misc_feature [331]..[331]: Chromosome 5, SNP identification no. = rs255987
  misc_feature [331]..[331]: allele = t, in linkage disequilibrium with rs26396, respectively
  misc_feature [331]..[331]: n is a, t, c or g
ttttgagtagagaaggggtttcaccatgtgggtcatgctggtcttgaactcctgacctcgtgattcacccgccttagcttcccaaagtgctgagattacaggcgtgagccaccgtgcccggccagcttttgtgttttaattctttactatttagtattcatatagcaaactttatcctactttagaaagttatcttttgtttatttgaggagcaaaacttctcaacctagagtaagtacaggatgggtgggatttgtgccccttggtggaatgtgagtgtcatttctgagagagcaggggccgcgatgctgctttcttcatcaacccctcnttgtcatcatcactattttcagcattgccccttaccatttactttcacagtcaccatcactttttaatcttcagcacaacctcatgatggattattttataatttccattttatgaatggggaccaagagagacagaggttaaatgtttcattatccacctagaaagaaacagaggaaagattttaatctgaaccttccagcttcaaaactcattgctatttctgttatacagtgtgtgttctaccttgcctagcagcagggcttcagataattattttaaatgaatgcatttgaaaggtcctgttgtcagaactggtgttgaaaaagca

SEQ ID NO: 2351 - DNA, 661 bp, Homo sapiens
  misc_feature [331]..[331]: Chromosome 5, SNP identification no. = rs255988
  misc_feature [331]..[331]: allele = t, in linkage disequilibrium with rs26396, respectively
  misc_feature [331]..[331]: n is a, t, c or g
ccttaggttattttcagttttctcatattactgacaacacacattgaacagatttatagggaaatctttgcaacattcacaaatatttctttagaaccaatttctagaaaagaaccgcagtgtaaaagagactgcataattgtattgcctttattccctttgggagagaaagattgtaccacacattaacttctaacggtggaattttcaaaccaacagtggagggggttgcatcaaacaacatgtaagatcagtttttatttttgaacagcttttataaaacttttaatgtggctggtatatttaaaaattatactgaatagtaaagagnaaatttcaaatgattataattaactgcaagaaaggaaaatatatattttagtagaagcagttaaaataggaacataaatgaatatttcagttttggtatttcaactctttactaatttttcatatagtatgggttaggaacatttaattaatatgttagcttttttttttttttttttttttgagatggattctcactctgtcacccaggctggagtgcagtggtgcgatctcggctcaccacaacctccacctcccgggttcaagccattctcctgcttcagccacccgagtatctggaattacaggtgcgtgccaccacgcccagcta

SEQ ID NO: 2352 - DNA, 661 bp, Homo sapiens
  misc_feature [331]..[331]: Chromosome 5, SNP identification no. = rs255990
  misc_feature [331]..[331]: allele = c, in linkage disequilibrium with rs26396, respectively
  misc_feature [331]..[331]: n is a, t, c or g
agccctgatacatttagctagtggggagaagggaggattagtgccacctcaacactgaaatgggcttgagttatcagcagaaggaaggaagggactctggacaggtaaaaacaatagatgcctactctattaagttatactaatctgttagcaactatgccatgaactttaaaaaactcactgagtgaacttgaggactgcttggggatgtactgcaaatagactcagacaccacacctaggttctatctagacctgtccctccactaaacctctcttggtcatggtttccttatgaatgaagtaataaagtcaggcaaggtgatatttanggtagcttactgatctaatattcattgaatatccatatgcattgttttaatttttaattaaaatttaaaaaatattttagaaatctaagtcatgtgtggatatagtataagcagttaaagagtcctacattaattgttagaaaaaatagcctcctcctttcctcttcccatcatttctattcactagtggtaaccaattttaacacttttacctgattattgtggtatttacctctatatttctaattaagcatgctaattttgctgatttatgatattataggtctatgtgctatccactgatttcccgctatggaagatgaagattta

SEQ ID NO: 2353 - DNA, 661 bp, Homo sapiens
  misc_feature [331]..[331]: Chromosome 5, SNP identification no. = rs154053
  misc_feature [331]..[331]: allele = c, in linkage disequilibrium with rs26396, respectively
  misc_feature [331]..[331]: n is a, t, c or g
caccctgctggcaccttgatttcaggcttcccagcttccagaactatgagccaacaaatttctgttgtccaagccacttggtttgtggcattttgttatggtggccctaagcaactaacacaaccttcatgatttttgccatatttgtgaacctcttgtggttataaattatgagttacagggttttgttctaagatgactcaccattcaaatttaaataaatttactaccctgagtcccttggcatacagctgggcctgtctacatcttcatacccccatgtcttctgcatgggttgagagccctcagttggcctctttccgaggcagtngggtaggagctgcgagggacctccagtaataagagaaatgcagtatggtggttgttctaatcgtgagatggttttgttgctgcactccatcagaatgtccttggtctctgaacttacttgggtgctgacagccctgcgtgctgtctgagctagagatcactgcagaaggcaggagctggggaacgggattccttattcctccctgtttgagataagtctagcctctcctcacctgtgtggttttcgactgttaaaatctaaaatgattgtccttgtattaactgaaatcatattacatggtccacactttgggaaatattgccccaagct

SEQ ID NO: 2354 - DNA, 661 bp, Homo sapiens
  misc_feature [331]..[331]: Chromosome 5, SNP identification no. = rs1162861
  misc_feature [331]..[331]: allele = c, in linkage disequilibrium with rs26396, respectively
  misc_feature [331]..[331]: n is a, t, c or g
tgtgatggttacatggggactcatgatagattaaagatacattcgtctgctttaatatgtgtgatgaggaatccaacttcattttttgacgtttgactgctgaaagcttttaagcctcacccttccctcatccccttggacctcacatctgggcaaactgataagaaagcctggtgttcccttccttgtcacagatgggagagccaaatcttgcaggccccttcccaaacaggcaaaccctcctcgtctccccacccaggccaatctcctttcctggcttcaccaagccatttcaaacctgctttagaggcctgccctgctctccccaganaactcaattatgtagccagttggtcaaacatgtgggtggccaggggacccccacttgcagctggtgtctgaagtagtggcagtcttgttggagatgctgctttttaacttgtgtggtctgcactaaatctgagtggctaagatcagaattctgctgcagtccacagtatactagttggtgtcagataactcttcatttactcctctctcagaaacatctaggaggaagtcataaaacccatcttcttttctaaatatacctcattgagccactgggatgtctcctttatacaaaaataggaaggtttgggtagattgaaaatcacaaaag

SEQ ID NO: 2355 - DNA, 661 bp, Homo sapiens
  misc_feature [331]..[331]: Chromosome 5, SNP identification no. = rs2434250
  misc_feature [331]..[331]: allele = a, in linkage disequilibrium with rs26396, respectively
  misc_feature [331]..[331]: n is a, t, c or g
ttctgaccattttaagttatgggtgtgaggtggggttgcggggtgggtggtgaggctcatagatctctgtagttgagaactgatccaaacttaaaacatttatttctccatggaataagctattctgggaagaaaatccctgaatagagaaaaagaatgttgcatcttattaggaaagacatttagatgtctttttttaaacatccatgcttaaactttgttaaacattatgttttctgcaaggaatacagtttctttaagaaatcacataggctccttgtagccagtatctgtctcagttcagcttacggaaatgagttactggataatnaagcaaatgagtctttccagaaaagaaaaaattaaggctaaaaatgcaaaggcaattggtgaagaagtctgccactgaagagaattttggcataaggagttcaaagcatgacttaaaaaaagccttcaacaaactcagagattgcctttggaggatacaagaataccaactcattttaaatataataaatacatggaaagaatcaagcatctaccttaattttcctgtaagaactataactgagggtaagcaagtactagataaagagtagttcttccttagaaaatgttttatctaatgaggaaggaatgttagaatcaggagatcacc

SEQ ID NO: 2356 - DNA, 661 bp, Homo sapiens
  misc_feature [331]..[331]: Chromosome 5, SNP identification no. = rs253710
  misc_feature [331]..[331]: allele = c, in linkage disequilibrium with rs26396, respectively
  misc_feature [331]..[331]: n is a, t, c or g
tgaggaagcagagctgggattgagacagccaatcccagcgatactggatcttgcctaacatattgcctagaccttacagttgtgtgagttaaactcttttgcttgagtcatttagaattaaattattgataaattgtaacaaaaattctgaataatagacaagtggagaagcaaaaatgagtcaaggaaattgtctggatttcagggtcagatcttgttacaacctctaccctggaggtagacttggttggttagacaggggtaaaagttactgtaagatacagaaaagaattcaaaattttcttagtgtttccaagttaatatgttagantctctattttaattgtaaataaatatcataaagaagagttatagttatgcatttaggtatgctcctaattttaaaaaatccacagtccttcttttcttactgagttaatctgagctacattagtcataccattagttaataatcaccaacacttaaccttctatggtaaatcaacctctcatgaaaaacatagtttacaaatgtaagtaaaaacatagttttctgcaacaaatactctaataaattgggtttctatacatatcatagtctagtctagtctggaacttacaagtcaacattccttgaaattactcaaatcagcatctcaat

SEQ ID NO: 2357 - DNA, 661 bp, Homo sapiens
  misc_feature [331]..[331]: Chromosome 5, SNP identification no. = rs2548653
  misc_feature [331]..[331]: allele = c, in linkage disequilibrium with rs26396, respectively
  misc_feature [331]..[331]: n is a, t, c or g
tttagagggccccaaacacaaagatgcatagtcttgaattaccaaacttcagaatggaaagatgtcttgtatttatttatagcagttttgacttttgaaatgctgctgagctgaacttgggtgcctttttaatctgcagtacacatggggaatgaatctgacactatttaccaggtagattaaagagagggatatgtcaggcagccaaggtggcttgtgtttagaatgagtcaaagcaatggtgttcatcaagctctctccccaaaaggtatgtagcttcagagactaaaacatagtgtacaaggtggtcatgaagtgattgttctccagntgtgatattatggagggttgttgtcttaaacgtagttggtaaaggatcttttttatcttgcagactttatggggttttggtgctgctatgagctagctattagttcttgctgggaaccgaaagttaaaatggaagttttggctgaatccttgggtgataagtatcacatcaaaatatgagctgtgagagcatcctataggaatttccaagcaaataccccaaaagtagttatatgattcagacacctctctattacctcaaggataaagaaggtcagttgttggagatcagggagaatttgtgaaaaggatttcatcggacacctagtcc

SEQ ID NO: 2358 - DNA, 661 bp, Homo sapiens
  misc_feature [331]..[331]: Chromosome 5, SNP identification no. = rs1895248
  misc_feature [331]..[331]: allele = t, in linkage disequilibrium with rs26396, respectively
  misc_feature [331]..[331]: n is a, t, c or g
atcaagatcagagcagaactaaattaaactgaaacaaacaaacaaacaaacaaaaaatacaaaagataaatgaaacaaaaagctggttctttgaaaagataaataaaattgatagaccattagcaagcctaaccaagaaaagaagagagaaaatccaaataagttcaattagaaatgaaatgggagatattacaactgacaccacagaaatacaaaagattattcaaggctactatgaacacctttacgtacataaactagaaaacctagaggaggggcataaatttccggaaaaatacaatcctcctagcttaaatcaggaagaattaantaccctggatagaccaataacaagcaatgagattgaaatggcaattaaaaaattttcaacaaaaaaagtccagggccagatggattcacagcagaattctacaagacattgaaagaagaattggtaccaatcctattgacaccattccacaagatagagaaggagggaatcctccctaaatcttctatgaagccagtatcacccaaatactaaaaccaggaaagaacataatcaaaaaagaaaactacagaccaatatacctgatgaacatagatgcaaaaatccttaacaaaatactagctaaccaaatccaacaacatatcaaaaaga

SEQ ID NO: 2359 - DNA, 661 bp, Homo sapiens
  misc_feature [331]..[331]: Chromosome 5, SNP identification no. = rs7700635
  misc_feature [331]..[331]: allele = a, in linkage disequilibrium with rs26396, respectively
  misc_feature [331]..[331]: n is a, t, c or g
ctatggactttcctctcagcaccacctttgctgtagcccagaggttttgataggttgtgtcactattatcattcagtttgaagacttttttaatttcaatcttgatttcatttttgacccaatgctcattcaggagcaggtaaatttccatgtatttgcatggttttgaaggttccttttggagttgatttccagttttattccactgtggtctaagagagtgcatgatataatttcaattttcttaaatttattgaggctcgttttgtggcctatcatatggtctatgttggagaaagtttcatgtgctgatgaatgaaatgcatattcngcggttattaggtagagtgttctgtaaatatctgttaagtccgtttgttccagggtatagtttaaatccattgttactttattgactgtcttgatgacttgtctagtgctgtcagtggagcactgaagtccttcactattattgtgttgctgtctatctcttaggtctattagtaattgctttataaatttgggagctacagtgttaggtgcatatatatttaggattgtgatattttcctattgagcaaggcattttatcattatataatgtccctctgtcttttttaactgccattgctttaaagtttgttctgtctcatgtaagaat

SEQ ID NO: 2360 - DNA, 661 bp, Homo sapiens
  misc_feature [331]..[331]: Chromosome 5, SNP identification no. = rs1363429
  misc_feature [331]..[331]: allele = g, in linkage disequilibrium with rs26396, respectively
  misc_feature [331]..[331]: n is a, t, c or g
caaatgataaaagctgtaagaagccaatcaattatccactaagattctgttctttaacatttctccaggtggcacacccacagtaggaaggacctggagctgctaccacagttggtgggaggggtgggccaaaggggaaaatattgcccctctctaggcctctaacccctcaggagatcttcctcatcagattggatacgagtatgactaagatgaagataattgctttttaaaggaaaatgccagtgagtgctgtcagcaagatgagaaaataagacttcccagctctcaccctcttgcaaaaacattaatttgaacaactatccatgcntgaaaatacctccacaagagctaagggatccaggtgagagatgatagcacctgagtgcagcacagaaataagaagctgcattgaagagggtaggaaagatagtttcacattatcctcgtcacccttcacctaagctcacacagtacagtgcaaagatactgtctacctgatccaattttggtcaaaaccaaacttttgtcagctttaggatgacttcagttttaggatgacacaaaatgtgagagacagagcaaaagatgaaaataatacaggatcctgggtgactttattgagctactaagtcaaacatttcttgaaaactttattact

SEQ ID NO: 2361 - DNA, 661 bp, Homo sapiens
  misc_feature [331]..[331]: Chromosome 5, SNP identification no. = rs1363428
  misc_feature [331]..[331]: allele = a, in linkage disequilibrium with rs26396, respectively
  misc_feature [331]..[331]: n is a, t, c or g
actgaagaaagatactacagatactcatgaggaaaaacttcaaccactttcaagaaagtcagaaaaatggatttatggatatctgtctggtgtgtatgtatgtatgtattttaaatatctcaacaaaatccctaggaattccattgaataattttttactagcctagtttaagtaataaataacaaaactatatatttaagtaatgaaactattcaataatgaagttttcattttatccaaattgagagaaagagaccaacagatatttacattataacacttaatagatacaataatggcactgaccaaatgataaaagctgtaagaagncaatcaattatccactaagattctgttctttaacatttctccaggtggcacacccacagtaggaaggacctggagctgctaccacagttggtgggaggggtgggccaaaggggaaaatattgcccctctctaggcctctaacccctcaggagatcttcctcatcagattggatacgagtatgactaagatgaagataattgctttttaaaggaaaatgccagtgagtgctgtcagcaagatgagaaaataagacttcccagctctcaccctcttgcaaaaacattaatttgaacaactatccatgcatgaaaatacctccacaagagcta

SEQ ID NO: 2362 - DNA, 661 bp, Homo sapiens
  misc_feature [331]..[331]: Chromosome 5, SNP identification no. = rs2560278
  misc_feature [331]..[331]: allele = a, in linkage disequilibrium with rs26396, respectively
  misc_feature [331]..[331]: n is a, t, c or g
gggccaaaaatacatccattgattttggaattagaatctatttatacgcattttaaacagatatttctggtcaccttgaagtacaggtgcttgtgtcaggctggagagttggggacaccagtcttgctacacaacaaaaatagatcttcatcattagagcagcaatctaggatggctgcccaccaccagcctggtcctggtaggctgatgtctcagggatgctgactaagcatttttcagagccgactgctgggtccacaagggcttgctcagagcctctctggcagaacaagaaacttctccacaggaaaaaagatttttgcagctagantaaatattcctactgccatatagtatagatctactacatatagacctacaacatatagattctgtaaagtaacaatgagcacagcttttattggccccacaaaggcctatgagtcctatacctggggacaacataataaataaacagccacaggagtggtcattgtctttgaattgttagctcacctatctgtgtactgcatttgccatcacatgagatttcatctgttttttagtcattttttgtttgtttgttttactctgcacatgtgaatatgtgtgacagactgtgccaaattctgttaaaatatttattgaacacctataatgt

SEQ ID NO: 2363 - DNA, 661 bp, Homo sapiens
  misc_feature [331]..[331]: Chromosome 5, SNP identification no. = rs2731835
  misc_feature [331]..[331]: allele = g, in linkage disequilibrium with rs26396, respectively
  misc_feature [331]..[331]: n is a, t, c or g
tccacctatagaatgggatgatgataatagcacaatattaatgattctgtaacaatataatattatagaaattaatcagatatgtaaagctgttaaaacatgggctagagcacagtaagcactcaataaatcttagctcatgttctcttaggtctaaccatgtctgttttattgaattttctaggtgggtttcttagcagggactcaatagctgttaaatgaataaatgaaagactttgtactttagccgtgaaagatccagcctgtgaaaggagccagaggccagtttccatgcactatttctgaacggccccagcttctctcctagtgngtggatctggcccgtctcccattaccacaaatctcattctaggaacctctaccactaactcagcatcaacggaattctctaagatttctagaaccatttattgaagaacaattctcagcacctcctaatttaaggcattgattgttctgggaacattaagaaaatgttgaaagtctccttttctcaagaaacttcatttctctgtaggggagaggggtgagcccacagctgactctaaatcaaggcagccagggctacattatatggtcaaacacttccatcatcctgtgcttctcaagcttcctcaaactttcttggctaaaccaaacc

SEQ ID NO: 2364 - DNA, 661 bp, Homo sapiens
  misc_feature [331]..[331]: Chromosome 5, SNP identification no. = rs253708
  misc_feature [331]..[331]: allele = g, in linkage disequilibrium with rs26396, respectively
  misc_feature [331]..[331]: n is a, t, c or g
tataatcctgctttccacctatagaatgggatgatgataatagcacaatattaatgattctgtaacaatataatattatagaaattaatcagatatgtaaagctgttaaaacatgggctagagcacagtaagcactcaataaatcttagctcatgttctcttaggtctaaccatgtctgttttattgaattttctaggtgggtttcttagcagggactcaatagctgttaaatgaataaatgaaagactttgtactttagccgtgaaagatccagcctgtgaaaggagccagaggccagtttccatgcactatttctgaacggccccagcntctctcctagtgagtggatctggcccgtctcccattaccacaaatctcattctaggaacctctaccactaactcagcatcaacggaattctctaagatttctagaaccatttattgaagaacaattctcagcacctcctaatttaaggcattgattgttctgggaacattaagaaaatgttgaaagtctccttttctcaagaaacttcatttctctgtaggggagaggggtgagcccacagctgactctaaatcaaggcagccagggctacattatatggtcaaacacttccatcatcctgtgcttctcaagcttcctcaaactttcttg

SEQ ID NO: 2365 - DNA, 661 bp, Homo sapiens
  misc_feature [331]..[331]: Chromosome 5, SNP identification no. = rs2731834
  misc_feature [331]..[331]: allele = g, in linkage disequilibrium with rs26396, respectively
  misc_feature [331]..[331]: n is a, t, c or g
aattgccttcagtatttggtacagtcacatgctgtacaggtttgtagcctagaagcaataggctataccatatagcctaggtgtttggtagactataccatgcaggtttgtataagtgcactctatgacattcacacaatgatgaaatcacttgacagagttctcagaatctgtccattgtttgacctttgtaaagcaatacataactgtatttgggccactgacagccagtaccctgggtgtcctctgttgaaccggccttaactagtcatgggccaaagcagccagtcgtcattggcaggctgtgtcctcctcgactctcttttatttntttcttacttttgcctaacctcctacctgttgtctcaagagctcttagggtgtcctttgggtctcccttagggctcctcacctttccttgtgctattctgattttatctgctctggccttctagtaatctctaatgtgtttagcacttaatatttaggcgatgttcttcatgtttcacctcatcattcttacaggtgaggctgcacaggtgtgaatatcctgattttacaaataagaatacaaggaggttgagagaagtcaagtgactcactgaagaaactagtaaaactctgactgagtagacctcaggcctgctgacccttagtcttg

SEQ ID NO: 2366 - DNA, 661 bp, Homo sapiens
  FLJ25333
  misc_feature [331]..[331]: Chromosome 5, SNP identification no. = rs181880
  misc_feature [331]..[331]: allele = g, in linkage disequilibrium with rs26396, respectively
  misc_feature [331]..[331]: n is a, t, c or g
aatagctgggactacaggtgcccaccaccacactcggctaattttttgtatttttagtagagacagggtttcatcgtgttagccaggatggtctcgatttcctgacctcgtgatctgcccacctcggcctcccaaagtgctgggattacaggcgtgagccaccgtgcctggcctattgccattctaatagtattaggaagtggaggctttaagaagtgattaggtcatgagggctctctcctaatgaatgaattaaagcccttattgtgggaatgagttagttatcataggagtgggctcctgatagaaaggatgagtttggcttagtttntctctttctgtcttgcattcttatttcccttcttgctatgttatgatgtaatataaagatgtatcctctcaatcttggacttcccagcctctggaaccatgagccaaataaatgcccagactatggtattctttttttagacagagtcttgctctgttgcccagcctggagtgcagtggtgcgatcttggctcactgcaacctctgcctccaaagttcaagcaattctcatgccttagcctcctgagtagctgggactacaggtgtgcactgccatatctgactaatttttgtatttttagtggagacggagtttcaccatgttggccag

SEQ ID NO: 2367 - DNA, 661 bp, Homo sapiens
  FLJ25333
  misc_feature [331]..[331]: Chromosome 5, SNP identification no. = rs33892
  misc_feature [331]..[331]: allele = g, in linkage disequilibrium with rs26396, respectively
  misc_feature [331]..[331]: n is a, t, c or g
ctgtacatatagcttggcttaaagggaggctttcaatttgctttacatttcccctctcctcacttatcccaattctcccccatccccccataacatctatagttagctagaagagcatttctttacagatacttctataagacctttagaaacttttttaggatcagacagctctaaaataatcaggaatgtattttttttaaattatactttaagtcctgggatacacgtgcagaacatgcaggtttgttacgtaggtatacacgtgccatggtggtttgctgcacccatcagcccatcatctacattaggtatttctcctaatactatncctcctctagcccccaacccccaacaggccccagtgtgtgatgttcccctccctgtgtccatgtgttctcattgttcaactcccacttgtgagtgagaacatgtggtgtttggttttccgttcctgtgttagtttgctgagaatgatggtttccagcttcatccatgtccctgcaaagggacatgaactcatccttttttatggctgcatagtattccatggtgtatatgtgcggcattttctttatccagtctatcattgatgggcatttgggttggttccaagtctttgctattgtgaacagtgctgcaataaacatacgtgtgcatg

SEQ ID NO: 2368 - DNA, 661 bp, Homo sapiens
  FLJ25333
  misc_feature [331]..[331]: Chromosome 5, SNP identification no. = rs41121
  misc_feature [331]..[331]: allele = t, in linkage disequilibrium with rs26396, respectively
  misc_feature [331]..[331]: n is a, t, c or g
gtgggcagaatatgttaagactcacatacagaaagcattcctttttcaaatgcccaaggaattactacttcttaagttttaagaaacttaattggatacctcactccttcaaaaaaccttaaaaaaatgtgaagtccattttcagggatgctgtaaagaacgcctgacaaagtctctcctgacccagccctgttggtggtgggcaggcagaaaaggctcgaggctgctcacgagggagcctgtgaacccccaggagagagcttgtaccctccccgcattgctgaatggggtctgcaatgggtctaatgctgttaagccacgtcttcccctngagaatggatctactgattcactgggcactcaggtggccacgttatggaaactttcctaagtcagaggacctgatgccttctgccgtggagagtgttttcactcctgtttcccactgaaacagtactgagtcctgagacctcacctacttcattgccagttctttcctcctcacctttccactgctccctctggtctgtgtggggatctatttttggcatttcctcagcaaccggttggtccctccttatatgtttggagagtagtcctctccaagtatttgtggaattaaagtgtatgatgaatacagtgtccaagggcactaacttgt

SEQ ID NO: 2369 - DNA, 661 bp, Homo sapiens
  misc_feature [331]..[331]: Chromosome 5, SNP identification no. = rs4631207
  misc_feature [331]..[331]: allele = a, in linkage disequilibrium with rs6892901, respectively
  misc_feature [331]..[331]: n is a, t, c or g
tttaaatctctaagccaggaacagacatcctgactacctaagttatttaagggattcatgggggatgaagacaaagatgtttttattactctttgctttttcagttaatacagttattgctttaattatttaaaatactaagcagtaacatctgctatcttttgattaatactatagaaattggcaatgcttcttggtccttgagttgtgttcattatgtaaataaaaataatttttgataaaaatgtcctggaagtaaaaatgaattagagaacattttgctcttatttcttagtaaactgtgaatcatttagtgcatggtttaattcangaattaaaaaaactatttgtagaggtatgagtttataggtaaaaatttttcagttgctgggaaatcagattctcctctttgtgtctatttatttggtggttctttatatgcatttaaatctggataatggatggagaatttgattacacagtaaaaataccagtttgtaaaaagtaaacatgcctgggataattttgtctttaaggcagtatacctcttctaatgatgctggtgttgatgataaatatccctacctatttataatcatcgatctattgtgtatctatattgaattctgttttaaaattatcttttgagccaggtcacatg

SEQ ID NO: 2370 - DNA, 661 bp, Homo sapiens
  misc_feature [331]..[331]: Chromosome 5, SNP identification no. = rs4702966
  misc_feature [331]..[331]: allele = t, in linkage disequilibrium with rs6892901, respectively
  misc_feature [331]..[331]: n is a, t, c or g
atacatgtggacctgggaggaaactaattatttctttagaattgaaaaagagcaaagtgcctgaacgtgcattatttttaaagtatcttgtgagatttttaaagaatactgaatggttggcaatatataacaaattcatcaaaaatttagtattgcataatggttttctgctcaaacagtgaaatactctttggggagtggcttcagagggatattggcttctgctttttcctttcacaattcagaatgtaaaatgcttaaaggtgttacaaatacttggattaaacctaactaataatcccagagtaatcaataccaacatttctataanttttacatttgctgtcaaagaagggattatcactgcacagagtaaattgcatgacatttataaaatatttaaaaggaatggtgtttgctgatctggagctctatgcacatatttaaaaagcaaacataaaggtctataaaataaaaaaaaaccccaaaagatacaagtgcacatcccccaggtaactgtgaaaaaacatgaccaccaaaagtgttagttttcagaataataaatggtcaaaagaacttgaccatatgtcagagttgcatttctcaaagtgtgctggacacttagtgcccctggaaatatttgaggaatcctaacccaata

SEQ ID NO: 2371 - DNA, 661 bp, Homo sapiens
  misc_feature [331]..[331]: Chromosome 5, SNP identification no. = rs7701153
  misc_feature [331]..[331]: allele = a, in linkage disequilibrium with rs6892901, respectively
  misc_feature [331]..[331]: n is a, t, c or g
ttttgtcatactattgtgctaacactatagccatgattcacaaacatgtcaaaatggctcaaaaggaatccttaaagcaccaaagaatgaatgcaaattgtattctaaatactacaactcagaataatttttatactgtaagtaatgaacagacctcttgcaaacttagatgtgactctttctttagaatcacatgcaatgtgaatgttctagtatgttattttttgcaaaaacatcaaaaaggaaaagataaagtacttaataaaatcacacatgcttgcatattagattttattaacaggcaatctacttgtcttgagtcctgagaacnttgtataaaacttagttacaaagaaagtctcataagtcattaacactttgcattagaaaactcagtgaattttttggtaaactcgaattaacttttctcccagagcaagtgcaaaatctatgttttctgtcttagacctaagctcttctggcatcattcaaagtttaactctttgcataaacacagttacaagttatactattttcaagaagattataaacatattttcaagaagattataaacatattttcaagaagattacaaatatagctaccaataaataaaatggcatttctttttagagagaaagtaaaatgaacttctggcta

SEQ ID NO: 2372 - DNA, 661 bp, Homo sapiens
  misc_feature [331]..[331]: Chromosome 5, SNP identification no. = rs6872713
  misc_feature [331]..[331]: allele = a, in linkage disequilibrium with rs6892901, respectively
  misc_feature [331]..[331]: n is a, t, c or g
atttggctagctattatgctaaatttgccctttgacctgaagaaaacatttctaagatattttgttcactgagaacgataaatgtgatgcatcaaaagtttcttaactaattgagaaatgcttgaatgatcttgtctatttgaccgctacctactgggacacattttactaatgatgtgaaagaaactttggaatctcatcagtaaggtggaatatttttaagtaagagaattaagattaaaggatagtattattgaaatgaacttcaaaaaaggaagaacaccaaaaacatgataaaagatttaagcaaatatatatatttaaaacaganagataacattcattttattaggcaatatttttgaggggtataaaatatctagtctgaagctaaaggaagatagactattgtattattttgttttcatctaagcattaaagcatacatagtatgaatagataatggatgtactcctgcttggtggttgggaagatggaagattttgatgtaatgaggtataatgtaagtttgtaaaccatatcatttcagtcatttccacaaaacccactcttagcaaggattcatgctatcatttctatttggggctcagtgagatgtggaagacctaggttttataagatgcatagttagttcaaaagg

SEQ ID NO: 2373 - DNA, 661 bp, Homo sapiens
  misc_feature [331]..[331]: Chromosome 5, SNP identification no. = rs2948736
  misc_feature [331]..[331]: allele = t, in linkage disequilibrium with rs6892901, respectively
  misc_feature [331]..[331]: n is a, t, c or g
tcccatacttcttgaagattttgttcattcttttttattttttatttgtttttgtctagctagattagctcaaaagacctgtcttcaagttctgagattcattcttctgcttggtctagtctgttaaagctttcatgtatatttagtaattctttcaatgaatcttttatttccaaaagttctgcttggttttttataaaatattcttggtaaacttctcatttatatcctgaattgttatatctgatttccttatattattttcagatttctcttgcatcttattggtcctctttaaaaatcaatactttggattatttagaattttgantgtttctttcttattagtatccattactagagaactactgtgttcctttggaggtgtcacaataccttgctcttccatacttcttgtactattgtgctgatttttttgcatctgaagaaacagttatttcttatttttaaatttactctcattgagatgggacttttttgcttgaaattgtgacatcataatgattatgttgagtataatcatttggctttgcttctggatgtgttcagtgttgacaactctgtatgatttccttggttataaatagccttagtgtggtggtgttctcaaatgccagttgtagtagtgatgtaccagaca

SEQ ID NO: 2374 - DNA, 661 bp, Homo sapiens
  misc_feature [331]..[331]: Chromosome 5, SNP identification no. = rs6866261
  misc_feature [331]..[331]: allele = a, in linkage disequilibrium with rs6892901, respectively
  misc_feature [331]..[331]: n is a, t, c or g
caatcccccaaaagcctggaccagatgggttcacagttgacttctactgaacatacaaataactggtaccaatcctaaaactattcctaaaaactgagaagaagaaatgtctccctatatcacttttgaaaccagtgtcaccctgataaccaaaccagtcagagacacaacaacaacaaaaaactacacacgaatatcccaaataaacatagatgcaaaaatcctcaacaaaatactagcaaaccaaatccaatagcacatcaaaaatataatcaacaatgacaaactggaatgtactcctggaatgaaaggatggttcaggctgggtgcngtggctcagcctgtaatcccagcactttcagaggccgaggcaggtagatcacttgaggtcaggagttcgagactagcctagccaacatggtgaaaccttgtctctactaaaaatacaaaaattagccgggcatggtggagcatgcctataatcccagctcctcaggaggctgaggcaggagaatctcttgaactccggaggtgggggttgcagagagctgagatcgcgccactgcactccagcctgggtgacagaacgagactctgtctcaagaaaaaaaaaagaaaaataaaaggatgcaaatcaataaatgtaattcatcacataaac

SEQ ID NO: 2375 - DNA, 661 bp, Homo sapiens
  misc_feature [331]..[331]: Chromosome 5, SNP identification no. = rs12177005
  misc_feature [331]..[331]: allele = g, in linkage disequilibrium with rs6892901, respectively
  misc_feature [331]..[331]: n is a, t, c or g
ataatcccagctcctcaggaggctgaggcaggagaatctcttgaactccggaggtgggggttgcagagagctgagatcgcgccactgcactccagcctgggtgacagaacgagactctgtctcaagaaaaaaaaaagaaaaataaaaggatgcaaatcaataaatgtaattcatcacataaacacaagtaaggacaaaagccatgtactcaatagatgcaggaaaagcatttgataaaattcaccatctcttcctgataaaaaccctcaacaatctaggcatagaagggcatagctcaaaataatgagtcatatataacaaactcaaagcnaacattacagtgaatggggggaaagttgaaagcatcactcttaagacctggaacaagacaagaatgccattctcaccactgctattcaacatagtactagaagtcttagccagagctatcagacaagagaaagaaataaaggcatccaaagtggaaaacaggaagtcaaattttctgtttgcagaggatataatcttacatctagaaaaccatgaaaactccatcaaaaactgcttagacttgttaaataaattccataaagtttcaggacacattatcaatgtataaaaatcagtagtatttctatacactcataataatcaagcagag

SEQ ID NO: 2376 - DNA, 661 bp, Homo sapiens
  misc_feature [331]..[331]: Chromosome 5, SNP identification no. = rs2968332
  misc_feature [331]..[331]: allele = t, in linkage disequilibrium with rs6892901, respectively
  misc_feature [331]..[331]: n is a, t, c or g
cccattccacaggttgtcagttcactctgttgatatttcttttgctgtgcagaagctttttaattaattcatttgtccaattttggttgtgttgcttgtgcttttgaagtcttagtcataaattatttgactagatcaatgtccaaaacagttttccctaggttttcttctagtatttttacagtttctttattccatcttgagctaatatgtgtatatggtgagagatgggagcccatttctattcttctacatatggcaaagctattttctcagcaccatttattgtaaagggtgtcctttccccaggtatggttttccaatattggcnaaaaattggtgtgcatatgtgtatttatttctgggtcctctattctattctacataactatgcatccatttttataccagaatcatgctgttttaattcctattagccttgtagcataaagtcaggtaatgtgatgcctttcgctttgctcttttcgcttaggattggtttgagtattcaggctcctttttagttccaaatgaattttagaaatgtttttttctgagccaaggtggacgaacaggaacagctccggtctacagctcccagcgtgagcaacgcagaagacaggtgatttctgcatttccatctgaggtaccgggttcatct

SEQ ID NO: 2377 - DNA, 661 bp, Homo sapiens
  misc_feature [331]..[331]: Chromosome 5, SNP identification no. = rs1523379
  misc_feature [331]..[331]: allele = t, in linkage disequilibrium with rs6892901, respectively
  misc_feature [331]..[331]: n is a, t, c or g
ctgacttgaaggtagggcttcacaggggacatgcccatttctacccaggagcctgtctgctcctgccaccatcaacctgctgtccacagtgcccacagcacccaggttcatgctgaggggtgcctgcaggcccgcaccaagctgccttcaacaccccctcagcctccctctcatgcttgtttttacccaaagtctggaggggcctgaggtggtaggcggctggcatgtcagagctgccccaagcaaacttaaacttggctgggttgtgacagcacctggctcagcctcaactttgctccaaaatcagagtaggaactgggaatggggagancccatgtatcaggagcagacacttttgagcccgtgggggaacagcactttctggatctcctagtgcaaggatgcccaggtctgcagtcatgactgagcagctgcaggtgcacctgggagggtggggctcccactcctctaacttggaagggagcagggaccccatttgttcccaactccaactggcttcttggagcactcagccctggctttgcctctcccactgcagtcggcatcatggtagcactgctccagatgggccaccactgccatcagtaagattaagataaacatatctctgaatattacctaggatcacaaaggtttaata

SEQ ID NO: 2378 - DNA, 661 bp, Homo sapiens
  misc_feature [331]..[331]: Chromosome 5, SNP identification no. = rs2968341
  misc_feature [331]..[331]: allele = a, in linkage disequilibrium with rs6892901, respectively
  misc_feature [331]..[331]: n is a, t, c or g
tccattttcctcctgggactcttgtatctattgtccataaaggtaatgctaagtgatgaatacactcatgacattcagggaggaggcatatatttgggtcatacatttccaccgaggacaaattcaagtgcattcttgatttaaataccatttccctttgatttcctttaattcaacactgattaagatgttttgtcagctaaaattagtcatactttattggggcacaattgcaaatatgttcaaatgtttgattttcactctactatgtgtaaagcatgatactgtatactgggtcaaaaagaaggacaggaaaagatgaaaaagacangttttaccttatggtgcttaggccagaattaagttaatgactggaaagactacaattggaaattgggaaattatggtcttgaattatgcaactaaattgatatggtgtacaaatcatatgtggttatttaattgtcctgggtttcagtggcttatgtgtaaaacttcaggatttcatggagggataagtaaagaccatttttgtttgactgtctgcaagcctattttatttttatttggagccttggtttagagattttagatttttacctaaatgatataataaatctggttgaattttattttattatattttggccatactcatact

SEQ ID NO: 2379 - DNA, 661 bp, Homo sapiens
  misc_feature [331]..[331]: Chromosome 5, SNP identification no. = rs6892901
  misc_feature [331]..[331]: allele = a, c
  misc_feature [331]..[331]: n is a, t, c or g
tgtaattccagcactttgggaggccgaggcaggtggatcagctagggtcaagagttcgagaccagcctggccaatgtggtgaaaccctgtctctactaaaaatacaaaaattagctaggctggtggcatgtgcctgtaatcccagctactcaggaggtcttggcaagagaatcacttgaatccgggagatgcaggttgcagtgagttgagattgtgccgttgcactccagcctgggtgacaagagtgaaactcggtctcaaaagaaaaaaaaaattgaaatcaggatttggaagatatatcgttactcctatgtttatagccctattcttnctgatagtcaagatatggaagcaactccaatgtctattgacagttgaatggataaagaaaatgtggtgtataaataaaatagaatactattgagtcttttaaaaaaaagaaagaaaccctactatttgtgccaacaggaatgaaccggaaggacagtatgttagttgaaataaaccagccacagaaggacaaatactgcatgattctgaagcaagatattttcttgaccccttcgtgggactagtgacaaaggagcctcaattagtcaggccacccactcaatccctcatgggagggagcatgcaagtgaaggaatacaggactcagagc

SEQ ID NO: 2380 - DNA, 661 bp, Homo sapiens
  misc_feature [331]..[331]: Chromosome 5, SNP identification no. = rs2968342
  misc_feature [331]..[331]: allele = a, in linkage disequilibrium with rs6892901, respectively
  misc_feature [331]..[331]: n is a, t, c or g
tcagtggatcctttgcctcataatgtggggtgggatgtcttctgccagtgagggcaaagggccagtgtgacagccttttttgagtacccgcacttggtgtatcccgaattcttgtctggtgcccaagaggaatgaggtcatgcagatgaattgaaggatggcaaatgtggacaattttattgagtgatgaaagcagctgtcagcagaaaggagagctggaaaggggttgggcagggaaggttgctctcctctaaagtcaaactgcctctcttcctccatcttctgaagtcaagccacttcttcccaatgtccagccacatcttcccaacanccagctgcttctcccattgtccagctgcttctattctctgctggctgagtctggggtctttataggcataggatgggggcaggccgtaggtagttttggaagaggcaacattcaattggtgaaaagacattattcagaaagaaccaatcaggagagattgggcacacaggggtgaaagttctcaccttgggccatgggtttcaggccttttggctctaaggtggggttttgccagggacctgcccgtctgcctagagtttctctgcctcctgtcactatcaatttcacttatatgaaatttaaatagtcaaactcataggagcagaaaat

SEQ ID NO: 2381 - DNA, 661 bp, Homo sapiens
  misc_feature [331]..[331]: Chromosome 5, SNP identification no. = rs2948765
  misc_feature [331]..[331]: allele = c, in linkage disequilibrium with rs6892901, respectively
  misc_feature [331]..[331]: n is a, t, c or g
taacttttaattatcttttattgcaatactttatatctctctgtctttttgttctattttatgggagatttcattaaccttatattccaaccttatatgctgtaatattttcactttataagattaccattcagataatattatttggttaaattttttttctgttgtcttttgcatctgccttgtttattctccaaggatattttacacatatatttcattttatatattttaagaatattatttctatactaataatctttctctgaagctttctctaattttttggtgatccttggctattcattaatattgttaaggatgaggtcanttgtgagcctctaatggtttagtatgacttgaagaatgggcgtcagtatagagagagcaggaaaggagctcactgtgttggggccattctttctctttaaacagttcatttatcctgaaataatatctgcaatgtcctgctcagttgctatgaactgggctgccaaaacactgggaacagagtgagaaaaggcaaatgtgctactctctgctttgtatgtgcagttaattcctatatgcaatatggcatctctgatctctgcgtatttttccaggagtcagagtccttccggcaggagtctctcaagaaagtatactttctacttttaga

SEQ ID NO: 2382 - DNA, 661 bp, Homo sapiens
  misc_feature [331]..[331]: Chromosome 5, SNP identification no. = rs2963624
  misc_feature [331]..[331]: allele = a, in linkage disequilibrium with rs6892901, respectively
  misc_feature [331]..[331]: n is a, t, c or g
ttgccagcaccttgggaattttctttgtggtttttttttttttttttttttttttgagatggagtctttctctgtcacccaggctggagtgcagtggcgccatcatggctcactgcaacctccgcctccctggttcaagcaattctcctgcctcagcctcccaagtagctgggattacaggtgcatgcaaccacacccagctaatttttgtatttttagtagagatggggtttcaccacgttggtcgggcttgtctcaaactcccgacctcgtgatccgcccgcctcgccctccaaaagtgctgggattacaggcataagccaccataatnggtcttgtgtttttcttaaatctcatgttgtctcatttcttgattttctttattgttttagtggaacatctcatccagtagttttctaaaataaacagactatatggaaggtaaattttaaaaactttatgtgtctgaaaacacgtttgttctacacttgcacttgactgataggttactaaagcgttctaaattggaaattactttttgttataactatggaaacattgcctcattatctttgaactttttgtattgctattggtaaatctgatgccattttaatttatcttttctttcctatggagtctgttttcttttgtccatatg

SEQ ID NO: 2383 - DNA, 661 bp, Homo sapiens
  misc_feature [331]..[331]: Chromosome 5, SNP identification no. = rs1464636
  misc_feature [331]..[331]: allele = a, in linkage disequilibrium with rs6892901, respectively
  misc_feature [331]..[331]: n is a, t, c or g
gtgcatcctgcgatgaggcttcctgttcaaagtgggtttccgctttgtgtactgcactgctgggagtggctccaaccactcgaaatcttgagctagaataactggataaataagtatcttacttgtttctactagtctttcttaaatgtatatataactcacagttatttcaatgttaaatattagaagtgtttttagaagtttgttggtttttgtgaccagaaatatataggaacttaactcttgttacatcaattaacctttggtaaaattggtttaattatatgtaatttcaattaaagttgcagtttctgagaacctatcagcagcnttaggtcatatatatgtatatgacttaacatagatatatatatcttaacatatatatatcttataatatcatgttgtataccttcaatatacacagtgaaatttatttttgaaaatttgaaaaagaaagatattaaatgctccaatttaagatggaaattgtggttcgttagtatttgcttgaaaccaatgggattatttacgaaaccatgttccaattcaattggccattataattagaggtaacattcggattacccttcatttaaaaattgtaattaaactgtaacttcgatatgcatttaaaaagtgaattctttcccaaggtggg

SEQ ID NO: 2384 - DNA, 661 bp, Homo sapiens
  misc_feature [331]..[331]: Chromosome 5, SNP identification no. = rs2511925
  misc_feature [331]..[331]: allele = g, in linkage disequilibrium with rs6892901, respectively
  misc_feature [331]..[331]: n is a, t, c or g
ggggcccttaattctgtgtgtctaataggtcccaatgtgatgactatgtggcatgtctgtgcacagcatgttaaataacaaacattcaaagatgtttcccacatatgatatttactatttacaatagtataataatgtgggattttcagaaacagagaaattcaaacaaaaagcatttccactgccatgcttaaggtagaaacataggcaatgagcatacattttaaacaattttggatagctaacttacaattccagagggcatactccaatttttggtacaaggattatgtctccttcttggctaatgttctgtttttaatgccagaanacagtgctcttttagaaaagaaattgtaagttgattctcaattagtgcttagactttaatatttttttggataatattcagtatctgttttcttttttaaaagatgtgttaaattattttcagaatctcatgaaaaacatatgatgtgggtttattaattttcatttactgtacagaatatgcaacttgaaaaatatcctattctgcacacagaataggatatttatgtacttttattatcagatctactttgaagacataaatggtgttttttgtctcatcttgtttgatagaatatagataattctgtttaatccaagtttttatctt

SEQ ID NO: 2385 - DNA, 661 bp, Homo sapiens
  misc_feature [331]..[331]: Chromosome 5, SNP identification no. = rs2968352
  misc_feature [331]..[331]: allele = c, in linkage disequilibrium with rs6892901, respectively
  misc_feature [331]..[331]: n is a, t, c or g
gcttccctgttattgttcattttcctaatgccttaagcaaaatccttaaagacatctttttcccttatgtcctatcagtgtctaattcctattagaaaaatagtaagaaactttctttcaaatatctgccacatgcattcttttctttcattctaaatggcatcactctgtttcatgtccttatcaagttggcctgggttctgcactagttggacgcatttaccatgcatttatcaaagttatttaaagcactgccttcgccatgtcatttcaatgctcaacagtcatcaaacactccaaagtgcgttatcaactgtttatccaggtactnaaactccacctcctgccccaacctgttccaaccaacttttttggtctcaaatcccattacttggtttcttcataccatctgaactctaatttcctattcatatattttacactacatgactgtgttcagtctttgaagagagtccttagacattctaagaagtgcccaagaagaaagttcttagacactctagacaaaaatgtatcttccaagtaaatctcaacaaattatagataaatagatggatagatagatagataggatcattaacagtatcaagatgcaaaaagagggtcttgttattccccattaacaagtggagagcctgaa

SEQ ID NO: 2386 - DNA, 661 bp, Homo sapiens
  misc_feature [331]..[331]: Chromosome 5, SNP identification no. = rs2948756
  misc_feature [331]..[331]: allele = t, in linkage disequilibrium with rs6892901, respectively
  misc_feature [331]..[331]: n is a, t, c or g
ccataaattgttggcaggaatgccaaaaaataatcctcctatccctccctcatataacctgaggcagcatgatattccatattttctatcattttaatcaacagtcacaaattttgctctaaactaaaatctttctaatttcctgcgatgtcatgactctctctcctttcaaaaaactacccttccaagattatttttaaaatagcagaaatagtaatagctaaaaattggtgtttacccaatttgtacttccaaaaccatgtgggaaatggaccatgtagagggtaacagcattttggtttgctacttttaagagaataggaattttcangaactctttggttttcccctttttgcactattctcatagatctttactgtagttccttgtaagttttcccaatttaggagagaaatgggacgtgatatttctttttttcctttctttctgtcttttttttttttttttttttgacagagtttctctcttgttgcccgggctggagtgcaatggcgtgatcccagctcaccgcaacctccacttaccaggttcaagcaattctcccacctcagcctcccaagtagctgggattacaggcatgcgccaccatgtccagctaattttgtatttttagtacagacaggctttctccatgttggt

SEQ ID NO: 2387 - DNA, 661 bp, Homo sapiens
  misc_feature [331]..[331]: Chromosome 5, SNP identification no. = rs1818865
  misc_feature [331]..[331]: allele = t, in linkage disequilibrium with rs6892901, respectively
  misc_feature [331]..[331]: n is a, t, c or g
tccgagtccttttcttcctgattgcctgcctcattgcctcaatgacattccagcacctggcactagtcatggtattaccctgaccttttgagccagaaacagatttaagaatctggttttctctcttgatgttctgctagcaagagcgtcttcatttctctctatatactaaatgaagaaacagaaatagcttgggcacaaacttaaaataaaataaatgtgttttaaatagttaaaatactgtagctccatttcagagatacacaaaaagtacttaatgaccccaacacaatctccaaaataatttgacctaattgtaaaaggacataanctaaaaggattatgaaagataaaaaggaggtataagttaacctggttggggaatgttcttgaagtcagaaatcatgttttatttgtctctgtattcttcataacacctaacatagttccacatgcactgtagaaacagtatttgttgaactgaagttcatggaattaatgtgtcatacttggttacatattgaatagtagaaattaaagtcattcactgaccccttgataatataaaaacatattcatctgcaaaaacttctcacaaaactcaggcagaacctgagatgttttgaaaagctaggcttatttttatttcttctaaaaatga

SEQ ID NO: 2388 - DNA, 661 bp, Homo sapiens
  misc_feature [331]..[331]: Chromosome 5, SNP identification no. = rs2963602
  misc_feature [331]..[331]: allele = g, in linkage disequilibrium with rs6892901, respectively
  misc_feature [331]..[331]: n is a, t, c or g
aaccaaaaatgaattgttttattttagataaattttattttattttatatcaaggtaaacagatgaattaaccaataatgaccctgtaaagagcattttgcttattctccctttatagtttagtgaaattctagatctaattgttaccagaaaaggggtcttgtcccaagagcccttgggatctcacgcagctaaaaattcagggcgtgttacagaatacagtaaatttagcatagtttattagagactattacagagtagggtgacctcagagagcaagatgagaaacatcacttccaaaaatataatgcttacttatataggatattanagttaagaataatgcgctttattacaaaggcttgtgatcagcctgtgacaggctattagtatttttattctcttgtgtaactattgatttcaacaagaatttatggttattctattatcttaaagcgaaacctgttcttaaattaagaattcttgtccgggcgcattggctcacgcctgtaatcccagcactctgggaagctgaggcgggtggatcacaaggtcaggagatggagaccatcctggctaacacggtgaaaactcgtctctactaaaaatataaaaaaatagccaggcgtggtggcgggtgcctgtagttccagctactcag

SEQ ID NO: 2389 - DNA, 661 bp, Homo sapiens
  misc_feature [331]..[331]: Chromosome 5, SNP identification no. = rs2617343
  misc_feature [331]..[331]: allele = a, in linkage disequilibrium with rs6892901, respectively
  misc_feature [331]..[331]: n is a, t, c or g
acataggtgaaatgaggataatggcttatgttgtagcaaaagtttaaaaccacttgtcctttttaaaaaataaattatagtataacagtatgttaaaatgggactttctgcctcagtttaggctaatctccaagaaaatgggtggttaagagtttcacatttcaaagtgaggttctagctcacttaatcagaacttgtaaaaaagatgtttaagaaaagtttttgtgaaccctagcagagccattatctggccaaataaatgtagacactgaagaatgagctgagagttctaacatccccccatgttagggtgaggggaggatgagtcatnttttctcctatttcaagtcaggggcaggagcctcctaggaccactcaaaaatcttgatgggttttgctgtgggtcaaagatgaatatttccagtggaccaaattgtaggttgactgctgaagaaagacattcttcaatccaagagggacttttctcaagatgtccactggaacataaaggacgccaaacagatgtagcagtggatccaagagtagtcaacggggttaaccgaaagtgccatttggatgagaggagtgctggtgaggggccccaggacgtgaggatgtgtaaaaaagcccataaagcacctgacaaaaaaaacagctctca

SEQ ID NO: 2390 - DNA, 661 bp, Homo sapiens
  misc_feature [331]..[331]: Chromosome 5, SNP identification no. = rs2682154
  misc_feature [331]..[331]: allele = c, in linkage disequilibrium with rs6892901, respectively
  misc_feature [331]..[331]: n is a, t, c or g
tttctaccactagtttgaatattaattgctttcagagctactgattttgtcttaataaactatttctcatactgaaaatcacatggcaaatcaatttgcatattttttggtagaaaaagtatttttctctagagtcaaacaaggtgcaatgagtatttttaattgaaaatcatctgccatgatggttgcaaatgagggtacaatggacaggaggcagtgtctgatgggaagccatttacaactaagtagatatgaccatctagatgggtttttctatatttatatctgaaggtgtcatgtagataatcctgaaaattaattgaagtattanaatgagttagggtaagaggaaattatgccaaaattactaaaatctaatgagtgcatctaatagttaaagctctgatttagacagcattgccagaaaaaaaaattattactttaagtgaacaaaaagaattaagtactctccatacatctcttataattaacaaattgttacactttcatatatctttcttctaccagcagagaaggatagtaaaatggttatgatgaaagtattttagtaaacaaaaggataagaagtacattaacctggaataacaaagatggcagcaaaacatcagatgttgttctttgctattgcacttgattgcac

SEQ ID NO: 2391 - DNA, 661 bp, Homo sapiens
  misc_feature [331]..[331]: Chromosome 5, SNP identification no. = rs3867077
  misc_feature [331]..[331]: allele = g, in linkage disequilibrium with rs6892901, respectively
  misc_feature [331]..[331]: n is a, t, c or g
tagatggtcatatctacttagttgtaaatggcttcccatcagacactgcctcctgtccattgtaccctcatttgcaaccatcatggcagatgattttcaattaaaaatactcattgcaccttgtttgactctagagaaaaatactttttctaccaaaaaatatgcaaattgatttgccatgtgattttcagtatgagaaatagtttattaagacaaaatcagtagctctgaaagcaattaatattcaaactagtggtagaaatggaaggttaaatattaattcaacttttttagtttcaattgttaaaggaaagcccttttaccactgcgncatttcagttgttttggtttcaaattcattatcctcatatatcagcttttattcatgtgaatattgatttgggctttgttttcttaaaaagagagtaaatgcacctaagtaagagaaccaaataatttatagcccctaaaaaaggaaagaaaataaatgaacagaacattcccagtgcaaaagctatttacactatggttgaaaaatactttgtaaatgaaaacatactatttataacacctgttaaaagagaacaacatttgtagaaactatttgccatgcctttatactttctaggagaagacagtttatggatttttctagaaggtg

SEQ ID NO: 2392 - DNA, 661 bp, Homo sapiens
  misc_feature [331]..[331]: Chromosome 5, SNP identification no. = rs2682153
  misc_feature [331]..[331]: allele = c, in linkage disequilibrium with rs6892901, respectively
  misc_feature [331]..[331]: n is a, t, c or g
gtcattgtagcgataaatatattcgtgaacccatggtatacataagcaataatttttagaaggatgtgatctccattgatgtgtttttgcaatcaaaacaaagcagtattgtaaattatatggcaaaagtcattttatagatactgataatcagagaccagcatgtaggcaagtaaacatggctcttctttttatagtgtgaatgtgggtatttgaaacatgggggttatattgggtggcattcatggcaactagaggcatagaagttttagaggagcagttgacagcctattaattatcaaaggtttatagcaggccagacagagaaganctggcaccttctagaaaaatccataaactgtcttctcctagaaagtataaaggcatggcaaatagtttctacaaatgttgttctcttttaacaggtgttataaatagtatgttttcatttacaaagtatttttcaaccatagtgtaaatagcttttgcactgggaatgttctgttcatttattttctttccttttttaggggctataaattatttggttctcttacttaggtgcatttactctctttttaagaaaacaaagcccaaatcaatattcacatgaataaaagctgatatatgaggataatgaatttgaaaccaaaacaactga

SEQ ID NO: 2393 - DNA, 661 bp, Homo sapiens
  misc_feature [331]..[331]: Chromosome 5, SNP identification no. = rs586247
  misc_feature [331]..[331]: allele = c, in linkage disequilibrium with rs6892901, respectively
  misc_feature [331]..[331]: n is a, t, c or g
ataatattttaagagaccaggttcatatcaaacatttttccttttcttgcaaatgaagggaactcttgatgtaggcacttcatacagaacaaagtttcataggatgcttcctgtgcctcctatgaagtgaatgacacttctattccttgatacacaacggtgaggtcagtgggaagagttattgtgaaattcttttccatcaatccagcaccaaataagaaaggttacccattggatccagtttgtaagtaaatgacaaaaagtttcacagtgagtttctctgcaaggggccatcagaaataaagcctgcagtcactctgaagtgagtgtncctgttactttctcccagagtgagcagttaggtacttgcagaagctgagaaggaagtgctgaatatcagtctgtaagtgttctgcagctatttcttctagagaagagatgaagatgaagatgaggatagcaagtattcttacccctggcctgggtgagcaagagaaagaagcaaggacatcgaggtccctattatcactcacctacacaactctgtaggagggctcttaggattctgaggagatggaacaggtgaacatgctacattaagatggtgagtccaaagatgtttgagctcactggagattcaaatgaaaagatcctgttaaca

SEQ ID NO: 2394 - DNA, 661 bp, Homo sapiens
  misc_feature [331]..[331]: Chromosome 5, SNP identification no. = rs583142
  misc_feature [331]..[331]: allele = a, in linkage disequilibrium with rs6892901, respectively
  misc_feature [331]..[331]: n is a, t, c or g
agtgagctcaaacatctttggactcaccatcttaatgtagcatgttcacctgttccatctcctcagaatcctaagagccctcctacagagttgtgtaggtgagtgataatagggacctcgatgtccttgcttctttctcttgctcacccaggccaggggtaagaatacttgctatcctcatcttcatcttcatctcttctctagaagaaatagctgcagaacacttacagactgatattcagcacttccttctcagcttctgcaagtacctaactgctcactctgggagaaagtaacaggcacactcacttcagagtgactgcaggctttntttctgatggccccttgcagagaaactcactgtgaaactttttgtcatttacttacaaactggatccaatgggtaacctttcttatttggtgctggattgatggaaaagaatttcacaataactcttcccactgacctcaccgttgtgtatcaaggaatagaagtgtcattcacttcataggaggcacaggaagcatcctatgaaactttgttctgtatgaagtgcctacatcaagagttcccttcatttgcaagaaaaggaaaaatgtttgatatgaacctggtctcttaaaatattattttcactgggaacatgtcagaagtgagtaa

SEQ ID NO: 2395 - DNA, 661 bp, Homo sapiens
  misc_feature [331]..[331]: Chromosome 5, SNP identification no. = rs664978
  misc_feature [331]..[331]: allele = g, in linkage disequilibrium with rs6892901, respectively
  misc_feature [331]..[331]: n is a, t, c or g
catattaatgcatatgacttgtgtatttataataagttacaaatacagaaacttcaaaagagaaatgagcatattcagattacatttaatattaaaatttgtcattgtctttaattacaaatgtccatttaaaatagtaaaatcattggttggaatttctttattaaaagattctgatttaaaacattattttcctattttaaaacaccataaatatatcttcacaattccctatttttgaagagacagtgccacatttgagatgttcaggttagaagcagatcaaataatattttgctcaatctgacatatgtgatttgaattaatcganggctacaccctataaattactgttggtgaagtactgtgaaaagaaaattgacctgaaatatttatttaactactcaggtagtaaatacctgctgtcatctacctatttctcaagtgttctggcttaagttatactgactaagatccaagacagccctaaagtttatttcagaaagcagtgaacctaaaagtctgcctcagaaaaaaattgaacataaccccatttggtaaaacaatatttgagactgaaaattcattaactctcacatttcacctatgacatattttaagacaattaaatgagttaaaataggtgaaaacaaacacgagc

SEQ ID NO: 2396 - DNA, 661 bp, Homo sapiens
  misc_feature [331]..[331]: Chromosome 5, SNP identification no. = rs6594536
  misc_feature [331]..[331]: allele = a, in linkage disequilibrium with rs6892901, respectively
  misc_feature [331]..[331]: n is a, t, c or g
ccttagccatgtcagcagaagcaaaagatagagaaatgattgtctcagaatcacccatggatatggtttttgtctaagagtcaatctttgtgaaatccacataaggccaacaaggttccattactgagaacacagtcaagttggactgaacataaggttacagtgagccgagatcgtgccactgcactccagcctgggcgatggtgaaagatcttatctcaaagggagagacagagaatacaaaatgaaagtaagccataaagcccacaaaattttactgacaaggtattacagctgctcagctttaattaattaattatttttggggggncacctttcatgaaaatggaagcatgtctcacagcgtggaagccagagcaccaaggatggggctgacaccccagaggccaataatgacagccacagaagattatttccaggactcatccctaattaagaaactctgactctagtttgcccagctggattacaaaactgctttggaacagtgactctattttacattccattttctctctttttgaactattctctctttgttttaagtatctataattgttgacttatggctatcccatccattgtcgtatactgaaggtattgcaatgaataacttatccaattagttttaaagtacact

SEQ ID NO: 2397 - DNA, 661 bp, Homo sapiens
  misc_feature [331]..[331]: Chromosome 5, SNP identification no. = rs3862292
  misc_feature [331]..[331]: allele = t, in linkage disequilibrium with rs6892901, respectively
  misc_feature [331]..[331]: n is a, t, c or g
cccctctactatcattgtctctttattacaagttgcatttttctgcatctttttatgtattttaatttttgatattaactttttataaaataataaagattaaagtgcttaattttgttgtagtgtagtttgtttttccagtaaatttccatctgaactccttttgtggggagttaatatgaagctaattataagttgagctgagttggggctggtttgaagtgttatttaatttcagttcaactctgaattcaatactagctgggtacttgaacctaaacctagatgagattatgatggctgtctgtgtttcccactttacaaccacagntgctaactgagcaaattcttataggttataactgtgtggtcaagagatttatttctaccctgaggctcttccagattccaaacagtcattccaacacaagcattcattacaagtttagcttgtttctccccatccccaaaaagtctcttcttctgtggcaggtatattcctcagtcctcccttaacttgcatcccccagtcatttctcttgggaattgggtttctagacattctttttttttgaggcggagtctcactctttcgcccaggctggagtgcagaggtgcgatctcggctcactgcaagctccgcctccccggggtcacgcca

SEQ ID NO: 2398 - DNA, 661 bp, Homo sapiens
  misc_feature [331]..[331]: Chromosome 5, SNP identification no. = rs4400164
  misc_feature [331]..[331]: allele = t, in linkage disequilibrium with rs6892901, respectively
  misc_feature [331]..[331]: n is a, t, c or g
gttgctaattctcttcagttctgtgattgttcagactttttaagtttttctgtctttcagtacagtggcctttttttgtgctgtgttcaaactacagtttctttgatccaaggaattcttcaattcagatgtttttgtttcaattccagaatttgtttggtttgttgagtttagtcaatatagtcagaaattgagctgtattttagttttgttcttcttacggttaccttcagtgcactacagacctcaaactgttcttgattcactttgtgcttaggatgtgggctggttatctgggagattttctcaaagtctgcttcaccctcaactnaagacttccctttacacttgtgcccagagacggtctcccttcatcttcttatcctatccccagtaatattctaatgtaaattgatactcagttatcgccagttgtattatacaagtcatctggcttttacatactataagaatgggaacagtgctctttccagctaatcctacactgaagctgagaatccccctctactatcattgtctctttattacaagttgcatttttctgcatctttttatgtattttaatttttgatattaactttttataaaataataaagattaaagtgcttaattttgttgtagtgtagtttgtttttccag

SEQ ID NO: 2399 - DNA, 661 bp, Homo sapiens
  misc_feature [331]..[331]: Chromosome 5, SNP identification no. = rs10059478
  misc_feature [331]..[331]: allele = t, in linkage disequilibrium with rs6880868, respectively
  misc_feature [331]..[331]: n is a, t, c or g
tttgtacctcactagtgacctggtttggaggtgggctgcactcagaatggggtgtaatctcaatcaaggcagctgctatcaggctgggcaattcctggaaggtgctgcagctatgagcaaaaagcagccaccacttccagccactagaagaatgaaggcctctgttctgaaagacgaatctggggattgcatctctctatatactataacccaaacagcccaaaattcgaggaacaccatgtatattttagttgcacactgtgagaaacacattcgcctgtccaaacccaaagaatggactcggagacacagagaacagcagaagcgaganttttaacagcagtcttgcaagattgggtgtctgataggcaggcacagctggggcagttacagcaggtaatttacctcctaacatgcaagaacctcccccagttcctcattggccgagtaatatggggttacagtcttcccggatgtcacctgcgtttcattatcccccttataaggttatacccccgtccgtttccccacttaagttttgatttcccaataatgaaactttcttcctttttatgggttgacccctcctctacattctgttcacttatcgtgaccttctaggtgcatgagccgtgcggtttgtcacgtccacaggctggtt

SEQ ID NO: 2400 - DNA, 661 bp, Homo sapiens
  misc_feature [331]..[331]: Chromosome 5, SNP identification no. = rs7736625
  misc_feature [331]..[331]: allele = a, in linkage disequilibrium with rs6880868, respectively
  misc_feature [331]..[331]: n is a, t, c or g
gcgtttcattatcccccttataaggttatacccccgtccgtttccccacttaagttttgatttcccaataatgaaactttcttcctttttatgggttgacccctcctctacattctgttcacttatcgtgaccttctaggtgcatgagccgtgcggtttgtcacgtccacaggctggttgccagtacttagctttattaggccttgaaaatggaccatttaaaatgttttctcacacacactttttgattacctgtttatttgcccacaatttataatattattttccttagagaaaatagaaggataatttagtcttgcctttaagaaanctgttcaaaattacagctgcactactgtaaatgtgtttttcccctaaatttggaaaattatttgaaaatttggacaaatctctatcaactttcttttatatatgaactgtaatatttcagatactatgagtttctttggcagtgactaaatttaaatgttgtttgtaatggtgacactcattcatctattagtattcaaatattccttgtagtgagagttatgagttttatgttgagtcctgcctcttcatttcaggacacaagggaattggcacagtagtggtgggtacattctggaagccattttgacactgagacaagcaaaaactt

SEQ ID NO: 2401 - DNA, 661 bp, Homo sapiens
  misc_feature [331]..[331]: Chromosome 5, SNP identification no. = rs6861241
  misc_feature [331]..[331]: allele = t, in linkage disequilibrium with rs6880868, respectively
  misc_feature [331]..[331]: n is a, t, c or g
tcccaacactttgggaggccgaggcgggcagatcacaaggacaggagatggagaccatcctggccaacatggtgaaaccccgtctctactaaaaatacaaaaattagctgggcgtggtggcacgtgtctgtagtcccagctatttgggaggctgaggcaggagaatcacttgaacccaggaggtggaggtttcagtgagccaagattgagccattgcactccagcctggtgacagagcaagactccgtctcaaaaacaaataaacaaacagcttatattagtagcgtttactaatttccataatgtatgtactctcaccatgtctgatttngggcaataatgtgatgctactgagtctggagttgggaagtgctgggcatgatcagctctcctttgccggatacattagctccagcacaccactgtgtttagccattggggagaaagaggaaaggaaacccctgatgtttgcctacagcctggatcaaaggattctatgctgaagttctgtatatccaactgaatctcttattacagttatcttcttggaaattgacatcatgtaacccaaaggaaatacactctctaaaaaatagttgaaccttgagttttagtcaaataaatacataaaatgtgtctaattaattgtcttttaaaattc

SEQ ID NO: 2402 - DNA, 661 bp, Homo sapiens
  misc_feature [331]..[331]: Chromosome 5, SNP identification no. = rs6880868
  misc_feature [331]..[331]: allele = c, t
  misc_feature [331]..[331]: n is a, t, c or g
gaggtttcagtgagccaagattgagccattgcactccagcctggtgacagagcaagactccgtctcaaaaacaaataaacaaacagcttatattagtagcgtttactaatttccataatgtatgtactctcaccatgtctgattttgggcaataatgtgatgctactgagtctggagttgggaagtgctgggcatgatcagctctcctttgccggatacattagctccagcacaccactgtgtttagccattggggagaaagaggaaaggaaacccctgatgtttgcctacagcctggatcaaaggattctatgctgaagttctgtatatncaactgaatctcttattacagttatcttcttggaaattgacatcatgtaacccaaaggaaatacactctctaaaaaatagttgaaccttgagttttagtcaaataaatacataaaatgtgtctaattaattgtcttttaaaattctgattgtgtctccttagaagtagcatcacttacttgaaaagcaaggtatgtttggtatgattgaaggaaagttctactgccttgaaagatgaattctaaaagaagatattcctttttttccttcccaggttcctcaaatttttcacattaaataccttagttaattagaatcgtcatgcttaaag

SEQ ID NO: 2403 - DNA, 661 bp, Homo sapiens
  misc_feature [331]..[331]: Chromosome 5, SNP identification no. = rs6866306
  misc_feature [331]..[331]: allele = t, in linkage disequilibrium with rs6880868, respectively
  misc_feature [331]..[331]: n is a, t, c or g
aaaggaaatacactctctaaaaaatagttgaaccttgagttttagtcaaataaatacataaaatgtgtctaattaattgtcttttaaaattctgattgtgtctccttagaagtagcatcacttacttgaaaagcaaggtatgtttggtatgattgaaggaaagttctactgccttgaaagatgaattctaaaagaagatattcctttttttccttcccaggttcctcaaatttttcacattaaataccttagttaattagaatcgtcatgcttaaagctttatttcatagagcctacagctggaagagaccttaggtgataaggcaatgtnacacaaaacactttgaaaactctacaactattatagttgtacaactagtatattttattatttattatcataatatgctgttcaacccaataattttacagggatgttaagtaattttccacaattattattaaaagttaaggctagaacacagatcttttacatttcatagtaagaaaattcatataatatcagattgcctgccttattgtttactccctcttttaagtgttgaaataaaaccaaaatttaaatattatgcatatttaagagagtccttgtattagtccattctcacactgctataaagaaatacctgagacttggtaa

SEQ ID NO: 2404 - DNA, 661 bp, Homo sapiens
  misc_feature [331]..[331]: Chromosome 5, SNP identification no. = rs7718146
  misc_feature [331]..[331]: allele = t, in linkage disequilibrium with rs6880868, respectively
  misc_feature [331]..[331]: n is a, t, c or g
tttagaactttcaaatcagcactctattgacctccatagataccattcacaattataaaactgattttaaattgcacgagaggagttaggtccatgaaaatgtggggtaggaaactccagaaattgtcccttctataaaagcaatgagaaaactggcagaaatggtcagaatcaactttttcagaattcttgttactaaccgaagatttatttttggactctgttatgttttctgtccgtttcttaaccttctatccattccagagttgaaggctgccacttcattattaaagctctagagtatattttggtttctagaacagctgttctngcctttttattcttttccaaatgttcttggatttttgtgaggtttacactggattccattaaatgcatagcttattctcaatataattaatatatttgcagtcttaggtttttctcagtcagaaacagtatatgacttcacatttattttgattttcttgtaactttctgtaatatttcataacttttttcagacaggtttgcatagttttcgctatattcattattttattttacatattctgtaatgaaaaaggatatttattatttgtataacattttaaatctgttatagctaatatatagaaaactcttatttgcttgtttactt

SEQ ID NO: 2405 - DNA, 661 bp, Homo sapiens
  misc_feature [331]..[331]: Chromosome 5, SNP identification no. = rs6879808
  misc_feature [331]..[331]: allele = a, in linkage disequilibrium with rs6880868, respectively
  misc_feature [331]..[331]: n is a, t, c or g
tcactctgctttgtcaaaatattgttatttgattcacacgctgctcaagcttgccagatgcacacacacacacacagtggaatgttcactcttcactatcaaactcagtgttcctcataactagcaaaataaataaagaacaaatctttttactctggcctgctatttattatgcatatttatttattacatatatatcagattacatacatagactttagtttactaaaatacagattatataaaaatatcaaatcaattcttctctggcagacgttcagtttatatctcgaattcaaataaacttgatgcccattagtgtagtttcatncgcaagtcgaggttggtctatatgccatggccattcctttcctggaaacaggttatttgactgcaagagttctttttatgaagatggatctaacgatttttgaagttccataagacaatattctgtgcacctgtgtgaatgttttgtcaggatcagttataagatatgtaattatatggatgtttactaattaatgcaaaacccagtgggactgccagagagtttaaacaagttctctcttgcatatgacgacaattgttctgatgcgtcaagtttcattaagctaacaaggccaatcacttgaagggttttaggtagatttggatgata

SEQ ID NO: 2406 - DNA, 661 bp, Homo sapiens
  misc_feature [331]..[331]: Chromosome 5, SNP identification no. = rs6888825
  misc_feature [331]..[331]: allele = t, in linkage disequilibrium with rs6880868, respectively
  misc_feature [331]..[331]: n is a, t, c or g
tttgaagttccataagacaatattctgtgcacctgtgtgaatgttttgtcaggatcagttataagatatgtaattatatggatgtttactaattaatgcaaaacccagtgggactgccagagagtttaaacaagttctctcttgcatatgacgacaattgttctgatgcgtcaagtttcattaagctaacaaggccaatcacttgaagggttttaggtagatttggatgatattttcacattatgaacaaagagtcaaacactgttccatgccctgagagccacatttcattatggcagagaacatgtactccaaagtcctcagctgtttntttcagtataattatgcatcataataagaccccgctgtcaaggtggctacattttcattctattggacatctttattgaaaggatttattcttgtgatcatgagtcattagagtgacaaagtctactaagggtaactgtattctaatggttcccagtattggagaccatgtattatctactagggtagagttaggaactgcaaacaagaggatgaacaatataagtttttttccatttctcttcctgtataccattttctaattaatgaagacctaaagaattatgatcttatctcactatacatttcatgggagtaaaaacattttcta

SEQ ID NO: 2407 - DNA, 661 bp, Homo sapiens
  misc_feature [331]..[331]: Chromosome 5, SNP identification no. = rs905829
  misc_feature [331]..[331]: allele = t, in linkage disequilibrium with rs6880868, respectively
  misc_feature [331]..[331]: n is a, t, c or g
tcaatacaattttatgaatatttacttcccttctctttgtgtgtgtgtatatatatatataattttaagtcatgtttaatatttatattactattgcaacagcaaactgcaactacgctaatttttgttacaatgctatgaaatttggtgacattttgctgcctataacaaatatagtgattaatcataatgaaattcacatctggatattaggctcaatacaaaaatacttatttctaacaaatatgtcttatctatactttaacactataccaggtaaaataaggagaagggatgattccatcctaaaataaggagaagggatgattcngtacctaaaggtagcactaggaaacagaccttagattcatttgcttttaagaccctcacagctgcacattcctttctcctcttagttctcttcttaggctcaaataagagtattttgagctgtcaaaaaaattgaaattattactgattattctctatttaactttatagacagtgagaggtgacagcatgctggcagtcctcacagccctcgctagctctcagtgcctcctctgactgggctcccactttggcggccgtggaggagcccttcagcccaccgctgcactgtgggagcccctttctgggctggccaaggccggagccggct

SEQ ID NO: 2408 - DNA, 661 bp, Homo sapiens
  misc_feature [331]..[331]: Chromosome 5, SNP identification no. = rs13188041
  misc_feature [331]..[331]: allele = g, in linkage disequilibrium with rs6880868, respectively
  misc_feature [331]..[331]: n is a, t, c or g
atttgcttttaagaccctcacagctgcacattcctttctcctcttagttctcttcttaggctcaaataagagtattttgagctgtcaaaaaaattgaaattattactgattattctctatttaactttatagacagtgagaggtgacagcatgctggcagtcctcacagccctcgctagctctcagtgcctcctctgactgggctcccactttggcggccgtggaggagcccttcagcccaccgctgcactgtgggagcccctttctgggctggccaaggccggagccggctccctcagcttgcagggaggtgtggagggagaggcaggancgggatccggggctgcccgcggcgcttgcgggccagctggagttccgggtgggcgtgggcttggcgggccccacactcagagcagccggctggctctgccggcccgggcaatgaggggcttagcacccgggccagcggctgcggagggtgtactgggtcccccagcagtgccagcccaccggtgctgcccttgatttctcacggggccttagctgccttcccgaggggcagggctcgggacctgcagcccgccatgcctgagcctcccaccccctccgtgggctcctatgcagcccgagcctcccggatgagcgccgccccctgctccag

SEQ ID NO: 2409 - DNA, 661 bp, Homo sapiens
  misc_feature [331]..[331]: Chromosome 5, SNP identification no. = rs10900756
  misc_feature [331]..[331]: allele = g, in linkage disequilibrium with rs6880868, respectively
  misc_feature [331]..[331]: n is a, t, c or g
attccaggtgtggttttgttcctcattttctctaatttacccagcaccgggcctagaatatagaaggtcctcaattaatatttgtgaaatgaatgaggaaacgaatggaggaatgttgagtaaagacattggagtgaattagaatctcctggctctcttggtcaacgtttgaatcggatctataagccaagggttaagatcattgttgctaatattgtggaggttacaatttctatcagttaacatgtttctcagcattattaccttttaactttaatagttttcttgaaaggcaacctttagtaccattgaattgtactgtattaaagtncaaaaattgccattgattatactaattattatctgctgaaagtttcggtcagcgagacctgaggaaacaagtcctgctctacttttattcataccagcttgatattcatatcatgtcatttaatattagttttaggtttctctaaaaatattaccttttgtagacatatacagacacctatttagcacatgttatatgcctgaacaatgcttagctgatgtaaatttaaatataatggaaagcttccaagggctttgttacaactgaaccagtggctctctcaaattttttgagacatgctcattttttaaaaattctattcatacttga

SEQ ID NO: 2410 - DNA, 661 bp, Homo sapiens
  misc_feature [331]..[331]: Chromosome 5, SNP identification no. = rs7738040
  misc_feature [331]..[331]: allele = t, in linkage disequilibrium with rs6880868, respectively
  misc_feature [331]..[331]: n is a, t, c or g
aatctatggtagtgatagaaaacagcaacagtaaccaatagtcaacaaataactattcttcttatggtgagaggagacgattaattagaaaaaagaattaattaaatcatccaaccaatccctagtgagaaggtttatagagggtggtttctaagctaaaatatattatcttaaggtggagcaattataagtaaattagatactaaaaggaataactgtaatctaagattaaacaattttttttctttttctgtgaatctgcaaagaacacatgcagaactgctaactacaacagtgatagttgtttgaattaattatactagttgcaganatttttcatatctcaaaagatttgtggcaatgcatattgcggccatttttctccttttgaaattgcttttatgcttagccagagaataaatgaggctgaaaattaattcacatggcattttaaccaatagtcagtaatttctgttccacaagcaagaagcagcccaatgcatttaggaatgattttttccaaaagccactctgttagctgccactctgaagggaaccaatccatttccatttgaaatcttttcaccaaatgaaactcttgtttttattaaggtgctagtgtctaagctgcattttattcaatatagaggccacttatttt

SEQ ID NO: 2411 - DNA, 661 bp, Homo sapiens
  misc_feature [331]..[331]: Chromosome 5, SNP identification no. = rs10053332
  misc_feature [331]..[331]: allele = c, in linkage disequilibrium with rs6880868, respectively
  misc_feature [331]..[331]: n is a, t, c or g
catgaagctacatcaagataatttactgagatattaattactattttgtttttattacagttgaaaaattaaaataaattgctatttacattttgcaatctggatatttcccccctctttttctgttcttttagctaggactttgtgctttttttacctcagaggaatttttttaggctaagaggttgtctcaagatgttttcctcttgccttcagtttttataagattgagttcattagaaagattattttaaaggagcaaatagaagcaagcaaaagtaacaggatgtcttcccaaacaggcaaagaagcctgactgaatttctgagantggcatgaactcttacccataccctgggaaaataaaatggccttgagaaggtctgtctaccctgcttacccagggagattgaaatctctcacagggtctcctaccctccactttaaagcagtaaaccacctgcctgcctgggaccatacaagcaaactaaaggataatttccagctttctttacttttcctttttttcccccacaactagacctcctatatgtatacatgttccagggaaggataaaaacctcaccacagacacataggtgagcatgaatttcctggcaatcctacagaatgagggctcagtgtcacctcagtttgcttg

SEQ ID NO: 2412 - DNA, 661 bp, Homo sapiens
  misc_feature [331]..[331]: Chromosome 5, SNP identification no. = rs1445173
  misc_feature [331]..[331]: allele = g, in linkage disequilibrium with rs6880868, respectively
  misc_feature [331]..[331]: n is a, t, c or g
atgggcttgaaaatttagtagttggaatcaaattcaaaatgcttaccctagcacttttaagcatatttcaatattgactttttaaagggggacataggggacaatcatgctcatcacaggccccatttattcttatgatcctgtacttggtgcaattcatcaccttttgtttcctccttgtgttagtctattcttgcatgtctataaagaaatgtctgagactgggtgatgtataagaaaagaagtttaattggttcataattctacaggctgtacaggaagcatggaagcatctgcttctagggaagtcttaagaagcttccagtcatgncagaagtcagagaggtagcaggcacatcacaaggcgaaagcaggaacaagagaaccgagggggaggtgctacacactttaaacaaccagatctcatgtgaactcactcagtattgtaaggacagtaccaagcagatggtgctaaacagtttatgggaaatctaccaccatgatccaatcacctcccaccaggccccacctccaacactagggattacatttcaatataagaattgggtggagacactgtcattagccccctgaccccttcaaaatctcatgtccttctcatatttcaaaatccaatcatgcctttccaacaatcccccaa

SEQ ID NO: 2413 - DNA, 661 bp, Homo sapiens
  misc_feature [331]..[331]: Chromosome 5, SNP identification no. = rs6896126
  misc_feature [331]..[331]: allele = g, in linkage disequilibrium with rs6880868, respectively
  misc_feature [331]..[331]: n is a, t, c or g
ttaggtagagacgggttttcaccatgttggccagcatggtctcgatctcttgaccttgtgatcttcctgcctcagccttccaaactgctgggattacaggcatgaaccaccatgcccagccaggatgcagctgcttttaaacacccagatttcatgagaacttactcactatcctgaggacagaaccgagaagatggtgctaaactgtgcacgagaaatctgcccccatgatccattcacctccatccaggccccacctccaagactggagataacaattcaaaatgagatttgggcagagacacacatgcaaatctgtatcactcctctnggccaaccttatttattccatctatcctctttatcctgggcagtaaatgacaagattcttgtcacttgattgaaaggttagacaaataaatacactttataaacaaaataatccaacaaacatgggataaggatagaggaattatatttgattttgaacaacataaataatacaatgtaaagacaaaaggaataaattaggaataaataagggtgccttacaaagagaaagattgaatcaaaacttagcaatattgcctgtatatatgcattttattaagagctaacatggccaaaattattagagctaatatttttcaatgttatacct

SEQ ID NO: 2414 - DNA, 661 bp, Homo sapiens
  misc_feature [331]..[331]: Chromosome 5, SNP identification no. = rs6595366
  misc_feature [331]..[331]: allele = c, in linkage disequilibrium with rs6880868, respectively
  misc_feature [331]..[331]: n is a, t, c or g
attcttgtcacttgattgaaaggttagacaaataaatacactttataaacaaaataatccaacaaacatgggataaggatagaggaattatatttgattttgaacaacataaataatacaatgtaaagacaaaaggaataaattaggaataaataagggtgccttacaaagagaaagattgaatcaaaacttagcaatattgcctgtatatatgcattttattaagagctaacatggccaaaattattagagctaatatttttcaatgttatacctgactgtataacctagctgttttgctaaatctttttcatgtattagctaatttaanctttacctaagctgtaaaatctgtccaattgtaattcatttgacaaatgaagacttggacacagagaaatagacttaatgacagttacccatttagtaaaaacagagtcaatatttgaacccagcaatttgacctgcaagcccatcttatgttgattcctatagattaaaaaaaaatgttgatttgctaacctgaaaagagaaagttgatttttatagccaattagcaaaattctgagtgacaagataaaaaataaatgaatagtacaaaaacaggccttcctttgaaaatagaattcgattaataggaagaactttgcaaagatactgt

SEQ ID NO: 2415 - DNA, 661 bp, Homo sapiens
  misc_feature [331]..[331]: Chromosome 5, SNP identification no. = rs12519913
  misc_feature [331]..[331]: allele = g, in linkage disequilibrium with rs6880868, respectively
  misc_feature [331]..[331]: n is a, t, c or g
tccagtaatagaagacattattttactgtaagcgagaaaacagctatggctagtgcaatggcaatccatgtagaaagcaagcatctgcatcttctgacccaagaattccacatcacaagcataccttacagaaatgactgagcaaatgcacacagagacatcctcaaagacatgttattagcaacagaatactggacagtgtgcaatggtaaaaaaagagatatctaaagattcaacaaaatatgatgaatacatttcatataatggaatatgatacaggtcatttctttaacaaactcttttaaattaccacgtcatatgctgctctagntaacttacaaatattagcacacttaatacttatcacaagtctgtcaaataagaactattaaataattttataggtgaggaaaacgaggtgcagtgaggttaagtaccatatacaaggtagcacaaagctagtaagcatcaaagctatgattttaatttagtctgtcttcaagctttaatcttaatcactttgctttcttgcttctctggtgataaatgaaccagaatcccataaagttgacatatctcaataacagagtgttgaatggggaaaatattgaaaaatggttaattcaatatgataccaagtaatgaacgatgaaaaacaagc

SEQ ID NO: 2416 - DNA, 661 bp, Homo sapiens
  misc_feature [331]..[331]: Chromosome 5, SNP identification no. = rs12514914
  misc_feature [331]..[331]: allele = c, in linkage disequilibrium with rs6880868, respectively
  misc_feature [331]..[331]: n is a, t, c or g
tccacatcacaagcataccttacagaaatgactgagcaaatgcacacagagacatcctcaaagacatgttattagcaacagaatactggacagtgtgcaatggtaaaaaaagagatatctaaagattcaacaaaatatgatgaatacatttcatataatggaatatgatacaggtcatttctttaacaaactcttttaaattaccacgtcatatgctgctctaggtaacttacaaatattagcacacttaatacttatcacaagtctgtcaaataagaactattaaataattttataggtgaggaaaacgaggtgcagtgaggttaagtancatatacaaggtagcacaaagctagtaagcatcaaagctatgattttaatttagtctgtcttcaagctttaatcttaatcactttgctttcttgcttctctggtgataaatgaaccagaatcccataaagttgacatatctcaataacagagtgttgaatggggaaaatattgaaaaatggttaattcaatatgataccaagtaatgaacgatgaaaaacaagccgaaagacattatatattgtcaaagaacatatatatgtagtaaaagttttccaataattttaagaattgaacagaaaattaaagtcaaattcaggatagagactac

SEQ ID NO: 2417 - DNA, 661 bp, Homo sapiens
  misc_feature [331]..[331]: Chromosome 5, SNP identification no. = rs6595367
  misc_feature [331]..[331]: allele = c, in linkage disequilibrium with rs6880868, respectively
  misc_feature [331]..[331]: n is a, t, c or g
gtcaataaatacaagtctttagcatgagtgtaagcatttgtattgccttctattttactccagtcattagtttttttactgatacataatagttgtatatattttgggggcacatgtgatatcttgatatgtgtattcaatgtatgatgatgaaatcagggtaattggaatatacatctcatcaaactttttttttgtatgtgttgggagcatcacaagtcatctcttctagatattctgacatatacaataaatcattgttaactataatttttatactttactattgagtactaaaacttattccttctaagtgtctgtttttgcatgncttaaccaaatcttttgacagccattatattattccaatgttttcactatggtaggcactgctgcaatttgtatactcttataaagcatttgaattggtacaaatttttctaaatggaaaaagaaaagtgttcacacaaacactttgttatttagtattgggattcaaacaaatgtttcttggtttctaaaagtaaaataagtacaaaaagtgtgtgcaaaaagtaaaacgagtcaaataacatataaacaaagttgtttccactattataatattattggtactttgagttggaaaaggcaagatcctataggaatattttaagttatt

SEQ ID NO: 2418 - DNA, 661 bp, Homo sapiens
  misc_feature [331]..[331]: Chromosome 5, SNP identification no. = rs7702043
  misc_feature [331]..[331]: allele = t, in linkage disequilibrium with rs6880868, respectively
  misc_feature [331]..[331]: n is a, t, c or g
tggattgattgtaattctatttttaattgtttgaggaatctccctattgttttttataatgactcgactaatttatgtttccaccaacagtgtgtttgtcttcctttttcttcatattctcaacaatagttgttttcttttatctttttgataatagccatctaactagagtgaagtgttacctcattgcagttttgatttgcatttccttgatgattagtgatgttgagtattttctcacatatctgttagccattcatatttcttatttgaagaaatgtctattaaggtatttttcccattttaaccttatttttgtggggttttttgntgtcattagatgatgatgatgatgatgatgatgaatattatcactttctttttttttttttgagacagagttttgctcttgttgcccaggctggagtgcaatggcgcaatattggctcactgcaatctccaccttccagattcaagtgattctcctgcctcagcctcctgagtagctgggattacaggcaaccaccacaatgcctggcaaatttttttgtatttttaatagagacagggtttcaacatgttggccaggcaggtttcgaactcttgacctcaggtgatccacccgccttggcctcccaaagtgctgggattacaggttaag

SEQ ID NO: 2419 - DNA, 661 bp, Homo sapiens
  misc_feature [331]..[331]: Chromosome 5, SNP identification no. = rs6595380
  misc_feature [331]..[331]: allele = a, in linkage disequilibrium with rs6880868, respectively
  misc_feature [331]..[331]: n is a, t, c or g
tgtctctttttatgacatctttgttgaattcctcattctgataatggattgttgttctgattttagtgacttgtttgtctgagtttccttttattctctgagtttccttataatcattattttgaattccttttcagacatttcataaaattattttatttctggtctgtttctggagacttattgtgttctttgggagagggtagtgtcatgtttccttgttttttcatgatttttgcatttctacactgatatctgtgcatcttgtgcaatccttgccttttccaattttattaaatggcttttgttggagacatttttttttctgtanatgggtcctagggtgttggttgtgtatggtgcattggctttgcttctaggctcactagcatggtctctgtgcaattttttcagctataatccttgttagcaatgtctacaattccctcagtagcctaggctgtgggagtttttaatcaaagtgtgcagtttttctgtcatggaagtgggggtgtgggtaggaagggcagggcagacaccagttggttgtcaggcggggaacatgtgggtgcagaagccttacagtctgactggcatgctctccagggagatagtggccaccatcagaccagcttttgggccttgcatgggtgaatgtggt

SEQ ID NO: 2420 - DNA, 661 bp, Homo sapiens
  misc_feature [331]..[331]: Chromosome 5, SNP identification no. = rs2590411
  misc_feature [331]..[331]: allele = g, in linkage disequilibrium with rs6880868, respectively
  misc_feature [331]..[331]: n is a, t, c or g
gatggatagtcaggtgctactggaccctggggaatggtgcactgtagtagtgggtccactttcaagatggcactgagtcatagcagcttatgtcatgatggtataggatactcaatgtgggcttctactctgagacaatacagctgtgtgaacatctgtctactctccaaactgaatgtgggactgtaaagacatggagttgctcctttaggagggattgctagtgtttctgtcagcaataggggctactggaaatattcactttacctttttcccacaagaaccacaactcctcccccaactttgagcccatccagtaggatagacaatntagcagaggcaggatgactcattcccttctctatggtgctatactgggctgctatgctccacaaggattttgccactaccgtggtgcccttcatcttatttctttggtcaatctagttgaaatacagttgtttatttgttgttttggttccatattctaatggaaacaagcaccagctaactctagctggtcatcttgctgatgtcattctgggttttacagattttattcattcaggaatatataacacagtagtgcatagtcaacatagattgtggacctgagatattaatgtgtgtatgtatgtatacatacatacacacacatata

SEQ ID NO: 2421 - DNA, 661 bp, Homo sapiens
  misc_feature [331]..[331]: Chromosome 5, SNP identification no. = rs2590413
  misc_feature [331]..[331]: allele = c, in linkage disequilibrium with rs6880868, respectively
  misc_feature [331]..[331]: n is a, t, c or g
aattgtgacttcataaatcaaactaataccaaaatttaaaaactggatcaaattcttttatttaataacagtgattttgaagtgtttaatagttttcatctaaaggcctttaaaaatattttgtaaattagaaatagagtgcacatttatttactaataaattagtaagccaattaacagtcctgtttaacatgtagtaaatagtcatttcaactttccctgacttaaccagtgagaaaaacagcatccatttaagggccacatttccccagctcaaaagtattgtcagcccagggctgttttgtccagcttgtgttagcgagacactagnacatttttggagaatgcatttttttattcttcagatttctggaaggcaaactaaaagaacacattttaaaaaggtttattttaattttaagaaattgcatgtcaagtacagttttaaggtaaaatcttaatatatcataagggcagactattttcaaatcagatccagagtgaattatttagtcaagtaaataatccttttgtaatatattcttcagtttggttctttcatttaaatggaacagaaactcagtgacaataccacatgtaagggggtatatagttatgaagaaatatacggagagcaacactaacagcagggatatcgaat

SEQ ID NO: 2422 - DNA, 661 bp, Homo sapiens
  misc_feature [331]..[331]: Chromosome 5, SNP identification no. = rs2725112
  misc_feature [331]..[331]: allele = t, in linkage disequilibrium with rs6880868, respectively
  misc_feature [331]..[331]: n is a, t, c or g
tcccagtctaacacattctccagagttcacagcagtctacaactctactcaggttcgggttagaggcatagaaactaggaagcacagctcccccgccccacctccaccaccatatctaaccagacctgaatttgaggtctgcaagagaaagagcattccattttaagaggacgtaaaaatctagctcttttgtaatcttccacaaattcatagatgcttaagctgcaaacaaacaaaatagcatcaagaggaacaaccacaaccaaaaatgtaaaccataattagtatccttatacactgcaatagctacaaaaagatctattaaaacagnctgaaaaaaaatgttttttctcttatatgaagcttttattctgccgcaggctgaatagaactcatgatgactgactttagcgtctcacctagtcctactgctttcccaactgtcctggaatcccttcccactcacctttactcctcaaggaaacacattttactgtatattatctatagtaaacatattattttgtgtagagctaatacttactgaaagtctaaactccttattcaataaaatttaatctaagaaaaatattccattagttgaacattttccattttttaagtaacctagtacaaactaggttaaacaataaaggaaata

SEQ ID NO: 2423 - DNA, 661 bp, Homo sapiens
  misc_feature [331]..[331]: Chromosome 5, SNP identification no. = rs10515269
  misc_feature [331]..[331]: allele = c, in linkage disequilibrium with rs6880868, respectively
  misc_feature [331]..[331]: n is a, t, c or g
catcttcttgaaatgtgttccctgtcctctgctaaggacccgcatgtcccagtctaacacattctccagagttcacagcagtctacaactctactcaggttcgggttagaggcatagaaactaggaagcacagctcccccgccccacctccaccaccatatctaaccagacctgaatttgaggtctgcaagagaaagagcattccattttaagaggacgtaaaaatctagctcttttgtaatcttccacaaattcatagatgcttaagctgcaaacaaacaaaatagcatcaagaggaacaaccacaaccaaaaatgtaaaccataattantatccttatacactgcaatagctacaaaaagatctattaaaacaggctgaaaaaaaatgttttttctcttatatgaagcttttattctgccgcaggctgaatagaactcatgatgactgactttagcgtctcacctagtcctactgctttcccaactgtcctggaatcccttcccactcacctttactcctcaaggaaacacattttactgtatattatctatagtaaacatattattttgtgtagagctaatacttactgaaagtctaaactccttattcaataaaatttaatctaagaaaaatattccattagttgaacattttccat

SEQ ID NO: 2424 - DNA, 661 bp, Homo sapiens
  misc_feature [331]..[331]: Chromosome 5, SNP identification no. = rs2590421
  misc_feature [331]..[331]: allele = a, in linkage disequilibrium with rs6880868, respectively
  misc_feature [331]..[331]: n is a, t, c or g
aaaatgttttcctttcattcatgttgtctggtaaatatttaaatggaggagttaataattgtttactgggcagacacacttcacatttctagaaggtgggcccaagtccacctgcttgatccctctaaaatgatgtgagccatttttgttgcaagaatctctaacatgatggttatagtacttcctaaaagtacaccatcatcattaaaataactaaatgctatctaaacaggggcttgtgaggatatctattttatagaatttcttactgcagtggaagtacttgtattcatagtagcttagccattgttaagaagaaaatgctagtcangacttgaaaattagatagattcaacttctctatgttttcctaaatatagtcttgactatataagaagaatgtcaaaattgtatgagcggattgccttatattgcaatttttaagaagtagtataaaataagtcataaatcctccatagctatctatcttcttatctctctgaaacttttagagtgagctcatggtgagaaggcagattggaatctcagattatatcagtaatattgcaaaatccatttcaaatagttgagtaggttttcacagttcagtgaagtatgaggcaaaaaaaaaaggaatatataggacaagttgtttagtcag

SEQ ID NO: 2425 - DNA, 661 bp, Homo sapiens
  misc_feature [331]..[331]: Chromosome 5, SNP identification no. = rs2590422
  misc_feature [331]..[331]: allele = g, in linkage disequilibrium with rs6880868, respectively
  misc_feature [331]..[331]: n is a, t, c or g
aataaaattactcaggtaataaaatacagcattgtatattaattatgatgtcacaactgacagaaatcataaaacagcagtttcagcatagatggactaagacaatgtaatccttccatgggaatgatgaaggcagtctgttgggagatgatcccattccatggtcctggctaaagactggaactgggcaagaacattcagtgtaacattaactactacccacaaacaaaggttgttgtgaacacaatttagctactaggaccatgaaagattaaacagaatttgaggaaaagagactgagatgtgggcttactgaagcagaacattaacntcaatattctactacattcagataattgaagggcaattatatgagaggtgaggagaaatatgtaatgcgtatcagagaccctcttatgaagctgaaatgatgtttacatctgagaagcatagagagttaactatgtgaagactgggccatggtgccccctctttccacaacctctgtgaagcctaggatattttggctttctttattctgggacttgtagccaccctgttcatatggcattgctgctagcatatgacactttagtcttcaaggcttttgaagacatgtttaaggtaatttccaatcaagatctatttaaagtgatacttt

SEQ ID NO: 2426 - DNA, 661 bp, Homo sapiens
  misc_feature [331]..[331]: Chromosome 5, SNP identification no. = rs2590424
  misc_feature [331]..[331]: allele = t, in linkage disequilibrium with rs6880868, respectively
  misc_feature [331]..[331]: n is a, t, c or g
tgcaaagaaaatctgactttttatgtatttcatattgaaatttgaacttaacaacaaaaaccttgtcaaatagtattatcacaatgctttctgaaatacacatctctttttcagataaaatttgtctctagagtaaacgttcagtcttcagtgttctgctctcacccccaacacttctccaagatagaaatctttctcctcccgaacaaatacagggtggtgtacttgatttgttatacatgtgtggaagaggggcaggtaaatcaattaagtctgtgtgttatctttatggtctttgttagtctctacttcagtgttttagctggtctgntccatgagctagagatcaagtacattgtttcttcatacagccagtgcctgataattctttctgaatctcttatcaacgctgcagacctctgtatgagttagcaacattatataattcttgtttgggtttttagcccagcttttgcagatagcttcttgctgtgtgattgcatagcatatctcagttctcaagaatgatcaagattatcactatcttgtctctcccagggcatgcagaaacttctaatcagatctacttcactacacatgggagcaatgagagatgaatattctaatcaaggttcctgttacaacttcctactggtcattg

SEQ ID NO: 2427 - DNA, 661 bp, Homo sapiens
  misc_feature [331]..[331]: Chromosome 5, SNP identification no. = rs2725110
  misc_feature [331]..[331]: allele = a, in linkage disequilibrium with rs6880868, respectively
  misc_feature [331]..[331]: n is a, t, c or g
atcagtgatttttttcatgtcctgttggtcagatttccttgtggctcaccatacgatctgtgaatggcagccatatcttccaagagatggcaggtacaattggagcaaagtgatcactgatcagcgttaatcttaaagattagttttggagatcctgtgaaaaaatgatcttgaatgaaagaatctgtgaaatgggggttttaaaactatgtatacttccttctacattgccaaaataaagctgagcatcagtacatccaaccttgtaataagagtgggcataaaaaacagtatattctgtggggtaagtaaaacagagctatattacttncgtgagaagagagagaagaaccgatgaatccgttagccattgctatgtaacagacaataccaaaacttagtggttaccaatgattatttcctgtgtctctgccggttatgtattgcattatgcattatgctgttgttctccacatggtttctcatctttagcattttatctcagacatgctttacagaggaccaaatagacagaactaaactataaagtggaactagaagggaattttcacagtgttacttttgctgcctcattttattggtcaaagcaaatcactaggccagcccaagttgaagtagtgggaaaatagatgccatctct

SEQ ID NO: 2428 - DNA, 661 bp, Homo sapiens
  misc_feature [331]..[331]: Chromosome 5, SNP identification no. = rs12517897
  misc_feature [331]..[331]: allele = a, in linkage disequilibrium with rs6880868, respectively
  misc_feature [331]..[331]: n is a, t, c or g
ttaataataaaagtaatatgtatgaagctttctacattttcaaatactgtgatcaacctatctcacttaagtacttaggaaacctctataaggcaggcaatccatgaattattatctctactttacataaagagaaattaagctttataaataataaagtggcagacctggatttatttcaatttctctggcttctaatccattattctttgcagtatgaggaaaaatgaagtaggagagataacatgttcatatccagatacaatacaaggtagaatatgctaaagtaaagggtaaatatagttctgtaacaatttagaggggagagaantacattgcctttggatgattgatcaaaagtggcatttgatttgggttttacaaaaaacaaggttagctcaggaacataacaatgaatcaacatcatagatatgtattaatgaaacatactgtactaactgaataatggattataaaaacactcgagaatttcaattaatacaaaattgtttaaattcaatatcaatttttaaaaataatagcaaactaaaaatgcaaaggtctttttttaatcaaataatgagtacctttcaaaaacctataccaaattttatacttaatggaaaaatttcaaaagcatttcagttaaatcagaatatga

SEQ ID NO: 2429 - DNA, 661 bp, Homo sapiens
  misc_feature [331]..[331]: Chromosome 5, SNP identification no. = rs2725107
  misc_feature [331]..[331]: allele = a, in linkage disequilibrium with rs6880868, respectively
  misc_feature [331]..[331]: n is a, t, c or g
tagtggtgcccagtgcctgttatttggtagcagcagaaattcatgtcagtggcagcactggtacaaaaactactttggagtttcacaggaccccttggcccaaaaagcagatcctttacacaggacactcaactattgcactgatgatacagcttcttgaatatgttagtgggttttattaaatggagtgacagcaggagagtggggagaggaaatgggcaggcactaatgtaggtattgaaatctacttctcattcatctggtggcagactatcaaccagggtcttcctttgaagctaggagatgttttgaacaggaaaacatttctganaaaagtgagtagttgtaagacaagggaagagagctttttttttttattcaaatcatgaaaactataacacccttgctaggagaataccaaaactatttattgagttcacttttgcaaatgaaagattatttatcttggattcataatgatgtattgcaaaacctaggctgatatacatttagtatttgtgaaataaacattatatagttggtaaataaacactgttttgtctccttttccacttatgtgccttattcatagtcatcttattaattatatgtcttcaatttcattgcctagaatatctagcaagaggccagtgaggcctaa

SEQ ID NO: 2430 - DNA, 661 bp, Homo sapiens
  misc_feature [331]..[331]: Chromosome 5, SNP identification no. = rs2725106
  misc_feature [331]..[331]: allele = c, in linkage disequilibrium with rs6880868, respectively
  misc_feature [331]..[331]: n is a, t, c or g
agggaggtcaaaacctcttttatatatttttaacttcaagagtttgagaatttattctctattttattagttgtaacaattttatgccttcattgtcaagttgaataattaattgttcaaaaaaaccctcctggaagacaagaatttatacagtttttcaattcagtctaagatatgtctaaccatggcataattggccatgtctgatagattgattggtaaggacaagacgtaagtgttttttgcatgaggtgcaaagaacccttcagagaaaaaaattacccttagaggacaccacataattctgcacaaggagaaagcttctctgganctgtgaaaggaatggaccactgaaagtatagtcagatgtgtgacactcaaatttgccctctgactcatttgttttggggactaggattgagtcccagagatagttgggctgaagtataaagcctggtaaaatatattccctaagagctcaatagcatactgagtatacaagatatcatacacaatgaaaagaatataatatgcttacaaacacagcattagtgtgctgactgctccagatgatctctgggtgtaaatgggtgctttgacatattgagggaccatacttatactgccagcaacaagatccagtaccttggtgtgaggaccc

SEQ ID NO: 2431 - DNA, 661 bp, Homo sapiens
  misc_feature [331]..[331]: Chromosome 5, SNP identification no. = rs2725105
  misc_feature [331]..[331]: allele = c, in linkage disequilibrium with rs6880868, respectively
  misc_feature [331]..[331]: n is a, t, c or g
gagtttgtgaccatcctggccaacatggcaaaatcccatctctactaaaaatacagaaaaataggtgggcatggtggtgcgtgtctgtaatcctacttggaaggctgagggaggataattgcttgaacccaagaggtggaggttgcagtgagctgagattgcaccactgcactccagcctgggcgacagagaaagactctgtctcaaaaaaagaaaaaaaatatataactccaatttcgtagtaaattaaactgaaacacagagaatttaagtaactgcctatgatcacagaattagcaagaggaataaaagggcttcaaacgcaagcctntctctaaagcccatgctgacaatctgaaaaacataaactgcaaaatataagaagtcttgtctccactgacattcttcctaaaaaaaatctcatttggggaatttcctgatcatacctcttaagcaaagctcatactattgacattgaacactagtacaaagtacttgatattccagatattgctgtttctttttacagaattttaactagtgtatattattaatatttgatacttacattctcaatacaggcaactagatgaaatactagggaggtcaaaacctcttttatatatttttaacttcaagagtttgagaatttattctctat

SEQ ID NO: 2432 - DNA, 661 bp, Homo sapiens
  misc_feature [331]..[331]: Chromosome 5, SNP identification no. = rs6873910
  misc_feature [331]..[331]: allele = g, in linkage disequilibrium with rs6880868, respectively
  misc_feature [331]..[331]: n is a, t, c or g
agctggtgaacaggaaggaccgcagaacagatgtgccccagtcctgcagaaaagttggccatgctttctcttggcccagcagttagcaaaggttagagctacttggagaaatatggggaggcttgagggatgggtactcttggctttattctactgcagctaccctgcatgcaaaatcccctggggtccatgcaggctggagctctgtctctgcttactctcccggcagatgccccacgccagttcaaatgtccatgagggtcttgggatcttttatagctaggatctcagaggtctacagtgagagtaggctatcccaccattccttcantcacccctttctctaggagccattcagggcttgcagttagcctaggcattcagcaaccccacagagcctcagtgtctgtgttgcctctctattgttttttgtttttttatctctaaagatttgtctaaaatatgttggtttacttgagattctggtctctctcagtgggagtagtacttcctgactacatgtagtcagatattttctaaaatttctgtatttgtgttttaagccccacacaaaagcataattgttattcaacgaatctgcacactccaaagatgaacaaatgctcccaagtctctgggaactgtctgggtgagctccagt

SEQ ID NO: 2433 - DNA, 661 bp, Homo sapiens
  misc_feature [331]..[331]: Chromosome 5, SNP identification no. = rs6595414
  misc_feature [331]..[331]: allele = t, in linkage disequilibrium with rs6880868, respectively
  misc_feature [331]..[331]: n is a, t, c or g
agctacttggagaaatatggggaggcttgagggatgggtactcttggctttattctactgcagctaccctgcatgcaaaatcccctggggtccatgcaggctggagctctgtctctgcttactctcccggcagatgccccacgccagttcaaatgtccatgagggtcttgggatcttttatagctaggatctcagaggtctacagtgagagtaggctatcccaccattccttcagtcacccctttctctaggagccattcagggcttgcagttagcctaggcattcagcaaccccacagagcctcagtgtctgtgttgcctctctattgtnttttgtttttttatctctaaagatttgtctaaaatatgttggtttacttgagattctggtctctctcagtgggagtagtacttcctgactacatgtagtcagatattttctaaaatttctgtatttgtgttttaagccccacacaaaagcataattgttattcaacgaatctgcacactccaaagatgaacaaatgctcccaagtctctgggaactgtctgggtgagctccagttaggtcaagtaggacactgggatgattccaacaacctcccccagccagttctgcaatgtttttctataactattatttcttaagtaatagttaatt

SEQ ID NO: 2434 - DNA, 661 bp, Homo sapiens
  misc_feature [331]..[331]: Chromosome 5, SNP identification no. = rs1445170
  misc_feature [331]..[331]: allele = g, in linkage disequilibrium with rs6880868, respectively
  misc_feature [331]..[331]: n is a, t, c or g
taaaatatgttggtttacttgagattctggtctctctcagtgggagtagtacttcctgactacatgtagtcagatattttctaaaatttctgtatttgtgttttaagccccacacaaaagcataattgttattcaacgaatctgcacactccaaagatgaacaaatgctcccaagtctctgggaactgtctgggtgagctccagttaggtcaagtaggacactgggatgattccaacaacctcccccagccagttctgcaatgtttttctataactattatttcttaagtaatagttaatttgtcctttttagggcttttcttgtcatgtnttggtataaagctttaggatagctttattgaataaattgatttttttaaattttattttatatattctatagttcttatattttaatttttctagtcagttaataattaacttctgttttcaaacatattttaccatataaggtctgctccaatttattgaaaaatcctgcccagtatcagggcttcccatagcaaactgtatttcagaaccacctgagaactatttttaaaatgtctgagaatttgtgtgggtttttttttttttcaagttttctgctttacttttgtgtgcagtaactctgtggacctgggctttggaaccactgaat

SEQ ID NO: 2435 - DNA, 661 bp, Homo sapiens
  misc_feature [331]..[331]: Chromosome 5, SNP identification no. = rs1445172
  misc_feature [331]..[331]: allele = t, in linkage disequilibrium with rs6880868, respectively
  misc_feature [331]..[331]: n is a, t, c or g
taagtaatagttaatttgtcctttttagggcttttcttgtcatgtgttggtataaagctttaggatagctttattgaataaattgatttttttaaattttattttatatattctatagttcttatattttaatttttctagtcagttaataattaacttctgttttcaaacatattttaccatataaggtctgctccaatttattgaaaaatcctgcccagtatcagggcttcccatagcaaactgtatttcagaaccacctgagaactatttttaaaatgtctgagaatttgtgtgggtttttttttttttcaagttttctgctttactnttgtgtgcagtaactctgtggacctgggctttggaaccactgaatactttccattatcattttttttaaagttctttcatgtgtgtatgtatatttagaagttgttgctacaaagttcttgggccttctgaggactttttttttccttaggggccaaatctgattactgatggagtctccttatatccttcttgtctacaaagcccagagactactctaagacctaatcgtagaaagactatttactgcctgtctgactcctttttccttaaccttgactttatacaagttcttacagtgagtttaccctcacatacatactgtactact

SEQ ID NO: 2436 - DNA, 661 bp, Homo sapiens
  misc_feature [331]..[331]: Chromosome 5, SNP identification no. = rs11241664
  misc_feature [331]..[331]: allele = g, in linkage disequilibrium with rs6880868, respectively
  misc_feature [331]..[331]: n is a, t, c or g
ttgtacatctaatagaattaagttgtgagtccattcggtcctggattttattttggttggaaggctatttattattgcctcaattttagaactcattattggtctgttcggagattcagtttcttccaaaataaattggcatctattaacttccagtttgatgctttcttggttctaggaaatttatgttcttagattaaaattagttttattaagtgtcattggttacttattttttctgacatcaacttttttacctgtaaagtgatggcagaataatagccataacaaaactaacatattttaatatattacattggaaattctattnaaaaaggataaagaactgtactattaagaggtattgttattttgcaatagatttttatatacagaaccctacatgtacccaagcatacccttactacgtttttattttttgctaaccttttgcttttaccaaaaggtttattgattcttattctagatattgttttattccacttttgaaaatagatgccacaggctacagactaattcagggactttattttcttttaatttaaacagaacagcatctggtcttctgacagaaaattcaactttgttggcagctacagggttatcccttggtgggccgattaatggatgtttgagttta

SEQ ID NO: 2437 - DNA, 661 bp, Homo sapiens
  misc_feature [331]..[331]: Chromosome 5, SNP identification no. = rs13163793
  misc_feature [331]..[331]: allele = g, in linkage disequilibrium with rs6880868, respectively
  misc_feature [331]..[331]: n is a, t, c or g
tgtcctccaagatatgatttcccaagagttctaggacttgcttccttgtgccagagcatactgcacagtgggggtttcagggcacaaggttgaagtcagaaatgtatacctagcccccctcccaacccttataccactaattggctctatgactttgggaaaagtacttaaacatctctgagacatggctaattcttcaataaaattgaaataatagtagtacttaaaatttagattgttactggtagtgggctaaatgatgtccgttaaagagaatactcttgttttaatccctagaacctgtgaatgatatcttatttaggaaaaaggngtatttgcatgtgaagttaatttaaggattttaagataagaaaattatcctggattaactgggtgggccttaaatctaatatgagtatccctacaagagacacacagaagagagtcatgcagaagaggagcaaataatgtgaccatggaggcagagattgacgtgatgtggccacaagggaggcaacacctggagccaccataacataaaagaggtcaggaatggattctctcttcaagccttcagagggagtatggccctactgacaccttggtattggactcctggcttccagaattatgaaacaataacttcgtgttttaagccaag

SEQ ID NO: 2438 - DNA, 661 bp, Homo sapiens
  misc_feature [331]..[331]: Chromosome 5, SNP identification no. = rs12515114
  misc_feature [331]..[331]: allele = c, in linkage disequilibrium with rs6880868, respectively
  misc_feature [331]..[331]: n is a, t, c or g
ccgttaaagagaatactcttgttttaatccctagaacctgtgaatgatatcttatttaggaaaaaggggtatttgcatgtgaagttaatttaaggattttaagataagaaaattatcctggattaactgggtgggccttaaatctaatatgagtatccctacaagagacacacagaagagagtcatgcagaagaggagcaaataatgtgaccatggaggcagagattgacgtgatgtggccacaagggaggcaacacctggagccaccataacataaaagaggtcaggaatggattctctcttcaagccttcagagggagtatggccctantgacaccttggtattggactcctggcttccagaattatgaaacaataacttcgtgttttaagccaagtttgtggtaacttaatatagcaaccagaggaaagtaatacatcattcaatgagataattgtgaagaatatacttaatacatggtctagaacatagatgttattgataaatagaatttattatttatacaaaacctgagcagtgtgagacctagaaccagtgctaaaggatatttgtactcagagaatgggtttccatttatcgattagtttctatgagccaattattctactgggtgttatgcatgcattatatagtttctcc

SEQ ID NO: 2439 - DNA, 661 bp, Homo sapiens
  misc_feature [331]..[331]: Chromosome 5, SNP identification no. = rs13162330
  misc_feature [331]..[331]: allele = t, in linkage disequilibrium with rs6880868, respectively
  misc_feature [331]..[331]: n is a, t, c or g
gttttgcctttccagaaacatcctgaatttgttgtgttccatagtcattatagcccaataaatatgatgtgggtcagattggaaatgcaaagaatttggtgaactctgaatgtattaggtgcactttgaaccatttactgccacaaacacaatgatgctatttcaaaagaagcatattagagattgaaagcaactcttcttagtactataaatggttaccctgtattgcagtaaaaataacagatttattggcaaaacttctaccttgttaattttatatttcaattttccaagctccggtagctgaatatagattgatatagcttaagcntagactaatgattaaaagttcagcatgtaaatgcaatccagatagtttatttatgactcagacatattaatttgtcaagttgggttcaaaatgcttctctatctggatcaacttaatatttccatatatctttatataataggcttaaatattgctgaataaagatgacagcttaattttgatttgcaaaaatattttacacaagtaatttacaaagtatgaaacaaaaatacataaataatatgaataaaataatgcaaataaactaatagtacaaaaatcctctaattaatacataaaggagtatttagtcatcctatcaacaaatat

SEQ ID NO: 2440 - DNA, 661 bp, Homo sapiens
  misc_feature [331]..[331]: Chromosome 5, SNP identification no. = rs10751461
  misc_feature [331]..[331]: allele = g, in linkage disequilibrium with rs6880868, respectively
  misc_feature [331]..[331]: n is a, t, c or g
ggaggagtacctctcttctatttctgctaaaattctcaatctctgtcgagtagaaaatcaccggtttctgtggaagtagttaaaaatgcacgaaggtgctgaacacacaaacaagcaaaaataacagaatatcacaatactcttaaatacaaaataactgtatttctacacactatcaatagaagttgaaatgttaaaaataccatttaaagtaacatgaaaattatgaaatatgtaaaatacatatttttaaagatgtaagatgactacatgttgaaaaccatcaaaaatagctgagaaaaaatgttaaagacctgcataaatggagaantacattatgttcacaggttgaagattcagtattgttaagctatcagttgctctcaaatagaaccatagattcaatacacaatcccaagtgaaaaaagcagcagttttctagtataaatttataagattgtcctaaaatttatacaaaaattcaaagaacctacaattaccaaaagagagtttgaaaaagaggagttaaattggaagatgaacactgactgattttaggaattattataaaagtacaataaacaagacagtttggcattgagataatgaataaaaacttgactattggaacaaaatacaaaatccagaaaaagaaccaaga

SEQ ID NO: 2441 - DNA, 661 bp, Homo sapiens
  misc_feature [331]..[331]: Chromosome 5, SNP identification no. = rs157178
  misc_feature [331]..[331]: allele = a, in linkage disequilibrium with rs6880868, respectively
  misc_feature [331]..[331]: n is a, t, c or g
ataaacattttaattctataatccacttgcttttatcttctgtcatacctctgaaaactaaatcatggccagacaatattttataattcttaatttaaggaatattttccctcagcttagttgttataaattattttaaaggtatttctaaaagtccacatctagtactattattacctttttctcaaccctcattttttcattctttaattctcttctgtgttaaatggctgttatgccccatgttctatatggtttcatattctgtgctattattatttcttagaataatattttctttctctttttcttttttttgcctaagtgaatnttgcacttcctttggtctgtaccccaaacaaaatagcaaagaaagcagaaatcaagccaagcttagaatcatgaaatctttctttgcaaatctcagtccaaaaaaaattttttaatcccaaaacataattaacactctatgctgaactatatagtctcagtttatattatatacagtcatatttccacctgttaatcttaaggaagaggaatataattattttacattctgagagttacccagtttaactgggtgggaaatgcacccatcagttactgattgactcaatgaccatttggctactctgcagctaggtatttagctatacaa

SEQ ID NO: 2442 - DNA, 661 bp, Homo sapiens
  misc_feature [331]..[331]: Chromosome 5, SNP identification no. = rs279106
  misc_feature [331]..[331]: allele = c, in linkage disequilibrium with rs6880868, respectively
  misc_feature [331]..[331]: n is a, t, c or g
tggtccagtaattctactccttggtgtacatttctaaaaaattatcacacaagtcaccagacagatatgtatatagatgttcatttcagcagcatttgtagtaatagaaattttggggcaacctaaaaatgttttgctagaagggtagaaagaacaaagtagatgtaaaccatgaaatactctgcagtgttgaaacaatgaattagaggtacacaaaaaaccatgaatgttcttagaacatatagatatttacagaaagatggatgatagatcaatcatatataacatgatattatttaagtacattaaaatacatatacacaaaatgatncacatttgctaaaacatacgcatgcaaaatatacattaaacatattagtattaatatcggataaccagggatgaatagaataagagaataaggaaaaacaaaaacaaaaaaagggctttgcatacatcgttaatcactgcatggatcagtgccctgaactgaattagcataattaattcagccaatgcatctgagatacagaaattaaaataacaaagcaatgaagttatattttgttttcaggagacctagagactcaggacatactattgcatgtgtttctagacatttcagctgctattaaaccacaacatttactcagatctccta

SEQ ID NO: 2443 - DNA, 661 bp, Homo sapiens
  misc_feature [331]..[331]: Chromosome 5, SNP identification no. = rs173756
  misc_feature [331]..[331]: allele = c, in linkage disequilibrium with rs365807, respectively
  misc_feature [331]..[331]: n is a, t, c or g
aatgtattttccaaaatttattatttactttatttgataataagaaaaaaattagcagtgtgcaaaatgaggacagtcataagctacaagaaaagcagacctgtggactagtccttcccaagttccgccacttggctttattttcataatctgtgatattgggggttaattttttctatcatttttaatgtattattcagatattactgaattattctgagtagctttgtatcttccaaaagtttagtggaaattttaatttttcaaataattttagaactattttaaaaatacagtaaagcaaaaggcacagtcaaatgatatagtccantggaaactactaacagaaaatttatgcatgtaggttaacatatatttgcacaggcctcttagtgatctctgggcacatatttgagcttctcgaaactggactattgataaggaagcttgtagctctgatctgtcctttcaataaatttgttcctgcctatatgcactttgtgaagaatgatttgaagaagttcaattacttcaactatgcagtttcagcaactactttaacacaaacctgctgggctctattaatggcagcttagactcaaccagatccatttggtgtagattctattcagaatcagtataacagtcacctgtgcggtaa

SEQ ID NO: 2444 - DNA, 661 bp, Homo sapiens
  misc_feature [331]..[331]: Chromosome 5, SNP identification no. = rs365807
  misc_feature [331]..[331]: allele = g, a
  misc_feature [331]..[331]: n is a, t, c or g
ctgtactttcttgggtggcagaggaaagaaaagtaaaacattaaaaaaaaaaaaaaaactgcgttctttaaattctgtattattagcaacctctgttgtacatagtgtttgataataaagtattaatttgattcttatgtcttttgtaagtgagaacaatagactttcaggatacaaaacatgcattgaggctttgaaacatccaatgtgtaccatggctgaaaaaaagagtcacaagtggctgagacactgctccatacaggactcatgtgtggtcattgcccacccaatcttatgactccatcatcttgggacctggaacaacatgacntttttgatcgatattttgtcctcggtgttttcaaggtctgatgttggagccctgtggcccaccctcccttctccaccagcatgttggtttgaaaaggatagggaatttagaaacagttctgtactttggtttggtttggttttctgtttgtgattgttttcatggactgttttattttttcccaggaagagtctttatcaatatcatgtgcagctcactcatggaaatggttgcaaaccaatcagtgtaggaagcttaaatggggctgtttccctctctgtgtcgttgtgaaaggaagagtcacacagtacctgtggattttcagggact

SEQ ID NO: 2445 - DNA, 661 bp, Homo sapiens
  EFNA5
  misc_feature [331]..[331]: Chromosome 5, SNP identification no. = rs3797510
  misc_feature [331]..[331]: allele = g, in linkage disequilibrium with rs365807, respectively
  misc_feature [331]..[331]: n is a, t, c or g
caggaaatggtgtccttcctgtggacctcaactgcaaatgtgcatgtcacaaatacagtacacataggtgactccaattcattaggaaaaccacgggttcctgagggagtatatgtcttattcatgagagttagtgtgaaaaaagtgacacatggatgttcacactgctgttcaatgaatttctgagctgagatgaactcacttcaagccttgtgaacttgatttgctacatgcacataactgactttacagatgatactgctagataaacaggctgaagacagaatcaaatgcttaattggtttagcgaggagcttcttggatttagtanaggtctttcagatttttctttaggagaaataaatccaggacatgaaaattattgtagggcacatggcaataactaaacagcaaacgatacgcctccaggaaaaaactggagagttctctccatgagctctcaaggagggacacagtcttagctactggatgtgctccatacttctgtgaattaaaaatatgaaatacatttgtatttaaatgacacataaaataaaaacctctcttccctaacaacctgccccactacttcctcattttctgtcaccaggaaatgtgactgatgccttgtgatactgtgactattatactctaatcctta

SEQ ID NO: 2446 - DNA, 661 bp, Homo sapiens
  EFNA5
  misc_feature [331]..[331]: Chromosome 5, SNP identification no. = rs3797513
  misc_feature [331]..[331]: allele = a, in linkage disequilibrium with rs365807, respectively
  misc_feature [331]..[331]: n is a, t, c or g
tggttaccagatccacagaaaacttgttaaaacaaaagttaggcctcttcttagggaagaatactaaagcaacaatttgcaactggctatgtgccccttttttaaaagcattttcatacaaagcattttcatataaagaacaaaatcatgtgttatgatgaaatacatctcactcattctaacttttgggatttaaaagtcatgtgctttaatgactcgctcatggccccggtttaccaagcttgcattcatggtgccaccccaggagctactaaatttgccaacacatttcttctcttgcagcccactgcgtctcaagacttaaatcatnggcaggttaaggtcagagcccaagacgtaaaatttggaaaggaggtcactaagtaaagatagaggccttggagaaataagaatatcatgtaaatattagaaactttgatatgactctggggatgtttcttttaaaaaccagaataagaaaagggatgtgtttcccaccacataacaagagggatagaaaaacatattctgcaagttaaaacttggttttaacaccagggaactgtaacaaggaaaaaataattagagtaaacttcaggacaagggaggtaaaataagttccagctgtgcagccacacacaaaagagaaatgggaagcacc

SEQ ID NO: 2447 - DNA, 661 bp, Homo sapiens
  EFNA5
  misc_feature [331]..[331]: Chromosome 5, SNP identification no. = rs3797516
  misc_feature [331]..[331]: allele = c, in linkage disequilibrium with rs365807, respectively
  misc_feature [331]..[331]: n is a, t, c or g
cattaccaggcggctccggggaagttggccctcctgtaagtgtgctcctttgttatgaatatggaacagatggagccaaatctatctgctctgtaggaacaaaaacacttacaacccagctctctctattaaagactctacttagctcctttataccatcggctttctgtgcactgctgtgaggttttgactttatagaaaaaggcacttcataaaagcaacagttcttactcttaaaccaaagtggcctaagaactaaagaagatgaatacatggtttcaccgacaggactccttggagatatgtagatattcaattaggggtgtatgtntgtgtaggaggaggaggaagactgtattcaattctggtaaatgtctgcattaaaacaacatgaaaatatagaaaagagcgatgaagatgtcatgtttctcattacaaggatggcatctaattgctctagcataataaaatggcaagatttaattgtgtatatatgtctgtaaggctagcgagggctgtcttgaacaaaaaatatgactatgcacaacaaaatcatgcaggtaaatatgattagtaattaggaccataccacaaaacaaaggctatatgatgcttcttcactatgaaaaataatattaattactttcagcatcatcatgcc

SEQ ID NO: 2448 - DNA, 661 bp, Homo sapiens
  EFNA5
  misc_feature [331]..[331]: Chromosome 5, SNP identification no. = rs3756544
  misc_feature [331]..[331]: allele = g, in linkage disequilibrium with rs365807, respectively
  misc_feature [331]..[331]: n is a, t, c or g
gaaaaaggcacttcataaaagcaacagttcttactcttaaaccaaagtggcctaagaactaaagaagatgaatacatggtttcaccgacaggactccttggagatatgtagatattcaattaggggtgtatgtgtgtgtaggaggaggaggaagactgtattcaattctggtaaatgtctgcattaaaacaacatgaaaatatagaaaagagcgatgaagatgtcatgtttctcattacaaggatggcatctaattgctctagcataataaaatggcaagatttaattgtgtatatatgtctgtaaggctagcgagggctgtcttgaacanaaaatatgactatgcacaacaaaatcatgcaggtaaatatgattagtaattaggaccataccacaaaacaaaggctatatgatgcttcttcactatgaaaaataatattaattactttcagcatcatcatgccaatttgcttttacagtctgaaagatgtaaacactgcaggtaaaaccaatgcatgcatttatttatcatgccacaagaaatctacagccatccctacaacgtgctgttgccaagatatatgtgctgacagcaaggtaagtttcacaggcttccgggtgtggatacactactgtatacgcaccttccattgatagcaac

SEQ ID NO: 2449 - DNA, 661 bp, Homo sapiens
  EFNA5
  misc_feature [331]..[331]: Chromosome 5, SNP identification no. = rs3797517
  misc_feature [331]..[331]: allele = t, in linkage disequilibrium with rs365807, respectively
  misc_feature [331]..[331]: n is a, t, c or g
tctggggatacgtaggctactgcaaataaaactcttcttctgtctgttcaatcatttcaattccctgcagtgtgaaatatgaacttgccaacaaatggccagcgtgctgtgcctcgcagcagggggggaagtgccacagctgtgccagagactggaaaactcaagatgcgcatgacatgttcattagttcccctgtatagccagggcctgaaccacgccagtctccagaaccatccacagggaagcagaaggagtgtttactatacccaaaagagttagacacgatttccaccaaaatgagttgcacaacttgtgatccctttgatgaccngagaaggttagtctttaaaacaagaacacatctctggacaggaatagacagaaaatattatgtctgccaatgattacagtttttttctgactttattagcagcctgctctgtgagcaataaaaaatgaaataatgaataatactttcagtatccaagcatctatgagagattgaaagaatttagatgtctcttctctttatcagaaagacagatttgtggaaaatgcctggctcacccgttgcaggcaaacataacactagttcttcctagtgtagtagccttctactgcattctacattacagtttcacaataataaaatagttatttg

SEQ ID NO: 2450 - DNA, 661 bp, Homo sapiens
  EFNA5
  misc_feature [331]..[331]: Chromosome 5, SNP identification no. = rs13178242
  misc_feature [331]..[331]: allele = a, in linkage disequilibrium with rs365807, respectively
  misc_feature [331]..[331]: n is a, t, c or g
ctggctagtcattccttgcaaaaataggattctcaatgttcagaaccaacttggaaggcatatgtattagtgagtgcctgtccttctatagcccccagcttagtcataattgaggtattacttaatattttcatcaaagaatgtaagatggacttacgaataggtttataaggaaaattatttgggtgcagtaactagttattgaagccaactagttaaattgttcattaaagtggaacaaagttcaataaagacagttaaggcatgctatgagtcagaagcacagagcctatcacatgaacagaaaagccacttactaggtacaagtatntctcaggaaaaatgaagcctacagcagactgcaaatcgaatgtgagttatgctggtctactcatcaaatctaatcagaagttttgttctcacattttggatctgcattcaaaatgggactccagaaagatgacaaaagttatataaaagacttaaaaccggtcttgtaggaacagccagaggaatttaagtgacatgattcttttttttttttttttttttttttgagacgaagtctcactctgttgcccaggctggagtgcagcggcgcgatctcggttcatgcaagctccgcttcccgggttcacaccattctcctgcctcagcctcc

SEQ ID NO: 2451 - DNA, 661 bp, Homo sapiens
  EFNA5
  misc_feature [331]..[331]: Chromosome 5, SNP identification no. = rs6868410
  misc_feature [331]..[331]: allele = g, in linkage disequilibrium with rs365807, respectively
  misc_feature [331]..[331]: n is a, t, c or g
cttgccactttgaaaaagaaatttattttatgataaaaaattttgttcaattgtacaagaaatgcaaaaaccctaaagggttctatggtttttgtttgcatcagcaaggtcaaattatgtctaatttacaggtaaagcaatgagacaatttacttggtcaggcagaaggaaggatttattatgaccattgtgaattagatgactcccagaatcttagtctattttagtctttatcttagacttagtctctccctaaccagagctccctggattataccaacattcacatcacaaagactgccatttctcaagactgatggtactgttgacntgacccttccatttaatcaaatcctctagtacccacttctttcaagtcttgaattcagacccatccattcctactttaagccaatgttctcgaagtgtggtacaacttgcaggaaaaacagctggagggcttattaaaaatagattcctacattgcaacctcataaagttgaacgaatcaaactttatggaagtgggttccaagaatttgactttttacctatcatctccagacagatcacgaaatttgggatagcgtcttaagccctgagacttaaattccaccttgtccctcaaatcaatatgttactacatctttaactgatctctt

SEQ ID NO: 2452 - DNA, 661 bp, Homo sapiens
  EFNA5
  misc_feature [331]..[331]: Chromosome 5, SNP identification no. = rs7703776
  misc_feature [331]..[331]: allele = a, in linkage disequilibrium with rs365807, respectively
  misc_feature [331]..[331]: n is a, t, c or g
cttagataacgacttgccaatgatgcttgaaatctgtctacttttaacgtcttttaaaatatttattatgaaataattgaataaagactctaggcttggggtcaaactacatgggttcaaatcctgaccccagtactaactacatgatctcaggcaagtcacttaacctctctgagcctcagtttcctcatctatatgatagataatgatagtaccggcctcacagatgaggattcaacaatttaaaacagatacagtgctaggtacagtgcctgccacttagtacatgcaatatatgctaaatcactctaattacaaccatcagaacaantgttaccggaggagttattagttaaagcatgagtaaacctttagcaaaaggctaaactaaacttcatttaaatcattgcagtattcatcatactgcttcaaaactgactgaactgaactgcccccactgtatatagtaagacctctaagcaatatactaaaagtaaaaaatttgcctgttcacatttttagcctccaatttactctccttgcttacttagatttgcccattaaaaattccacctaaaatgaagcaagtatgtctgaaatcaaggttgaggaccaacagaaactgttaaagcaaaacatgcagtaaaacttaatcaattca

SEQ ID NO: 2453 - DNA, 661 bp, Homo sapiens
  EFNA5
  misc_feature [331]..[331]: Chromosome 5, SNP identification no. = rs3797527
  misc_feature [331]..[331]: allele = c, in linkage disequilibrium with rs365807, respectively
  misc_feature [331]..[331]: n is a, t, c or g
ataccgtgaatttccatcaagtcctgattattgagtaacttttaaggctccttttgcaaactttcaagatggtcccaatgtaaaaatctattaagcggtgatatctgctctattttcctttttcacagacctggcattaatttctctgattcttttaaacaggagttaaactagactcatcctttagtcacttaacagggcatgcatttccttttaaaatccatgctacttgatcaaataacttgtcaacaaatttaaaaatacttttcaataccctgtgttcctatgaattgcctcctccacctttgatttcactcaaactatgtgaagngtgctaggcgaagccattaccagaaggcagaggtacaggtctagctccaacagcacctgagctgatgctgcgtatgcatgctcagaaggttaagagggcacctggcagtaaataactgttttcataagaggaaattacaattaacagaataatttccacaagtccctaaatatcctctttcatgttctttatttaaccttcatttaagagcccttgaaattcattcatgctttcctaaaaaatgactagggacaacttgaaacagacacaattccctaaactcattctttaaataaaaaggtgcattattgcagcttcactaaagacctg

SEQ ID NO: 2454 - DNA, 661 bp, Homo sapiens
  EFNA5
  misc_feature [331]..[331]: Chromosome 5, SNP identification no. = rs13182976
  misc_feature [331]..[331]: allele = t, in linkage disequilibrium with rs365807, respectively
  misc_feature [331]..[331]: n is a, t, c or g
aggcagacggtggtagcagaagtcagaggccgagggaatcagggaaaggagttcaaccatggaggaccttgctggccaggttagagactgtggacttttgtctgggtgagacaggaagtcactggagggctgtgacagagctctgaggctgtgaggcactgctctgtcagtgccatgagtggggaaaacaggagcttgctgcactggtagagaccacagataatgatgacttggacagagcagctgggagagaactagttcaataaccctaacacgcctctccattctgcattttccctaaaaatgtacctttaactaggatttattgaanatctactaagcaaggtattgacctggaccactgtacggatgttatcttttaccctaatgctgcagaccctcagataaaatataataaaattaggatattaaagctccaagaatttctgaagtcaattataattacattattttacagatgtagagttcaaactccagatggatgaaatgattctctcaagatcatacagctagttaggtcaagaaaaggacctgggactcagttttccttactttataaaagcatatattcaaatcagtgttttatggaattacaaagataacttattaaaaggatttccctttaccccttctgatgtaa

SEQ ID NO: 2455 - DNA, 661 bp, Homo sapiens
  EFNA5
  misc_feature [331]..[331]: Chromosome 5, SNP identification no. = rs11956440
  misc_feature [331]..[331]: allele = a, in linkage disequilibrium with rs365807, respectively
  misc_feature [331]..[331]: n is a, t, c or g
cttttcatcttgcatcccccagcatttctcagctcagattaagctgtccaataaatgtattttttaacaagtaaacttttaacctcttcagttgacagtgagaatacatgggaaaggccagatagtttaaatataaatactagttaaagtccagatacacaacaagctgcttaaagtagctaccacctataatcttgctactcaaagtgtggtccacagttcagtagcagcagcagcatctgggagcttcatacatccagaatttcaggccctgccttaagacctcctgagtcagaatgcattacaagatccccagataacactatgcacngtgaagtttgagaagcatttacctataacatatgatagtaggaggtatgaagaagtgatgggtatataatggagaagaaacaaggccaggcattctgattaatacagaagtctactgagaaagttttagagctctcccaggacagagtcactcaatgctcacaggtcggaaactcgctcataccagttaccttggaaccccttctagacacttcttcacaagtctttcctgtttaaagacagagctactcttaataattatcttttctccttgctgcaaagagagtatttatcgtcaacatgctgacatgtccaggagttttggcttcct

SEQ ID NO: 2456 - DNA, 661 bp, Homo sapiens
  EFNA5
  misc_feature [331]..[331]: Chromosome 5, SNP identification no. = rs3873122
  misc_feature [331]..[331]: allele = a, in linkage disequilibrium with rs365807, respectively
  misc_feature [331]..[331]: n is a, t, c or g
tgcagttcccaatctaagccacaaaaagccattttacagtgagattccattatatttgtttcaaaatatcctacaaactaagtgctttgctttcattttaaatattatattaaatatcactctttcaaactgtggaactctatagaggtactagtgtgctgttttccatgtttcctttcattcttaaaaatcatatattaaaacaaagtttttatatttttataatagtgtttcacttgataaatatttttgaataaatgaatgaggaaattaaagaacaaataaatgaccgaattgttttttgttatagttgaggccattttccactttntatgcaaatgagaattacagccataaaattgggagaattagaatcataacattttacagttagaaagacaattcctaaaacacttccattttagagaaaaataaaaagacataaagatgaagcagtgagtgattgagccaaacctagtatggagacttcggatcccagttcagtgcttttcttagatctgctacgtcagaaacttattttagtgcatctcgattttgatgcagcatcttttccatactgagaaaacaacccatctaaatcaaatggctcttcccctcatttcttttaatccctcaacaggtcatgttctagagctgggct

SEQ ID NO: 2457 - DNA, 661 bp, Homo sapiens
  EFNA5
  misc_feature [331]..[331]: Chromosome 5, SNP identification no. = rs11242636
  misc_feature [331]..[331]: allele = a, in linkage disequilibrium with rs365807, respectively
  misc_feature [331]..[331]: n is a, t, c or g
taaatcaaatggctcttcccctcatttcttttaatccctcaacaggtcatgttctagagctgggctggtgagtaatgaaagtaacaagccaaatgaaaatagccaaaaccacggctaattcatcctagttaaaaatgtacacacctgaatacacacacctcccaccacaaacaccacactgtctgcttcaattctcatctcacaaaagttttgcttatctgttttaactaatgtgtctttccccatcagtcgaacagtatttcccaagacacaacgatgtgtgaaacaggaactgttatgcatacaactttctcagtctaaaatcatggtngaaaagcgtacaaaactcctttgtttttagctggtgaggaaattcttctctgagccctcagaaatttcatcataaaattgtgttactgctgaaatacaatgctcataaagtcatataatctccaagctggacagtctgagtgtgaacacttcccagtggcagtgagatagtttattccatttttggacatctctagatgttggaaagtttcttcttatattcagcatatccgcttctgtgtaatttctacccagtgatcctacttctgctgcctggaattacaaaaaacaaatcaaattcctcttctgcaagggagtccataaaacattt

SEQ ID NO: 2458 - DNA, 661 bp, Homo sapiens
  EFNA5
  misc_feature [331]..[331]: Chromosome 5, SNP identification no. = rs3901010
  misc_feature [331]..[331]: allele = a, in linkage disequilibrium with rs365807, respectively
  misc_feature [331]..[331]: n is a, t, c or g
taattttaaaataatagcagtaagaacatacaacagagataaaaataatatgtatatttccccttttaaaaatccaaaaggaaaatcatatagaaatgttaaattctgtccttaaatgtcaaatgatccatagcaactccacttgacccttgctcttgaaaagcagcatgctgatttacacaagagaaataaggacaaattctcagaatattcacttttcagctagaggatcccaaactacataaccatttttttaaaaaccgaaaacacttggaagtatttatatatttgcaatgaccacgagtttactttttcttcattactagcaganaatgatttgtcaagatgcaaggaaagcctgtgttgcttttaaaagatttttgaacatcaagctaacatcactgccaaagtacagagaaaagacactgcaaagttcagataaaagggtgctgggatatgaagcatcagcactcagagtagcctgacagttttggataagagccagacaagaacagcagaaggcaatgcccagatgcactttatattattatattattattatagattttaaagagattcaagggggaagttttttctttccctaagtgtcactcattttagcttccactagcatttggcactgctcaaagtgaaagtaaaa

SEQ ID NO: 2459 - DNA, 661 bp, Homo sapiens
  misc_feature [331]..[331]: Chromosome 5, SNP identification no. = rs2974468
  misc_feature [331]..[331]: allele = a, in linkage disequilibrium with rs17350454, respectively
  misc_feature [331]..[331]: n is a, t, c or g
agtggggttgctatatcttgagagtgggtggttagaactgtgagttcagccctcacgtgctcacttgctcttgtcctcttttgcctgtctgccttctgccatgggatgatgcaacacagagggctttgccagatgcttgtgctgtgctcttagacttccctgccttcacagccatgaaccaaataaatttctattcattataaactactggtcaaatggtgttttctaaataggattatttaatgaagtaaataccaaaagaaatggctcaaagatggataggcagttcatgctggacagtggaacctggtggagggaggatctataaganactaatatttttcttcataagccttttagaataatttaacacttaaactctgtatatcattaatttaaaaaattgaaaacagaaatggcatgaaattgggaataagacaaactatatttcaatcacaagactgtagtttctttctagtgtggcttaacctctctgagcctccctttcttcacaagaaaaagcatgactaaatgtgatagtttccataaagcacttaattatattaagtgagaaccttaaataagctctagcaagtggcaggcattcaagtttgctttatatgttttctaagcctctgataaataaaagcttagggttaat

SEQ ID NO: 2460 - DNA, 661 bp, Homo sapiens
  misc_feature [331]..[331]: Chromosome 5, SNP identification no. = rs2974469
  misc_feature [331]..[331]: allele = a, in linkage disequilibrium with rs17350454, respectively
  misc_feature [331]..[331]: n is a, t, c or g
tttctttatgaactgtaatgtgttggaagtgttgcttatttgatttctggtcacacgttatggcaattgcactagtgctaaagagtattctaaaataaaaggaaataaatactataccttttatagtttctacatcagaagttatacctgccccaatatctattttatatgcttttcttgagtaattgggctgccgtattattacttgaaatatacaatgtctcataatggaggacagcatatttagtaactaatccatttacatggcaacctctctgttatttgattcctaatttggagttttctgtcttacttggctagaatacatctnaaagtatttttgaagaagacatgtggatagtgttttttgcatacttgataattttgtggtgttgttttctcataagaataaatgatttgatatgagatttggagtggaaaaatttttactgaggactgtgtaagtgctctaatgtcttctgacattatatgatgcacagaagtctgaaattggtctggcttcctctccacttcttccttctttattttaatttgcaaagcaaaggaacacacactcacacaaccaccccccccacacacacacaccagaaaggaaaatatatccataattcacatatcatttcttaaaacacagcctcca

SEQ ID NO: 2461 - DNA, 661 bp, Homo sapiens
  misc_feature [331]..[331]: Chromosome 5, SNP identification no. = rs7724546
  misc_feature [331]..[331]: allele = a, in linkage disequilibrium with rs17350454, respectively
  misc_feature [331]..[331]: n is a, t, c or g
ataaaagaggacacaaacaaatggaagagcattccatgctcatacataggaagaatcaatatcgtgaaaatggccatactgcccaatgtaatttatagatttaatgccaccgccatcaagctaccaatgactttcttcacagaattgtaaaaaactactttaaagttcatatggaaccaaaaaagagcccgcattgacaagacaatcctaagccaaaagaacaaagctggaggcatcacgctacctgtattgcgggatctggccagcagcctgcaatgcaacggggctctttcctttttcccaggtggattgacaggtcaagaaataatanacgcacacaagatagtgaaagctgggtccaggggggtcaccgccttctggtcccaagatgctgccaatgcactggatataccagcatttattattaattttagtgagggtgggggtagattagtaagaaatttagggtcatttgattatgaggtgagatggtcacatgggaatgaagtaattctttaacagaacatctgtatacagaagtacagtatacagagataaaaatttacaatatagtgtgtgcatcagtaatttctaacagagccttaaaacagaaacacagtctttccataacctatgattgggaagatattaatcagtagta

SEQ ID NO: 2462 - DNA, 661 bp, Homo sapiens
  misc_feature [331]..[331]: Chromosome 5, SNP identification no. = rs4368718
  misc_feature [331]..[331]: allele = g, in linkage disequilibrium with rs17350454, respectively
  misc_feature [331]..[331]: n is a, t, c or g
aatagtgccagtgaagtcagccagattagtctgtgccagcacaaggatgtagaaaaggcatttttaacctcattttttgacaaagggaccacaataatgtttggatcaaagccggaaattttagtgatacgttgacgtcctaacccaattgaagtgaccatttgatcaagatatattgaaagagttttagaggctgaattaggaagaaatacccattcaacaagagaatcattttgtactataagtcctgcaggacagtggatgaaaggaaaaactaaatttgtaaaggcaaatttgggtcaatatgagagacttgtccctctttcactcnttgttctacaaaagacaactctttttctgctggttcagatagacagtgaggactgtttagatctgtatctcctgataaagtagcaaatagatgagataatgcataagtagggatgcctaggattggtctgagataattgatgtcacctagtaatttttgaaaatcatttaaggtgtttaaattgtcagtatgaagttggactttttggggcttaatggcgcgagcttctaggtgcgttggtgcattcctaagtacagaaaaggagtggcttgttgaattttattaggagcaatgtggagtcctgcattggcaacagctaattttaaagag

SEQ ID NO: 2463 - DNA, 661 bp, Homo sapiens
  misc_feature [331]..[331]: Chromosome 5, SNP identification no. = rs6873190
  misc_feature [331]..[331]: allele = a, in linkage disequilibrium with rs17350454, respectively
  misc_feature [331]..[331]: n is a, t, c or g
atacccattcaacaagagaatcattttgtactataagtcctgcaggacagtggatgaaaggaaaaactaaatttgtaaaggcaaatttgggtcaatatgagagacttgtccctctttcactcattgttctacaaaagacaactctttttctgctggttcagatagacagtgaggactgtttagatctgtatctcctgataaagtagcaaatagatgagataatgcataagtagggatgcctaggattggtctgagataattgatgtcacctagtaatttttgaaaatcatttaaggtgtttaaattgtcagtatgaagttggactttttgnggcttaatggcgcgagcttctaggtgcgttggtgcattcctaagtacagaaaaggagtggcttgttgaattttattaggagcaatgtggagtcctgcattggcaacagctaattttaaagaggtaaaacattgaattaattcatctttagtaggagcagcaatcagtatatcatccacataacgaagaatgtaattatttttaaaaatctgtcgaatagattgtaacacagtactgacaaacaactggcaaatagtaggactgttaatcattccttgaggtaaaactttccattcatatctagctgtaggagctgaattgttaatggaag

SEQ ID NO: 2464 - DNA, 661 bp, Homo sapiens
  misc_feature [331]..[331]: Chromosome 5, SNP identification no. = rs4705487
  misc_feature [331]..[331]: allele = a, in linkage disequilibrium with rs17350454, respectively
  misc_feature [331]..[331]: n is a, t, c or g
tgttaatcattccttgaggtaaaactttccattcatatctagctgtaggagctgaattgttaatggaaggtatagtgagagcaaatttttcacagtctgacttgtctaaaggaatatgaaaaaagtagtccttaaggtcaatgataattaaaggccatttcttaggaatcgtggagggggagggcataccaggttgtaacaccctgataggtttaataactgcattaacagctcttaagtctgttaccatcctccattttcctgactttttttgtgcaacaaacacagacgagttccatggagacaaggagggctcaataatgtttgcttntagtaaatcattaacaatttcaattaaagcctccaacttgtgtttggaaattggccactgctctacccaaacaggtgactcatacatccattgtgtagaggcagaggaagagaaggagagtgagggcactgggacgtggacttgggggagacaggattctaagcctctgaaagaaggggtcctggagtgtcgaaagaaacagtaggcttagaagaggggagagttctaaaaggatgagaggaatgagaaacaggccattcagatgaatgccacatgtcctcctctggcagagggggcaatggcttagtagaagaagagttaacatataca

SEQ ID NO: 2465 - DNA, 661 bp, Homo sapiens
  misc_feature [331]..[331]: Chromosome 5, SNP identification no. = rs4705626
  misc_feature [331]..[331]: allele = c, in linkage disequilibrium with rs17350454, respectively
  misc_feature [331]..[331]: n is a, t, c or g
ttaatggaaggtatagtgagagcaaatttttcacagtctgacttgtctaaaggaatatgaaaaaagtagtccttaaggtcaatgataattaaaggccatttcttaggaatcgtggagggggagggcataccaggttgtaacaccctgataggtttaataactgcattaacagctcttaagtctgttaccatcctccattttcctgactttttttgtgcaacaaacacagacgagttccatggagacaaggagggctcaataatgtttgcttgtagtaaatcattaacaatttcaattaaagcctccaacttgtgtttggaaattggccacngctctacccaaacaggtgactcatacatccattgtgtagaggcagaggaagagaaggagagtgagggcactgggacgtggacttgggggagacaggattctaagcctctgaaagaaggggtcctggagtgtcgaaagaaacagtaggcttagaagaggggagagttctaaaaggatgagaggaatgagaaacaggccattcagatgaatgccacatgtcctcctctggcagagggggcaatggcttagtagaagaagagttaacatatacaggttccaagataggaggtggagggaggggatcatcaccaggttcctcctcttggggaga

SEQ ID NO: 2466 - DNA, 661 bp, Homo sapiens
  misc_feature [331]..[331]: Chromosome 5, SNP identification no. = rs10078772
  misc_feature [331]..[331]: allele = t, in linkage disequilibrium with rs17350454, respectively
  misc_feature [331]..[331]: n is a, t, c or g
agggcactgggacgtggacttgggggagacaggattctaagcctctgaaagaaggggtcctggagtgtcgaaagaaacagtaggcttagaagaggggagagttctaaaaggatgagaggaatgagaaacaggccattcagatgaatgccacatgtcctcctctggcagagggggcaatggcttagtagaagaagagttaacatatacaggttccaagataggaggtggagggaggggatcatcaccaggttcctcctcttggggagaaaacaaggagagatcaaattcctcatcatgatcagaaggaggactagtagggggtcagctactngaggtacagggagcggctcaccatccgtgttaacttgtggcagttgaagaggatcaccagactgaaaaggaagtaaagtgacctgaataagagcccagtcagcccaaccagaaataggaagtaaaacaccatctctcatgagttggcagagggtggtgccaactctatcccagtctaacaggtccatagaacctttgtcagggaaccaaggacaatatttttcaatagtctgaaataagagaataaggttataggaatcagcctggattccaccctgtttaagaagacgtttaataaaagacagataagcctggtgtttagaatgtgatt

SEQ ID NO: 2467 - DNA, 661 bp, Homo sapiens
  misc_feature [331]..[331]: Chromosome 5, SNP identification no. = rs4616883
  misc_feature [331]..[331]: allele = a, in linkage disequilibrium with rs17350454, respectively
  misc_feature [331]..[331]: n is a, t, c or g
gcctgggcaacaagagtgaaactgtgtctcaaaacaaacaaacaaacaacaacaaaaaaacaaataaagcaagattcctttcaggcacaactttttaatttgttttgtttttgaattttttttttctttaaaatcaaatatcactgagaaactttctagtgtaaaacagatctgttacatttgggtagagttgagaaaaaaatgattcttttggctttctttttctggtaatagaaatcacagagcttaagggatcttagagctaaccctctcactcatttttgatttttgaaactattaataagttaaaacttgattaaatggcagtggnttggggacagggctcaggtacccccagccccttctttactccagtgtgttctcattccaccgtcctgccactccagctcccttccttccacttggtgggacagcaaagggggttgtaatgagaagagttgggacagtcagcttgggttagggttgcttatcagctctttctttccatggcaatttcagttgcaacaaagcacatgaaagagagagagatgtcccagaaaaaaaaaaaattggtcaattcaatgacctgttttgatcaatcacattgagcatgtgatggtatgtggacacactttccttcaaataaaaggttagtgatttt

SEQ ID NO: 2468 - DNA, 661 bp, Homo sapiens
  misc_feature [331]..[331]: Chromosome 5, SNP identification no. = rs4314389
  misc_feature [331]..[331]: allele = c, in linkage disequilibrium with rs17350454, respectively
  misc_feature [331]..[331]: n is a, t, c or g
tttttgaaactattaataagttaaaacttgattaaatggcagtgggttggggacagggctcaggtacccccagccccttctttactccagtgtgttctcattccaccgtcctgccactccagctcccttccttccacttggtgggacagcaaagggggttgtaatgagaagagttgggacagtcagcttgggttagggttgcttatcagctctttctttccatggcaatttcagttgcaacaaagcacatgaaagagagagagatgtcccagaaaaaaaaaaaattggtcaattcaatgacctgttttgatcaatcacattgagcatgtgntggtatgtggacacactttccttcaaataaaaggttagtgattttttttaaacttctgaactagtgaaagagcttttctagagtcaccacctcagctgctactgacacagacttccagtttgaagtaaggtagagagatgtatttccaaggagttatcctgatgtttgactttggagttggtggaactgtctagaaaaaaaaaatctctccatggtactatagggaaagtgctttctctttatcacatttttcaatgaaataggaaatgaaaatatgaatgcttgtgttcatgcaatgttaacactgtacctttatagataaaaatgagg

SEQ ID NO: 2469 - DNA, 661 bp, Homo sapiens
  misc_feature [331]..[331]: Chromosome 5, SNP identification no. = rs17350454
  misc_feature [331]..[331]: allele = a, g
  misc_feature [331]..[331]: n is a, t, c or g
aagagatgccagcatgtaaaaaggcatatggtgggcgggagcatggctaacatgaggaaccataagaccaaggtggctaaagtacagagagcgctgaaagggaaataggatgaggcaaaaagcatgagaagccttgatggagtaatctgaaagggagatggtgttggcttgaacaaggctggtgataatagtgatgaagagaaataaacagatcagtaatgtcttcatattgacgagataagatttggggagtgagcagtgagacaagactaaaacacgtgttggcagctggacagaatgtggtatcattccgtgaaactgaaaacgttgnggctttgagacatccatgtgaaagccagtgggcaattagatatatgagtcagaagttcagaatatattcatgttgtcaggtctggaagtactgttttgacagtgagggtgtagcatttagatgatctgacaaatatattgcacttgccccttcagatgcacttctcgcccacctccactttgttctcactccagtaggctgacctccatggaataatcaacatattttcctgccctctgacttcaggttatgttctgccaatagggacccctgtcaagaactgtgaagggccttagagtttaccctacttataagcatatgagttagttt

SEQ ID NO: 2470 - DNA, 661 bp, Homo sapiens
  misc_feature [331]..[331]: Chromosome 5, SNP identification no. = rs4365834
  misc_feature [331]..[331]: allele = g, in linkage disequilibrium with rs17350454, respectively
  misc_feature [331]..[331]: n is a, t, c or g
ggcatatggtgggcgggagcatggctaacatgaggaaccataagaccaaggtggctaaagtacagagagcgctgaaagggaaataggatgaggcaaaaagcatgagaagccttgatggagtaatctgaaagggagatggtgttggcttgaacaaggctggtgataatagtgatgaagagaaataaacagatcagtaatgtcttcatattgacgagataagatttggggagtgagcagtgagacaagactaaaacacgtgttggcagctggacagaatgtggtatcattccgtgaaactgaaaacgttggggctttgagacatccatgtganagccagtgggcaattagatatatgagtcagaagttcagaatatattcatgttgtcaggtctggaagtactgttttgacagtgagggtgtagcatttagatgatctgacaaatatattgcacttgccccttcagatgcacttctcgcccacctccactttgttctcactccagtaggctgacctccatggaataatcaacatattttcctgccctctgacttcaggttatgttctgccaatagggacccctgtcaagaactgtgaagggccttagagtttaccctacttataagcatatgagttagtttgccacagtatcacagatacctc

SEQ ID NO: 2471 - DNA, 661 bp, Homo sapiens
  misc_feature [331]..[331]: Chromosome 5, SNP identification no. = rs10062393
  misc_feature [331]..[331]: allele = g, in linkage disequilibrium with rs17350454, respectively
  misc_feature [331]..[331]: n is a, t, c or g
gtgagatgaaccgggtacctcatttggaaatgcagaaatcacccgtcttctgcgtcgctcaggctgggagctgtagactggagctgttcctatttggccatcttggctccacccctgaagttgtttcttaagctgtttgtttaggaatcttttgggctgagataatggggttttctagatgtaggatcatgtcgtctgcaaacagggatagtttgacttcctgtcttccagtttgaatgccctttatttatttctcttgcctgattgccctggccggaacttccaatactatgttgaataggagtggtgagaaagggcatccttgtggcanttttcactgggagaatgattccagcttttgtctattcagtatgatattggctgtgggttagttatatatggctgttattaatttgaggtatattcctttaatacctagtttattgagaatttttaatgtgaatggatattgaattttatcaaaagccttttctgcatctattgagatcatcatgtggtttttgtctttaattcttttatattaccctcaagtccattttgtatggactctgatgtctactgctttcactgttgttgcccctttatgcagggcattaggtagtctgtttcttcttgccctctctggtgttcctgatgtgca

SEQ ID NO: 2472 - DNA, 661 bp, Homo sapiens
  misc_feature [331]..[331]: Chromosome 5, SNP identification no. = rs10036987
  misc_feature [331]..[331]: allele = c, in linkage disequilibrium with rs17350454, respectively
  misc_feature [331]..[331]: n is a, t, c or g
ttaagctgtttgtttaggaatcttttgggctgagataatggggttttctagatgtaggatcatgtcgtctgcaaacagggatagtttgacttcctgtcttccagtttgaatgccctttatttatttctcttgcctgattgccctggccggaacttccaatactatgttgaataggagtggtgagaaagggcatccttgtggcaattttcactgggagaatgattccagcttttgtctattcagtatgatattggctgtgggttagttatatatggctgttattaatttgaggtatattcctttaatacctagtttattgagaatttttaangtgaatggatattgaattttatcaaaagccttttctgcatctattgagatcatcatgtggtttttgtctttaattcttttatattaccctcaagtccattttgtatggactctgatgtctactgctttcactgttgttgcccctttatgcagggcattaggtagtctgtttcttcttgccctctctggtgttcctgatgtgcatctcctggtaatatggggaggaaggatgtgtgtcttattatacacacagtttagcatggctttgagacaacccatatgaaggtcaaatgtgaagaggcatatgaagtgctttacaaaatacttaaca

SEQ ID NO: 2473 - DNA, 661 bp, Homo sapiens
  misc_feature [331]..[331]: Chromosome 5, SNP identification no. = rs7720919
  misc_feature [331]..[331]: allele = g, in linkage disequilibrium with rs17350454, respectively
  misc_feature [331]..[331]: n is a, t, c or g
aggtgacatgtgagtggaatggagttagaaagtagccaccttggaaatttaccaaattcaagttatccaacaataatataattgtctccaagaaaaatcaaatacaacacatcctaaggaagggccagaatgtgtccattaaaattggaattctatgactggaattgagtacctgagattgcaaatgcgcattttggatgtacatatttaaatttagtaatgtgacgatcctataagttgtagaacaacttagctcccttttttattaagcagtatagctaattcataattgtaattaaataaatcatctgatgaaggctttttatactangatttatttggaccgtttctattactaatcgtagttagcacttattgagtgcttatatgccaagtactgttttaagttttttgcacgtaataattaacttaacgttcctaatgatcctataaggaaggcactattgttttacagatgagacgagtaaggcacagaaagtttaagtaacagtaacttgcctaaagccacacagcaagcaagtgttaaaggtcggatacaaatccaagtagtctggcttcaggctctgtgttcttaaccactgttataaatagtcaatccctgaacaaaatgggtttgaactgtgaggtctacttacatgtg

SEQ ID NO: 2474 - DNA, 661 bp, Homo sapiens
  misc_feature [331]..[331]: Chromosome 5, SNP identification no. = rs7721332
  misc_feature [331]..[331]: allele = a, in linkage disequilibrium with rs17350454, respectively
  misc_feature [331]..[331]: n is a, t, c or g
ggaatggagttagaaagtagccaccttggaaatttaccaaattcaagttatccaacaataatataattgtctccaagaaaaatcaaatacaacacatcctaaggaagggccagaatgtgtccattaaaattggaattctatgactggaattgagtacctgagattgcaaatgcgcattttggatgtacatatttaaatttagtaatgtgacgatcctataagttgtagaacaacttagctcccttttttattaagcagtatagctaattcataattgtaattaaataaatcatctgatgaaggctttttatactaagatttatttggaccntttctattactaatcgtagttagcacttattgagtgcttatatgccaagtactgttttaagttttttgcacgtaataattaacttaacgttcctaatgatcctataaggaaggcactattgttttacagatgagacgagtaaggcacagaaagtttaagtaacagtaacttgcctaaagccacacagcaagcaagtgttaaaggtcggatacaaatccaagtagtctggcttcaggctctgtgttcttaaccactgttataaatagtcaatccctgaacaaaatgggtttgaactgtgaggtctacttacatgtggagttttttcaataa

SEQ ID NO: 2475 - DNA, 661 bp, Homo sapiens
  misc_feature [331]..[331]: Chromosome 5, SNP identification no. = rs7721339
  misc_feature [331]..[331]: allele = a, in linkage disequilibrium with rs17350454, respectively
  misc_feature [331]..[331]: n is a, t, c or g
gtagccaccttggaaatttaccaaattcaagttatccaacaataatataattgtctccaagaaaaatcaaatacaacacatcctaaggaagggccagaatgtgtccattaaaattggaattctatgactggaattgagtacctgagattgcaaatgcgcattttggatgtacatatttaaatttagtaatgtgacgatcctataagttgtagaacaacttagctcccttttttattaagcagtatagctaattcataattgtaattaaataaatcatctgatgaaggctttttatactaagatttatttggaccgtttctattactaatcntagttagcacttattgagtgcttatatgccaagtactgttttaagttttttgcacgtaataattaacttaacgttcctaatgatcctataaggaaggcactattgttttacagatgagacgagtaaggcacagaaagtttaagtaacagtaacttgcctaaagccacacagcaagcaagtgttaaaggtcggatacaaatccaagtagtctggcttcaggctctgtgttcttaaccactgttataaatagtcaatccctgaacaaaatgggtttgaactgtgaggtctacttacatgtggagttttttcaataaaagttatgccaagtgt

SEQ ID NO: 2476 - DNA, 661 bp, Homo sapiens
  misc_feature [331]..[331]: Chromosome 5, SNP identification no. = rs11747036
  misc_feature [331]..[331]: allele = t, in linkage disequilibrium with rs17350454, respectively
  misc_feature [331]..[331]: n is a, t, c or g
aacttctctctcctcacttggagcatgtaatcttaccatcaacttcagagcaaatagaagtgatcagatgagaatgcctttttattttcactaacaaacatactaacttacctgtatatacactcattctgttcttctttttgtctgatattttagaagagtagtttatcctacttaaggctaataatctctacttgttctatgtaacctgtaccatcttgccaataaactagaaagagttactatctgttttgttatattttgacctcttccctttgaagtggacctgccccatttcaaaaagtattgaggtataattgaagtagataancccagatatgaaaatgtacaaactgattggttttgacttatgcattcacctgagaaaccatcaccacaatcaagacagtgaatatttaaccccaaaagtttcctaatgcccatttgcagcccatcccatacttttcaagcaaccactgaacttctttctgtcactacagatcaatgtgtaagttttagaagtttatataaagggtatcatgcagtaggtactcttacctgggctcttttatttagcatattgattttcagattcattcatgtgattgcaagtatcagttgctgtttactttttattgcgagtagcatgtgagtagtatac

SEQ ID NO: 2477 - DNA, 661 bp, Homo sapiens
  misc_feature [331]..[331]: Chromosome 5, SNP identification no. = rs6879669
  misc_feature [331]..[331]: allele = a, in linkage disequilibrium with rs17350454, respectively
  misc_feature [331]..[331]: n is a, t, c or g
aacctgtaccatcttgccaataaactagaaagagttactatctgttttgttatattttgacctcttccctttgaagtggacctgccccatttcaaaaagtattgaggtataattgaagtagataaacccagatatgaaaatgtacaaactgattggttttgacttatgcattcacctgagaaaccatcaccacaatcaagacagtgaatatttaaccccaaaagtttcctaatgcccatttgcagcccatcccatacttttcaagcaaccactgaacttctttctgtcactacagatcaatgtgtaagttttagaagtttatataaagggnatcatgcagtaggtactcttacctgggctcttttatttagcatattgattttcagattcattcatgtgattgcaagtatcagttgctgtttactttttattgcgagtagcatgtgagtagtataccattgtatagctagtttctgatttatattcacttgttgatgggcttttgtgttgtttctagtttttttaagttttaaatatatgtagcattatatatgtgtgtatatagatatataatcatatatatgtggatatatatacacacacacacacacacacacacacaacatctaggtagtatgataaatacacacacatatacaag

SEQ ID NO: 2478 - DNA, 661 bp, Homo sapiens
  misc_feature [331]..[331]: Chromosome 5, SNP identification no. = rs9326911
  misc_feature [331]..[331]: allele = t, in linkage disequilibrium with rs17350454, respectively
  misc_feature [331]..[331]: n is a, t, c or g
tgttctctccaccttcatatttttcccttgatgcctaaccctaattttgaatgaataccctgagggctactcactaatgatttttcatgctaactataaatgtgctctttgacctgtggaatgtcattttatggctgctttaccatgtctttgtgactttgcactcatgtagcctgaaagtgaactaaattgtgtgtgtgaggaaggtgtgaacttatcagtataattatcccagttttcagggtgtatagtatggagccctcttgttgtgataaagcagtgaagatgaaaaagatggaatgtgctctgggttttaggaactcaggaaacnttattgatcctataatgcttctaagcttgaccaagggaagggaagtttctacaaacctattgaagataagcctttggagatgaccatatatagtttctccagttgattctcaatttcgtacaaccctcactttcatcccaacctaccagtttacaccacaaagtgaactaccagcaccacttgttaattcaacaaatatttatttggtgcttattatgggcaaagtatcatgcaaagcacttaataaatattaacaaagaaggtaggaagattggtttcatttctagggtttttaccttattttttgaaattctaagaattatactatta

SEQ ID NO: 2479 - DNA, 661 bp, Homo sapiens
  misc_feature [331]..[331]: Chromosome 5, SNP identification no. = rs10066191
  misc_feature [331]..[331]: allele = a, in linkage disequilibrium with rs17350454, respectively
  misc_feature [331]..[331]: n is a, t, c or g
ctcccgggatcacgccattctcctgcctcagcctcctgagtagctgggactacaggagcccgccaccgcgcccggctaatgttttgtatttttagtagagacggggtttcaccgtgttagccaggatggtctcgatctcctgacctcgtgatccacccgccttggcctcccaaagtgctgggattacaggagtgggccacggcacccagctaatatgctgttttgtatgtatgtcacacatcacaagtaaatttatatgtattctatatatccatatatatatatattttttccattagccttgggggacttgtgaaattatttcatacanttgttggtgacctaaggtaaaatttgctaagttaattatgaaatacaccatacaaaacattaacatagttcctgaaacagatatttaataaatatattaacaataataataattacagcatttttatagagtactttaattaaaattgtgctaactgtgaaaatctagaataactttgaaagttaaagtatgaggtaattaatcaaggcattgcaatcctagtattctgttttaaatttaatttaagacattatcttctcagttaaggaaaagaggaaagacaagaaaaggaaacaaaccattttgatcaattagacatcggattaaatc

SEQ ID NO: 2480 - DNA, 661 bp, Homo sapiens
  misc_feature [331]..[331]: Chromosome 5, SNP identification no. = rs6594791
  misc_feature [331]..[331]: allele = a, in linkage disequilibrium with rs17350454, respectively
  misc_feature [331]..[331]: n is a, t, c or g
gaccagtatactaaataagtacatatttgtaaacattttttggctcagaatttggtgtcattagatagccctgttaatttgggtatagtatggcaatccccgtaaatctagatgtaaaattgttgaatcatatttgaaagtacttaggtattttcttatattagctcatcagaaattggaataaaaagctgggaaaaggtcccaaaacccagagtaactgatagaaaaatgaggtgccattttctggtcaatttgtggaagtaaggtattaaataaatcattgatattccacacataccagaggctgaataaaacagaactaataaattanttaataaggctgagctcaaaaacaaaagaatgaaataatcccaaatacaagaattaattcaaaatgaggaaggtgcctatgtgctgaagttaggagtttataaggataatcatattggtcttaactgttactataaactttatgataacagttttgacagcataagtgaaatggaccatttatttggaaattatacgtgataaaaatggacttaagaagaaataaacaataacttccaaagattagtaatcagttaccattttagctccttgatcatgacaccaggctcaggtggtattcaggaagatgttaaatacccttcaaaggaga

SEQ ID NO: 2481 - DNA, 661 bp, Homo sapiens
  misc_feature [331]..[331]: Chromosome 5, SNP identification no. = rs17429055
  misc_feature [331]..[331]: allele = g, in linkage disequilibrium with rs17350454, respectively
  misc_feature [331]..[331]: n is a, t, c or g
cttcaaaggagagaggatacatattttgtataaactgttagaaagaagataaagctacccagccatttttataaggccaatataaccttaacaccaaatttgatggaatacagagataaaaatcacgagataatctccctatgaacatggtaaagaagtcataaatataatgttggtacatccaccccataaatggttcaaattaaatatattatcattaattaaggtttactttagaaacgtaagagtgatataacattagaaaaatctattaatttggtcagtttttaatattcatagttattaattttatcctaaatgactggttaantattctaggtgagagacagatttgttatttgttaccttatattaaataagtgcattgcaccacccccaccccacttttgctgcaggccttactcctgggatgacacagttaaaactagacggaaaaaatctcctacatgagtaaactgacacactataggcaagaggtggaaaacaatagatgttctccttttattggtgggagagagataatcatcccttttccttcctgaaaggagagaaaaatatttttactcatttgatggaaagtatcctagattcctggcctaaccttttggaatataaatatctttccaagggctattaatat

SEQ ID NO: 2482 - DNA, 661 bp, Homo sapiens
  misc_feature [331]..[331]: Chromosome 5, SNP identification no. = rs6594793
  misc_feature [331]..[331]: allele = c, in linkage disequilibrium with rs17350454, respectively
  misc_feature [331]..[331]: n is a, t, c or g
aatctgcttaccaattaaatgttgatcttgtccaaaaacagcttcacagacataccctgtcaaacagaataatgtttgaccaaatgcctgggcaccctgttgtccaatcaaattaacacataaatacataaaagtaaccatcagaaaaactaactcgtatgttttacttactatatatcaggcactattccaagcactttgtgtatgttagtgtgtttaattctcacagcatcctatgaaataggtatgattttatctccaatttataaataaaatgaagccacagtgaaattaagaacttaaacgtctatagtagtatagaacagagaanccagaaagatacgcacacatacatgggatcttggaatgtgataaaaatagcattgccagtcagtaggggataaagtggtgttgggacaattgcttatccatattaaaagtcagtgttttacctcatagcacacaccaaaataaattccagatgaattaaagatctcaaagtgaaaagcaaaagttcaaaagttaacaaaagaaaaataaaatgtagaagaatatctttataacatcacagcatggaaggaattctttaaaacaagatgaaaaaataaaaaattgataatttggcttcatcaaaatataaaatatttgtagctaccacacc

SEQ ID NO: 2483 - DNA, 661 bp, Homo sapiens
  misc_feature [331]..[331]: Chromosome 5, SNP identification no. = rs4272124
  misc_feature [331]..[331]: allele = t, in linkage disequilibrium with rs17350454, respectively
  misc_feature [331]..[331]: n is a, t, c or g
tgacctcgtgatctgcctgccttggccttccaaagttctgggattacaggcgtgagccaccgcacccagctgcttcatgcctaatattaaagcacaaatatcagatgttgtatatcaaataagaaagagacattatttacctttcttatttattttcagagagctctaatagggtccaaactctagaatcatccttatttaacaaagaaattccaattttggctgtgaaggaaagccattacacatttgccctgccattcaaggttattttgctagtgaaagatgctgtggagcagtgaatagaggatggaggaaagtttgaaaggttttnattttttggctcttttggatttaattctgttttattattaggtctctaatattaaatatctaattgtattttaatattatgtctcttttgctgattatggtgattcaattcttataatacattgaaagttaccatttaaagtccactgtgataggacaagtctaaagtctaaagttcttatgtgacaggacaagattctaatgtcctgatgttccttgcgggatgctcacaatctcatctaaatttctcattttactcaaagaaaatcttcattttttttagatttacttagggaatttgaattttcatcagtgcaaatataaatttatc

SEQ ID NO: 2484 - DNA, 661 bp, Homo sapiens
  misc_feature [331]..[331]: Chromosome 5, SNP identification no. = rs10045738
  misc_feature [331]..[331]: allele = g, in linkage disequilibrium with rs17350454, respectively
  misc_feature [331]..[331]: n is a, t, c or g
ctaatcgattgactagcctgcaaaatcatatttcctctttctcatgttgagccttttctccgtatttctcagacttagaattccctattctgtgccccctacaaaggacttagtgtatatttagaacactctttctttttatagactctttattcaacatgtatgtagtgtgcatctacagtggatcgtatctctgaagctgttatcgatgggagctgagggaagtgtctttgtgatgaactccctaatgactagttcttgttttggggtgtattagaacactggaccgtcaaacaccctctcacaataactgctctctgagcatataganaacttcatgttgttcattttattctcccctgacagtgtctctagagaaaataggttcccagtgcatttttgttgatgaataaactgtaccttggacaaaatcttatccttctgagatgcagtctcctcatttgtgaaaggaagaatagaaaatggtatatcgctgagcaaatgccattgttcaggtcatcgcacacatgtattttctttgtccatacctggttggctaacttttaatacccatacctagtatattacatgatctttgcagaaagacctgtaaattttcagtagatgtgtgtaacttgattttcagcatcttaagcatttt

SEQ ID NO: 2485 - DNA, 661 bp, Homo sapiens
  misc_feature [331]..[331]: Chromosome 5, SNP identification no. = rs4519916
  misc_feature [331]..[331]: allele = a, in linkage disequilibrium with rs17350454, respectively
  misc_feature [331]..[331]: n is a, t, c or g
tgtttccctctatttctcactctcagcagatgattttatttttaacttcacagagggaatagaggccactatgtggggtgattctgttaaattccaactttccctccactctatgctaatgctgacatctttcattcctgtttaaggggatgagggtggtgcccaattccaggttggctacttggctctgtagtgtatctatcaacccatctgtctttagaacagtagatctcaactcaggctgtgcattaggataacctgggatgcttttatacgaagctgacactgagaccccacctttggctaatgaaatcagaatctctggggtgangctcaggtatatgattctatgaaaaatgaggctttacaaaccagtcctcagcctaaaaaatccactagggtaagcatcttgtttgtgtgttcaaaaccgttccacttaatacgctgcagggcacctgactcagagtcaatgcttgatgtgtatttttatctcactctatcaccaacctcttctcatccactggctccttatcctcaggagacttacatgacctctcaacaacatcttctctcaactactatgttctctctctttccttcacagtctctcccagtcattatttcagttttgaaaactggcttctactctcacttctccact

SEQ ID NO: 2486 - DNA, 661 bp, Homo sapiens
  misc_feature [331]..[331]: Chromosome 5, SNP identification no. = rs6891961
  misc_feature [331]..[331]: allele = a, in linkage disequilibrium with rs17350454, respectively
  misc_feature [331]..[331]: n is a, t, c or g
gatgaaagaaatcaaataactaaataaatggagagatattccatgttcatgaatgggaaaactcaatatcatcaatacatcattcaacttgatctagagattcaatgcaatcccaattaaaatcctactaagttattttgtggatatcaataaactaattctaaagtttatatgaaagaatcaaaagacccacaacagccaacacaataccgaagaaaaacaaagttggaagactgacaccacctaacttcaagactttaaatctacagtaatcaagataatcaagtatttgcaaaaaatagacaaatacatcaatggaacataccagaangtccaggggaaaaaaatcgccacataaatgtagtcaactaagcaaatatagtcaaggaggaaagacaatagaatggagtgaagatagcctttcaacaagtggtgctgtagcaactggacattcacatacaaaaaaaaggaatctagacacagactttatatggtttacctaaattaacttaaaatgaatcacctgtctaaatgttaacacgaaagtataaaacttgtaggagatgacataggacaaatcttttatgaccttgggtgtggtcatggctttttaggtacaacactaaaggcgtgatccatgaaagaaagaattgataagctg

SEQ ID NO: 2487 - DNA, 661 bp, Homo sapiens
  misc_feature [331]..[331]: Chromosome 5, SNP identification no. = rs4521461
  misc_feature [331]..[331]: allele = a, in linkage disequilibrium with rs17350454, respectively
  misc_feature [331]..[331]: n is a, t, c or g
aaaaccatagaatgtacataccaagagtaaatactaatgtaaactatggacttcgggtgataatgatgtttcagtgtgggctcatcaattgtaactaatataccactcttgtgtgggatgctgaaatcggggaggctatgcacatgtggggctaggtgtacatgggaagtctcagtacctttgaagcacgatatttctctgacaccttcatgggacttgtggcatggtaccttgttcactcagcctaccactctcaactcctcatgggaaggagcatgtgagcaaagaagtgcaggaaccagagcaagcacttttgggaactggcaggaanaaactccatttacttggctcaccacactcaactccttgtgggagggagcaagtaggtaagcgagtatgggattcagccagctgcttttgggcaccagcgggagtgaactctttgcaggccctgcagcagcatccaggcaggggtgcctgtgactcttgaagccccagagggcatgtgttacagtgctattttagctctgccatccatggctgacttaaatgttaaaagcttagtaggctgtttgcctttttgtgtgaggtggctgccctccgccagcaaggacaaagggtcagtgtgacagccttttgtatctgcactcatggctcccaa

SEQ ID NO: 2488 - DNA, 661 bp, Homo sapiens
  misc_feature [331]..[331]: Chromosome 5, SNP identification no. = rs4537054
  misc_feature [331]..[331]: allele = a, in linkage disequilibrium with rs17350454, respectively
  misc_feature [331]..[331]: n is a, t, c or g
ggggtttttataggcacaggatggggcagggaggggccatatgtgctttaggaagatgtaacattcaagcaggaaatcagggatataagttctcacttcgggctgtggttgcaggttttttggcttgagggtggggttttgccagggatctgcccttttctgcctagaatttctctgcccttgtccctatcaccttcctatcagttttactgcaaatctaaaattaatctttaaagtctatcaaaaataatcaaaaaataaaaataattgggatagcatctatagataaactgtatgttaagcatcagcatactttttctgtgagggccanacagtaaaagttttaggctttgtgggtcaaaaattgtctttgttgcatattattctatatttcttaagcaatcattaaaaaatttagaaataatttttagtttacagaccttaagaaaaaaacaggtagcaggttggattaggcctacaggtcatatagttggctactcttcggactgtgtaattagaaaaactggccgtgtaaaacaaagttctgaatgctaatgttgcaagccaaacctataacatatcttaggacctcttcttggcttaacaaataatacattagaaatgtgtatttcaaacttctaattaaaatggtattgccaat

SEQ ID NO: 2489 - DNA, 661 bp, Homo sapiens
  misc_feature [331]..[331]: Chromosome 5, SNP identification no. = rs4451040
  misc_feature [331]..[331]: allele = c, in linkage disequilibrium with rs17350454, respectively
  misc_feature [331]..[331]: n is a, t, c or g
taaacacctccttcaacactttcaagatagcaatgctggaaaaaatatttaaaaacatatatttaaagtatctaaatgctactttaccatggtagtgggcaggagagaggaaaaaatctaacccaagaagattaaagccaaattttatgaaatagggccaataaactcaataatcaagtaaattatccaaagaaatacaaatactaaagcagtttttcaaaaactatttgtaaaataagtatttttaaaattctgaaagggatacagaaatgttttttaaaaaaagagaaaggaattatgaaatacaaacagacaaatgagacttaatacnaggattagcagaaaaggagccaattagaaatcctggcattgaaaattatggtcattttaaaattaacaagtgaacatggctaaagagataataaatagcaagacacagagcaaaacactgaggctgaggcaggagaattgcttgaacccaggaggtggaggttgcagtcagctgagatcgtgccactgcactctagcctgcctgacagagctagactccatctcaaaaaaaaaaaaaaaaaaaagttaaagtcaagttaaagactcagatcagaagataggtcgaaaagttccaacatattcctggtatatgttcaaataagaaatgtaa

SEQ ID NO: 2490 - DNA, 661 bp, Homo sapiens
  misc_feature [331]..[331]: Chromosome 5, SNP identification no. = rs6863368
  misc_feature [331]..[331]: allele = g, in linkage disequilibrium with rs17350454, respectively
  misc_feature [331]..[331]: n is a, t, c or g
atggataggccctaggtgcaaagtgatagaatctaggaattgttttaaagattttctacaaaatagcaataattaagctgactgtagatgtttttattactgacaatatatgctaggaggtaatagaataaaatttttaaatgccaaggaaaaaactcaacctcagattatacaatacaaagctattatttaaaagagagaatgaaacaaattttgaacaaagactaatagaatttacctcttacagattcttgctgagagaactacaaaaggatggactccagcaagaggaaaaatgaatctaaggaatggagtgggatataagcaatancagtgagtaaaaatagtagtaaaatatgtacatttagttctaatataaataagtgattttattgaaaacaaaagttaggtcagctgaatttatttcaactaaactatctgcctatagtttaaactattttcaatttagtgattcattcttttttatgtattacctgcctatttctctcactagcccaccaccactgcattaagaaaacataataggcacacaaaaatatttctccagtaaacaaatgtattttcatttgaattttaagaatagtttttgatgagagatagcattttggtgagattaagtatcagaaaatatgctgtagtt

SEQ ID NO: 2491 - DNA, 661 bp, Homo sapiens
  misc_feature [331]..[331]: Chromosome 5, SNP identification no. = rs4072690
  misc_feature [331]..[331]: allele = a, in linkage disequilibrium with rs17350454, respectively
  misc_feature [331]..[331]: n is a, t, c or g
atatgattccctgcgctgaaattgtgccatacccacagcttaattgaggaagaattgacattcccatccgataatatagtacagttcgcaaattttcaaatcaacttatttgcacactgagatacatgaaaaatgcagtttgccattcttgagcactgtcattcacatatcaatcccctaatgacttcatggtctcagaatcaaatatagccctaaagtattttggggaaggccctcaaatacttagttcaattttttgatattcattgcctgtccatgtagccctttctggtatggtagttctaggcaacagtcatatcaaaaaaatatntttgaggctgcctttggtatggtgtgcctaacgataccatgcaaatattgtttactagggtcttacagcttcctgctgagaggaccctgcttacgttcttagattttctctgatccccctcatttactcccctttttattccttgcttaattttttgaaaggaactacaggagaccttgcaaactatttttgcattctgctttggatatactttcactgaagcattaaatgtttatctggcaactagacaatgaggcatataagtaaaagaaaaataaatctcaaacatattatctagccatgcactttaacttgttttaacctcaactt

SEQ ID NO: 2492 - DNA, 661 bp, Homo sapiens
  misc_feature [331]..[331]: Chromosome 5, SNP identification no. = rs3935351
  misc_feature [331]..[331]: allele = t, in linkage disequilibrium with rs17350454, respectively
  misc_feature [331]..[331]: n is a, t, c or g
agatggcattcatctgctgccctaagattaagcgtttaaatataaacaaatacattctgtggcagctcactcacagcaagtagtcacaccaccagtttcaataatcaaagactgcagatgaaaaggtaacacagcatacacagaacctggactttttaaacagctgacttattaggaagtaccaagtgaaggcctattttgagaccaagatcacctttcaccaaaagtctaacttttaacattaatgtctcattcagcttcttttttttaatcactgtcttatggtaaaaacaaacaagggatatgattccctgcgctgaaattgtgccanacccacagcttaattgaggaagaattgacattcccatccgataatatagtacagttcgcaaattttcaaatcaacttatttgcacactgagatacatgaaaaatgcagtttgccattcttgagcactgtcattcacatatcaatcccctaatgacttcatggtctcagaatcaaatatagccctaaagtattttggggaaggccctcaaatacttagttcaattttttgatattcattgcctgtccatgtagccctttctggtatggtagttctaggcaacagtcatatcaaaaaaatatctttgaggctgcctttggtatggtgtgcct

SEQ ID NO: 2493 - DNA, 661 bp, Homo sapiens
  misc_feature [331]..[331]: Chromosome 5, SNP identification no. = rs4288107
  misc_feature [331]..[331]: allele = c, in linkage disequilibrium with rs17350454, respectively
  misc_feature [331]..[331]: n is a, t, c or g
gaaactggtggtgtgactacttgctgtgagtgagctgccacagaatgtatttgtttatatttaaacgcttaatcttagggcagcagatgaatgccatctctcataatctctattgaggtctcttctgctttcatgctgtccatctttctgactactaacagtcagtagcattcattgattttctacaagacaaaatgtaaacctaataaatatttttttgtgttcttgcactacatgtttaaaagaagatatataatttaggtcaagagttaaagaaatatcaatacctgggcacaaatacatgtcaattgatagcatccatcgtttgacnctaacagttttgaaggtctgcatggaaaagtaacccataattaattagtctactggaatgaaatgatttccaaagacatacagtgaggattctgattcttcgcagcttcagaaaaacttgtttggagaaaaatcttttggaaatgcttattttccctttcaaagtcatcttgaactgctttgagattatgaccaagaaggagacccatatctgtttttctttagccatatttgaaaacatttcagtaaaatatataaataatatatgatgatcattttcacatttaataaaattaatggttttgaaattaagacaggagtctccttggac

SEQ ID NO: 2494 - DNA, 661 bp, Homo sapiens
  misc_feature [331]..[331]: Chromosome 5, SNP identification no. = rs4460131
  misc_feature [331]..[331]: allele = a, in linkage disequilibrium with rs17350454, respectively
  misc_feature [331]..[331]: n is a, t, c or g
gtttggagaaaaatcttttggaaatgcttattttccctttcaaagtcatcttgaactgctttgagattatgaccaagaaggagacccatatctgtttttctttagccatatttgaaaacatttcagtaaaatatataaataatatatgatgatcattttcacatttaataaaattaatggttttgaaattaagacaggagtctccttggacatgcacagacagccaaaatagacagggaagtgtatttttcagagtccagttaggcgatagaaatcacagcaattgtttttacaagagaatttaatacaaagaattgtcagccaggaattnacaacctgaaaaaagacaacactacatttttcacagagcatctataaggctggggaataaaaggatgaggctagggttggtttttaaagtttagaagcttggatgaaggactcaatgaactaagacgaacttctgaggaaggggtgttgctgagttgtgatgctgcctcaggaatgcaacagaagggctgtgtggggctaggacccaaacctttgaagaagggggccccatttggcagcacctggggcctgtgagggggcagaacaatgttggttctatggttgttgaaaaaaatgcaaactagaatcagttgtactattggaacaacta

SEQ ID NO: 2495 - DNA, 661 bp, Homo sapiens
  misc_feature [331]..[331]: Chromosome 5, SNP identification no. = rs3890748
  misc_feature [331]..[331]: allele = g, in linkage disequilibrium with rs17350454, respectively
  misc_feature [331]..[331]: n is a, t, c or g
tgaggaaaaacaattatatcaaatgttgtgaaggtataggaaataatcacttttaaagaactgttgttagaatataaatcgatatactgtactgcagagaatttgccagtatctatcaattctaaaaatgctcatataatgtgattcaatattgaaaaaaataaaacactctaaaggagtatatgtactctgcattttaagaacatttaatctaaggtttcctttaggttaaaatgtattttttttaattaaatgtatttgtatactaacctacaagaaaacaggaatgctttctcttctttcgacctggtatttcccactctgctcttcntctaatccctgactcactgtttcttctgtgagatctttggggattttagtcccggatagttctttgttttcaataaaccacagttgtatgaatttcactacatgctttattgatttatttgctcactaatctatgtccctcttcaattcattttgttttgccaaaggacaagcttaaatattcattttacagaatacgtggatgattatctttctgaattttggcatgtttgttaagtcttactctatattcatacttaaatgctaatgtagctggctataaggatttaggttcaaaatcaattccctcagaatctgaaattttgtccct

SEQ ID NO: 2496 - DNA, 661 bp, Homo sapiens
  misc_feature [331]..[331]: Chromosome 5, SNP identification no. = rs4705640
  misc_feature [331]..[331]: allele = a, in linkage disequilibrium with rs17350454, respectively
  misc_feature [331]..[331]: n is a, t, c or g
tgggaggatgaggcaggcggatcacaaggtcaggagatcgagaccatcctggctaacacggtgaatcccatctctactaaaaatacaaaaaatcaaccgggcatggtggcgggcacctgtagtcccagctacttgggaggctgaggcaggagaatcccttgaacccaggaggtggagcttgcagtgagctgagattgcgccactgcactccagcctgggcaacacagcgagactccgtctcaaaaaaaaaaaaaaaaaaaaagaaatattgataggtcaaataacaaatgagtatctaatttttgtggattaccctttgatttttttcatntagtggattaaatagcaaaatacttctgtgtcttttgattaagctgtttattttcttgaccactcagtccaaaagactattttaattcactcgtaattcttattactgtctgaaaagttttaatcatttatgtttttctagtatcttacttggttcacctctaaaatgtacactcttttaggcagggactttgaccaacttgctctatgcctgatatttataacagttaatgagcgaatgaaagaatgaaggaatgagtgagtgccagtgttttcctatctacttacttttgtttttgctgttctcgctactaaaaatataacctgtcaa

SEQ ID NO: 2497 - DNA, 661 bp, Homo sapiens
  misc_feature [331]..[331]: Chromosome 5, SNP identification no. = rs6594802
  misc_feature [331]..[331]: allele = c, in linkage disequilibrium with rs17350454, respectively
  misc_feature [331]..[331]: n is a, t, c or g
actgtctgaaaagttttaatcatttatgtttttctagtatcttacttggttcacctctaaaatgtacactcttttaggcagggactttgaccaacttgctctatgcctgatatttataacagttaatgagcgaatgaaagaatgaaggaatgagtgagtgccagtgttttcctatctacttacttttgtttttgctgttctcgctactaaaaatataacctgtcaagttgtatttactcttcaacacctagttcaaattcctttttattcataaagcatccctagatccgcttgcttaaagaagtgactttctcctttactcatgccctanagtaccccgtactgttgtactcttactcttacccccttctggcttccaccttaaaaacatcattagttgcccatacaacttgttttctcagtagattataaattccttgaagacagagcctatgtctgttcatttttctgtcctccagagcaccatcattgtgccttgcacttgacagaatttttaattgaattgagtaattaccataagtaccttaatgcttttcgtagcaggcttagtggaaaagtaataaaatttgaaatcagaaaaaaagtatgaaacctagttctttcactcttagctgtatgatattatttctgaattaagccc

SEQ ID NO: 2498 - DNA, 661 bp, Homo sapiens
  misc_feature [331]..[331]: Chromosome 5, SNP identification no. = rs6898328
  misc_feature [331]..[331]: allele = g, in linkage disequilibrium with rs17350454, respectively
  misc_feature [331]..[331]: n is a, t, c or g
ttagctgtatgatattatttctgaattaagcccatgtaccctttccttacctgtaaagaaggattataattcctaaatagcaaggttgcagtgaagagtaaacattaaacatatacatgtaaggtaaacatgaagagtatatatgagtgtatatatatatagtaggtgaatatatgttggaacatagaaggtgaatatatgttgattcattccttcattcagtaaacatttgagtgcctactgtgtgccaaacaatgattgatgatgatgacgatgatgatgatgatgatgatgatgatgatgatgatgaaagaagaaggagatgatgatnaagttccaagctttaattgaattcccattgatgaatgcttataatttggtgaattatgaaaaacaatgacatagatttggtgttcaggtattaaggaacaataaaatttcagtcttgagatgtcatttcaattattagaatcaaattctctttcaactgaaaaagtagtaaatatagactccctttttaatataagtctcaaaagtgaagaatatctcatttacttttgaggttctgttacatgaagtaaacaatagatttatgtaacagcatgtagagtagaaaagaaagtcttgaatattacatttatgaaaataataaaaggaaact

SEQ ID NO: 2499 - DNA, 661 bp, Homo sapiens
  misc_feature [331]..[331]: Chromosome 5, SNP identification no. = rs6883917
  misc_feature [331]..[331]: allele = c, in linkage disequilibrium with rs17350454, respectively
  misc_feature [331]..[331]: n is a, t, c or g
tgattgatgatgatgacgatgatgatgatgatgatgatgatgatgatgatgatgaaagaagaaggagatgatgataaagttccaagctttaattgaattcccattgatgaatgcttataatttggtgaattatgaaaaacaatgacatagatttggtgttcaggtattaaggaacaataaaatttcagtcttgagatgtcatttcaattattagaatcaaattctctttcaactgaaaaagtagtaaatatagactccctttttaatataagtctcaaaagtgaagaatatctcatttacttttgaggttctgttacatgaagtaaacaanagatttatgtaacagcatgtagagtagaaaagaaagtcttgaatattacatttatgaaaataataaaaggaaactaagtttcacaactgcatttcaaatttaaaaatattgtcaaccaaacagattttaaaagcagacagtttaaaatgtataacttttaaccatctatctaattttttgaaataaaatagttttattatgatgtagtctgcttctgggaaaaatgcagtaatatcagtaactgggaaaagttggaaaatttttattgaaacacagaactaaaattgtgcctgaaattgcagttacactaatatgctttatgtttctcca

SEQ ID NO: 2500 - DNA, 661 bp, Homo sapiens
  misc_feature [331]..[331]: Chromosome 5, SNP identification no. = rs10037472
  misc_feature [331]..[331]: allele = a, in linkage disequilibrium with rs17350454, respectively
  misc_feature [331]..[331]: n is a, t, c or g
ttagattgtttctgaatttaacagtaaaatagttcaaagagaaattaacttaatttgcttatttaaataattgtgttgattaattagttaggttaaattaaaggatggaagcagtaaagctataaaatttatgattgtactaaaaattaaaacaaatttgattacttttcagaactttaggcaaagatattttccattatgttactcagtgttcagtttcatagagagtcatatgataatgatttcttctggaattttaatttctggaaaatgtgtctatctcctgaattactagcttattctcttttattatctactaagatccctgctntttttttttaacattttcttttttgcttttattatctaggagctctcagtttttaacttagtattcagatacaataattatatctcccctggcctggttattttctccttattcctaaaagactcttacttttatctttatattaactatcttgcatgttcttgtttttcatacataagttcctgaaattctttcaaatgtgtgaaaattctaaaagtttttccttaaaaaattctgtttgtgattatttgatttaggacatatcagagtaccaggttcatatgtatttgctttgtttaaaaaattagatgtaaatattagtatgtattt

SEQ ID NO: 2501 - DNA, 661 bp, Homo sapiens
  misc_feature [331]..[331]: Chromosome 5, SNP identification no. = rs10053690
  misc_feature [331]..[331]: allele = a, in linkage disequilibrium with rs17350454, respectively
  misc_feature [331]..[331]: n is a, t, c or g
caggtagacagatctgtgggataattggattggaggctattagcatctgacttggcaaaaatcagtttaaatgaattgaattcaaagcgttgaattcattttaaaaatatacttttaatctactgatttttttaacttttgaggccagtattgatattctcaagataactaatattgcaaaaattatgggaatcccagtgtccctgtcccactgtttgggcctgagaatctgtgacttggcttcactttgattgtttcgagttgaaatagaatgtggcacataggagtaaattattcaggcaagaggcgtcattgaatagaggattaatgntctcgtctgaattagaaataggatgagaacaggtcatgagtcctatttactccacaatttataacattaaatttaattctaaattagtgttataaaatgtataaaaattaatggtccatcttaaatcatatagtactttcttctctacctttctaaattataaacataacattaaaaaataaaaactaaataatcactggtaaccatcagtaatattttaaggtttgcgttttgccttccagtctgtccacatgtactccaggcttataacttcctctttacaagcgggtctttttatgtatgtatgagaacatatacctgtgtccacga

SEQ ID NO: 2502 - DNA, 661 bp, Homo sapiens
  misc_feature [331]..[331]: Chromosome 5, SNP identification no. = rs12719177
  misc_feature [331]..[331]: allele = t, in linkage disequilibrium with rs17350454, respectively
  misc_feature [331]..[331]: n is a, t, c or g
gaggcgtcattgaatagaggattaatggtctcgtctgaattagaaataggatgagaacaggtcatgagtcctatttactccacaatttataacattaaatttaattctaaattagtgttataaaatgtataaaaattaatggtccatcttaaatcatatagtactttcttctctacctttctaaattataaacataacattaaaaaataaaaactaaataatcactggtaaccatcagtaatattttaaggtttgcgttttgccttccagtctgtccacatgtactccaggcttataacttcctctttacaagcgggtctttttatgtatntatgagaacatatacctgtgtccacgataatgagtacttcgcaatatatcaggcttaaccaaaagtttttccaaatctttcctattgtcatcttttgatgatctctttttttaaacttttaaataaataatccccattgaattgtcttctctagcttaaaaagtattgttctttaactttgcggtgtcaaaaagttttatctcaaagtccaattccaatttattgataatgatggcatggaacactatactcagaattctgggttttcctaagatgtcagcagtaaagaggtccgtgattgattagtggtgctgatcatggaagcaggag

SEQ ID NO: 2503 - DNA, 661 bp, Homo sapiens
  misc_feature [331]..[331]: Chromosome 5, SNP identification no. = rs6594803
  misc_feature [331]..[331]: allele = t, in linkage disequilibrium with rs17350454, respectively
  misc_feature [331]..[331]: n is a, t, c or g
agaaaactacttgtttccatttttcttctctgttccctatcctctgtatcagtcatcttctcttgcattattttagttttgtcccattcttttgagttctgagatgacacttgagcttttcttttatatatacttcattcatttaccattccttagaatcaacacttcttgctgtagccttcaacatgaattttaacttggctctagctttttttttttggttagcaattcatccttatatcattcatttgattttttcctcacctagttatttataacagtctccttttatttcatagcaaccatattgtttgaactttattgaggatancaaactgttcctggaagttttcttctgaatcctactctagattattttcagacatatcatttatcttctgaatcttaaccttatttgacaatgtttttcataagtcatatgtatttttttctgtctctcatcctcaaaccatgtaagatcagaatttccaataaacagagaagactgaccttgtgcgatgtgcgatggtaaatttttcttctcagatgcaggttggactgagacagacatgcacagtttccttttaactttacgattctgttaggatttcatgtagtatattcttctttgctcatgtgccatttttctttgttctcaagg

SEQ ID NO: 2504 - DNA, 661 bp, Homo sapiens
  misc_feature [331]..[331]: Chromosome 5, SNP identification no. = rs7708130
  misc_feature [331]..[331]: allele = a, in linkage disequilibrium with rs17350454, respectively
  misc_feature [331]..[331]: n is a, t, c or g
ttttctgtctctcatcctcaaaccatgtaagatcagaatttccaataaacagagaagactgaccttgtgcgatgtgcgatggtaaatttttcttctcagatgcaggttggactgagacagacatgcacagtttccttttaactttacgattctgttaggatttcatgtagtatattcttctttgctcatgtgccatttttctttgttctcaagggccttgttatcccattatattgaactaatgcagtatatcaagcaaaacatattccaaatgaattggggtatttctttgttcatagatccttcacccaataagacactgtttggaagnacattgttccaaaaatacactgtgctgcttccttcacggttgttgagaatctgcatactcaggtatatgtgtgtaaacgggaggtggagagtggagaagaggggagtgaggcagagtagctagtgacaggattctgcttactctcggggaaacatttagggagcagagcaggatggctgccaactagagagttgtgggcctccctggaactgacttagggagcaaaacctgatcaaagggaatggcctctttaaatccttttgaagatactcttcatttggttaagcaagttcagtatgtgttatgagttagagctcagagaggattttc

SEQ ID NO: 2505 - DNA, 661 bp, Homo sapiens
  misc_feature [331]..[331]: Chromosome 5, SNP identification no. = rs4440350
  misc_feature [331]..[331]: allele = t, in linkage disequilibrium with rs17350454, respectively
  misc_feature [331]..[331]: n is a, t, c or g
acattggagactatttggtacctgaaggtggagataaggtaggagggagagagaaggctggggctttagtagatcccccgccatgactaagaaagcagcttcacttttatctctaaattttttttttattttacctgatgaaaatcttcctttgaaaaacacaatctaaagtttgaaacacactggcacaggcaatttctcaggtcccttactgccctaatgttttatgattatgcattgtattatttatggtaattaatgctagctgcaagtgattaaagccccaaatctcagtaacttagtcaacagaaatttatttctaactcatatntagccttctacgggttgggagaggctttactccacgaggtgactcagggaactgaatcttgtgatgctcagctcttgccccgtggccttttaggttgcagcagcataggaagagatggatggaggaagcataccagcttctgacttacttagctcagaagtgacacttgagctcacagcccattcatcaaaccaagtcacgtggcttcaatttcaccgcaaaggaagcttagtcatgtagaggaacacattgaatatctggactcagtaagtctctctagcatttgtaccaagtgcaggaaacataattcacatgcagaagggcagagtg

SEQ ID NO: 2506 - DNA, 661 bp, Homo sapiens
  misc_feature [331]..[331]: Chromosome 5, SNP identification no. = rs4376257
  misc_feature [331]..[331]: allele = g, in linkage disequilibrium with rs17350454, respectively
  misc_feature [331]..[331]: n is a, t, c or g
tcgcggcactgcactccagtctgggtgacagagtgagactccgtctccaaaaaaaaaaaaaaggattattgttctctactgtattgaaatttaattttctaaaaaacaatttattggattccaccatagggagctggcatggcaatttatgttaatttagaatgtaattccactaacctatgtcctatcagcctgagcagtctatctcttttaacatagatcaaaatgcaaaggcccttttctcatgaagcatggacctattttttttatggtgtgctgagatgaaggagaacagggtacagtgttcctgataatctttgatgtgatttanttgtatttttgagcttgatgataatgtctttatcatctagttactgttctacatctcatctcctggtggtacagcatgctcaatgtggtttactttctgaaacaacaacagatttagtttttatgttgatgaggataggaagaggcccaaagattgcatcagaagcaattaaatcattttgggaagagttagtatgctctttggagggtaattctggtgactcaaagtaactgtaagtgcataatggaaagaagcccatgcctggtgtgggtgtgtagcttaatggagaattgggaaaatagtcagctagagaagcaaagataaaattat

SEQ ID NO: 2507 - DNA, 661 bp, Homo sapiens
  misc_feature [331]..[331]: Chromosome 5, SNP identification no. = rs4705643
  misc_feature [331]..[331]: allele = a, in linkage disequilibrium with rs17350454, respectively
  misc_feature [331]..[331]: n is a, t, c or g
atataaaaattaatagcttttgtgctaactagcaatatctagttagtaaagattatttggagtaaaaaacatttgtatatgtgtctatatgtatcctgatccaaagaaaaataaattataaaccacttagatataagtacttgattataaaaggaagttatgaaatataacaaacatatttaaagaagactcaaacagtaaatgtctggataaaataactctaatgtcacaaaaatagcaataattctgagaacattatgtaatttaatgtaattccactcagcatttcaatagatttcaatagatttggaataggtaaaattcattttanataacgaatatagtaggataaattttggagaagagccaaaacattttgaataaaatagtgaagatagttatgccttaacaaaaattaaaatgtataccaagttgctataatcaaaacatcattctgtcttcaggagaatctaaataaatggactggtgaaaactaaaatataccaaaatggagtcaggtattaatacgtataggaagttactacatggtaaggataaaatttaattcaccttttaaaggacaatttatttaataaagattgctgtcatgtggaaaagaaaaagctaagaaccttgtctttcacaataggcaaaaacgtaa

SEQ ID NO: 2508 - DNA, 661 bp, Homo sapiens
  misc_feature [331]..[331]: Chromosome 5, SNP identification no. = rs10065369
  misc_feature [331]..[331]: allele = t, in linkage disequilibrium with rs17350454, respectively
  misc_feature [331]..[331]: n is a, t, c or g
caagacccatggagagttgtcttcaacaatagcataaacaaaataaaaggtaaaataatgaacctcataaaaatacttgcagctcatataatagacaatgagtttgcatagttttgacccagaaatcctgtgttgataacatatctaacaggcattaatccagttctctataactatttatttacaaggatatttatataagcattgtttatagtgacaccagttgagacacaacctgaatgtctaccaaaagaatgattatattaattcaactatttctctacttagtccttgggaagaccagtgttctatgtatttattttgaactcgngaataggaaaaaagcaacttcagagtaaatgttagaaagagcaagaaggacagaaggaaggaaggaagcaaatcgatctctaggtattggtatacatttttgtgaacatagagaaaggaatagaaaagtatattactattggattccttagggagaatgcaatatagggaagatagattattaactttctaaaaatgtggttcatctttgtattgcttcccctattacaaattaataaaacacaaaaaataaaaataaattggccattcttttggcagtaaatgaggcccaacatgccttgtttgggactcattcattcatctatttatt

SEQ ID NO: 2509 - DNA, 661 bp, Homo sapiens
  misc_feature [331]..[331]: Chromosome 5, SNP identification no. = rs4299732
  misc_feature [331]..[331]: allele = a, in linkage disequilibrium with rs17350454, respectively
  misc_feature [331]..[331]: n is a, t, c or g
taatccagttctctataactatttatttacaaggatatttatataagcattgtttatagtgacaccagttgagacacaacctgaatgtctaccaaaagaatgattatattaattcaactatttctctacttagtccttgggaagaccagtgttctatgtatttattttgaactcgcgaataggaaaaaagcaacttcagagtaaatgttagaaagagcaagaaggacagaaggaaggaaggaagcaaatcgatctctaggtattggtatacatttttgtgaacatagagaaaggaatagaaaagtatattactattggattccttaggganaatgcaatatagggaagatagattattaactttctaaaaatgtggttcatctttgtattgcttcccctattacaaattaataaaacacaaaaaataaaaataaattggccattcttttggcagtaaatgaggcccaacatgccttgtttgggactcattcattcatctatttattaaacaaatattactgagtgttttctcagtgtcaaatactgattagacagggaaaacaccagtgagcaaaagaaatattctctgccattgtggaacttatattctagtggggatgtcagaaaatataaaaataaacatataatatgtcttcataca

SEQ ID NO: 2510 - DNA, 661 bp, Homo sapiens
  misc_feature [331]..[331]: Chromosome 5, SNP identification no. = rs7712075
  misc_feature [331]..[331]: allele = t, in linkage disequilibrium with rs17350454, respectively
  misc_feature [331]..[331]: n is a, t, c or g
gctggcaactatgtctgacacacagcaagtacccaaaagggtagccattgttgacatagtagttttttttttcagaggaaggattatgtcttaggtgggtttctggatttgctaatattatttctttcaagtttaattggaagccctccttgtgcatctcagtataattatcttcagaattctatcttaattgtttttgtgttttccacctgagactttggacttcccttttctttgctttccgtcctgacttagaacagaactctagactcttcttacaggtggatgactgctgtgagcaagaatgttcaacatgttgccttccttattngaatcaggtcatgtcgacctacttgaagtctcagtccaatgccttcttgtatagtaatgctccttgtttcccccagatttttacatggacaggaaagagggaagtgtatattagggggttaggatgattcaaatacgcattatttcagcttgagagttggtgtcatcctcttaatgatattatggaaattcatcatgtttggaacattaaatggtacctatagtacatcttttaatttgcctcaattagaactgacaaggttaatgagaagtttagttatttggggggaagttacacaatgtaaaatgtatattgaccaacattgaaaag

SEQ ID NO: 2511 - DNA, 661 bp, Homo sapiens
  misc_feature [331]..[331]: Chromosome 5, SNP identification no. = rs10044702
  misc_feature [331]..[331]: allele = a, in linkage disequilibrium with rs17350454, respectively
  misc_feature [331]..[331]: n is a, t, c or g
tggaagccctccttgtgcatctcagtataattatcttcagaattctatcttaattgtttttgtgttttccacctgagactttggacttcccttttctttgctttccgtcctgacttagaacagaactctagactcttcttacaggtggatgactgctgtgagcaagaatgttcaacatgttgccttccttattcgaatcaggtcatgtcgacctacttgaagtctcagtccaatgccttcttgtatagtaatgctccttgtttcccccagatttttacatggacaggaaagagggaagtgtatattagggggttaggatgattcaaatacncattatttcagcttgagagttggtgtcatcctcttaatgatattatggaaattcatcatgtttggaacattaaatggtacctatagtacatcttttaatttgcctcaattagaactgacaaggttaatgagaagtttagttatttggggggaagttacacaatgtaaaatgtatattgaccaacattgaaaagaacatgtaggtagatgatagtgaaaggtaagatatatatggatcaaagagcacagaacatatctgaaagaggcagagaggataatagatgtttccagctactaaatacttctttttttataagtttgcattactttt

SEQ ID NO: 2512 - DNA, 661 bp, Homo sapiens
  misc_feature [331]..[331]: Chromosome 5, SNP identification no. = rs4597957
  misc_feature [331]..[331]: allele = t, in linkage disequilibrium with rs17350454, respectively
  misc_feature [331]..[331]: n is a, t, c or g
tttatttcctggcagtcaaagcaaaaaataagtgtacatggttttgtagtctcatttacccactagaaaattatttcaaatttatttacagagaagaaaacataatctttgaaattaaactcaagcaactatttatcatagtgatttctgaccatagagagacacaatgtacattatttaaagcaagcatttccaagtactttttctgacttccattatactgagcataatattaacaaatttttttaagttgcccctattaatccataagttatagagagctgtgaagaagagggtcacagcatatagtgtagtaaccgtttaatgaatnattcaaactggaactcttgagggtgtgaaaggggcactgttggcaattatgccatgacagcaggtgaaaaccagattgtcctggtaaaaactgcaatgaatgatcaccctagtacagggtgttaccatattgtccctttcagatttaagtgttaggaaattttcaggagtaaatttctacaaagacaaagtttctgcataaaataaaacatgagaagagaatagacaatcaaaatagcaagacattctctaagttctgctgatgattcaatggagattaacatttctttttttttagacatgaacttaaagttctgtagaccacatttgt

SEQ ID NO: 2513 - DNA, 661 bp, Homo sapiens
  misc_feature [331]..[331]: Chromosome 5, SNP identification no. = rs10056135
  misc_feature [331]..[331]: allele = c, in linkage disequilibrium with rs17350454, respectively
  misc_feature [331]..[331]: n is a, t, c or g
gaaaattatttcaaatttatttacagagaagaaaacataatctttgaaattaaactcaagcaactatttatcatagtgatttctgaccatagagagacacaatgtacattatttaaagcaagcatttccaagtactttttctgacttccattatactgagcataatattaacaaatttttttaagttgcccctattaatccataagttatagagagctgtgaagaagagggtcacagcatatagtgtagtaaccgtttaatgaatcattcaaactggaactcttgagggtgtgaaaggggcactgttggcaattatgccatgacagcaggngaaaaccagattgtcctggtaaaaactgcaatgaatgatcaccctagtacagggtgttaccatattgtccctttcagatttaagtgttaggaaattttcaggagtaaatttctacaaagacaaagtttctgcataaaataaaacatgagaagagaatagacaatcaaaatagcaagacattctctaagttctgctgatgattcaatggagattaacatttctttttttttagacatgaacttaaagttctgtagaccacatttgtgaagaacgtaaacatggtatcacgaaagttctcagtatatttctttttctttctttctttctttc

SEQ ID NO: 2514 - DNA, 661 bp, Homo sapiens
  misc_feature [331]..[331]: Chromosome 5, SNP identification no. = rs10053242
  misc_feature [331]..[331]: allele = a, in linkage disequilibrium with rs17350454, respectively
  misc_feature [331]..[331]: n is a, t, c or g
tttgggccacacttagagccacattggtctcactgagttgtctctactgcctgattctgagcctcttactaatggaaaggaatttaatatttctctccggccatccatagaccattcattgcccacccatagtgatgagtagattgtgcctccataaccagcaggctgactctggtgttttaagaacatatctaggacagatgatgtttaggatgcttatgtggtttgattggcaagctgtatttataccaatatataaaaacagaatatttccatgaagatatggatttctaatttctccaaataatggaaaattcctctaataacagancctggtaatgcggtacattgcatcctggtaacagtcaggtggagctgagtatcatgggccctttgtaaaggggtgcaagtgttttccggttggccacaggccttttgccagtgctgaattgtgttgcctattgcaattacaaccagcctgcttctcccattgttatcgcctacatagcctttctaaacatttacttttgtaatcctgatctggactaatggaaagtcacttgtttaatcaaagattcaaaggctttcaaagtagagcttggtttgaatcctcctatgctatctattaaatatataactttgaacaaattacttaactttt

SEQ ID NO: 2515 - DNA, 661 bp, Homo sapiens
  misc_feature [331]..[331]: Chromosome 5, SNP identification no. = rs4484417
  misc_feature [331]..[331]: allele = a, in linkage disequilibrium with rs17350454, respectively
  misc_feature [331]..[331]: n is a, t, c or g
tacctgggtagacagaagcagagaaaagtaaaacaggtaagtgaaagattttgtctggactcacgtaaagttcccagaaataagtactaacaatgctattttcctcatttgttaggaaacttttggaaatgatactttaagggaaggaggaggacgtgagagttatctggctgccgctccactgagtgccagggttgattcagctgatctggctggctaggcgggtgtccccttcctctctcactgctccatgtgcatctctcctgaagctgtgtgcttggttgaagaggacgaccttgtccccagtccagggtatatgagtagctgcgtncccctgctggaacctccaaataagctctcaagggcaggaggagatcttatttacattattgtctcttctcattgtatttgttccatttctaccttttttacaccataggctttttacagattatgaatcttttataattatttttcgaaatagtttcatggttgtattagattgttagatgtatattaaatctttattgagtccttatgatgcaattaatctgtgactcttgtttgcattctgcatcaaggacctttatttcataaacaattgcatgccaagtatactttatcaacatgatcattaaaggagggctaaatatgctcagca

SEQ ID NO: 2516 - DNA, 661 bp, Homo sapiens
  misc_feature [331]..[331]: Chromosome 5, SNP identification no. = rs4235757
  misc_feature [331]..[331]: allele = a, in linkage disequilibrium with rs17350454, respectively
  misc_feature [331]..[331]: n is a, t, c or g
gtaaatatttcagaaaaaaagtaatcctagtaagtatattttagcttatagtgtgcttttctgtattttaatagagcttttggattaagccttttctttatcatatctgttccttagaacagtttttctctttcttataaaaatattgcctatgcttattcttatattccttaatctcctgaagctgtaacttaaaaacaagcaaacaaatgtttaaatgaaatctgttcattcacttaaagaaaaatgattggtaatgttttcaattaactctagaaaacctgtacataattacattgaatgatctgaggcttgtatttaccaaaaaaanaatcttaagtaatctgattaatttataaagttggatttctgctaactcagtaagaattcattggcctcatcattttttgatgcaccaaaaatggaatggctctattgagaggtacagagttcacagtctgtaaaggcataggtatttatgcagagaaaagatgactgcttgatgacagttactattttgatcatttaatatgtataagttacggtgaaaggcacatgggtatacaaagagaaaaatgccagatgtcttccctcaaggagtttatcacccgagacagagagacatatgtgaacaaaatcttacacgtgcattgtagtgttg

SEQ ID NO: 2517 - DNA, 661 bp, Homo sapiens
  misc_feature [331]..[331]: Chromosome 5, SNP identification no. = rs4323225
  misc_feature [331]..[331]: allele = a, in linkage disequilibrium with rs17350454, respectively
  misc_feature [331]..[331]: n is a, t, c or g
tgtgcacatgtaccgtaaaacttaaagtataataataataaaaaaaaaagtcctcaaatcacagcttacaccagtgtttgggttctgacagttcagatactggtggtctgctgtaggggtgaggggagccgaaacactcccactcacccttccaatgaagtaacaagtccctctggatttctagcccgtctctaccagcctcttgtttccttcttttgctgtgccccagcttcttccctgaggtcttcactaggttccagcactcaccccttgataggctattcaacttatgattattcactgtaactttcgttcttctttctgaggaganttggcatctgacatctctagtcagccatcttgaatcccatgaaactcaaggttttagaagaaacagaatacctcaatgtcatccttgcttcatctttttccctcccagccctcgtctgattcatcagtgagtcttttctgttctacctcaaaaattatctttacaccatctccacttctaccaccctactccaagataacactatcttttgtctaaactatggaacagctcctgactgtcctttcttctgctctagttcctcaatcattcattctttgtgcagcagctggagtgatctttctgaaaagtaaatcagaccatatcactccc

SEQ ID NO: 2518 - DNA, 661 bp, Homo sapiens
  misc_feature [331]..[331]: Chromosome 5, SNP identification no. = rs4496701
  misc_feature [331]..[331]: allele = t, in linkage disequilibrium with rs17350454, respectively
  misc_feature [331]..[331]: n is a, t, c or g
cagttcagatactggtggtctgctgtaggggtgaggggagccgaaacactcccactcacccttccaatgaagtaacaagtccctctggatttctagcccgtctctaccagcctcttgtttccttcttttgctgtgccccagcttcttccctgaggtcttcactaggttccagcactcaccccttgataggctattcaacttatgattattcactgtaactttcgttcttctttctgaggagaattggcatctgacatctctagtcagccatcttgaatcccatgaaactcaaggttttagaagaaacagaatacctcaatgtcatccttgnttcatctttttccctcccagccctcgtctgattcatcagtgagtcttttctgttctacctcaaaaattatctttacaccatctccacttctaccaccctactccaagataacactatcttttgtctaaactatggaacagctcctgactgtcctttcttctgctctagttcctcaatcattcattctttgtgcagcagctggagtgatctttctgaaaagtaaatcagaccatatcactcccctccttatattaccaacttcacatcacactttgaattaaatatcagtgccattccctggcctataaagcagtctttgcttacctctgt

SEQ ID NO: 2519 - DNA, 661 bp, Homo sapiens
  misc_feature [331]..[331]: Chromosome 5, SNP identification no. = rs4478312
  misc_feature [331]..[331]: allele = a, in linkage disequilibrium with rs17350454, respectively
  misc_feature [331]..[331]: n is a, t, c or g
actttttagaatgaatgaataaatagaagggaagaaaagaactctgttttggttcctttagctctctttttctgagaacaatttagggatatccctttgtattccttgtctggtttacctttgtcttaatagtctaaagtcttcccatatagctaggtgtccattgggtgcaggtggctttcatttgcatatgtaaaatgggcagtgctcccacctttctgtgtttagaatgtttgtctggagtgaggcaagtcaaaaatctgctctaagccttaccaggtgagattggggagcagaaggaagaggaaaaaagaagattgtttgtctttangaacatgtggcataagtctacaaccactgcagttccctggaccatttatttttctggtgtggttatattatttgtgatttatttttaaacacttccatataaacatgtgataaatatatactgtgtaaattaatagcacactctcaggtgttttgttaacatttgaagtgcccactcaaagatccaccctccagagatttctaggaaaatgatttcaatatcactaattagcagcagagaagtaatttttcactggtgaaatcagtagtgtcaagacattcagctggttagaaagattgcacagtatgtcctttcatgatgagtgcaagg

SEQ ID NO: 2520 - DNA, 661 bp, Homo sapiens
  misc_feature [331]..[331]: Chromosome 5, SNP identification no. = rs4330454
  misc_feature [331]..[331]: allele = g, in linkage disequilibrium with rs17350454, respectively
  misc_feature [331]..[331]: n is a, t, c or g
agttccctggaccatttatttttctggtgtggttatattatttgtgatttatttttaaacacttccatataaacatgtgataaatatatactgtgtaaattaatagcacactctcaggtgttttgttaacatttgaagtgcccactcaaagatccaccctccagagatttctaggaaaatgatttcaatatcactaattagcagcagagaagtaatttttcactggtgaaatcagtagtgtcaagacattcagctggttagaaagattgcacagtatgtcctttcatgatgagtgcaaggactctgagtttctgtccttccttgagcaacncatccagcaaacccacagcccaacacagcaccccaggtgaagacctcagctttgccctattcctaccgcctactcaccccttagttcaggcactgggcacaggattcagtgagaaggaaggctgattttgccatcagaatattttttactggcttccaagtgaacctttcacacaaagtgctaatcagggtgtccaaaaaggcagagggccagaaccttaccacacttaagggaacaggatatatgtttttgaaacttccacctaagaaatgtttgtacctatgggtagaattttctctgagaattattttccctacagtatactattaa

SEQ ID NO: 2521 - DNA, 661 bp, Homo sapiens
  misc_feature [331]..[331]: Chromosome 5, SNP identification no. = rs4566781
  misc_feature [331]..[331]: allele = g, in linkage disequilibrium with rs17350454, respectively
  misc_feature [331]..[331]: n is a, t, c or g
tagaaagattgcacagtatgtcctttcatgatgagtgcaaggactctgagtttctgtccttccttgagcaacacatccagcaaacccacagcccaacacagcaccccaggtgaagacctcagctttgccctattcctaccgcctactcaccccttagttcaggcactgggcacaggattcagtgagaaggaaggctgattttgccatcagaatattttttactggcttccaagtgaacctttcacacaaagtgctaatcagggtgtccaaaaaggcagagggccagaaccttaccacacttaagggaacaggatatatgtttttgaaactnccacctaagaaatgtttgtacctatgggtagaattttctctgagaattattttccctacagtatactattaatcatgaggttgtggggtgagcaggcagataactccacctatgtattgccaaaggctgtctacatttatgaaagaatctgctcattgtacttggaaaactgacttgggttagttcgcagaaagttctcagctctctcacatcatccagagactggcaggctaaggctggtcagctttcagtgaggacccactgggcagggcagttaccaatcaagagagagcccagggagagctgggcacatggtgatgattgccttgg

SEQ ID NO: 2522 - DNA, 661 bp, Homo sapiens
  misc_feature [331]..[331]: Chromosome 5, SNP identification no. = rs4489054
  misc_feature [331]..[331]: allele = c, in linkage disequilibrium with rs17350454, respectively
  misc_feature [331]..[331]: n is a, t, c or g
aatgtgggttcctgggccagattgcctgggagtgaatcctggctctggttttggctaactgaatgatattgggaaattcattcagctgtgcggcaattgccctccctgtaaaagtgcaatagtagcagtaactacttcatagagtaattttaaattaaattcttcatggcatgagaagtgcttagaatagcaggtgaaacttatgtttttaaaattttactattgccaatgttttcatggtcattcttaatcataccttcagtagataggatgcttgttgagatggacagcgtgcctggattctccctgcaacttaactatcaaccagctntatgacctggaaaaaaaatgacttgaccttcctgggcttcagtcctcttatttatcaaaagagggattggcctagataatatctaaatgtcccaataatactaaaatgcgatgatcctattatatcattcgccaattgtgagtttagagaaaatactttaaaagggaatatcaaaaagacctaataaaaataaatgaaaaggagagattgtgtttaaatttctcttgacttggaatcaggacaactggatcgaggcctggctgcttactatccttcttaacccaccccacctttcactcttgtttttctttttggctcagtatggctctt

SEQ ID NO: 2523 - DNA, 661 bp, Homo sapiens
  misc_feature [331]..[331]: Chromosome 5, SNP identification no. = rs4235760
  misc_feature [331]..[331]: allele = g, in linkage disequilibrium with rs17350454, respectively
  misc_feature [331]..[331]: n is a, t, c or g
tgacctggaaaaaaaatgacttgaccttcctgggcttcagtcctcttatttatcaaaagagggattggcctagataatatctaaatgtcccaataatactaaaatgcgatgatcctattatatcattcgccaattgtgagtttagagaaaatactttaaaagggaatatcaaaaagacctaataaaaataaatgaaaaggagagattgtgtttaaatttctcttgacttggaatcaggacaactggatcgaggcctggctgcttactatccttcttaacccaccccacctttcactcttgtttttctttttggctcagtatggctcttggngagcatgttggcagaaagctgaaaaaggaaaaaaaaagctttgattgaaaacaagcagtttacagatgggttggatgtgtgcatggggtaggggtgcatgtagtcaccatctcgtctcaagaaacctgagagacattccatgttgagagaagtcacatgaagtgaagccagtggtcacatctaaaaggagaccaactcctgcacgttataagatttgaactcagaaagttgttatttatattcttgtttatttcaaaatatgcaacacgtgctagataagcaggtagacttatccagtgaatgctggataagcaggtagacttatcactt

SEQ ID NO: 2524 - DNA, 661 bp, Homo sapiens
  misc_feature [331]..[331]: Chromosome 5, SNP identification no. = rs6594805
  misc_feature [331]..[331]: allele = a, in linkage disequilibrium with rs17350454, respectively
  misc_feature [331]..[331]: n is a, t, c or g
ttgtgtttaaatttctcttgacttggaatcaggacaactggatcgaggcctggctgcttactatccttcttaacccaccccacctttcactcttgtttttctttttggctcagtatggctcttggtgagcatgttggcagaaagctgaaaaaggaaaaaaaaagctttgattgaaaacaagcagtttacagatgggttggatgtgtgcatggggtaggggtgcatgtagtcaccatctcgtctcaagaaacctgagagacattccatgttgagagaagtcacatgaagtgaagccagtggtcacatctaaaaggagaccaactcctgcacnttataagatttgaactcagaaagttgttatttatattcttgtttatttcaaaatatgcaacacgtgctagataagcaggtagacttatccagtgaatgctggataagcaggtagacttatcacttatccagtgaatgctgaagagctctctctccttgccaccctatggatcggattgcccccttcagcctgagttcttcccttcacccgttttgaatctggctcttgctcagtgggcagtatgatctaaaagtaagcctctctgtctcccaacaaggtaactctatttctgtttgtaaaaaaattttttataaaatatagaaaatttgg

SEQ ID NO: 2525 - DNA, 661 bp, Homo sapiens
  misc_feature [331]..[331]: Chromosome 5, SNP identification no. = rs4519914
  misc_feature [331]..[331]: allele = t, in linkage disequilibrium with rs17350454, respectively
  misc_feature [331]..[331]: n is a, t, c or g
atggggtaggggtgcatgtagtcaccatctcgtctcaagaaacctgagagacattccatgttgagagaagtcacatgaagtgaagccagtggtcacatctaaaaggagaccaactcctgcacgttataagatttgaactcagaaagttgttatttatattcttgtttatttcaaaatatgcaacacgtgctagataagcaggtagacttatccagtgaatgctggataagcaggtagacttatcacttatccagtgaatgctgaagagctctctctccttgccaccctatggatcggattgcccccttcagcctgagttcttcccttcacncgttttgaatctggctcttgctcagtgggcagtatgatctaaaagtaagcctctctgtctcccaacaaggtaactctatttctgtttgtaaaaaaattttttataaaatatagaaaatttggtcttcagtctttatcatatatggaaaaccttcccttttctgaagagtgattccattagctaaaatattaagtgatcgaatactaaaacaaccaacttgactaacaccttttagactattcactcacccctgcctctcataagggagtttgaaaatttagggagttccccttcagcaaagaggctattgtccaaatagtgcatcatatg

SEQ ID NO: 2526 - DNA, 661 bp, Homo sapiens
  misc_feature [331]..[331]: Chromosome 5, SNP identification no. = rs4597958
  misc_feature [331]..[331]: allele = g, in linkage disequilibrium with rs17350454, respectively
  misc_feature [331]..[331]: n is a, t, c or g
ctaaaaggagaccaactcctgcacgttataagatttgaactcagaaagttgttatttatattcttgtttatttcaaaatatgcaacacgtgctagataagcaggtagacttatccagtgaatgctggataagcaggtagacttatcacttatccagtgaatgctgaagagctctctctccttgccaccctatggatcggattgcccccttcagcctgagttcttcccttcacccgttttgaatctggctcttgctcagtgggcagtatgatctaaaagtaagcctctctgtctcccaacaaggtaactctatttctgtttgtaaaaaaatnttttataaaatatagaaaatttggtcttcagtctttatcatatatggaaaaccttcccttttctgaagagtgattccattagctaaaatattaagtgatcgaatactaaaacaaccaacttgactaacaccttttagactattcactcacccctgcctctcataagggagtttgaaaatttagggagttccccttcagcaaagaggctattgtccaaatagtgcatcatatgcacagctccatgcaggatgcttattaagacacccttattcatcctgagctgacccaaatgcaagcaaggctctctgagcttctttctcaagggcatag

SEQ ID NO: 2527 - DNA, 661 bp, Homo sapiens
  misc_feature [331]..[331]: Chromosome 5, SNP identification no. = rs4618418
  misc_feature [331]..[331]: allele = t, in linkage disequilibrium with rs17350454, respectively
  misc_feature [331]..[331]: n is a, t, c or g
gaagagtgattccattagctaaaatattaagtgatcgaatactaaaacaaccaacttgactaacaccttttagactattcactcacccctgcctctcataagggagtttgaaaatttagggagttccccttcagcaaagaggctattgtccaaatagtgcatcatatgcacagctccatgcaggatgcttattaagacacccttattcatcctgagctgacccaaatgcaagcaaggctctctgagcttctttctcaagggcatagtgagaacattccctaccacccagctgtgtagtgcagtttaatgaggaaatggatgtgaacctganttttagactagaaaacatacttccaattaggtgattattttaagcttctagctaaagatggcttaatgatcaattctgtcttgtagttggaaacatgaactgtttccaactcccaagagcttccagtttttccatcctttccatcatttctatgactctgtatgcatgttcttcatacatgagatgtgatcattaacaaaattcattctggtaccctttctgtatatgaattataatctacacttttattatcatcctttcatgttccataattccagtatttcctagctttccttccatggcattctgcttgtacaagtggaaaaatca

SEQ ID NO: 2528 - DNA, 661 bp, Homo sapiens
  misc_feature [331]..[331]: Chromosome 5, SNP identification no. = rs4368719
  misc_feature [331]..[331]: allele = a, in linkage disequilibrium with rs17350454, respectively
  misc_feature [331]..[331]: n is a, t, c or g
gcaagacagaaaacagggaggttgcttcttccctattgagagcacagaggaagcccctctcatggtgttgagttgtctgtctccatcatggtcacagccctcttgctaaaaccagaaagatgcctctaggtggtgattttaaaacattaaagattttaagagttgccaactgcaaagagttggcattctaagcaaactgtaaagaatcctgtaggcctggaattgagacctgagctaacttgttgctggtagtctcaccatgcttgaatcctcacgaatgcccccccagggcagcatgccaccagaggcccccatcttctgctttgctccntaggttatatgaccttgccttccagtcccaggaagcctgctgtcctcctgatgacaaaaggttcaagtgccctcagggatataagcatagaaggtaaattttacctattgcctgaaaacctaactcagcatatgagtcctttttgtgtctaccatttaatttttttgttatgttatatgaaaaacaaaacaggacaaagtgacttttaaatagagattgcagagggcttgattgggataaagcactttctgaggcatcatctcctttaactcttacacatcttggtgaggaggtagtatttttacaatgagcaaattgagattcagggta

SEQ ID NO: 2529 - DNA, 661 bp, Homo sapiens
  misc_feature [331]..[331]: Chromosome 5, SNP identification no. = rs6594807
  misc_feature [331]..[331]: allele = g, in linkage disequilibrium with rs17350454, respectively
  misc_feature [331]..[331]: n is a, t, c or g
caacatgaaaattattaatgagatactttacattctattttgtttttaccaagtctttgatcagtgtgtattttttagctacaacacatttcagttcagtccagccacatttcaggtgctcagcagcctctgactaatgcctgctgtagtggacagggaagccacaagtgtctgttgtagaatgctctatcttatgtatcttattctggtgtgggttttagacccaagttactgagggtttgggagaaagagcaactgtttggaggatttgatataacaccaggaaagtctgagtggtattagactttgtcaggacaagctgcttgggaanatcagacctagatgctgggtagttactctccatctagagattgccaggactgcattgttagaaggttatctgttacctctggaccagaataggctggttcttgggcagccctgctcctagctactacttcctgctctgcattactcactgccacttctctcccaagccacagttactgttccctgctacaagaaatcctgggactgggagtggggaggctggtctacaaaagattgagccaaagcacactttatagaagtttcttcgttgcacaccatttgaggggaacatactctagcatcacaaggtttagctaatgtccccatcaaa

SEQ ID NO: 2530 - DNA, 661 bp, Homo sapiens
  misc_feature [331]..[331]: Chromosome 5, SNP identification no. = rs4426906
  misc_feature [331]..[331]: allele = g, in linkage disequilibrium with rs17350454, respectively
  misc_feature [331]..[331]: n is a, t, c or g
ttttatttttgagtcccctttgtcctattaaataaaaagtattttattttcccagaggaaaatataataatccctgaatggtgattaaagggtttttccctggaagaggaaaaataatttcataccctgctaatatttacaatatagtcagacttaattaagttatctaaattgcagttaattcaggcatttgtttctagatgcagaagctttgagtcagactactagttaaattatttcctctggatgagggaaaccagtgtttctctctctcccctcagatgcttttatggccattgttcctttctgggagaatgttatgtcctttgcngggagctccctccctggccgtgccaaaacaccttaaatgccacttccttctgatcccaccctagcacttcccacttgatgcttcctaaatcgcgtcatttgctgcccaaattgcacacagggcacacttgtgtgcacactcaccaaagctcatgcattctggtaaaccatctaagccaaattagaggacaacacaaagaactgatgaatagagaaaggtgtccagtccaatgcaccaactcatttatcatacatcagcttccctttctatttacattttcctgatctcagtcatcagcctttaatactaatacacaattttatgattatt

SEQ ID NO: 2531 - DNA, 661 bp, Homo sapiens
  misc_feature [331]..[331]: Chromosome 5, SNP identification no. = rs4274972
  misc_feature [331]..[331]: allele = a, in linkage disequilibrium with rs17350454, respectively
  misc_feature [331]..[331]: n is a, t, c or g
tttttccctggaagaggaaaaataatttcataccctgctaatatttacaatatagtcagacttaattaagttatctaaattgcagttaattcaggcatttgtttctagatgcagaagctttgagtcagactactagttaaattatttcctctggatgagggaaaccagtgtttctctctctcccctcagatgcttttatggccattgttcctttctgggagaatgttatgtcctttgcagggagctccctccctggccgtgccaaaacaccttaaatgccacttccttctgatcccaccctagcacttcccacttgatgcttcctaaatcncgtcatttgctgcccaaattgcacacagggcacacttgtgtgcacactcaccaaagctcatgcattctggtaaaccatctaagccaaattagaggacaacacaaagaactgatgaatagagaaaggtgtccagtccaatgcaccaactcatttatcatacatcagcttccctttctatttacattttcctgatctcagtcatcagcctttaatactaatacacaattttatgattattatcctttcaacacaaaagttctagaattgggctcaagttcgccatttccatgattatcaaatgttttatataaaatttaaaaaacacagctt

SEQ ID NO: 2532 - DNA, 661 bp, Homo sapiens
  misc_feature [331]..[331]: Chromosome 5, SNP identification no. = rs269504
  misc_feature [331]..[331]: allele = a, in linkage disequilibrium with rs1455850, respectively
  misc_feature [331]..[331]: n is a, t, c or g
aaaagtcagatatgctgtaactccacagataagcaagtggagtaggagtagaaggattctcttctttctttcatgaagctcacagaataactcttcctttcctctacacacagaccaaagatgagttgggcaccatgagtttacacaatgccttttgtctggatacctcaaaacactttcttgaagataatttctgaaaagaagggtcagagagataagtgggaaatcaaagtgtggttctggagccccaccctgattttattatacactgaggagaaatggtctagcatgtcagttcatatttctgggcatttgtttcttttctcaccangactgcctcccaggggtaacttagcaaaatctagcattcaaaggacttaatcattcagggctactttgtgagatttcgactcactgaaggcagtttggtgagtaatttttcaaagctgatttttcattagaaagaagatgggaagttgggaattaagtgggaacaaaacacactggcaagaatatgtattacagctgctaaatcagacaaacaatgagtcatctggtctcaccacagcccttctctgtggaagctgcccatggactttgccacgtgtttgtatttgtgaacagcaaataggtttagaaacattatctaataaacaataaa

SEQ ID NO: 2533 - DNA, 661 bp, Homo sapiens
  misc_feature [331]..[331]: Chromosome 5, SNP identification no. = rs269505
  misc_feature [331]..[331]: allele = a, in linkage disequilibrium with rs1455850, respectively
  misc_feature [331]..[331]: n is a, t, c or g
tgtcagagccactggacagagatagatggtaccttctccgcacttggccatagccccagagcagtaaagggtctagaaactaattaaaagtcagatatgctgtaactccacagataagcaagtggagtaggagtagaaggattctcttctttctttcatgaagctcacagaataactcttcctttcctctacacacagaccaaagatgagttgggcaccatgagtttacacaatgccttttgtctggatacctcaaaacactttcttgaagataatttctgaaaagaagggtcagagagataagtgggaaatcaaagtgtggttctggagncccaccctgattttattatacactgaggagaaatggtctagcatgtcagttcatatttctgggcatttgtttcttttctcaccacgactgcctcccaggggtaacttagcaaaatctagcattcaaaggacttaatcattcagggctactttgtgagatttcgactcactgaaggcagtttggtgagtaatttttcaaagctgatttttcattagaaagaagatgggaagttgggaattaagtgggaacaaaacacactggcaagaatatgtattacagctgctaaatcagacaaacaatgagtcatctggtctcaccacagcccttctc

SEQ ID NO: 2534 - DNA, 661 bp, Homo sapiens
  misc_feature [331]..[331]: Chromosome 5, SNP identification no. = rs269506
  misc_feature [331]..[331]: allele = c, in linkage disequilibrium with rs1455850, respectively
  misc_feature [331]..[331]: n is a, t, c or g
atctattttcacatccctggaatgagagctgtagagaagagaatagagccaagcaggcttctgacaaagttataggaggtgtcagagccactggacagagatagatggtaccttctccgcacttggccatagccccagagcagtaaagggtctagaaactaattaaaagtcagatatgctgtaactccacagataagcaagtggagtaggagtagaaggattctcttctttctttcatgaagctcacagaataactcttcctttcctctacacacagaccaaagatgagttgggcaccatgagtttacacaatgccttttgtctggatacntcaaaacactttcttgaagataatttctgaaaagaagggtcagagagataagtgggaaatcaaagtgtggttctggagccccaccctgattttattatacactgaggagaaatggtctagcatgtcagttcatatttctgggcatttgtttcttttctcaccacgactgcctcccaggggtaacttagcaaaatctagcattcaaaggacttaatcattcagggctactttgtgagatttcgactcactgaaggcagtttggtgagtaatttttcaaagctgatttttcattagaaagaagatgggaagttgggaattaagtgggaacaa

SEQ ID NO: 2535 - DNA, 661 bp, Homo sapiens
  misc_feature [331]..[331]: Chromosome 5, SNP identification no. = rs12654556
  misc_feature [331]..[331]: allele = t, in linkage disequilibrium with rs1455850, respectively
  misc_feature [331]..[331]: n is a, t, c or g
tttccttgacccttttgtgggccttgagacacgggtgccttgcttactcagcccacagctctcaacccctcatgggaggggaagcacacaggtgagcaggtgcaagagccagagtgagtgcttttgcgcactgggaggagcaaaattccatgctggtctcatggcagggtctagtgggtagtacctgcgaccctgaaagccccagaaggagtgttacaggcagcactcttttagctttgccatccatggataggttaagtgtttaactgctcagtgaaccctctgtcttttcgtgagggtagagggtcagtgtgacagccttttgtatccngagctcttggacagcatccaggaaaaaccaggtcacacaaatgaattgaaagatagtaaatgtggaggatcttattgctaatggaagtggctctcattgggtaggggagctgaaaaggggatggagtggaaatgtcttcttcccctaaagtccagccttctccagcctgcggtttttatggatgcaggacgggggtcagggtgggccatgggtaattttgcaaaaggcaacattcgagcaggaaaacagaaatgcatgttctcactttgggctgcagttccaggcttaagggtggggcttcaccagggacctcgcccttctgcctagaat

SEQ ID NO: 2536 - DNA, 661 bp, Homo sapiens
  misc_feature [331]..[331]: Chromosome 5, SNP identification no. = rs12654590
  misc_feature [331]..[331]: allele = t, in linkage disequilibrium with rs1455850, respectively
  misc_feature [331]..[331]: n is a, t, c or g
ctagtgggtagtacctgcgaccctgaaagccccagaaggagtgttacaggcagcactcttttagctttgccatccatggataggttaagtgtttaactgctcagtgaaccctctgtcttttcgtgagggtagagggtcagtgtgacagccttttgtatcccgagctcttggacagcatccaggaaaaaccaggtcacacaaatgaattgaaagatagtaaatgtggaggatcttattgctaatggaagtggctctcattgggtaggggagctgaaaaggggatggagtggaaatgtcttcttcccctaaagtccagccttctccagcctgnggtttttatggatgcaggacgggggtcagggtgggccatgggtaattttgcaaaaggcaacattcgagcaggaaaacagaaatgcatgttctcactttgggctgcagttccaggcttaagggtggggcttcaccagggacctcgcccttctgcctagaatttctgtgccttctgtccctatcagggaggccttagaattttatttttggttcataatactaaacccctcaggttccagaacagtagagcactttcctggtcaagcttgcaagtgcctcaggaagaacagattttttaaaaagctagattcagactagctttgtgcaacca

SEQ ID NO: 2537 - DNA, 661 bp, Homo sapiens
  misc_feature [331]..[331]: Chromosome 5, SNP identification no. = rs11241320
  misc_feature [331]..[331]: allele = t, in linkage disequilibrium with rs1455850, respectively
  misc_feature [331]..[331]: n is a, t, c or g
gttccaggcttaagggtggggcttcaccagggacctcgcccttctgcctagaatttctgtgccttctgtccctatcagggaggccttagaattttatttttggttcataatactaaacccctcaggttccagaacagtagagcactttcctggtcaagcttgcaagtgcctcaggaagaacagattttttaaaaagctagattcagactagctttgtgcaaccagtataggtaattctgtcaggtacttgccttaaagcagtaatgtcaaaatgataagaaaaacaaactttgagtcagaaatattggatatcagagacaaagttatactntcttgcatccctgaagtatacccaaataaatgattgcttggtatccctgaagtatacccaaataaatgattgcttggtatgaaggcaaacagaccattatttggacagccactgtgttcaatcaagttatgtttagacatagtcccagtttttaaccactaaaatgaattcagaagtgctgttcctcttcctatatggcactcttacatatcatataactcggggaacagcctggagtgcagcagtttatttactgtcttttttatttccttattttcaaatactcaggtccaaggcttggctggctaggacagtgcttatcaatttctt

SEQ ID NO: 2538 - DNA, 661 bp, Homo sapiens
  misc_feature [331]..[331]: Chromosome 5, SNP identification no. = rs10519405
  misc_feature [331]..[331]: allele = g, in linkage disequilibrium with rs1455850, respectively
  misc_feature [331]..[331]: n is a, t, c or g
actgtgttcaatcaagttatgtttagacatagtcccagtttttaaccactaaaatgaattcagaagtgctgttcctcttcctatatggcactcttacatatcatataactcggggaacagcctggagtgcagcagtttatttactgtcttttttatttccttattttcaaatactcaggtccaaggcttggctggctaggacagtgcttatcaatttcttcacttggtagattttcccaagtaatgaaaaaagccaataacagggagagaactttcctcttggtattttaaacttttagggggtccccaaattgcactggattatctgccnctaattagagattaggaattggtgtgaagggagagagggagtgtctccacagagaggttacaccttcctttaaaagccataccactgtagattttgtgtatcacttcatggatgcctaaggatgggcacttttccttttaaaatcaacattgttgaatgttttctatattattctgttggtacctaccctctagagcacagtgtggcagactctattttccaaagatggccacaaaactttctctggcagtggcagcataaccttgctactcccgctttaagaactgaagtctatttctccaactccagcccttctccccttgaacccaa

SEQ ID NO: 2539 - DNA, 661 bp, Homo sapiens
  misc_feature [331]..[331]: Chromosome 5, SNP identification no. = rs10519406
  misc_feature [331]..[331]: allele = c, in linkage disequilibrium with rs1455850, respectively
  misc_feature [331]..[331]: n is a, t, c or g
ggcactcttacatatcatataactcggggaacagcctggagtgcagcagtttatttactgtcttttttatttccttattttcaaatactcaggtccaaggcttggctggctaggacagtgcttatcaatttcttcacttggtagattttcccaagtaatgaaaaaagccaataacagggagagaactttcctcttggtattttaaacttttagggggtccccaaattgcactggattatctgccactaattagagattaggaattggtgtgaagggagagagggagtgtctccacagagaggttacaccttcctttaaaagccataccacngtagattttgtgtatcacttcatggatgcctaaggatgggcacttttccttttaaaatcaacattgttgaatgttttctatattattctgttggtacctaccctctagagcacagtgtggcagactctattttccaaagatggccacaaaactttctctggcagtggcagcataaccttgctactcccgctttaagaactgaagtctatttctccaactccagcccttctccccttgaacccaagtagaccctttgactgctttgaccaaaagaatgtggaagttacattgtgttaattccaggtgtggctcttaagtgttaatttcctg

SEQ ID NO: 2540 - DNA, 661 bp, Homo sapiens
  misc_feature [331]..[331]: Chromosome 5, SNP identification no. = rs269503
  misc_feature [331]..[331]: allele = c, in linkage disequilibrium with rs1455850, respectively
  misc_feature [331]..[331]: n is a, t, c or g
tttattgggggagggtcttgcctcagtgaggctgctaactgatcagggtggtggctgctgaaggttgaggtggctgtggcaatttcttaaaataagacaacgtgaagtttgccacatcacttgactgtttctttcctgaaagatttctctgtagcacgcaatcctgtttgataacattttacccacagtagaacttctttcaaatatggagtcaatcttgtacatctgcatcagagctctcgggtgaccaggtgcattgtcaatcagcaacaatattttgaaaggaatctttttcttctgagcagtaggtctccacaggaatagggctatnacacttcctcatcctacatgttttcacaggagtagcacttttaatttccttcaagaacttttcctttgcattcacaacttggctaactgtttggcacaagagggttaactttcagcctgtctcattttaaacatgcctgcctcactaaatgtaatcatttctagcttttcattcaagaaattcattaagaatttcattaattccctggaacacttagcagccattatggctttatttcttagcctaatttaaacactattgtatctcacaggatagggaggcccaaggagagggaaagagatgggggaacagccagttggtagagcagtt

SEQ ID NO: 2541 - DNA, 661 bp, Homo sapiens
  misc_feature [331]..[331]: Chromosome 5, SNP identification no. = rs10463669
  misc_feature [331]..[331]: allele = c, in linkage disequilibrium with rs1455850, respectively
  misc_feature [331]..[331]: n is a, t, c or g
gtgttccacccttcgtgggagggagtgcaaggtgagcaggtgcaggaactggccagatgctttagcactggcaggagcaaactctgtgcaggccccatggagggcagagtgccagtgcaaccgccttttgtatgcacaattgtggcttccgagctcttgtccagcatccaggaaaaatgaggttgcatgaatgaactgaaagatgataaatgcaggggactttattgccaatgaaagtagctctcagtgggaaggggagctgaaaaggggacagagtgggtaggtaatcttcctctgaagcccagctgtctccggcaggatgcttctccgnagttatatgccatcaagctgtccttctgaagtcaagctgcttctctccaatgtccagctgtagtcctgtctaccagctgaatctggggtttttataggcacaggatagggtggagtgggagccatgggtggttttaggaaaagacaacatttgagcaggaaaacaggggtataagttctcactttggactgtggtttcaggcttttcagcataaggatggggtttccctggggacccatctttttctgcctagaatttctctgccctgtccctatcacttctattatgtgctttgcatgtggcaaacatacttctgtgctgagaatctca

SEQ ID NO: 2542 - DNA, 661 bp, Homo sapiens
  misc_feature [331]..[331]: Chromosome 5, SNP identification no. = rs12657417
  misc_feature [331]..[331]: allele = a, in linkage disequilibrium with rs1455850, respectively
  misc_feature [331]..[331]: n is a, t, c or g
cctatgttcagggaagtattacatgtttcccaggatatatttggaagctcaatactttcctcttcaatgcatagtggttcctgcccatttccttcttttacttaacaataaagggactaatatgtctgttattattttttaatgtcaggaaatcccagttatttctcacagtggcaactctttttctttgggaaaaaaaccaaggttctctaacagttgctctgactataactaaactgtaaagataacttttagagctcatcgaagaattaaagaggcacctcatttgcttataatgccttttatgtgtgggtcactgtacctatttctngaggacagaatttggtctataggaacatggtcaggcccagacctaattctgagtaggaaaaacatatcttggccatgaccttgagccccctgcctttcctcccttctcttgttccctcaccattaaatgcttgttagctgcctatattgctgctcttgactttctgctctcatcaccaaggcagacaactggttttcttttctttccattttcactgcagacattgaagttctgcagtttccagcaagcaaatcgggcacaaaaatagtctcctccagttgagtaggtgatggttacctggatgggagtaatacataggaggcttgtcac

SEQ ID NO: 2543 - DNA, 661 bp, Homo sapiens
  misc_feature [331]..[331]: Chromosome 5, SNP identification no. = rs4705733
  misc_feature [331]..[331]: allele = c, in linkage disequilibrium with rs1455850, respectively
  misc_feature [331]..[331]: n is a, t, c or g
aaaaagactggttcctatgtaaggctccggaatcccttatcctttccttttctcctcattttgggctcctctcttttgattatttttctcctatctgctccatgaaaggacacaaaactcctccaaggagtgctggtaagtgtaggctggtggagcctccccagaaatacacagagctgagcattacccttgagggattgggggagacccaccatcccaccatgtgctccatgacttctttatgatagtaccaggccttgggcccattgatcagcttgaaatctgatgacattgaattgctcattgggcctgaatttggagttgcatgggncacctcccacagagcctgtagcctagtggccaagtgtctgctaagctatgagggcagctaatagccttgccaaggcctacctcactagggtaaatgagtttgttgctatggcaaagtgtaactgtctttgtgcctatgaactgttatgtgagcctatcaaggaatgtcaagctgtttccagttggccaagttctattctgtctgccctgatgcttcaaggagataaaagacctcggcattctctacagcttgctggatatgaatcatcacatgcatcctgctttcaagcagctgctgcataatcctctgcaggcacagggtggaatgcag

SEQ ID NO: 2544 - DNA, 661 bp, Homo sapiens
  misc_feature [331]..[331]: Chromosome 5, SNP identification no. = rs11241323
  misc_feature [331]..[331]: allele = c, in linkage disequilibrium with rs1455850, respectively
  misc_feature [331]..[331]: n is a, t, c or g
ccagccccttggaatcaccattctactttctgtatctctgaatttgactgtttcagctgcctcatataaatgggatcatatgatatatatccttttgtgtctggcttttttttacttaagaacatcaaacattatgatgttttcaaggtccatccacattataacatgtgtcagaatttccttcctttttaaaggctgaataatatgctactttatgtatatactcaatttatctattcatttatcaatggacatttggattgtttttactttttggcaattatgaataatgctgcaatgaacatgggtgtacaaatatctgtctgagtcnctgcttttaattattttattttgggcattaaatatattttctaatgaacttaactagaagaaagatctgtctgcccttgaagtgtagaaattctcctttactggggctaataaagtttctggaaaatgcccagccttgaaagacaccagagaagagaatgccatctctaaataggatatttgactaacctagtgactcttaaaccaggttctacttctaatcacatgagtagcacctagaaattatagctgcctaggaatctgatggacaccacattaacaaggtaattaaacgtaacatcacaaattatgaggcaaactgacatcatgt

SEQ ID NO: 2545 - DNA, 661 bp, Homo sapiens
  misc_feature [331]..[331]: Chromosome 5, SNP identification no. = rs2605179
  misc_feature [331]..[331]: allele = g, in linkage disequilibrium with rs1455850, respectively
  misc_feature [331]..[331]: n is a, t, c or g
gctaaaaatcaagggagagactacatatatctacgtggtacctctgaaaaacacccaagaaaatgataacattggttgcttctgaaagggaattggatagttgggagtcgggggaagaagggaaaattttcactgtatattcttttgtaccttttgaattttaaaccgtgtgaatattatagctattaacaaaacaaaaccgatttttaaatgttaagttctcaaagaggagggcaggggagtgttggaataagtggagctgcaatctcttcttgtaacctgcagtcttaagcaaattgatgagagatacccaagtgcagatacagaaganagatccctaggaaatcattgaacaaggaagcagaactcagccttacgaattatgcgtactttttttcctgaaaaaaatatatcaagatatccctcatagatgtgtatgtgctcaggccccttcagcccatggctgggaagcagacaggcatgcagatgacgggctcaggtcaaatggtaaggggaagcacctgaaagccctggtgacactgagtgattcagccagaagagataaccatctgcgctaaattctgcaaaaatgcatgtgtgggtttctgtgatggccaccaccaattagggtgtttaatatttaaggcatgtttaatattgt

SEQ ID NO: 2546 - DNA, 661 bp, Homo sapiens
  misc_feature [331]..[331]: Chromosome 5, SNP identification no. = rs2591258
  misc_feature [331]..[331]: allele = g, in linkage disequilibrium with rs1455850, respectively
  misc_feature [331]..[331]: n is a, t, c or g
cacatgcatttttgcagaatttagcgcagatggttatctcttctggctgaatcactcagtgtcaccagggctttcaggtgcttccccttaccatttgacctgagcccgtcatctgcatgcctgtctgcttcccagccatgggctgaaggggcctgagcacatacacatctatgagggatatcttgatatatttttttcaggaaaaaaagtacgcataattcgtaaggctgagttctgcttccttgttcaatgatttcctagggatctatcttctgtatctgcacttgggtatctctcatcaatttgcttaagactgcaggttacaagaagngattgcagctccacttattccaacactcccctgccctcctctttgagaacttaacatttaaaaatcggttttgttttgttaatagctataatattcacacggtttaaaattcaaaaggtacaaaagaatatacagtgaaaattttcccttcttcccccgactcccaactatccaattccctttcagaagcaaccaatgttatcattttcttgggtgtttttcagaggtaccacgtagatatatgtagtctctcccttgatttttagcaactgacttaagtacactatatgtaaagttctatttcatgtttttgtatttgacgttgtgtat

SEQ ID NO: 2547 - DNA, 661 bp, Homo sapiens
  misc_feature [331]..[331]: Chromosome 5, SNP identification no. = rs4705524
  misc_feature [331]..[331]: allele = c, in linkage disequilibrium with rs1455850, respectively
  misc_feature [331]..[331]: n is a, t, c or g
ttgttttgttaatagctataatattcacacggtttaaaattcaaaaggtacaaaagaatatacagtgaaaattttcccttcttcccccgactcccaactatccaattccctttcagaagcaaccaatgttatcattttcttgggtgtttttcagaggtaccacgtagatatatgtagtctctcccttgatttttagcaactgacttaagtacactatatgtaaagttctatttcatgtttttgtatttgacgttgtgtatacactttatgcaggaaccgtctatctgggaaggttggctcttttttgacagcttcaggagatgcccacagngactagggatggaaaatagactgtctgccaaccgtaaagaaaagtgcagtcaactcttccatatgtggggagacggatctcacagccaggggatcacccttacatcctcctcagggtttaagatcacacggtaacttcccaatgccaaacctagcactggccacctggtaggtctcaatagatgtctgccaatcggtggataagaaaaaaatgttggacctactcaattcacaataaacatgttgcagaaccagtaaaagctgtttagaatccattaaaagatttttgttatgaaaccaatttagccgtatctttttcctgaaccaagag

SEQ ID NO: 2548 - DNA, 661 bp, Homo sapiens
  misc_feature [331]..[331]: Chromosome 5, SNP identification no. = rs10447263
  misc_feature [331]..[331]: allele = t, in linkage disequilibrium with rs1455850, respectively
  misc_feature [331]..[331]: n is a, t, c or g
gcaatcaagcaccaggtctgatgggcaaaggtgaggccagagactgcaggccaggcaatagctaagatgcttagaaggtcaacagctaggggaagagcagcaaatagggcaagatgagatgctcaggtgataggtcaggaaccaaggcagggagctgagaagtttgttcctattggctatctagccggggaagaatttggccagctctcagtaggtgtacaagccaagtgataggtggtgtagtcctttaagatctttgttttggcaaaccatacctttttaaaggtgactgtacacttggtgtgttgctcaagtccctcctaggactccnacttgaaatcagtccatttatcagccatccaagaaaataagtatcacactttatagttaaattctacacactgcaggatcaagaactcgattacatattttttctacttttgaaaagtaataagacagctagaacaaaaataacaaaaacactttgatacaaaagaccttagaagatacgggtcatgtttgtttgtgactgtaaactgcttagctgaaagtgattgacactttatttgaaggcttaaaatgaaatccttcagactagtttcactgttctgctatcagaatcagattgaaacaccaggtaggccatattcaagcccagggt

SEQ ID NO: 2549 - DNA, 661 bp, Homo sapiens
  misc_feature [331]..[331]: Chromosome 5, SNP identification no. = rs7715232
  misc_feature [331]..[331]: allele = c, in linkage disequilibrium with rs1455850, respectively
  misc_feature [331]..[331]: n is a, t, c or g
acaaaggttaagccttattatagaacagctgaggttacatggatgacgtcaaaagtccttatatttagaaaccttctcaaattgccttgtgtattgtcagccctctcaatctgtcactactggcagccaccagtggatctggcgtaagaagcctgtggttttgtgtccctcccacaggcccacaaactttggacttttggttctcttgctgactccctgaccccgttcctgaacccaagaaattcactcccatggtggctggcactgcacccccacacccctccctatgttcccttaggtgtctgctttcaggtagcactgaaacagtcanagctattttttaaaatgtaactctcctagaatttagccatgctatgctatcttgctattttgaaagctgaatctattcaatatatattttcaaatatacatttgtctgctctatattcttttacctctacctgctacctattgcttcagatctcctgcatcagacaaattaagaaacaccagattaagatgaccataaagaggagtgtttgtggggatgtagcagaaggcaaagaccaaatgtctcaccgtcattgtcatcttcatcctaaagaaaaggaactaagattgatagtgccggggcctgttccaggctctttttttttttttt

SEQ ID NO: 2550 - DNA, 661 bp, Homo sapiens
  misc_feature [331]..[331]: Chromosome 5, SNP identification no. = rs12519220
  misc_feature [331]..[331]: allele = a, in linkage disequilibrium with rs1455850, respectively
  misc_feature [331]..[331]: n is a, t, c or g
tggccctgaatctgggctggctttgtgacttgaccaatagaatgtggtggaaataatattgtgctagttccaaggtaagacttgtggaggtcttgaacacttctgctctctctctagtgtcccagccagccccagtgtggaaaagcctgggctagcctgctggaaggtgaggagaccacatgaagaaacaacaagttgaccaagaggccaccctatgggtcccagtcaacccggcagacccataattgagcctagtcaagaccagaactgcccagttaggctcagtcgaaattgctgatctgcaaaattgctagctacataaatagtggangttttaagccacaagttttagggtagtttatcttgcagcacaaactatctgatagagtagctagtggttatttccaagactgattctggaagaatgaatatttgagcaaattggttcacttccaaaaactaagaattgatattgttttccactcccatcttccattttccaatttccaaggcagggatctgagtagatattgagtagatggatatggagtagatattgatactgagtagatgggaagaaatccagaaaaattccacataggtacagttaaaatttcactttaaaaatggctcaagaaaagactgtatagtctaagaggtg

SEQ ID NO: 2551 - DNA, 661 bp, Homo sapiens
  misc_feature [331]..[331]: Chromosome 5, SNP identification no. = rs12516512
  misc_feature [331]..[331]: allele = a, in linkage disequilibrium with rs1455850, respectively
  misc_feature [331]..[331]: n is a, t, c or g
tttgtgacttgaccaatagaatgtggtggaaataatattgtgctagttccaaggtaagacttgtggaggtcttgaacacttctgctctctctctagtgtcccagccagccccagtgtggaaaagcctgggctagcctgctggaaggtgaggagaccacatgaagaaacaacaagttgaccaagaggccaccctatgggtcccagtcaacccggcagacccataattgagcctagtcaagaccagaactgcccagttaggctcagtcgaaattgctgatctgcaaaattgctagctacataaatagtggatgttttaagccacaagttttanggtagtttatcttgcagcacaaactatctgatagagtagctagtggttatttccaagactgattctggaagaatgaatatttgagcaaattggttcacttccaaaaactaagaattgatattgttttccactcccatcttccattttccaatttccaaggcagggatctgagtagatattgagtagatggatatggagtagatattgatactgagtagatgggaagaaatccagaaaaattccacataggtacagttaaaatttcactttaaaaatggctcaagaaaagactgtatagtctaagaggtggacttccaggcaaacatatag

SEQ ID NO: 2552 - DNA, 661 bp, Homo sapiens
  misc_feature [331]..[331]: Chromosome 5, SNP identification no. = rs17137700
  misc_feature [331]..[331]: allele = g, in linkage disequilibrium with rs1455850, respectively
  misc_feature [331]..[331]: n is a, t, c or g
cataattgagcctagtcaagaccagaactgcccagttaggctcagtcgaaattgctgatctgcaaaattgctagctacataaatagtggatgttttaagccacaagttttagggtagtttatcttgcagcacaaactatctgatagagtagctagtggttatttccaagactgattctggaagaatgaatatttgagcaaattggttcacttccaaaaactaagaattgatattgttttccactcccatcttccattttccaatttccaaggcagggatctgagtagatattgagtagatggatatggagtagatattgatactgagtagntgggaagaaatccagaaaaattccacataggtacagttaaaatttcactttaaaaatggctcaagaaaagactgtatagtctaagaggtggacttccaggcaaacatatagaatgagatgtgtgatcaagttgggagtttgtgaaccatgatcttgaaagtccctgtattgtccactgtttaatgttatgctgttttatgggcacaaaagtggggaattgcagttgacttccttagagaacccttaggaatccagcactctcttcctgcctgctataaattacagctagtgaagaaagaaagaatatgtctatttttccagtaacagaat

SEQ ID NO: 2553 - DNA, 661 bp, Homo sapiens
  misc_feature [331]..[331]: Chromosome 5, SNP identification no. = rs7703838
  misc_feature [331]..[331]: allele = c, in linkage disequilibrium with rs1455850, respectively
  misc_feature [331]..[331]: n is a, t, c or g
atatgtctatttttccagtaacagaataaataatattatgaattaaaaaaattatttcaggtagagcatgactagtttttcttataccttgtgctaaaagattgctggcactgttgccatttcctagaaaaaaagtcactctggtctctggcccaggtcctgacataaacctagttccttttcttctgctgtgatcagtccagataaatttgcacagagcagctgtttctacctgctgctttcatgctgacgaggtatgcattcctctgatctagtgcctgtggcggtttgattagtcataattagacctcagaaatcagactcttttcanctcaatctccaaagcaaaattttctataaattcaacatcagtttatgtaggaccttaaagttaaaacaacaacaacaacaaaaaactccaaagaaatcttttgacttcctgataccttttacttctctaatctaaatgcttaggaagcatcaggattaattaggctagttcctgctactcagcagccggaagaagccgaaagaggtggagttttgacctgcctctgaaccttctacatgggcagctggccctgggcaggtgtacataattaacaggtgtgagctggcagggtactcggaaggtcctgttagcagttcccatgcaatcttc

SEQ ID NO: 2554 - DNA, 661 bp, Homo sapiens
  misc_feature [331]..[331]: Chromosome 5, SNP identification no. = rs7721559
  misc_feature [331]..[331]: allele = c, in linkage disequilibrium with rs1455850, respectively
  misc_feature [331]..[331]: n is a, t, c or g
caggtagagcatgactagtttttcttataccttgtgctaaaagattgctggcactgttgccatttcctagaaaaaaagtcactctggtctctggcccaggtcctgacataaacctagttccttttcttctgctgtgatcagtccagataaatttgcacagagcagctgtttctacctgctgctttcatgctgacgaggtatgcattcctctgatctagtgcctgtggcggtttgattagtcataattagacctcagaaatcagactcttttcatctcaatctccaaagcaaaattttctataaattcaacatcagtttatgtaggaccttnaagttaaaacaacaacaacaacaaaaaactccaaagaaatcttttgacttcctgataccttttacttctctaatctaaatgcttaggaagcatcaggattaattaggctagttcctgctactcagcagccggaagaagccgaaagaggtggagttttgacctgcctctgaaccttctacatgggcagctggccctgggcaggtgtacataattaacaggtgtgagctggcagggtactcggaaggtcctgttagcagttcccatgcaatcttctgaaagtagggtcttgagctgtcaatgattttcttatatttgcatgagtcaatgcac

SEQ ID NO: 2555 - DNA, 661 bp, Homo sapiens
  misc_feature [331]..[331]: Chromosome 5, SNP identification no. = rs7703997
  misc_feature [331]..[331]: allele = c, in linkage disequilibrium with rs1455850, respectively
  misc_feature [331]..[331]: n is a, t, c or g
aagattgctggcactgttgccatttcctagaaaaaaagtcactctggtctctggcccaggtcctgacataaacctagttccttttcttctgctgtgatcagtccagataaatttgcacagagcagctgtttctacctgctgctttcatgctgacgaggtatgcattcctctgatctagtgcctgtggcggtttgattagtcataattagacctcagaaatcagactcttttcatctcaatctccaaagcaaaattttctataaattcaacatcagtttatgtaggaccttaaagttaaaacaacaacaacaacaaaaaactccaaagaaancttttgacttcctgataccttttacttctctaatctaaatgcttaggaagcatcaggattaattaggctagttcctgctactcagcagccggaagaagccgaaagaggtggagttttgacctgcctctgaaccttctacatgggcagctggccctgggcaggtgtacataattaacaggtgtgagctggcagggtactcggaaggtcctgttagcagttcccatgcaatcttctgaaagtagggtcttgagctgtcaatgattttcttatatttgcatgagtcaatgcacatgatcacacgtcatttgccatgccagagttgtctctcag

SEQ ID NO: 2556 - DNA, 661 bp, Homo sapiens
  misc_feature [331]..[331]: Chromosome 5, SNP identification no. = rs7704303
  misc_feature [331]..[331]: allele = c, in linkage disequilibrium with rs1455850, respectively
  misc_feature [331]..[331]: n is a, t, c or g
gctgctttcatgctgacgaggtatgcattcctctgatctagtgcctgtggcggtttgattagtcataattagacctcagaaatcagactcttttcatctcaatctccaaagcaaaattttctataaattcaacatcagtttatgtaggaccttaaagttaaaacaacaacaacaacaaaaaactccaaagaaatcttttgacttcctgataccttttacttctctaatctaaatgcttaggaagcatcaggattaattaggctagttcctgctactcagcagccggaagaagccgaaagaggtggagttttgacctgcctctgaaccttcnacatgggcagctggccctgggcaggtgtacataattaacaggtgtgagctggcagggtactcggaaggtcctgttagcagttcccatgcaatcttctgaaagtagggtcttgagctgtcaatgattttcttatatttgcatgagtcaatgcacatgatcacacgtcatttgccatgccagagttgtctctcagagagttcacgatatggacggtggtggcctaacattcaccagcatctagactgctaccaagaactgaaacatatcatttctcttcttaataaactccctttaggtattttctagtccacccggctcaagcaagttcac

SEQ ID NO: 2557 - DNA, 661 bp, Homo sapiens
  misc_feature [331]..[331]: Chromosome 5, SNP identification no. = rs2416401
  misc_feature [331]..[331]: allele = c, in linkage disequilibrium with rs1455850, respectively
  misc_feature [331]..[331]: n is a, t, c or g
ggaagaagccgaaagaggtggagttttgacctgcctctgaaccttctacatgggcagctggccctgggcaggtgtacataattaacaggtgtgagctggcagggtactcggaaggtcctgttagcagttcccatgcaatcttctgaaagtagggtcttgagctgtcaatgattttcttatatttgcatgagtcaatgcacatgatcacacgtcatttgccatgccagagttgtctctcagagagttcacgatatggacggtggtggcctaacattcaccagcatctagactgctaccaagaactgaaacatatcatttctcttcttaatanactccctttaggtattttctagtccacccggctcaagcaagttcacacatcgacaaatatagggctgttggtggagtgggtaggggctggctggggtggaggtacagcatggtagcatactcccatgacatatttgcactcccctcgaactttgtgtagagatgaacatctgatcaaaatgaatacaaaatctatctaatgatcctgtagaaaccacgcctattaattaatccactgttgacaatgtcaggtgacacgttataacaacgccattgtgtttctgagctttatttgttatataccttaaaataagacagtttctacaattat

SEQ ID NO: 2558 - DNA, 661 bp, Homo sapiens
  misc_feature [331]..[331]: Chromosome 5, SNP identification no. = rs2416402
  misc_feature [331]..[331]: allele = g, in linkage disequilibrium with rs1455850, respectively
  misc_feature [331]..[331]: n is a, t, c or g
ggagttttgacctgcctctgaaccttctacatgggcagctggccctgggcaggtgtacataattaacaggtgtgagctggcagggtactcggaaggtcctgttagcagttcccatgcaatcttctgaaagtagggtcttgagctgtcaatgattttcttatatttgcatgagtcaatgcacatgatcacacgtcatttgccatgccagagttgtctctcagagagttcacgatatggacggtggtggcctaacattcaccagcatctagactgctaccaagaactgaaacatatcatttctcttcttaataaactccctttaggtattttntagtccacccggctcaagcaagttcacacatcgacaaatatagggctgttggtggagtgggtaggggctggctggggtggaggtacagcatggtagcatactcccatgacatatttgcactcccctcgaactttgtgtagagatgaacatctgatcaaaatgaatacaaaatctatctaatgatcctgtagaaaccacgcctattaattaatccactgttgacaatgtcaggtgacacgttataacaacgccattgtgtttctgagctttatttgttatataccttaaaataagacagtttctacaattataactttaaacaggtgttca

SEQ ID NO: 2559 - DNA, 661 bp, Homo sapiens
  misc_feature [331]..[331]: Chromosome 5, SNP identification no. = rs2416403
  misc_feature [331]..[331]: allele = t, in linkage disequilibrium with rs1455850, respectively
  misc_feature [331]..[331]: n is a, t, c or g
cctgcctctgaaccttctacatgggcagctggccctgggcaggtgtacataattaacaggtgtgagctggcagggtactcggaaggtcctgttagcagttcccatgcaatcttctgaaagtagggtcttgagctgtcaatgattttcttatatttgcatgagtcaatgcacatgatcacacgtcatttgccatgccagagttgtctctcagagagttcacgatatggacggtggtggcctaacattcaccagcatctagactgctaccaagaactgaaacatatcatttctcttcttaataaactccctttaggtattttctagtccaccnggctcaagcaagttcacacatcgacaaatatagggctgttggtggagtgggtaggggctggctggggtggaggtacagcatggtagcatactcccatgacatatttgcactcccctcgaactttgtgtagagatgaacatctgatcaaaatgaatacaaaatctatctaatgatcctgtagaaaccacgcctattaattaatccactgttgacaatgtcaggtgacacgttataacaacgccattgtgtttctgagctttatttgttatataccttaaaataagacagtttctacaattataactttaaacaggtgttcaatattttgaa

SEQ ID NO: 2560 - DNA, 661 bp, Homo sapiens
  misc_feature [331]..[331]: Chromosome 5, SNP identification no. = rs2416406
  misc_feature [331]..[331]: allele = t, in linkage disequilibrium with rs1455850, respectively
  misc_feature [331]..[331]: n is a, t, c or g
ggtggtggcctaacattcaccagcatctagactgctaccaagaactgaaacatatcatttctcttcttaataaactccctttaggtattttctagtccacccggctcaagcaagttcacacatcgacaaatatagggctgttggtggagtgggtaggggctggctggggtggaggtacagcatggtagcatactcccatgacatatttgcactcccctcgaactttgtgtagagatgaacatctgatcaaaatgaatacaaaatctatctaatgatcctgtagaaaccacgcctattaattaatccactgttgacaatgtcaggtgacacnttataacaacgccattgtgtttctgagctttatttgttatataccttaaaataagacagtttctacaattataactttaaacaggtgttcaatattttgaagctaataaagtatggacaagtgcttataaggaccttttacatttctggaggtttttatagtaagtaaataattttatgcagcttgtgcatttatataattaaaagtttttttgataggtgcagcaaaccaccatggcatgtgtatacctatgtaagaaacctgcacattctgcacatgtatcccagaacttaaagtataattttttaaaaaagtttttaagttttaaga

SEQ ID NO: 2561 - DNA, 661 bp, Homo sapiens
  misc_feature [331]..[331]: Chromosome 5, SNP identification no. = rs2605178
  misc_feature [331]..[331]: allele = c, in linkage disequilibrium with rs1455850, respectively
  misc_feature [331]..[331]: n is a, t, c or g
gttggaacagagcccagtagatagtcagctctcaataaagcttgcgtatgaatactatttttaaattgttgcttctattattgttattgtttgagagcaaaatatttaaacacagctgcagttaattaagaacctccgtagtgaggttcctgactggccaatgactcagctactaagagaaagaggaaacgccagtagttgctgctaaaacatgcacacccttacacaggtgcctggaaaccctgagaattttatgcatttactttagcttttcccagaattatatccactgttttagaaaattttaacttactaataaaatattattatncatgattcttgtccccaaagtcttcctttgaagtactcctatttataccatatagctcttaagtttctctgtttgatgatagcgtattgattattcacatccagagattgttttttattgtgttatatctactcttgagatttttaaaaattcttgtttctttcttcatgttgtatagttttgtttcacataaagatctattatcttgcattaatgtttcttaaatactgttttttacacttcttaaaacttaaaaacttttttaaaaaattatactttaagttctgggatacatgtgcagaatgtgcaggtttcttacataggtataca

SEQ ID NO: 2562 - DNA, 661 bp, Homo sapiens
  misc_feature [331]..[331]: Chromosome 5, SNP identification no. = rs1445697
  misc_feature [331]..[331]: allele = t, in linkage disequilibrium with rs1455850, respectively
  misc_feature [331]..[331]: n is a, t, c or g
gtggatataattctgggaaaagctaaagtaaatgcataaaattctcagggtttccaggcacctgtgtaagggtgtgcatgttttagcagcaactactggcgtttcctctttctcttagtagctgagtcattggccagtcaggaacctcactacggaggttcttaattaactgcagctgtgtttaaatattttgctctcaaacaataacaataatagaagcaacaatttaaaaatagtattcatacgcaagctttattgagagctgactatctactgggctctgttccaaccactttatatgtaatacagcattgatcctcactagaatgangaagtggggactattattgtcctcattttacaaaggatctaagatagttactattcttgagctcagattaacttttaccacttttcaaatgtcagagtggtgtatggtaataagaagcgtaggccagtgcagtggctcacgcctgtaatcccagcactttgggaggccaaggctggcagatcacttgaagtcaggagtttgagatcagcccagccaacaggatgaaacctcgtcttactaaaaatataaaaattagcccagctacccaggaggttgtggtaggagaattgtttgaacctgggaagtggaggttgcagtgagccaagattg

SEQ ID NO: 2563 - DNA, 661 bp, Homo sapiens
  misc_feature [331]..[331]: Chromosome 5, SNP identification no. = rs1455850
  misc_feature [331]..[331]: allele = g, c
  misc_feature [331]..[331]: n is a, t, c or g
aatattggtatcaagagaccaaagggaccatctgtaagtccttcacagaccaccagggttgcactcagtgaaacccctcttcttaatgatgctctgtcatggttttgaaggtttatggaaaagagaattctgtaacctttctggcaaaccctcctaggtgttagaaatgctgactcaggaaaacctgcgtctgttaatttttcgcttgaattcttcctgctgcaggtaaaacctaattctgtttgcctttttgcagtgtgggagaaaaaaagatgttaagattggatgcctataatctcatctaatgagtaatagatataagatttgaacnaagacctgattctaaagcatgccttatttttttttcttaaccaatgaacttccttgcctagttaatgggattgttcagtactacttagggatttatttccctaagtagcttggattaaaggtaatgcccactattggccataaatccttgtgactctagctctatttccaggagtccagggcagtaaggcagcccacaggctgcctttggaaatactggaaatggaagcagaagactgtaatgcgtcatagcccagtgtgcttcctgagctagctagaaaactctgtccctgggcaccccaggcctttggtacagttttacacttttttt

SEQ ID NO: 2564 - DNA, 661 bp, Homo sapiens
  misc_feature [331]..[331]: Chromosome 5, SNP identification no. = rs1455849
  misc_feature [331]..[331]: allele = a, in linkage disequilibrium with rs1455850, respectively
  misc_feature [331]..[331]: n is a, t, c or g
aattacatgaagtgaaaattatcttttaggcaaatataataggttaatattggtatcaagagaccaaagggaccatctgtaagtccttcacagaccaccagggttgcactcagtgaaacccctcttcttaatgatgctctgtcatggttttgaaggtttatggaaaagagaattctgtaacctttctggcaaaccctcctaggtgttagaaatgctgactcaggaaaacctgcgtctgttaatttttcgcttgaattcttcctgctgcaggtaaaacctaattctgtttgcctttttgcagtgtgggagaaaaaaagatgttaagattggntgcctataatctcatctaatgagtaatagatataagatttgaacgaagacctgattctaaagcatgccttatttttttttcttaaccaatgaacttccttgcctagttaatgggattgttcagtactacttagggatttatttccctaagtagcttggattaaaggtaatgcccactattggccataaatccttgtgactctagctctatttccaggagtccagggcagtaaggcagcccacaggctgcctttggaaatactggaaatggaagcagaagactgtaatgcgtcatagcccagtgtgcttcctgagctagctagaaaactct

SEQ ID NO: 2565 - DNA, 661 bp, Homo sapiens
  CTNNAP1
  misc_feature [331]..[331]: Chromosome 5, SNP identification no. = rs1809211
  misc_feature [331]..[331]: allele = a, in linkage disequilibrium with rs1455850, respectively
  misc_feature [331]..[331]: n is a, t, c or g
ttgttgcagtaatagaatgaacttaaacatttaatacttgtaaataatttaaaatatatgcaacatataaaaggcactgtatatgtttgttttaaaaaatactgctagtcccataagcttagatggttttgcaactgagcactaaatttatctctaagctttctagcagttaaggaaaaaataaaaatatgacagccttcataatttacattaactgattgaaatgagcctgctaattctgaaacagagccaataatttacctggcacaaatgcctaaagggaatttatcccaggagacattaaaaacagaataaaacacattttcaaaanggcttaagtaagatttgtaggagagttcttcgtctggcgaactctctcatggatacttcatcagagaaagctatttcttctggaagctaagataaagatgttcatgttcgtagctttctgatgtgtaaccctgaatcagtggttttcagcaggagcagttttgctccctgtgagaacatttgtcaatgtgtggtgactttatggttgtcacagctgggggtgggggagcatgctatcaccatttagtagacagaggccagggatactgctaatactgcacaggacatacctatactataaaaatttattcgtgtttatctgaaattcaaa

SEQ ID NO: 2566 - DNA, 661 bp, Homo sapiens
  misc_feature [331]..[331]: Chromosome 5, SNP identification no. = rs269500
  misc_feature [331]..[331]: allele = a, in linkage disequilibrium with rs1455850, respectively
  misc_feature [331]..[331]: n is a, t, c or g
gaagtcatagaatggaagaaacaaagaggaagcaaggagggacgctgactggaaagactctctgggagggaaatgggaaactggttatttggcagaataaagaatttgaaggtggaataaattagaagaaaaacaagagaattgatggaattgtaaaagaagaaaaagaaataggctcacactcagaaagagccctagttctgcctaatcaatgtttttatttctcctcatcaaaaataatttctattatatctcctgagcacggaaacattggtaagaactattaacttaggtcagtaaagtgggataggtaaattatttggaatcaaantcttagtggagttttcatctaataagaacagaatacactaatggccatttcatggggctactgcaagcagaaacattgtgtgtgatatgtctccaaatgtgatcatttcaaatatcatttgagaacccatgaaaatctttagtaaatttaataatcctagaatcttcctttttttctagtctctatgaaattgctctcaaaagttaacaaatttcagtaatatagcaatcagatgacatttctatatttatatggcggttgggctcagagatagcctttacaagtgatgacaagattcaggctttagtaactatagtctcacagcaaagt

SEQ ID NO: 2567 - DNA, 661 bp, Homo sapiens
  ADAMTS19
  misc_feature [331]..[331]: Chromosome 5, SNP identification no. = rs7707606
  misc_feature [331]..[331]: allele = g, in linkage disequilibrium with rs3909548, respectively
  misc_feature [331]..[331]: n is a, t, c or g
atctcgaaagcttggattcctcacctttaaaatagaggctacatcttctatctcacagaatgctgtgaaactgtgacagtcgcaaagcagctagttaactggcattttatctacaccagtttctatcacatcctgttattccccatggagaggttacagattttcccagaatcactgatagtaaatgatagtgctagactctacctcagatcttctgactgtactgtcacctttcttttataacattgtatttttatacaatagataaaaatacaactagaaaactgaatgtgagaacactgtcttcagatgaagatatagaattaaattngaaatgacaaacacaaacttagaaataattttatttaccaatatttcaactttaaaacaatagaatattgtgctcattcgctgagtcaaaaggtttgtgcattttaaatgagttaggctatgttaatgttacagaatattattaagcaagtgcttccgttgataaattatagttatttactaagcttatatttgaaaagctacatgggggataaaaagtaaaaataatttttaccaccttctcaattacacactttttcctgttgatatagttatgtagatggtttggtaggtcagtaggtaggtatgtagatcatggaagaaaatacat

SEQ ID NO: 2568 - DNA, 661 bp, Homo sapiens
  ADAMTS19
  misc_feature [331]..[331]: Chromosome 5, SNP identification no. = rs7446814
  misc_feature [331]..[331]: allele = c, in linkage disequilibrium with rs3909548, respectively
  misc_feature [331]..[331]: n is a, t, c or g
ttatgtaaaatatgaaatatattgaaatatatctaatgacaaatatgtaagacatatggacaatattatagactatattacaattcattaaagaagaccttgatgaagagatacactctactcatggtctgaaagactaagtatgatacaaatgttcatttccctcaaactgatctattaatacaatgcattccattaaaattctaacgagagttttgaaggaactagataggatgattctagatgtatagaggaacataggtctgaaaattgccaaggtactgttgaagaaagaatatgggaaggaaggaaacctgcgctatcagatacnaagatatagtacacagtaaatatgaaaatgcagttgcctgtatttggaaattgatgtatactgcagatcactgggtaaggcatagttcaatacattatgttaagttggttattcacatgaaaaaaatttgagattaattcatatggtttaaatttgcaaaaacaggagtctatttttgatgtagagacagacagatttcttagagagtacacagaaatgttaatcataaagaagctatattaatatttaaaatgtatgcatattaaaagacatagtaatgaaagtgaacaaaagcaagcttctgtcagggagaggataccatatttcatg

SEQ ID NO: 2569 - DNA, 661 bp, Homo sapiens
  ADAMTS19
  misc_feature [331]..[331]: Chromosome 5, SNP identification no. = rs11742295
  misc_feature [331]..[331]: allele = a, in linkage disequilibrium with rs3909548, respectively
  misc_feature [331]..[331]: n is a, t, c or g
ttccaccattatcatagccctttccatgttcagtggcagtaacacttagcttctgtcttgttcgaaaagtaaatgaaaaatattactgttattctcattttcattttaaagcacttgttcattttaaagcacttatttctataattatagaaggatcacctgaagcagtaagcaatatgcaaagtagttagtgagatgtttaaggtatccaaaacaagtcttagtgagaaatacaggaacacctagcttgctaaactcactacacagatgaactttattcacttttgtatatcctttaaatagttaagcccatttttctattaaatggctntatgtacaatatattctgtgcatgctgtttgtcataacagtctagagaagagcactcagagcatgtgatatttcagacacaccatcagtagctgcatcagcagcccttctgtaggccctaatgagttcctaaggaacatgcatgattttgtatggctgccttcacatgaatcaggactcctatgacatcaaataccactttaaaatatattacagagttgtatacaaagttgtattacaatgtcaagcacaaatatatctacactgttaatattcacctgaggatgctttccatacattctttaaatccccaaatatagctgatatctta

SEQ ID NO: 2570 - DNA, 661 bp, Homo sapiens
  ADAMTS19
  misc_feature [331]..[331]: Chromosome 5, SNP identification no. = rs30708
  misc_feature [331]..[331]: allele = c, in linkage disequilibrium with rs3909548, respectively
  misc_feature [331]..[331]: n is a, t, c or g
ggagcttgcagtgagccgagaacgcgccactgcactccggcctggactacagagtgaggctcagtctcaaaaaaaaaaaaaaaaaaaaaaaaaaaggctgtacggactatggagcttgaaaggaaatggtgttgctatgtaattgtgatctaattccaaagggtttacatgtggcacagtcatggatccttggaactccacatcgtgtgtgacaattatgacattggttctgtaaggtctgtctccggtacctctctgacctcatctactaacctccactctgctttcacctctgagtctttagacaatcaaaagtctggtcacaatcctntttcttaaatcttcatggtaaaatgaaagattttgaggtacaaaggtttgggtttgtgggcagacacttttacaggctgaagttactattattttaggcaacaaaataggctctttgtggtcactgtcactggagcattgcacaggagacagtttcagttcatgtggtatagagaattgatagaactgatcaatggatcagttcatccaaaatgttcatattttataaagcattcctactgtaaaagctcagtagatgatcaactacacacgattctgttaaattgtagattcttttccataaatactattttacaagcttttagaaatt

SEQ ID NO: 2571 - DNA, 661 bp, Homo sapiens
  ADAMTS19
  misc_feature [331]..[331]: Chromosome 5, SNP identification no. = rs17617039
  misc_feature [331]..[331]: allele = t, in linkage disequilibrium with rs3909548, respectively
  misc_feature [331]..[331]: n is a, t, c or g
aaggtctgtctccggtacctctctgacctcatctactaacctccactctgctttcacctctgagtctttagacaatcaaaagtctggtcacaatcctctttcttaaatcttcatggtaaaatgaaagattttgaggtacaaaggtttgggtttgtgggcagacacttttacaggctgaagttactattattttaggcaacaaaataggctctttgtggtcactgtcactggagcattgcacaggagacagtttcagttcatgtggtatagagaattgatagaactgatcaatggatcagttcatccaaaatgttcatattttataaagcantcctactgtaaaagctcagtagatgatcaactacacacgattctgttaaattgtagattcttttccataaatactattttacaagcttttagaaattattttaatatatcacatgcaattaaattttgctagtgccattctacaatgttttgacctctgaatatcttccacataatgtgtttaattatttattttatgatgtaatttgacacttttttctttttttattatacttgaagttctagggtacatgtgcacaatgtgcaggtttgttacatatgtatacatgtgccatgttggtttgctgcacccattaactcatcatttaca

SEQ ID NO: 2572 - DNA, 661 bp, Homo sapiens
  ADAMTS19
  misc_feature [331]..[331]: Chromosome 5, SNP identification no. = rs17673487
  misc_feature [331]..[331]: allele = c, in linkage disequilibrium with rs3909548, respectively
  misc_feature [331]..[331]: n is a, t, c or g
ttgattcttataaccattaaataccatattgtctagtcctattttacaaatcaacaatttgaggtctagagcagttaaataatactttgaagttcttatacctattaacagagaatgctagatccaaactcagattatgtctaaatcccaaaaatcagatgctctccagtctcctatggaactcaaacttctttatatgctatattgtcttctctatggaaaaacccttagatcagatctcatatttaaactaatttttttgtctcctatagcacctatactatcagttttaaccagtatcttaattgattcattttgctaaactatttgntctatttatatgattatttcccaataacctacctgcacagattttttccttgatctctgaaaatatgattgtttatttaggttttttaaatctgtttctcagtatcctaggatgttgccttgttttaaaactacacattgtgctaataaagttttaggtttaaggtttccagaaatgttctcctttttattttctctccactcttatactccagtcccaaatcagtacagcatgtaaagtgtagtaacctaatagacgatagataggtagctagaaccatggaaaagataatttacatatttagtcattgatttgacaaatatttattaa

SEQ ID NO: 2573 - DNA, 661 bp, Homo sapiens
  ADAMTS19
  misc_feature [331]..[331]: Chromosome 5, SNP identification no. = rs3909548
  misc_feature [331]..[331]: allele = a, g
  misc_feature [331]..[331]: n is a, t, c or g
aagcctaaaatatgtactatttggcaatttacagaaagagtttgctgacccctgttgtagagactctggattctgttatattccttcaaagactgttttttgttttcacaggcaattatattaattagatttaaactggaaattttgtctcatctattgtaggcagcagctcatatcttagatcaattcatttttctcttatctgtgctatttgtagtgcgtgttgtgtatgtatgggtcagttgccaaggggagacttaagctcttctaattctattccctctggaaatctcccttcagtttatggcagccttgaccacctcagtttccntcttcacgagtctataagatgatatgtttttccagttggcacctaatgtcaggacactcccttcagtttatggcagccttcaccacctcagtttctgtcttcgtgagtctataagatgatatgtttttccagttggaacctaatgtcaggacacaatagtgggcatctatcaggttaaagctgcaaagatgatgaactaaccttgtgccagtgttttcggtttccctcaaaagtgtgcctgctgaaagcaatcactttcataattgccatgcacaaaaaataaaatacctaggaatacagccaagcagggaggtgaaagatctctacatg

SEQ ID NO: 2574 - DNA, 661 bp, Homo sapiens
  ADAMTS19
  misc_feature [331]..[331]: Chromosome 5, SNP identification no. = rs17438080
  misc_feature [331]..[331]: allele = t, in linkage disequilibrium with rs3909548, respectively
  misc_feature [331]..[331]: n is a, t, c or g
ttggtaaggtaagtcatttgtgttgtctgaatttaatgagcatactagatgaaacttgagaatcttgcattttctctgccagttacatttgtattcatcttagcactgatggaataataacagtatatacaaaaatattagtatttcatcagttttaacatttatactttttaaaatccatggttgttttgttaatatcaatgtggtgaggttttattttatttgttattttatttgttgtgagaatgttgagagtcatatatatgcattaatatagcaaaaatgtgaatttttttactttttaaacagaagtaaattaagcacaaataanagcataaatggtaaaatttctcattgccaatggatcttttcaagtataaaataattgacttaggagagcaactgagtattttttctttgtcaatataataatcatccataaaatattccagttgacatttggagattagtaaatatttggctgtctgtgtagtttaatgtacttcataaggctttaaaaatttgttagtatacatttccagatctaaataactgcttttgaaaattaattttcctttgaggaatatgaagaagatggatttcacatgtatttaataattatggttaacataatcaaaagataacagatcaatagtttaca

SEQ ID NO: 2575 - DNA, 661 bp, Homo sapiens
  ADAMTS19
  misc_feature [331]..[331]: Chromosome 5, SNP identification no. = rs17673664
  misc_feature [331]..[331]: allele = g, in linkage disequilibrium with rs3909548, respectively
  misc_feature [331]..[331]: n is a, t, c or g
taatgagcatactagatgaaacttgagaatcttgcattttctctgccagttacatttgtattcatcttagcactgatggaataataacagtatatacaaaaatattagtatttcatcagttttaacatttatactttttaaaatccatggttgttttgttaatatcaatgtggtgaggttttattttatttgttattttatttgttgtgagaatgttgagagtcatatatatgcattaatatagcaaaaatgtgaatttttttactttttaaacagaagtaaattaagcacaaataatagcataaatggtaaaatttctcattgccaatgnatcttttcaagtataaaataattgacttaggagagcaactgagtattttttctttgtcaatataataatcatccataaaatattccagttgacatttggagattagtaaatatttggctgtctgtgtagtttaatgtacttcataaggctttaaaaatttgttagtatacatttccagatctaaataactgcttttgaaaattaattttcctttgaggaatatgaagaagatggatttcacatgtatttaataattatggttaacataatcaaaagataacagatcaatagtttacataattttctaatttgcatactgtgatgggaaag

SEQ ID NO: 2576 - DNA, 661 bp, Homo sapiens
  ADAMTS19
  misc_feature [331]..[331]: Chromosome 5, SNP identification no. = rs11740723
  misc_feature [331]..[331]: allele = a, in linkage disequilibrium with rs3909548, respectively
  misc_feature [331]..[331]: n is a, t, c or g
ttgcaatcttgaaatctttaaagtaaacttattttggcagttaaaactgtaattactaaacaaaagtaaaaagttttattttcctataattgtgttaatgataactctcttagaggttctgtaatgctttgtatattgaaataactaatgaacctctcagttttccaggccatgtgggcttcttcaaatattcatctgtttcagctcttttagaagccatcgtgaaaatagcttccaacactctgccattgtgtgcagtagtgctaaaatatttgaatgcttgcaacctcacaccaaacactgcaagctcaatacattgctaaccaagagncaaagcttgggattttgtaactgataacactctagtgatattaatcaaactgtataaatctagttaatctaagagtatataattacatctgagaaggtgcttacagaattctatgcttctgaatgattttgaacaaagaggtttatatactctttatggacagcataatgcaaattgaaaacaacttgttttcttctctttttataatttttatataattttcatatttttcaatttacaatacaaatatcaatgtgttggcatttacatttcaaagagattaagtagtgggcaaatgatttattcaaaaataataaatgtatgtatttt

SEQ ID NO: 2577 - DNA, 661 bp, Homo sapiens
  ADAMTS19
  misc_feature [331]..[331]: Chromosome 5, SNP identification no. = rs17617398
  misc_feature [331]..[331]: allele = c, in linkage disequilibrium with rs3909548, respectively
  misc_feature [331]..[331]: n is a, t, c or g
attgtgttgccattaagtgtagaagttcatttagggctaggaggatcaacttactcaacctcatcgttatacaatcactaatctaaatgcttgtaatcttacttattattctcaatatgattttgttactcttaccatgtttgctacgaccatcatctatttgattttcaggaatgaggagaaattttaataacctgtcccccaaattctagcaaccattcctgggtgaccatcagcaatctctctcattgcttttgttttcagtgaatgaaaaaataaaataaaaataaaaaagagaatgactacacttctttctcttattccagttatntttaccagttaatagataccaagtaaagtataaaataattggcatgaaataacagaatttcagcatctaattgcccacgtctttcaaaccaacttgctgtaatgttaatgtttgaacttgatgggaattctttcagaaaaaaaaaaaaaaaaaaaagcataaaggaaagtgctaaaatcaaacagtactttttaaaaactacaagttaaaaaagtaccctgagtcactgacatttcatacgaaaattactaaatttgctaaaaatgtctgctttgacgtaggacatttatttcttgtttccattcttatatattactctgatttttttgt

SEQ ID NO: 2578 - DNA, 661 bp, Homo sapiens
  ADAMTS19
  misc_feature [331]..[331]: Chromosome 5, SNP identification no. = rs11744022
  misc_feature [331]..[331]: allele = a, in linkage disequilibrium with rs3909548, respectively
  misc_feature [331]..[331]: n is a, t, c or g
tgtaaatgatgccccattgtcacataactaataataaagcattgtgttcaatatttattatacccactttcttttggttactaagttcagaaatttttttctacagagtatcttctggattttctcccttagcctccactactcctggattttaccattagtgtcctgacactgttacccacaactatatccctgttcctcttggatatcactgttagtcaaagcctcttaaagccagaatccaattaccaaggtccttgctatagaatgtttgatagtttcaaattgataaattcattctcctgggcatgcatttaaactctctttaatngagccactctcttaaatcttctcattccatctgaattattttattcaagtgccactaaccacaccacatatcccttactcttccttatacacagtgaactcatcctttttctgtatgcatgtgaatgctacccattctccaaaggcagttcatctatttacttttttgtgaagctttcctttataagttgttctctcctttgaatcatagtgattctgtctgatgacagtgtttcccaagtatgagtaatttttaacaaggaaaaaaaaaatcctacctctgtgaataaaaatagcagtgaagccttgaaggtagtagcttaaacaactc

SEQ ID NO: 2579 - DNA, 661 bp, Homo sapiens
  ADAMTS19
  misc_feature [331]..[331]: Chromosome 5, SNP identification no. = rs11951112
  misc_feature [331]..[331]: allele = c, in linkage disequilibrium with rs3909548, respectively
  misc_feature [331]..[331]: n is a, t, c or g
catctagctctattgttttgcatgtttatttgatgtaaattatcaaaagtttcataggtacctcagaaataataagtctgatatagtttggatgttgtctcttctaaatctcatgctaaattctgatcctcaatactggaggtggggcctggtgggaggtgattggatcatggggatggatttctcacaaatggtttagcaccatcctcttggtgctgtcctcacaatagtgatttcacgtgagatctggttacttaaaagtatgtggtatgtaccccccaccctcctgccccttgctccctctctccccatgtgagatgcctgctccacntgcactttcggccatgattgtaagcttcctgaggccctcatcagaagccaagcagatggcagcaccatacttcctatacagcccacagaaccgagagccaattaaatctattttctttataaactacccagtcccaggtgtttcatgatagcagtgcaagaacagcctaacagaaagtccaaaatcaaaagtccaaataaaaaatttgatttccactccatgctaaaacctcttcttcctttggtgttctccactacagtgaatgtcactgcattagtgtcctatgcctactataacaattactgcaaacttggttacttaaaacaacaa

SEQ ID NO: 2580 - DNA, 661 bp, Homo sapiens
  ADAMTS19
  misc_feature [331]..[331]: Chromosome 5, SNP identification no. = rs2902316
  misc_feature [331]..[331]: allele = a, in linkage disequilibrium with rs3909548, respectively
  misc_feature [331]..[331]: n is a, t, c or g
ttagaagcattagaaggtggagtcttctgagaggtgattaggtcataagagcgctgcccttataattgggattagtgtccttatcccagaaagctagctagctccttccaccatgtgaggacatagcaagaagatgccatctgtaaatcaggaaatgagcccttaaagggcaccaaatctattagtgccttgatcttggacttcctggcctccagaactatgagcaatacatttctgttgtttataagctacctaatctatggtatttttatagcagcacaaacaaactagataattaccttctgtggcacattaaaaaattacagatatnaagttgaagatcttgagatgggagattatcctgaattatccaggtaggccttaaatacgaggccttataagagagaagaggaaaatttggacatagaaggaaaggagaaggcaaagagaccatgcaggtagacaatggagtgacaaggtcacaagcgaaggaatgctggcagccactagagttggaaaaggcagggaatggatgttctcctagagtctccagagatagtgtaacactgcaaacactgatttttggcccagtgaaactgattttggacttctggcctacagaactatgagggaatacatttttgttgttttaagtaaccaa

SEQ ID NO: 2581 - DNA, 661 bp, Homo sapiens
  ADAMTS19
  misc_feature [331]..[331]: Chromosome 5, SNP identification no. = rs17680717
  misc_feature [331]..[331]: allele = g, in linkage disequilibrium with rs3909548, respectively
  misc_feature [331]..[331]: n is a, t, c or g
tggcactaaaaggctagaaatatagaggatgatatcagaaaatagagctgagattatagaacagaaagggagaggggtctggtagtggcagggaggagcatggcagctgcaccacgtctagatccaaaggtacctggaagtgatcaaaacaatggtcaccccactgaaggctacagggagagtaagaggctgtgtccttaggagaaagaaggtgccaagaatattcaaggagcatagagtgggaaggagcatcctttggcagagggctcagagctttgaggttctcacctgactccaggagcatctttgccagagcaaaggcaacatcagnggcagaggaatggtgaagttataaggaattcactttgtgccccaaggataaaaagtggttacaacaaaaacatttcaaatcgctctctcaatttaaaaaaatgttatcagtcacccttgccacaagaaattttcagtggccatgtttctcttcctgggccctaatactgccctatgacttgagctcttctatcctcccatcctctcctgctgatgctcccatatgcacccaaattcgcaaattcctgttcctctgctccactcatcctacactgatgccaggggctcatctttcttaaggggctgtacttcaccttctctacccaaataa

SEQ ID NO: 2582 - DNA, 661 bp, Homo sapiens
  ADAMTS19
  misc_feature [331]..[331]: Chromosome 5, SNP identification no. = rs30303
  misc_feature [331]..[331]: allele = t, in linkage disequilibrium with rs3909548, respectively
  misc_feature [331]..[331]: n is a, t, c or g
cctgttttacaggatctgattatttatgaagttttatagagttaaccctttcatgcagtattaacaagtgatttaaacttattcaacagaattctgttgagaaacaaggcaccttaaaattgcacataattgttcctggtttattcttatatttatattctacaattcaaacttactcctttaaaattctaggaaatgattagttttggacacatataaagttatgacatattaacagatatttggacaggggatttatgagcctttttgaaatgacataatctaaaataatgctggaagcacagtaaatcattttggatgatttagttanacagcccagccagttgggtatatatttgtttagaagtgatagatacaaagcctgcagtataatgagtaatttttaacttatcctccaaaaggaaatcacaattatattcagcatgttgtattgaataggagaggaattagacaaatgaagaatctaaaaactaattttttcctaatgaataagcaaaatatacttatctagatacctgctttctagcaataaaaattagatttatgttaatgggaattctacgtattctgagctcatgctcatagtgaaaattttctagtttccttagttacaaatctcaaaatggtgttctacaataaa

SEQ ID NO: 2583 - DNA, 661 bp, Homo sapiens
  ADAMTS19
  misc_feature [331]..[331]: Chromosome 5, SNP identification no. = rs32816
  misc_feature [331]..[331]: allele = g, in linkage disequilibrium with rs3909548, respectively
  misc_feature [331]..[331]: n is a, t, c or g
tttgggaggccgaggtgggtggatcacaaggtcaggagttcaagaccagcctagccaacttgatgaaactccatctctaccaaaaatacaaaaaaaattagccgggcgtggcagcgggtgcctgtaatcccagctcctgggtaggctgaggcagaaaattgcttgaacccaggaggcagaggttgcagtgagtggagatcacaccactgcactccagcctgggtgacagagtgagactctgtctcaaaaaaaaaaacaaaaattctttaggctagcatttccaaaattttgttccatggagagctcattccttggggatgtggtctctatntatgaaaaatgctggtgttaaataaagaaaatcaaatatctttgctgtaggacttttcaggtcttttaatattctactgtatttggtaaatcgcaaagaggaaactaaagtatttctcctttctttctgctttataccaaagatcgcttttgcagaggacatagctaatttgttatttaacataatacactttgggtgacttcacattagattattcaactttcaaagaatagttatgtaaatttttttttctagctagagaaaatgtgtagattgaaactaaactgaaattatctataacatagggaattattcctgaaataggttagc

SEQ ID NO: 2584 - DNA, 661 bp, Homo sapiens
  ADAMTS19
  misc_feature [331]..[331]: Chromosome 5, SNP identification no. = rs32817
  misc_feature [331]..[331]: allele = g, in linkage disequilibrium with rs3909548, respectively
  misc_feature [331]..[331]: n is a, t, c or g
tcaactttcaaagaatagttatgtaaatttttttttctagctagagaaaatgtgtagattgaaactaaactgaaattatctataacatagggaattattcctgaaataggttagcattttattcaaaattggtttctaattatgtctgcaaatatactgatgtttggagaaggtaattgcttacaatttttgtaattacaaataatcatgtaagacaggaaaatgtgaacagctatcccctaaaatagaaaactatcacaccgaaagctctcattgtcagatcagtccatcatctaaagaaatcaaagattgtgagcttaattttaaagcntttggacattgaaaaaacctatcccaagatatcctaaaaaagaaacattttacattttattttctttgaaaactgttcacaacaaatagattagtcagtaataagtaggatccctttcctcaagaaagactttccattttgttgtttagatatatccactgagtacttacaaaacttgctactcaccattatatctggagaaaccatgcaaaatttcctaaacaatgactatcaaattgttttgtctctgtctctttgcactaaagagaatggatttttttttgcattgctgttatttttattttgaaaatctcctgagagtcttattta

SEQ ID NO: 2585 - DNA, 661 bp, Homo sapiens
  misc_feature [331]..[331]: Chromosome 5, SNP identification no. = rs4913050
  misc_feature [331]..[331]: allele = a, c
  misc_feature [331]..[331]: n is a, t, c or g
cccaagtagctaggactacaggcgcatgccaccatacctgtctaatttttatttattcattattttttgtagatacagtgtctcactatgttttccaggctggtctcaaactcctggcctcaagtgattctcctgccttgatttcccaaagtgctgagattatagaatgtgatccaatgtgcccggccaaactagttctttataaactaacatatagatgacctctgggttttctctactatgactaattctgcaaaaactatactcttatatgcatctttgtgcacatctgattgggtttcccactaaacaatttcacctgtctctctcntctggaatgaatgaactgagctgatctaatcaaaccaaccagagggggtagatgtgtgctcaagacatgcaaaggaatcagtgagtgacgccaagttaaacatgaagaagaggttgtcttttctcttttacattttcccttcctgattcatcctgctcaccaattacactgtgcattacaaaatcaaataacagcaaacatttttgagcatttaagtgtcaggcatgatgttcagtgatttgtaagcattatctcccttttaccctcatgaccacactataaggcatatgctaaaattatgtccattgtatagataagaagtaaaaggag

SEQ ID NO: 2586 - DNA, 661 bp, Homo sapiens
  misc_feature [331]..[331]: Chromosome 5, SNP identification no. = rs4913051
  misc_feature [331]..[331]: allele = a, in linkage disequilibrium with rs4913050, respectively
  misc_feature [331]..[331]: n is a, t, c or g
taaagagccacaaattcacaccaagcagggtgttacatgaagcctgaggtcccaaatgttgactgtaaatactcctctctgatgaaaatttcacaacactttagagacatgccctgaagtggtttaacaatcagttgtgtcgggaaaggctgaggaggactcctaactggagctgagtggggtctgactaaccccagatttgtgtgtgaatgtggatctctgcccagaagggagtgaaaacagagctctgggaggatgacatccctcacgccaaggatcctcaatcccaccccagggcagacactaggaaacacacaaatgttcacacacntacatcctcacaccccacctccaccctctcctgagaaccagcatcgctgaggaaacatgggatggtagatccagagtagggcccacagtaacccggatctggcctgatggttgatgggatcttgcccctggaaatggttttccctaggccttaattttactatctgtaaaatgaaagacttggacttgaagtttttaacctctgacaatctacggttccttaatgagatgaacaccttcctaacccactgaggaggtaggttgccttcctgcagcctggacttggctctggagccaccagttttatttgtcacacacaaatcctcatacc

SEQ ID NO: 2587 - DNA, 661 bp, Homo sapiens
  misc_feature [331]..[331]: Chromosome 5, SNP identification no. = rs10044918
  misc_feature [331]..[331]: allele = t, in linkage disequilibrium with rs4913050, respectively
  misc_feature [331]..[331]: n is a, t, c or g
agagattctgtttctttatccttaaaatagagataatacccagtaatactgttctgaaaagtaaataacatgtaaggcctgaaaacactttataaatccaaatgtgtgctatacaaataaacataccacagtgacgaagagagaaactgtaagtttaaggcaatttggtttgttattcattcatttttattagagatgtactatgtacacaatatattttaactgcctgtatggtgtagaggggatgcctaagccctcaaagaatttagagtccaatagaggaaattggtatttacatatataacattaaaccaaggcaccttcaaaaatnctgcttcaagagaggaaataaagtattatggagagagatggagggaataaataattccgagttgcatggacggggtaggagaggaatgaggacatcttcaagaatgtggcacttaacctgagacataaagagtgtgttggcttttatatgcatagaggaggcaaaatgcattcaggagagcagtcactaaatgaacaaaggctgggaggcatatagtaagtgcttaataagtgttatagatgtatgaataaataaataaatgaatgaacaaatagtggtccaagaatagcacatggtccagcgtttccatagcaaagagaatgtgggagt

SEQ ID NO: 2588 - DNA, 661 bp, Homo sapiens
  misc_feature [331]..[331]: Chromosome 5, SNP identification no. = rs2569011
  misc_feature [331]..[331]: allele = c, in linkage disequilibrium with rs4913050, respectively
  misc_feature [331]..[331]: n is a, t, c or g
tccccagaggagagtgagagagtgggggtatcaggcccacccacactccacagactgagaagggaaggaggggtgcctctgtagggagaaacatacataggtgccattaccaggctcatcctgcattaccaacagagtgatttctgtaaaatatggttatgatcttgtgactattatgccccagaatcctcaatggctcccgattaaaataaatgctgaaattcttggtctggcattcaaaactcatcataatgtagccccaatctattcctctggttttctctctcaccaagcactcccacattctctttgctatggaaacgctggaccntgtgctattcttggaccactatttgttcattcatttatttatttattcatacatctataacacttattaagcacttactatatgcctcccagcctttgttcatttagtgactgctctcctgaatgcattttgcctcctctatgcatataaaagccaacacactctttatgtctcaggttaagtgccacattcttgaagatgtcctcattcctctcctaccccgtccatgcaactcggaattatttattccctccatctctctccataatactttatttcctctcttgaagcagcatttttgaaggtgccttggtttaatgttatatatgt

SEQ ID NO: 2589 - DNA, 661 bp, Homo sapiens
  misc_feature [331]..[331]: Chromosome 5, SNP identification no. = rs10077374
  misc_feature [331]..[331]: allele = a, in linkage disequilibrium with rs4913050, respectively
  misc_feature [331]..[331]: n is a, t, c or g
aggattctggggcataatagtcacaagatcataaccatattttacagaaatcactctgttggtaatgcaggatgagcctggtaatggcacctatgtatgtttctccctacagaggcacccctccttcccttctcagtctgtggagtgtgggtgggcctgatacccccactctctcactctcctctggggatgatcagatgattcgactggccaaggggagtatttcattcctctgcatcacagggattggtccagggatgggcacctgacttgagccaggccagtgagatggtgtccttggactttaggggaaaatgttaaaaaaaaaaangggggtgcttatcttccctcactggcattgcttatccgatagcatgtatgtctgaagttgatggggacaataaaaacctgcctgagaatgaagctaacaggaaagaaattagagacagcagagaaaggaagtccctgactgatggcttcatttgagttcctggatagagctgccctgaaaataacatttccctgaatttccaacagcactggaagtaatccaatcacattcctttctggcttgaattgcttttctgcctttttgtcatggaatgattcctgattagatagagttgggcactgtgttaatccctaaacagtcattcactca

SEQ ID NO: 2590 - DNA, 661 bp, Homo sapiens
  misc_feature [331]..[331]: Chromosome 5, SNP identification no. = rs10064587
  misc_feature [331]..[331]: allele = t, in linkage disequilibrium with rs4913050, respectively
  misc_feature [331]..[331]: n is a, t, c or g
gccaaggggagtatttcattcctctgcatcacagggattggtccagggatgggcacctgacttgagccaggccagtgagatggtgtccttggactttaggggaaaatgttaaaaaaaaaaaggggggtgcttatcttccctcactggcattgcttatccgatagcatgtatgtctgaagttgatggggacaataaaaacctgcctgagaatgaagctaacaggaaagaaattagagacagcagagaaaggaagtccctgactgatggcttcatttgagttcctggatagagctgccctgaaaataacatttccctgaatttccaacagcantggaagtaatccaatcacattcctttctggcttgaattgcttttctgcctttttgtcatggaatgattcctgattagatagagttgggcactgtgttaatccctaaacagtcattcactcacctaataaatatgtttcagtgtctgccagctgccagctactcttccgggcactggaaatagagtgcaaaaatagacaaaagttccttccctcatggagcttacattttagttgaagttgtgggggacagacaataaacaaaatcagtgagttaaatgtatagtatgcaagatagtgatccgaaatgaaacaggggagggaacatggaag

SEQ ID NO: 2591 - DNA, 661 bp, Homo sapiens
  misc_feature [331]..[331]: Chromosome 5, SNP identification no. = rs6580390
  misc_feature [331]..[331]: allele = t, in linkage disequilibrium with rs4913050, respectively
  misc_feature [331]..[331]: n is a, t, c or g
atcagccctgatgagttcccaggcactgagtgccagctttgctccaggtgttctgccagtgctgggcggacaaaggtcataatatcatttcaccccacagagcccagagtccagtggagaatacagtgggtcaatcagcagttacagcttgtggggcaggagctgtgggagagggaggttcgggaggccatgagagctaaaaagggggttcttagccctgaccagagatcaggaaggcttcctggatgaaatgacccctctttcattcattcagcaaataactacagtacccctgttatatgccagccactgctctgggtgctggagttanagcaatgagcaacaaaacccctgccctcgtggagctgacatcccaggggcaggggaaagaccacacacagatacgtaataagcaaataaatagtgtaaacaatttgatagatggtggtaagtgttttgaagaacacaaaacaaagcgaaggagagtgacagacagagcaggagagctactgtggagtgggtgggcagtggagacgccacagaagagctctaaatagcaagatgaggcctatgaagaggaggtatgaggcggagtcctgtggaaaggcctaaggtggcaccagcctggccttgtcaactgtaggaaggccagtgtgacctg

SEQ ID NO: 2592 - DNA, 661 bp, Homo sapiens
  misc_feature [331]..[331]: Chromosome 5, SNP identification no. = rs1387911
  misc_feature [331]..[331]: allele = c, in linkage disequilibrium with rs4913050, respectively
  misc_feature [331]..[331]: n is a, t, c or g
atccatagatgggtggggagcctgtgggacagcagatctcaaggtttcaggtaggttaagatcacttaagggacttactcaaaatacagatgctggaaattccacttgaggatgcctggaagagagatccaggatttttcattcttaccaagaacctctggtgatcctaatgcaagtccccacgcctctctttgaaagtaacctctgcttctaagactatagcattaggaaaaggaagtaaaaagctccattgtcgggtggcctgactttgcctctggcagtctctcacagatgcccaaggacataattccacaaccccagcaccactcanttgcagtggccttttttcttgaccactctgctgctggtgagaaggcagtggaggtactgcccatctttatctgctgtgcttattgtagaaactcaatcagatttttttttttttttttttttttttttgagatggagtcttgttcgatcacccaggctggagtgctatgacaccatctcggctcactgcaaccttcacctccagggttcaagtgattctcctgtctctgcctcctgagtagctgagattataagcgcacaccaccacgcctggttaatttttgtatttttagtagagccagagtttcaccatgttggtcaggctggtctc

SEQ ID NO: 2593 - DNA, 661 bp, Homo sapiens
  misc_feature [331]..[331]: Chromosome 5, SNP identification no. = rs2400203
  misc_feature [331]..[331]: allele = c, in linkage disequilibrium with rs4913050, respectively
  misc_feature [331]..[331]: n is a, t, c or g
atggtgactaacctgtaactgatgttcagcatgtctttcctgacctggaactgaagctaccttttctggtttccataggaacgattgtttgtcacccccaccctctgtcatgcttggttttcatcagtaaggaaacatgtttggggaagagggaacttgagtggcagaatgacctgcattccaatcctggtataagtactcatttcagaccatcactcaatatttttgagactcaggttccttctctataaaatgaaaacaataatgcccaataatttccataccttccacagtcattgtgaggattcagtgaagtaaggcaagggtgctnaaactttagagagcatcagaatcacctgaaggtctggttaagacacagattgctgggcccatccccacggtttctagttcaatctgggcagggcctatgcatctctaactagctttcaggcgatgctgatgtggatccaggaccacacgttgaggacagtgcctggcaacagtaaacaccaggcagatgtgagttactatcacttttatattttggagcaggagtaatagtgtagacacccccacccggctgcaattctaattttagggtccttattttgactacatcaataattgcttgattttcaatttttgtagcactactctaaac

SEQ ID NO: 2594 - DNA, 661 bp, Homo sapiens
  misc_feature [331]..[331]: Chromosome 5, SNP identification no. = rs6873171
  misc_feature [331]..[331]: allele = a, in linkage disequilibrium with rs4913050, respectively
  misc_feature [331]..[331]: n is a, t, c or g
atcctggaaggcctactcataaaaagagacatcttgcactaatcagagcacttggggaattactgaattttgcaactttctcacttgtgtgacaaaaaaaaaacaagattgtggttacccaattgtctgagcaaactgtcagcttttgcacagacttgccctgagtttaataagaattaaggttgcatcctgctcctggttttgaatcaaaacatttactgatttcatcagaaaggaaacagtgaaagaaagggagaaagacaggttaggagtgaaatgatttatcacttacttttctttagtaaggcacagtatctgtcatggattaacntctaattacagcagtttcagagctgtgaagtttattatttttttaatggctatcttatcaactgtaatgcataagctattagggttataggatttaactccccctgttgcagatgttttagtaaatctgtaatgatttaagcatttttaatatcttttaaaaatgtattacactttaatccatcttgaattaatttttgtataaggcgtaaggaagggatccagtttcagctttctacatatggctagccagttttcccagtaccatttattaaatagggaattgtttccccatttcttgtctttgtcaggtttgtcaaagatcagatgg

SEQ ID NO: 2595 - DNA, 661 bp, Homo sapiens
  misc_feature [331]..[331]: Chromosome 5, SNP identification no. = rs17115481
  misc_feature [331]..[331]: allele = g, in linkage disequilibrium with rs375232, respectively
  misc_feature [331]..[331]: n is a, t, c or g
gaatccaggagtttgagaccagcctgggtgacacggtaaaacccgtctctccaaaaaatacaaaaattagccaggctcagtagtacaagcctatagtcccagcttctcaggaggctgaggtgggaggatggcttgagcccaggaggttcaggctgcagtgagccaagatggtgccaaagcactccagcctgggtggcagagtgagacctcatctcaaaaaaaaaaaaaaaagaaaagaaaagaaagggagatgagtttctcacagcacagccaactcagaggtataggtgctctcttctaacttgtctttgactcacaaactctcgtggtntataaatatcaagtctcactgcccatccaagggtagaagaattggaccttctccatgtggccctagtaggtagaattaggaccagtgggtagaatttatataaaggcagattctagctccatataaagtataactttattatagtcagacctattctaaaatggaatagactgtctcccaaagtagtgagccccccaacaccagaagtaaccaactgctggggatgttataaaacaaacttcctcaaagtgtaacccacttgcattagcatgtcctgggcagattcttaaagaggcagattgctgggaccctaaatcagactaagtgtgg

SEQ ID NO: 2596 - DNA, 661 bp, Homo sapiens
  misc_feature [331]..[331]: Chromosome 5, SNP identification no. = rs286965
  misc_feature [331]..[331]: allele = c, in linkage disequilibrium with rs375232, respectively
  misc_feature [331]..[331]: n is a, t, c or g
aggggctgcagtccctgacagatgctgtggacactctgaattacccagtattgagtacagaataggtcctcagcttgagatgcttagcactgactgagagtctagaaatcaccattcagttctggctccgttactaactacagattcaatgtagccaaagacccattccctctcaggggtctcagttttcccatttgtacaaaggcaataatgataccttctctgcctcttccttgagccaggctggaggtgcaaagctcaagtgaaggcttgagctatgagattcctaaggtgaccagtgagtgagcaaaattgactcctcctactgacnacttactgagtccttactatgggccagagactgtgctaaatgttttgtaggaatattcaggtctgccttcatggatatgcaaccagtataggcactcaagaccacacttagaaaggccgacatttggggctttaatctctgtggtcccatcttgaggtgtttaataatttcatctttgaattccgacttgttaagagaagcccaatgggacaatgaaacacgtgctgggacatggagcctcggttcccccggggcccagtgcacttaggtagggcccaggtacctatagagcctgcacttacctggcaactatccccatgcctgagggag

SEQ ID NO: 2597 - DNA, 661 bp, Homo sapiens
  misc_feature [331]..[331]: Chromosome 5, SNP identification no. = rs390299
  misc_feature [331]..[331]: allele = a, in linkage disequilibrium with rs375232, respectively
  misc_feature [331]..[331]: n is a, t, c or g
acactgtggcctgcagaagttaagacatcagcctgaggtaatctggtgcgagggtggtagagtggattcaacccctgttctgcctgtgtgcataaccactgcactaactgcttctcagttctcagccataaaaagaagagactgagctaaagtgtttggattcttcatggttagagtgatgttgagccagttagctaattctgccctgaacttaacaggagacagtaaagaaataatttaagaactcccaattttgccctatggggaagaagacaaacctgggcaggttgagggatagaggcagccagcacagacagggtaatggaatgantgtcaccctttgaagagatgtgacttactgaggatatcctgttatatcctgattggatgtgaaaaataagcctgctctctccagcagagttcagggtctctgaagagtcctgatggttgaatgcatgcctgtctcttcattacctaaaatacagtaaatgggaagacaaaatatctgtgagcttgctcagtcaaattcacagagcccgcctggaaaggcagctggtcctgctaagaagtcacaggaaggaaaccaggacaggatgcaccaaaggtggaaggtggaaaagagatgccaagacccaaattaagaggatagagaatcaacaaa

SEQ ID NO: 2598 - DNA, 661 bp, Homo sapiens
  misc_feature [331]..[331]: Chromosome 5, SNP identification no. = rs375232
  misc_feature [331]..[331]: allele = g, a
  misc_feature [331]..[331]: n is a, t, c or g
ctgctatccaactgaccgccgattgctggctcgcacttcctgaggaatcagagtaagatagatggattgtatcaatgtcaatatcctggttgtgaaaggacacttagttttgcaagctgttatcattgggggaaactggataaaaggtacacaggatttctctgtttctaataactgcacatgaatctgcaattatctcagttatttcaagtatttttaaaggaagaggaggtcttttgtgccagggatccaaaaagtcaagcaatgtggcccactccccaggagtggaaacaaagacctagtgggtcgtctggtccttttgagtgtcccnatcatgagcacccggaagcaggaatggtggcaagtgtggctcagactggctcctctcaaaaagcaggtacattggtagccaaaagtgggatgagaggagtgcacgagtttgagaaggtttccggaggggttctatcattcttcattgaaatccaccaatttagtagaaaagatggttatggaattctgtttccagcatcattaacaccatatgctgcattaaacagatgaaggaaactctacaaattaaatgaaagttgcccaagacagttgaatactaattctggctccacccctacctcacaggatttatactgagatactttctatc

SEQ ID NO: 2599 - DNA, 661 bp, Homo sapiens
  misc_feature [331]..[331]: Chromosome 5, SNP identification no. = rs4295437
  misc_feature [331]..[331]: allele = g, in linkage disequilibrium with rs375232, respectively
  misc_feature [331]..[331]: n is a, t, c or g
tggttggggctcttacaaataaagcatcttttactaaagtatcttctatttattaaaaataaagctgctaagaacatttgtgtactcctcttttctttctgatcaggaattgatatagacgctcctacctgactgaagcccttgttcctgctgtggcaagcatgacttgtcaccacactgtcctttctatgccaactcctagtggctgtagatactctgtccagatgctcccccacggacatttatctctaagtaggcacctcccaagcctttccccttaaagaaatacaacagaacaagcatgagttagggaaccagaaaacctagactnactctgcaagagctctgccatgtatagttgtgaaatcttgagcaagtcgcttaaccctctgaatctctatcatactcatcataataaaataactaatagttgttgaggtttctttaccaacagcttatagtgacagtgcaatgaaatagtgaaaagcaggaactctggtaccaagctgcctgactttaaatcctggttctaccacttgttggctctgtgaccccaggtaagttacttaacctctctatgcctcagtttttccatctataaataggcatgtcaacagtacctgtctcatggggttgttgtgaggattgaattaatacatat

SEQ ID NO: 2600 - DNA, 661 bp, Homo sapiens
  misc_feature [331]..[331]: Chromosome 5, SNP identification no. = rs4354102
  misc_feature [331]..[331]: allele = g, in linkage disequilibrium with rs375232, respectively
  misc_feature [331]..[331]: n is a, t, c or g
ctgctaagaacatttgtgtactcctcttttctttctgatcaggaattgatatagacgctcctacctgactgaagcccttgttcctgctgtggcaagcatgacttgtcaccacactgtcctttctatgccaactcctagtggctgtagatactctgtccagatgctcccccacggacatttatctctaagtaggcacctcccaagcctttccccttaaagaaatacaacagaacaagcatgagttagggaaccagaaaacctagactcactctgcaagagctctgccatgtatagttgtgaaatcttgagcaagtcgcttaaccctctgaanctctatcatactcatcataataaaataactaatagttgttgaggtttctttaccaacagcttatagtgacagtgcaatgaaatagtgaaaagcaggaactctggtaccaagctgcctgactttaaatcctggttctaccacttgttggctctgtgaccccaggtaagttacttaacctctctatgcctcagtttttccatctataaataggcatgtcaacagtacctgtctcatggggttgttgtgaggattgaattaatacatataattaatacatgtaatgcatgttcagaacaatgcctggcatagtgcttatgagttcatgagcat

SEQ ID NO: 2601 - DNA, 661 bp, Homo sapiens
  misc_feature [331]..[331]: Chromosome 5, SNP identification no. = rs386841
  misc_feature [331]..[331]: allele = c, in linkage disequilibrium with rs375232, respectively
  misc_feature [331]..[331]: n is a, t, c or g
catggtaacaactcagaaattaccaccccctttctagaaatttctgaataacctgccccttaatttgcaggtaattaaaaatggatataaatacagctagccagcagcccacaagtaccaactctgggcgcattgcccatgaaccctgccctgcaaggagcagtaccattcaataaatgatcactgtctaacaccactggctcacccttgagttctttcccaggtgaagcaaaatccctcctgggctaagccccaattttggggcttgcctgtcctgcaacatgtagcaaccacaaagggatgaatacagcgatcaggaggcagtgaccanttcagcaataagacggtggggacagtggcaatagagattggtggagaggcaagatgacgagagatggtgagagatggtgactgacaaggaagtgggagccagcaatcagcggtcagttggatagtaggatggcaaaatggagaaatggtcatcagcactatggtgatcaaagctgcagagccaagggctcttttaagagccgtctttcctgggaaaagccaaaaatgctcctgggcaattttggggcttgcttgtcttgcaacaaaaagaagtgagacagctgcttggttgtaatgaattgtggttgagttggatggacatgtcccaaat

SEQ ID NO: 2602 - DNA, 661 bp, Homo sapiens
  misc_feature [331]..[331]: Chromosome 5, SNP identification no. = rs425263
  misc_feature [331]..[331]: allele = a, in linkage disequilibrium with rs375232, respectively
  misc_feature [331]..[331]: n is a, t, c or g
gagaaagtgaggtaagagaccagcaggacttgttttctggtcaccaccctgctgttctattctggacaggaactggtccagatagggtaaagtttaaaaaaccagcagaaaccagcagatggtgacaaaggtgatctctagttgccctcattgctcattggcataagacactcccaccaacgccatgacagtttacaaatgccatggtaacaactcagaaattaccaccccctttctagaaatttctgaataacctgccccttaatttgcaggtaattaaaaatggatataaatacagctagccagcagcccacaagtaccaactctgggngcattgcccatgaaccctgccctgcaaggagcagtaccattcaataaatgatcactgtctaacaccactggctcacccttgagttctttcccaggtgaagcaaaatccctcctgggctaagccccaattttggggcttgcctgtcctgcaacatgtagcaaccacaaagggatgaatacagcgatcaggaggcagtgaccaattcagcaataagacggtggggacagtggcaatagagattggtggagaggcaagatgacgagagatggtgagagatggtgactgacaaggaagtgggagccagcaatcagcggtcagttggatagtagg

SEQ ID NO: 2603 - DNA, 661 bp, Homo sapiens
  misc_feature [331]..[331]: Chromosome 5, SNP identification no. = rs378267
  misc_feature [331]..[331]: allele = a, in linkage disequilibrium with rs375232, respectively
  misc_feature [331]..[331]: n is a, t, c or g
tctggcatgtagtaggaaatgtttgttgactgactgaaagaaaaggaaaaaataaaagaagaaaaggaaggaggaggcaggggaaaaggaactaaagctaaaagcaaaaaacaaagagtggcctactgttttgctaccagcagagaatatagagctgggagggactccagagtgtatatggttgaaacttctcatttcactgctagggatgttgatgcctcataggaggaagtgactctcccaaagtcacactgttggtaggaggctcagttggacctgaacccaggtcttctgatccctggcatggggttctctgtgttataccagaatnttactgggtttctgcacatatactgagaggttactccttcccagacaactgggttaagggctgggagaacaaaatgcagaatatgtgattcctgtcccagaggagctcacactcgtgccagtggctgagcagtctctgcattgtagctgcaaagccctctgagaaagtgaggtaagagaccagcaggacttgttttctggtcaccaccctgctgttctattctggacaggaactggtccagatagggtaaagtttaaaaaaccagcagaaaccagcagatggtgacaaaggtgatctctagttgccctcattgctcattggcataagaca

SEQ ID NO: 2604 - DNA, 661 bp, Homo sapiens
  misc_feature [331]..[331]: Chromosome 5, SNP identification no. = rs453034
  misc_feature [331]..[331]: allele = g, in linkage disequilibrium with rs375232, respectively
  misc_feature [331]..[331]: n is a, t, c or g
ttctacaagtggttttaggtggaagctgggttgaccacagtggagacacatgcgacaggtgaggtccctctagggccagtcttcagagattagcatgaaggctacagggtgtcatcctgtcacaggatgacagagcacagagtctgagctctctgtgtttggagaggtggctgacgagtgtagctctgcctaagctctcctggtgtctgttaaactcttgagtgtatatgtatttttgaagtccagtagttgaggtcggtaacttggtaattcgcatatggggagtctgataaggtttaatgtaacagtcccaaggggaggggggctcacnccaagttctcacatatggaatctgataaagcgtcatactcttgaagggaggggggatttcactccaaaacatcaaatggtgtaaaaagctacattacaaaagaagtcattttcccaacttgactgtgaatgtaccaatatgtttaattttttaaagcgcatttgtaagttggaatggaggtagtttgctacagagtttctaccagccatcctcacctggctaactgttgcagtgaccttggcagtttcagccaaacctgtttaaacctgaagtgtctacataatttctgtagctgcttatgtcggaattgtaggacttctcttaagtgtt

SEQ ID NO: 2605 - DNA, 661 bp, Homo sapiens
  misc_feature [331]..[331]: Chromosome 5, SNP identification no. = rs2053310
  misc_feature [331]..[331]: allele = c, in linkage disequilibrium with rs375232, respectively
  misc_feature [331]..[331]: n is a, t, c or g
tctgcctactgtctgttcagcctcttgtacaatggcagtttggcagctttaaatccttaacctagaaatgtatttaaggtttttctttcaagaaatggggtatacatatgaaggagagagtaacaactctttttatacacctattcagatttcagccctgaatttggcaaattttagattaggtctcacataaggtaaatatgactcactaactctttttttctcatcttccccacccccccatatatatttatttattttaatggagttagggaccactagtgaaatgatgaaaggcccaattctgagtaacaattgtctactcttcacntaaaatatactgaaaaagaattaagattccttgatccagtagacatagagaaacataaacattcatgacagatgagtaggtaaattcagggatcactttggaacttgctggattatggtgatggtttttggatagtatgtgcttcattattttatttggggtagttacagtgttttagttttttgttaacagctacacttttggtactattttccttttaaatttttggtgtctaagatttaccactaattactaatatatgcctttccaattcacttaaaaccttaataagtgaaatgttcaggtattgctagggtaaatgtgtctttt

SEQ ID NO: 2606 - DNA, 661 bp, Homo sapiens
  C5orf3
  misc_feature [331]..[331]: Chromosome 5, SNP identification no. = rs707179
  misc_feature [331]..[331]: allele = t, in linkage disequilibrium with rs375232, respectively
  misc_feature [331]..[331]: n is a, t, c or g
tatgtttgcagatattctgagtctcttcaggatgtgtttcgtgtctaccatatatgcaggataaattctttaacagcaaactccaaaggaatgttgaagctgttttagcaatgaggatttttttgtttgagtgttgaagtgggccatagtcctttagaaatgatgttcatttatgataggatttaacttctaaggcatagtttattttttcctctttcctttttgtttgttttaatgtattctttagcatgtttttgatataacttttatcctccagatcttaagctttcttttgctctcttcagcaatttaagagactattaagctgtcntcttcctaaaagctattttggtatccactctttttaaaaaaattctccaactttgtggttttttaatgattaaggtaatttgttagctctgcccctcatcttctaaaacctttgtaataaaatgtattaatcatgttatttgatcctttcatttacttttgtaaacacgagccctaatatcttacttagaccaaaaaaaaaaaaaaaaaatagcaaagcaaagccataacatagattagtataaagactgtttctacgtaatcttctttggggcaggagtcagttagtaagcaaggaagagaaataaatttggtttaaaaaggtatacca

SEQ ID NO: 2607 - DNA, 661 bp, Homo sapiens
  C5orf3
  misc_feature [331]..[331]: Chromosome 5, SNP identification no. = rs1057772
  misc_feature [331]..[331]: allele = a, in linkage disequilibrium with rs375232, respectively
  misc_feature [331]..[331]: n is a, t, c or g
tcttaagagctaaattcttctccctataatagagtttaccaaaatggccaagtcactgctcttacttgccaggctatgaattcagttagattacaaaaattaatctgttcccctgttgccttacagtatatcttctcttttaaataactaatattttctttttcttgttttttcaatcctggcaggcatcaaacagtgcctcctacatccaggacgcctttcagctactcttacctgtgctagagatctctctcattgagaacaagattgaatcacacagacatgagctgcagggccagaaacctttgttagaacattgaagaatggagangttttgacctgggacttgtgacggccaaggaatgccaccttattctggctactcctgcagaaatgaaggagtggggttattttagtatataaaaattcaggcaggagagatggtttaaagaggaagattgttgccttcagtgtttgattgaagtattcaggttctcacagtattctttccagttgttgtaattcataaattatttgaaaagaaacttttgtagaaagtccaagaataataactctagataaagattagtgggacactcaggcaaaaatgttggtctttctttgacatgttgcaaaatgttatcaattttgtcatggatat

SEQ ID NO: 2608 - DNA, 661 bp, Homo sapiens
  C5orf3
  misc_feature [331]..[331]: Chromosome 5, SNP identification no. = rs1438591
  misc_feature [331]..[331]: allele = g, in linkage disequilibrium with rs375232, respectively
  misc_feature [331]..[331]: n is a, t, c or g
ctccctatgtgatgttttctggattccatgttttaagaactctaccttgtaaactaactgtgcagacaacatagactttttgatgatttgtttaaaacatgtttatgtaagtctggggggagaaaatatatttgatagttaagttttagatgttaattgaaaaaatgttttaactaccaaactcttacttctctagttttaaattcttttgacattaccatcaaggaaatgattttaattctttaattacacagttttaatcaagtagtcagggaaactattttgatcattgtaataatttttaaaaatataagtttgtgatttagtaaanggcagagtggtgcagtagaaaagactttgtaaaccaggagccccgtgttgccctggatcttccttgatttgttgtgtgactctgacaaacttcgttattttcatgtgcaacataagagatttaactagacgatatctgaggtcccttttgtgtgggaaattgagtattaaatgtcacactgaattttaaatagtacttgccattgataaattttaaaaaggtaatatcacttgatatgggctccctattatttttagtggattttttttttggatacagatttgaaacactcttgtcttcgaaattatacatttttatcttaatgagctc

SEQ ID NO: 2609 - DNA, 661 bp, Homo sapiens
  C5orf3
  misc_feature [331]..[331]: Chromosome 5, SNP identification no. = rs7727981
  misc_feature [331]..[331]: allele = t, in linkage disequilibrium with rs375232, respectively
  misc_feature [331]..[331]: n is a, t, c or g
ccaaccagcacattaaaagatgttcaacattggcgctgggcacggtggctcatgcctgtactcccagcactttgggaggccaacgcaggtggatcacctaaggtcgggagttcgagaccagcttggccaacatggtgaaaccctgtctctactaaaaatacaaaaattggctgggcatggtggcaggtgcctgtaatcccagctacttgggaggcagaggcagaagaatcacttggacccaggaggcagaggttgtagtgagctgagatcatgccattgcactccagcctgggtgacaagagcaaaacttaaaaaaaaaaaaaaaaaaagnaagaaagaaaaaaagatgtacattagggaaatgtaaatcaaaaccacaatgagatactatttcatacccactaggatggctaaaataaaaacaaacaataagtattagcaaggatacgaagaaactggaacccttacacactgctggtgagaatgtaaaactgtgcagccaatttggaaaacagtttggtaattccttaatgacccatatcacccatatgacccagcaattccactcctagctatctacccaagagaaatggaaacatattcacataaaaacatacatgcatgttcatagcaacattattcattatagccaaaaagcaga

SEQ ID NO: 2610 - DNA, 661 bp, Homo sapiens
  C5orf3
  misc_feature [331]..[331]: Chromosome 5, SNP identification no. = rs4594908
  misc_feature [331]..[331]: allele = g, in linkage disequilibrium with rs375232, respectively
  misc_feature [331]..[331]: n is a, t, c or g
ttgaattgtacacttaaagtgagcaaattttatgatatttaaactgctaaagaaaccagacaaacattattgcagtaagaggcatggattcttaccccagcagttgttaggcaggtagtgaactctttagacagagaggacaactctttacacaacacaattgtcatcctaggaaagaaaggaaaagtcagaaacgttttttctttttttaaaaaaataagttatatttaacaattgtcagaagagaacaaatcacttctggtactaaatgtgaaagaagaaagcttttcaagggagtaaatacagtatcccccccttatctgtggtttcnctttttgcagtttcagttactcatggtcaacaatgatctgaaaataataaataaaaaattccagaaataaataattcataagtttttaattgcacatcatcttgagtagtgtgatgaaatctctcattgttttctccatcccacccaggacatgaatcatccctttgtccagcatatccacagaacccactcattagtcagctattaatattagccatctcggttatcagactgactgttgtgttatcacagtgcttatgttcaagtaacccttattttacctaataatggcccctgctatggttttgatatgtcccctctaaaattcat

SEQ ID NO: 2611 - DNA, 661 bp, Homo sapiens
  C5orf3
  misc_feature [331]..[331]: Chromosome 5, SNP identification no. = rs869737
  misc_feature [331]..[331]: allele = t, in linkage disequilibrium with rs375232, respectively
  misc_feature [331]..[331]: n is a, t, c or g
atacccctgtccacagagtaagtggtgcatagattaaaaagtaacccaagccagatcaatggacatcagtctcaggacatctggtaaaattatcagcaaaaagaagtgttctttcagtaagagttaccgaaatggaaaaaagtcacccaccctgaagctgccaatggtcattttaccaccatatggaaaagcttccctaagaatgaagccaaaacaaaaaggaagcaagccgaaagacacagatagggatagagataggttcctgaatagagccatgcctgaagccagttctgctccttgattttctattttcttgagctactgaattccnctcttttaaattagtttctgttattttttaagtttcttaacttgagtttctgtcatttgcaagtgaaagagtcctggtttctcagaaactgtttattaccacctagtttattaactttacatacacagaatgtgttcaaagctgtcatgaggtaataggaatccagagaagactttgagagtcattctaactgagaaaacaggttttattacacatacagtactggagttaggccttgaaggatcagcaagtggggctacacccaaggctacccgaatgagctaaagcagacctgtgttcccagaatttcactgtagggttctttcccta

SEQ ID NO: 2612 - DNA, 661 bp, Homo sapiens
  C5orf3
  misc_feature [331]..[331]: Chromosome 5, SNP identification no. = rs11167652
  misc_feature [331]..[331]: allele = a, in linkage disequilibrium with rs375232, respectively
  misc_feature [331]..[331]: n is a, t, c or g
cataacacatataggtgtatatgtacctgagtatattttccagctctgctgacagcctagaatcaaagccatgccagtggcaatgagtacacttagtactcatgtcttggtctataaaaccaaaagggaatgaatcatgctttctcaaagaaatgtctggttgcagggctggggcacagaaggcataagatgagtctagaatatcttgttatgccagaaaataaggaagcacccaaaaatgatggaggcatgccacctaggagccagcttgaaagacaaatttgaacatcaaaataattaaggacagtgatgaattacaagccaatggggnaaaagcagaactccatgaaagcatactgataacaaattaaaaaaagaacaaaatgggggagaaaggagaggtcatgactattctagaatgctgaaagccaactggtaaatcttcacattaaatattggtgccagaatcataaataaatgctagatttagaagagaaattatgatgaatagcaggatatttgtatggtcttacagtatctcctcacagaaagtttattagcaagataggaaaataaactttaactgtacagaacaaaatcagacaacacatcaccaataaggggcagatggatatcatgtacctttagatgtgataccctg

SEQ ID NO: 2613 - DNA, 661 bp, Homo sapiens
  C5orf3
  misc_feature [331]..[331]: Chromosome 5, SNP identification no. = rs6862861
  misc_feature [331]..[331]: allele = a, in linkage disequilibrium with rs375232, respectively
  misc_feature [331]..[331]: n is a, t, c or g
actggctccagtggtagaggaaaaagtttggtattattggacattattgggtcaactgatgtaactgaaatatggaaaatagattacaacaaattagtacaacaaaagtactaatgttaaatttactgaagttgatagctacactgtggttatgtaagggaatatccctatccttagcagacacatactgaaacatttagaagagcaataatgtttacaatttactctcaaatagttacaaaaataaagtgtttatctatatatgtatacatgtatttacacagagaaagaacacatgtgaaagcacaaatgtttgagcaaatgaagtaantattaacagtactggatttgcataaaaggtatacaaatattgtttgtgctactcttgtaacttttctctaagtttgatattatttccaaaataaaaagcactataagatcaaaagtgctttagtaaagtgttacagtagaggtgagggagatgagctgcctggggatgatctaaaagagctttttcagagaatgcagcattttcgatgggcataggagagtgggataacacaccaaacatcatagtttttgccctgggggatggagacaaggtgactgggttgactatgcaatagctctcacctctccctggccaggaaacaatgtgcac

SEQ ID NO: 2614 - DNA, 661 bp, Homo sapiens
  C5orf3
  misc_feature [331]..[331]: Chromosome 5, SNP identification no. = rs1978855
  misc_feature [331]..[331]: allele = t, in linkage disequilibrium with rs375232, respectively
  misc_feature [331]..[331]: n is a, t, c or g
tagtttttgccctgggggatggagacaaggtgactgggttgactatgcaatagctctcacctctccctggccaggaaacaatgtgcacctgcagctgactggtcctgaaatgcttctcaagattggtagaggtgggtaaagaggtagcaagcaatccatgacccagtgaacagtgtcccaagagcaggcactggcttatacttgccacagaacctccctacccactctgagctttgattaaagtctctccacattccaaatataagaaaatagttccagaatcagcaccaaaaataagggccttggtcataatactctctcatttccacangccaaatagtcattatctgagtcactgggctctgggtaatgacaacctctaatccctatgggcaaggccacatatcatctctaaatcattcagatccctgagaacagtgagtcctcgacagaggctcacccactggaatcatgaggctggtcatcactgccaacttttaatgaccaacattgtagactaaattaagctttcagataagcaaagcatcccaaatgaaaacaggtaaggatgggacacgtgttgtggggcagatgtggcttcaacacactaacctggaggagcagaaggcaagtagatgcagaacccaattctgggtataac

SEQ ID NO: 2615 - DNA, 661 bp, Homo sapiens
  C5orf3
  misc_feature [331]..[331]: Chromosome 5, SNP identification no. = rs1978856
  misc_feature [331]..[331]: allele = a, in linkage disequilibrium with rs375232, respectively
  misc_feature [331]..[331]: n is a, t, c or g
ctccctggccaggaaacaatgtgcacctgcagctgactggtcctgaaatgcttctcaagattggtagaggtgggtaaagaggtagcaagcaatccatgacccagtgaacagtgtcccaagagcaggcactggcttatacttgccacagaacctccctacccactctgagctttgattaaagtctctccacattccaaatataagaaaatagttccagaatcagcaccaaaaataagggccttggtcataatactctctcatttccacacgccaaatagtcattatctgagtcactgggctctgggtaatgacaacctctaatccctatggncaaggccacatatcatctctaaatcattcagatccctgagaacagtgagtcctcgacagaggctcacccactggaatcatgaggctggtcatcactgccaacttttaatgaccaacattgtagactaaattaagctttcagataagcaaagcatcccaaatgaaaacaggtaaggatgggacacgtgttgtggggcagatgtggcttcaacacactaacctggaggagcagaaggcaagtagatgcagaacccaattctgggtataacgagaatataccttcgattttggtgacacctctgccaggaatttataatcttatgctctttat

SEQ ID NO: 2616 - DNA, 661 bp, Homo sapiens
  C5orf3
  misc_feature [331]..[331]: Chromosome 5, SNP identification no. = rs497503
  misc_feature [331]..[331]: allele = g, in linkage disequilibrium with rs375232, respectively
  misc_feature [331]..[331]: n is a, t, c or g
aacaaatgtaaaaagccaaaggtgaaagaaagtatgggaagaagtttaatatgattgagaatatctaacgtaagggggagaagtggtaagctagaaaggtaagatccagataataaaggccatataatcgatggtgaagaattcaaactttataatgaggaagtgaggaaccactgaatggttttaagcagaaacagaatcacatttaaattttagaaagatcactttggtggctgggtggagaatggattagaaggcggaaaagaagagaggcaggctgaggcaataatctaggatccaggtaagacaaaatggtggataagaagaaaanaggatcaatcattatgcatccataataattaaaaataaaaagaagagaagcaaaggggattccagaacgttggaaggatggtaaggaagctgttggagttagtcttgtgaaagatgatggagaaccaggaacacttacaaagaaacaagcaagcaaatgggtgactcaagatcaaaaagcaattagcaaatccaatcagtgcgaaatgctctctttccctctccactcatctgaatcctatacactccccactttgtggtccagcccaaggcttctctgcaacatggaatgcagaagagaactcttgtacatagaaatcttctagcaatc

SEQ ID NO: 2617 - DNA, 661 bp, Homo sapiens
  C5orf3
  misc_feature [331]..[331]: Chromosome 5, SNP identification no. = rs2578373
  misc_feature [331]..[331]: allele = t, in linkage disequilibrium with rs375232, respectively
  misc_feature [331]..[331]: n is a, t, c or g
aaaattatcaggaaatgagatgggtcaggaaatgagatggctgacgtaaagtataattgccaggcaactgaatattaagttctaagggttgttttattgacattttagctggaaatatttctaagatatacactaactgaccttttttttttaaaaaagtggaatctaatgaatacagttttgccttttcttcatgaaataatcagttataaacattaaaagtgaatggaaaaattctctcaggtttcattaagacatagggccaatcacccatgtagtaggttaaatcagtgatgaacaaagtgtggtctgtagacccttgaattcccanaaccctttcagggagtctatgagtcagaactctgcatcataatactaagatgttgtctacttaggaattttttaaaaattataatgagttttttttctgctttggcatttgtgctgttggtgaataacaatgatgcataaaattgctggtgccataacatggatcaagatgttagcagactctactagtgtcattgcattttcattgccatgcattggcagttaaaaaaaaaagtgccagttttatttaatcttgtccttgatgaagcagtaaaaattattaattttattaaatctttacctttaagtatgcatcttacaaatattctgt

SEQ ID NO: 2618 - DNA, 661 bp, Homo sapiens
  C5orf3
  misc_feature [331]..[331]: Chromosome 5, SNP identification no. = rs2560047
  misc_feature [331]..[331]: allele = g, in linkage disequilibrium with rs375232, respectively
  misc_feature [331]..[331]: n is a, t, c or g
tctgggaattcaagggtctacagaccacactttgttcatcactgatttaacctactacatgggtgattggccctatgtcttaatgaaacctgagagaatttttccattcacttttaatgtttataactgattatttcatgaagaaaaggcaaaactgtattcattagattccacttttttaaaaaaaaaaggtcagttagtgtatatcttagaaatatttccagctaaaatgtcaataaaacaacccttagaacttaatattcagttgcctggcaattatactttacgtcagccatctcatttcctgacccatctcatttcctgataattntgcaaatatacatagtatctacatttacattttctgagaaatgaagatattaaaatatggtataagagttttcaaaataaaaaaagacaaactatcacccacattttagataactgccatcctgcatgcttcaattcaagacagaatcaggggttacaagagtcagagaggcagaggtaaagtacctaggaatatgaaagctcatatgaatgaccagtcaaactgaggcaagaatctgatgagaacagctttctaactgcaaaaataggcaaagatgtgagttgcaagattagaccttgagaagccacaaagggtttggttggaaggagg

SEQ ID NO: 2619 - DNA, 661 bp, Homo sapiens
  C5orf3
  misc_feature [331]..[331]: Chromosome 5, SNP identification no. = rs2560048
  misc_feature [331]..[331]: allele = c, in linkage disequilibrium with rs375232, respectively
  misc_feature [331]..[331]: n is a, t, c or g
acaacccttagaacttaatattcagttgcctggcaattatactttacgtcagccatctcatttcctgacccatctcatttcctgataattttgcaaatatacatagtatctacatttacattttctgagaaatgaagatattaaaatatggtataagagttttcaaaataaaaaaagacaaactatcacccacattttagataactgccatcctgcatgcttcaattcaagacagaatcaggggttacaagagtcagagaggcagaggtaaagtacctaggaatatgaaagctcatatgaatgaccagtcaaactgaggcaagaatctgangagaacagctttctaactgcaaaaataggcaaagatgtgagttgcaagattagaccttgagaagccacaaagggtttggttggaaggaggcagggagacatgggcataaggccaactgcccccatcaatgcctagtcaggtgcaaggctgcagagaattttacacagagaatttgcataaaaattttcaccaaaaaagtaaaatcaagccagtgtaataagagtaaataatttatttcaagggcaatgcactgcatacaaacacactgcatcctctccactcagatactaaattttcatattaccttttttctcttcttcctcttcttca

SEQ ID NO: 2620 - DNA, 661 bp, Homo sapiens
  C5orf3
  misc_feature [331]..[331]: Chromosome 5, SNP identification no. = rs9324764
  misc_feature [331]..[331]: allele = t, in linkage disequilibrium with rs375232, respectively
  misc_feature [331]..[331]: n is a, t, c or g
acagaaaggtagggagactctgtgcttctaaaagtaataccagccagaaattcctggaaattatcagtgtttagcaacagcttagaaataacaaaaaaattagataatcttaaatcaattaaaagctaacaggtaactgtacacaaattggcagctcaagtcaacaggtttcttggcagcctaggccaaagaaactaaaaaaaaaaaaaaaagaccaaaacgaaggaaaaataacacatgtcctattaagacctctttgttaaccttttttgtttaaatttaaagaaataatacttgactaattctgcttttagcaattagttcaatcaancattagtttttaaatttattttgtggtagtatttcgaaggcatctcaagcctctaacaaaacatacacttcatcttccaaatgtacaaagagaaaggaaaccatgcagcattcttttacttgaagactttttccagttgagattttggcttggaattacctttatttcactttcttgggaaagcatctccagagcttctagatgtgaaaggccttgaaattcatcaaagagtagcccataatgagttttcttgtctgtttccacggtaacctcattggaggtccgtatctcttctttctccttcgcctctcgtaaaacctaaaaagagat

SEQ ID NO: 2621 - DNA, 661 bp, Homo sapiens
  C5orf3
  misc_feature [331]..[331]: Chromosome 5, SNP identification no. = rs9324765
  misc_feature [331]..[331]: allele = t, in linkage disequilibrium with rs375232, respectively
  misc_feature [331]..[331]: n is a, t, c or g
gtttagcaacagcttagaaataacaaaaaaattagataatcttaaatcaattaaaagctaacaggtaactgtacacaaattggcagctcaagtcaacaggtttcttggcagcctaggccaaagaaactaaaaaaaaaaaaaaaagaccaaaacgaaggaaaaataacacatgtcctattaagacctctttgttaaccttttttgtttaaatttaaagaaataatacttgactaattctgcttttagcaattagttcaatcaaacattagtttttaaatttattttgtggtagtatttcgaaggcatctcaagcctctaacaaaacatacanttcatcttccaaatgtacaaagagaaaggaaaccatgcagcattcttttacttgaagactttttccagttgagattttggcttggaattacctttatttcactttcttgggaaagcatctccagagcttctagatgtgaaaggccttgaaattcatcaaagagtagcccataatgagttttcttgtctgtttccacggtaacctcattggaggtccgtatctcttctttctccttcgcctctcgtaaaacctaaaaagagatggaggcattacactgtagcaaacaatgagagctcaagggtgagttctgagaattgaaggaagcaaagc

SEQ ID NO: 2622 - DNA, 661 bp, Homo sapiens
  C5orf3
  misc_feature [331]..[331]: Chromosome 5, SNP identification no. = rs6889563
  misc_feature [331]..[331]: allele = c, in linkage disequilibrium with rs375232, respectively
  misc_feature [331]..[331]: n is a, t, c or g
atgtacaaagagaaaggaaaccatgcagcattcttttacttgaagactttttccagttgagattttggcttggaattacctttatttcactttcttgggaaagcatctccagagcttctagatgtgaaaggccttgaaattcatcaaagagtagcccataatgagttttcttgtctgtttccacggtaacctcattggaggtccgtatctcttctttctccttcgcctctcgtaaaacctaaaaagagatggaggcattacactgtagcaaacaatgagagctcaagggtgagttctgagaattgaaggaagcaaagcttagacaggttanagtacagaggattgccctttcattcttggcactgctattcaaatctggtgggctcaggagctgcagaaagaaaaacgatcacacataatttgagacggagtttcactctgtcacccaggctggagtgcagtggcacgatctctgctcactgcaacctctgcctctcgggtttaagctattctcgtgtttcagcctcccaagtagctgggattataggcatacgccaccacgtccagctaattttggtatttttagaagagacggggtttcatcatgttggtcaggttgatcttgtactcctgacctcaactgattcacctacctcggcct

SEQ ID NO: 2623 - DNA, 661 bp, Homo sapiens
  C5orf3
  misc_feature [331]..[331]: Chromosome 5, SNP identification no. = rs7704562
  misc_feature [331]..[331]: allele = g, in linkage disequilibrium with rs375232, respectively
  misc_feature [331]..[331]: n is a, t, c or g
cacacataatttgagacggagtttcactctgtcacccaggctggagtgcagtggcacgatctctgctcactgcaacctctgcctctcgggtttaagctattctcgtgtttcagcctcccaagtagctgggattataggcatacgccaccacgtccagctaattttggtatttttagaagagacggggtttcatcatgttggtcaggttgatcttgtactcctgacctcaactgattcacctacctcggcctcccaaagtgctggtattacagccgtgagccaccgtgcctgaccacataatttgatcctagacagtgcaaatcacacccanggaaccaggtgtttctctgaaagtgatttaaacattaaaacaaacaaacaaacaaacaaaaaaccctgacagggtttagcattttgcactgcactgatgggaggctcctgcagaaagaggaggagaaaaagagctgggtatttttgtaagcagtagagctctcacccatccctgatccccccaaaaaaacgcctgaataaacattattgaaaatgcttgaaaagaaaacactaacaaggttccaagtaaacaaaggcaaaaatacagatcaaaacagaaacaggaagtaaacaggtaaggataatcagtacctgagatagtgtagcattt

SEQ ID NO: 2624 - DNA, 661 bp, Homo sapiens
  C5orf3
  misc_feature [331]..[331]: Chromosome 5, SNP identification no. = rs2578376
  misc_feature [331]..[331]: allele = t, in linkage disequilibrium with rs375232, respectively
  misc_feature [331]..[331]: n is a, t, c or g
taccaaataatttcagtattatcaaatattatagagaggacttccacttctagcatgatggattaactggtattagatatgacctcctgccacaacaactgaaaaactggacaatatataagaagcaactgtcttcagacataggacaataggcagtacaagacttcggttcacacaagaagaacaacaaagtaaaccttacaattggcttggctttctgtatagaggagctttccaggccatgacagagggaggagaaacccaagtagggcatggcaatcagtttgagtggaagaaacggagactggaatctgggaatgctgaagcaatnggaatttgcaggtcagaaaaccgtagaggaggaagctacatagctaaaaagttctaagaatccgcataggcatgccctaagacacctttaggtgtttttgcttaaatactgcactgctgaggcactgggaggctccataagtctgtacaaagaactaccatggagctctaagctaagcaatccccagagctcacgctaggctgagagacatttgacctccaaccacaaaagcagagactttatattaaacacctgggaattaaggtggagacttcggaagagtcaagccttagcagcagagataaacagtacttagttagagtaaaggcc

SEQ ID NO: 2625 - DNA, 661 bp, Homo sapiens
  C5orf3
  misc_feature [331]..[331]: Chromosome 5, SNP identification no. = rs2560059
  misc_feature [331]..[331]: allele = a, in linkage disequilibrium with rs375232, respectively
  misc_feature [331]..[331]: n is a, t, c or g
ttaggtttattattcatggtttatggggagaactagtaactagtaccactcagtggaagttatatagagttaagttttagtttaataaagagtttaacagggagaactttccaaaattacaatggactgccttttgatactaaaccccttctatcttctaaagttcctgaggaaggaggttaattcctctgccaaggatgtgtcttgtagtcaacatgtatattttcagaattttgagataagcataggccattgatggaaatcattgatcatctattagggattttgttttcttcctttaaagggggctatcttctgctttccttttgtnggcgggcagttaaggtatttgcaacttaaattgatgctttaaggcttttttttttttttttggagagggagtctcactctgtcgcccaggctgaagtacagtggtgcgatctcagctcactgcagcctctgcctcttgggttcaagttcttctcctgcctcagcctcccaaatagctgggattgcaagcatgggccaccatgcctggctaatttttgtacttttaatagaggtgaggttttgctgtgttggccaggctggtctcaaactcctgacctcaagtgatcctcttgcctcggcctcccaaagtgctgggattacaggtataagc

SEQ ID NO: 2626 - DNA, 661 bp, Homo sapiens
  C5orf3
  misc_feature [331]..[331]: Chromosome 5, SNP identification no. = rs7731081
  misc_feature [331]..[331]: allele = g, in linkage disequilibrium with rs375232, respectively
  misc_feature [331]..[331]: n is a, t, c or g
ataaacctctaacttgattgagacctgtctcagacactttttgattcacactatctagctgactcttttctggattcacccagtttttcaaagcccttcttaaaacatggccctctgtggtagatatctttcagtgtcatgaagatgctgctgttaacatattcaaagccacttctaaccccctttttccttggctgctaaacccatatcctgatcttgaggtttctgataatgcccaaaacgcactctctcagcatctcttgctgctacatcaagaacatgagatcctgttctaggcaatggcattggagaagaaacatgcttgggactnctggaaaacatttcccctctttaaagaaagagggatgcatgaggaaaaatgacacttcccatctacttcattcctgactttgagcatggttattttagaacactatacttggagttgcagtattatcggacaaccataaagaaactataaagaaatcaacaaagaatactgtagagaagccagcccagaaccttgacatcattgagccactaaactaactctggaacagcctacttctagagtccttaagtaagaaaaatatattgactttcattcacacatgctgttacttgcagctaaaatagtttaactgatgcaggcatcactaag

SEQ ID NO: 2627 - DNA, 661 bp, Homo sapiens
  C5orf3
  misc_feature [331]..[331]: Chromosome 5, SNP identification no. = rs720985
  misc_feature [331]..[331]: allele = a, in linkage disequilibrium with rs375232, respectively
  misc_feature [331]..[331]: n is a, t, c or g
cccctctttaaagaaagagggatgcatgaggaaaaatgacacttcccatctacttcattcctgactttgagcatggttattttagaacactatacttggagttgcagtattatcggacaaccataaagaaactataaagaaatcaacaaagaatactgtagagaagccagcccagaaccttgacatcattgagccactaaactaactctggaacagcctacttctagagtccttaagtaagaaaaatatattgactttcattcacacatgctgttacttgcagctaaaatagtttaactgatgcaggcatcactaagaacagtgcctccanttcacatccatagtcctttgcagccatgtttatacatgtgacttgtctccaggccataagtgatccatggacatatgacccaagtttagactgattcttttacctaggaattcagaagtggaaataactgatgccaggattcaatataaagctggagctgaggaaaataagcagcgaaagtcagtctgcttcaagaaaaaaactgagacagatcagcaaaaagaaacaagagtgagagacaataaagcccatgagagatgaagaatgcaaaccaggccttgaaaagattcctattttctggtcccaggccctctcgatttctggttataa

SEQ ID NO: 2628 - DNA, 661 bp, Homo sapiens
  C5orf3
  misc_feature [331]..[331]: Chromosome 5, SNP identification no. = rs720987
  misc_feature [331]..[331]: allele = a, in linkage disequilibrium with rs375232, respectively
  misc_feature [331]..[331]: n is a, t, c or g
gaacagtgcctccagttcacatccatagtcctttgcagccatgtttatacatgtgacttgtctccaggccataagtgatccatggacatatgacccaagtttagactgattcttttacctaggaattcagaagtggaaataactgatgccaggattcaatataaagctggagctgaggaaaataagcagcgaaagtcagtctgcttcaagaaaaaaactgagacagatcagcaaaaagaaacaagagtgagagacaataaagcccatgagagatgaagaatgcaaaccaggccttgaaaagattcctattttctggtcccaggccctctcnatttctggttataattctagccttcatagtttgagagtaggtttctgtctgatcaaggctagcctctagaattaaacgtagtcttcataaaaatctgaacacaaaaggaatacacccccaaaacaatacattaaaatatttttatcatgtcacaacagactcagattcagctaactcttattagtctcttattcaattatgccaagcaaaatgctaagcaatttttatattgtatattcatggccttatttgttaaatgtttataacagtcacttgagatataaaatatcattctatttcagatgtggaaagtgaagtaaagggacacat

SEQ ID NO: 2629 - DNA, 661 bp, Homo sapiens
  C5orf3
  misc_feature [331]..[331]: Chromosome 5, SNP identification no. = rs2578377
  misc_feature [331]..[331]: allele = t, in linkage disequilibrium with rs375232, respectively
  misc_feature [331]..[331]: n is a, t, c or g
taagcaatttttatattgtatattcatggccttatttgttaaatgtttataacagtcacttgagatataaaatatcattctatttcagatgtggaaagtgaagtaaagggacacataagcagttaaaggacatagatgtctaattgggaactaaagattctaaatactctttctcactacagtcccacgatgccctgagtatcagatgtccaataaatacctactgaaaaattagttcaactgttccatttcaattcataattctaggtctttatgtttccatatactgacctgctacatacttgacttcagttgaaatttcactgggacnagggattccaagggaagtctctgccttctcgatgacatttgaaatgccttgtcctaatgagaaaaataacttttttttttgctatttgtcaccaaaactgaagaaacaaaaatcaaacttgaagatttttaaaatcatttaggaccacaagacatgttattttgacaatacataactaatcttggcactatttccttaaaaaaattgattcatcatcaccaaagaataagttcacagtaataattcctagacttcaatattctaatgaggaaatgctacaaactctagtggcagtatatatcagcccatcattactaatgcatcctcaaa

SEQ ID NO: 2630 - DNA, 661 bp, Homo sapiens
  C5orf3
  misc_feature [331]..[331]: Chromosome 5, SNP identification no. = rs11167654
  misc_feature [331]..[331]: allele = c, in linkage disequilibrium with rs375232, respectively
  misc_feature [331]..[331]: n is a, t, c or g
aggatatctgtattgtttccagtttgggactattataaataaaacagctatgaaagttcatgtataggtttttgggggaacataagctatcatttctctggggtaaatgaccaagagtgcaactgctgggtcatatggttaagttcatgtttagttttatgagaaactgccatactcttttccagactagctacaccattttacatttccaccagcaatgtatgactgataagtttttctgcattcttgccagcatttgacattgtccctattttttatttgagccattctgacagttgtgtggtgatatctcattgtggatttaagttgnacttctctaagacctaataaggttgaacatcttttcatgtgcctatatgccatctgtatatccttgtcagtgaaatatctttgtatcttttgcccattttctaatgagattttttttttactgttgagttttgagagctcttcatatattctgtataatatgtggtttgcaaatatttttttccagtatgtagcttatcttttaattgtcttcattgggcctttcagagcaagtctttaattttaatgaggtataatttatcaatttttccttttacttattgtccttaaaaatcttactagttattaatcattcctacctcaatttttc

SEQ ID NO: 2631 - DNA, 661 bp, Homo sapiens
  C5orf3
  misc_feature [331]..[331]: Chromosome 5, SNP identification no. = rs10039286
  misc_feature [331]..[331]: allele = c, in linkage disequilibrium with rs375232, respectively
  misc_feature [331]..[331]: n is a, t, c or g
caatgtatgactgataagtttttctgcattcttgccagcatttgacattgtccctattttttatttgagccattctgacagttgtgtggtgatatctcattgtggatttaagttgtacttctctaagacctaataaggttgaacatcttttcatgtgcctatatgccatctgtatatccttgtcagtgaaatatctttgtatcttttgcccattttctaatgagattttttttttactgttgagttttgagagctcttcatatattctgtataatatgtggtttgcaaatatttttttccagtatgtagcttatcttttaattgtcttcantgggcctttcagagcaagtctttaattttaatgaggtataatttatcaatttttccttttacttattgtccttaaaaatcttactagttattaatcattcctacctcaatttttccaggacatcatgaaatttaagccatcagattggctttatgtcagatcaacttttgaataccagtgttactcaattcaattccttccagatgtagagctctttggcaattaaagccaagatactattggtgtctctacaaagaacagacactagtttccaggataaccaaggattatcagagtagaaatcaatacatctcacacatatgtacacac

SEQ ID NO: 2632 - DNA, 661 bp, Homo sapiens
  C5orf3
  misc_feature [331]..[331]: Chromosome 5, SNP identification no. = rs10055534
  misc_feature [331]..[331]: allele = a, in linkage disequilibrium with rs375232, respectively
  misc_feature [331]..[331]: n is a, t, c or g
ctcaatttttccaggacatcatgaaatttaagccatcagattggctttatgtcagatcaacttttgaataccagtgttactcaattcaattccttccagatgtagagctctttggcaattaaagccaagatactattggtgtctctacaaagaacagacactagtttccaggataaccaaggattatcagagtagaaatcaatacatctcacacatatgtacacacacgctgtaggtatgtactgatatgtactaagtgcagaattagacccaacccatgctatcaaaatgtttctaatgtattagaaaagaaaggcatattaaaactaangcagactggatgcagcactataacaggtgctgcattcagtccaacacacaaaatgctgaaacatccctgccagaccatccaacacacaaaatgctgaaaaaaaacagaactccattagaatcagacaacgtaattcatgaacaaagtacctgaaataagcctagagtagtggtcacaaactgggaatttaagtgccaaatccagcctacagatgtttttatttggcctgcacagtatttaacctttgcaaaaactagatgccaacatttaaaaatcagacttcatataaaaatataggcttccaacttctaacttgtaaaattaaaagat

SEQ ID NO: 2633 - DNA, 661 bp, Homo sapiens
  C5orf3
  misc_feature [331]..[331]: Chromosome 5, SNP identification no. = rs4594909
  misc_feature [331]..[331]: allele = a, in linkage disequilibrium with rs375232, respectively
  misc_feature [331]..[331]: n is a, t, c or g
ggtatgtactgatatgtactaagtgcagaattagacccaacccatgctatcaaaatgtttctaatgtattagaaaagaaaggcatattaaaactaaggcagactggatgcagcactataacaggtgctgcattcagtccaacacacaaaatgctgaaacatccctgccagaccatccaacacacaaaatgctgaaaaaaaacagaactccattagaatcagacaacgtaattcatgaacaaagtacctgaaataagcctagagtagtggtcacaaactgggaatttaagtgccaaatccagcctacagatgtttttatttggcctgcacantatttaacctttgcaaaaactagatgccaacatttaaaaatcagacttcatataaaaatataggcttccaacttctaacttgtaaaattaaaagatctagcaacaccgggcccacattcaactctgtaataactagcttgtgctaaatagccgctgggcccttttagctagggcagttgctctccagctccctacaatcccccacgcaaatccacttcactcaaattatgctacctgattaacctctgtaggcatctgagttggcaacacctgccttaaaagaagcttatgattttgacagatgatgatgccaatgacaggattcaagga

SEQ ID NO: 2634 - DNA, 661 bp, Homo sapiens
  MFAP3
  misc_feature [331]..[331]: Chromosome 5, SNP identification no. = rs920309
  misc_feature [331]..[331]: allele = c, in linkage disequilibrium with rs375232, respectively
  misc_feature [331]..[331]: n is a, t, c or g
gcgtgagccaccatgccctgccaaaacagtccctttactaaaatattaaacactggttatctctattctttcatttgtgccagatatttgagctaagccagaagagaattttttatggtgatggttgtttatattatcattactatcgttattagaatgactgtaccatctctttcctcaactcattcataatctaggagaaaggttaaaaaaaaaaaaggaataaacaccaagtacgtggaactgcactatttagtgtttttgtaagtcttccaggcattgtgtagtaagcgtgtagaaataattgtagtttctcctccagttattttcncagttggaggagaaagattccaataactgtaaataaatacggctgagccatatttttaagaaataaaaacgcatacgcttacacacacacatatatattacgtatatatacactccacccgccccatttaccaaaatgaagagcagtacagcttagtagctaagagcacgggctctggagtttactttcttcctgtcctgcagcgattgtggggaagtcaggtcacctgtctgcctctccgtttcctcatctgtcaaatggagttctgggtccctataaagattcagtgacgcgatatgtgaggggcttggaacagtgaccggcacgtaa

SEQ ID NO: 2635 - DNA, 661 bp, Homo sapiens
  C5orf3
  misc_feature [331]..[331]: Chromosome 5, SNP identification no. = rs2560062
  misc_feature [331]..[331]: allele = t, in linkage disequilibrium with rs375232, respectively
  misc_feature [331]..[331]: n is a, t, c or g
aagtcaaggaaaagacaaaggccactggctagagcaaaaggagcaaggtgagaatggagagagatgaggccagggacttgagcccaaatcttgtaaggcttatgagcaaggataaagagtttgatttttgtttggaatccagtggaaaaccattgaaggtttctaagcagatgaatgacatgatctgatttatgactctaagattactcctgggacctcatcagaaagatgcaactcttctgttgccctcgagcagtgaaaatgcatgaaatccagactgacagagctagtaaaatattaaaatcaatcttattgtacagataagaaaaantgaatcccagagaggtgaagggacttagcctttaagaactcatgttttccaactccatttaatgccctcggaattatcatcttaattcccagataagagtaattgtcacttctaaaactcttcagatattttcctttgcttttgacagtggttctctaaatttaggttcatcaatatcacctggaagcttgttaaaattccaaaaaacaacaacaaaaaaacccctgcttaaatataaaatggatcatttcctctgattttctgttgtaatggaaaatgcatagaatttggggctaaagtatggaatcttgggaagccacttatttttta

SEQ ID NO: 2636 - DNA, 661 bp, Homo sapiens
  MFAP3
  misc_feature [331]..[331]: Chromosome 5, SNP identification no. = rs567749
  misc_feature [331]..[331]: allele = t, in linkage disequilibrium with rs375232, respectively
  misc_feature [331]..[331]: n is a, t, c or g
ttgcttttgacagtggttctctaaatttaggttcatcaatatcacctggaagcttgttaaaattccaaaaaacaacaacaaaaaaacccctgcttaaatataaaatggatcatttcctctgattttctgttgtaatggaaaatgcatagaatttggggctaaagtatggaatcttgggaagccacttattttttaaatgctgctgataattatagcagcagttctcaaactttttgatcttagaatttctttatacttttaaaatgtattgagaacttcaaagggtttttgtttataatagctatcaatatttactattttagaaaacaantttcaacaaaggttattcattttaaaataaactcattatatgttaacatagatagcatttctgtaaaggatattttccaaaatgaaaaattattgagaatggcattgttttacattgttacaaatctctttaatgtctggctgaataaaagacagctagattttcgtaacttctaccttcattctcttacaatatcaatcatcatgtaacttttagaaaattgtgccatattgtgtgagaatgtgagtgaaaaagggatatgtcctaatattatgtaaattgttttgaaacagtgtcagggacacccaggagttcctgcaccacactttt

SEQ ID NO: 2637 - DNA, 661 bp, Homo sapiens
  MFAP3
  misc_feature [331]..[331]: Chromosome 5, SNP identification no. = rs816041
  misc_feature [331]..[331]: allele = a, in linkage disequilibrium with rs375232, respectively
  misc_feature [331]..[331]: n is a, t, c or g
ggatttaaacattaagtctggtctttagttttacctctatcacaaattagctatgatgtgctccagtggttttagtttcctcacctagaggctgattatcattatcattcgtttctttgcttaaatcctataatctacccagctttcctgccatggctgaaagcctaaactacgcttgttttactttattctctctaaataacttttcaccttactagttgttccttttgcttaaaaatctttctgccccttcccgtcaatatctttctgggggaaactgtaccctctctataatattcaactctaatttcatcttattcaggaaaccctntcatgcccaccctcttgtcagatgagttttttttttttttgctctgtcagtcccctagcacattaagagtacgccattataagacttatcagttttcctcttagcagttagttatccgttcaaaagactgtaagcttatgaatgatagagtctaaaaaccttctgtccttagcacagggccactgcctgtggcaagtgctcaaaattttgagttcagacactcatcgacttggtagtgtgaaaggtgtctgctacaaacttattaactttccagagcttcaggctctggaaactattgatggagagaggtgaagataagaaagacaccta

SEQ ID NO: 2638 - DNA, 661 bp, Homo sapiens
  MFAP3
  misc_feature [331]..[331]: Chromosome 5, SNP identification no. = rs816039
  misc_feature [331]..[331]: allele = a, in linkage disequilibrium with rs375232, respectively
  misc_feature [331]..[331]: n is a, t, c or g
gcaggcacacaaattgacaaagcagcattctgaatcggcaaaggggagaaaaagcaaatgaagagcaggttgttagcactaccctaccctttgcaaagaataaacacaaagttgttctgcctagactcaagcattattatagggatctgtaactaaaaaaggttagtgacattcaaacagaaatcactatcctgagggccatttactcaaaagtttctaattaaaatagcctttatattactaccttggagctatcacataccccataactagcatttggtcagtctgagctcaaacttcaacatatcttctggcacctggagaaacatcntctgtatttatcagagctttgctttaaacccaggattatttcagttatacccataacttatatcctttttgccataggtatatttgctgaatagctactggatgcaaatgacaaaaacatcaatgaaacaggcttagatttatgatcttcccaggccatttttccccctctatagtctgaaacatctctatttgaaactcagtctagttaaaacagaactcctcttaccctcagatctacttgttcagcttatgaacagcttagataatagccagacaattcttccagttttgcagtatcaaaattgtaagacaatcatggctcagtggt

SEQ ID NO: 2639 - DNA, 661 bp, Homo sapiens
  MFAP3
  misc_feature [331]..[331]: Chromosome 5, SNP identification no. = rs544908
  misc_feature [331]..[331]: allele = c, in linkage disequilibrium with rs375232, respectively
  misc_feature [331]..[331]: n is a, t, c or g
aaatagtgagggaagaacaaatcatccttggtatcagggtactattatttcctcacactaagtctcctttttgctaagtcagcttgaatgggtttctgctacttgcagcacaaactgcattgactatgaccattctgctcattctagactaatgactttaaaactacagctcagctaggtcaaggatccatcgtggaagatgaagtacagtaggtggtgcaagagttgctaaggagaattaggacactgtcctagaccctcaggaatttacaaaccagcttgaaagacagcccagaaacagccaactgtatctaagacaatgtgactgaantgtaattatattgtgaatgcaacagagaaaagacaaatgtgtcagttctaggaatgcaattcacttatatgtttgggacttcctataatattaggcctgcatgctttgaacatatgatcctttatactatagttattttactttcatttccaatcctttaatttttcctcacatatacagcctcagatgcagaattgttcaccaaatcagttaagtgggctgaggtcattaaggcaggtatattagatgccatgggagacacaagagtacgtgcatttgtatttggaaaaaaaaatatatatatatatattatgcctgctgtttttaatg

SEQ ID NO: 2640 - DNA, 661 bp, Homo sapiens
  MFAP3
  misc_feature [331]..[331]: Chromosome 5, SNP identification no. = rs816037
  misc_feature [331]..[331]: allele = g, in linkage disequilibrium with rs375232, respectively
  misc_feature [331]..[331]: n is a, t, c or g
agatttagattactctagatcagcaaaattgaaggtctctaataagagcagggtagcagagaggttcagagtataggattcaaatacgatctgtgactctaaccagccttgcaacttttataaatgacttaatctccctgcctcagcccctcatctttaaaatgggcaaaataacagaatctattctcacaggattattgcaaagtctgaatgaggtagtatacataaaacacagagtctggcaatggtaatcactgaataagctctattattattgttcatggttctttcagatattgaactaaaatttacatttgatagttacatcatnataaaacactcagaataccatgcaaccatttaaaaatcttgggggttggggggaaggggacaccattatgcagttttaatcttaaatttaaaatttcacatttttctttttctcattgcaaatattttgcaatattatggagcatataggcattgtaaactgagcttggatcccaaccatgatatgacattgtatgtgtcctcagtttgtggtagagaagatttgtcgtgatctacttacccaacggctcccctctttgagccctatccctatcttcttgggtctaggaggaagacaacctattggcaaagtaagctaatagaatctttg

SEQ ID NO: 2641 - DNA, 661 bp, Homo sapiens
  MFAP3
  misc_feature [331]..[331]: Chromosome 5, SNP identification no. = rs816036
  misc_feature [331]..[331]: allele = c, in linkage disequilibrium with rs375232, respectively
  misc_feature [331]..[331]: n is a, t, c or g
tactgcatctaagggccactaatacagttcctcaatttcctctgcaactgacctgcagaatggtgcttcaggctatttgaatatttccaatgagagatataatcactcacattccattctagatttagattactctagatcagcaaaattgaaggtctctaataagagcagggtagcagagaggttcagagtataggattcaaatacgatctgtgactctaaccagccttgcaacttttataaatgacttaatctccctgcctcagcccctcatctttaaaatgggcaaaataacagaatctattctcacaggattattgcaaagtctgantgaggtagtatacataaaacacagagtctggcaatggtaatcactgaataagctctattattattgttcatggttctttcagatattgaactaaaatttacatttgatagttacatcattataaaacactcagaataccatgcaaccatttaaaaatcttgggggttggggggaaggggacaccattatgcagttttaatcttaaatttaaaatttcacatttttctttttctcattgcaaatattttgcaatattatggagcatataggcattgtaaactgagcttggatcccaaccatgatatgacattgtatgtgtcctcagtttgt

SEQ ID NO: 2642 - DNA, 661 bp, Homo sapiens
  MFAP3
  misc_feature [331]..[331]: Chromosome 5, SNP identification no. = rs411245
  misc_feature [331]..[331]: allele = a, in linkage disequilibrium with rs375232, respectively
  misc_feature [331]..[331]: n is a, t, c or g
tcacaggcgagggctgcagggcaatgagtgtcctcaccaacacaaggcttggcaaagcataactcccacatggaattctgccttcccgcaaacttcctgaacctcctatcaaggccttagctattcctcctacataaattcagagtatagctgtataaaggatggcttctccttcaccccagagccctccccacctaccgtactcatctggcgctggtatatgctgctctgtactgctaggcagtctatcccatctcaactaccccttaagaacaaggcctatattttttattgctgtacgtcataactagcacatgctcaataaatattnatggagattagtttaaatttgattcagtatgtgacagatctttataaattgaataatgttatgcaacagggattataattgttcaaactgacatacagttgcctattataaattctctgaaacaaaaacagtcaatgctaacaatcttggaagaccttaaaagtacctaattaaatgcattcttccgactcccaacctgataccttcatttaccatgttgtcctagaggataatggtaggaataaaagatcaccaagtgcagtttccaaaccaggttgaatatcacaactgtcaggagagctttttaaaaatatggattcccaggtccca

SEQ ID NO: 2643 - DNA, 661 bp, Homo sapiens
  MFAP3
  misc_feature [331]..[331]: Chromosome 5, SNP identification no. = rs816035
  misc_feature [331]..[331]: allele = c, in linkage disequilibrium with rs375232, respectively
  misc_feature [331]..[331]: n is a, t, c or g
aagagggggtgatgggtagaaacaatggaaataacatttattgaatgactgccatcagccaagcactgtgctaggggcttgacatgtaagtttccaagctctttttcactgcaagatatacagcaattggaggacataattttgtactttattctagattagtggttctcaacggtgacaggctatgagtgtgctgaaaaaatgctccaggctttctccagaactttgattaggagttcctatagcttcatccagggcagcacttcccaaacttcattcattccttctcctgtcttttttgttgttgttgtttttactatatccatgaacnaaattatcgtcatttctgcttttcttttaaatcaactcattttatttttactttcacatttatttaaaaaggaaactctacatcagttctgtggacaaatgtaaccgtacacataaacataatgaaaacaaagaagtgttattagcttccagagatactactgcctgctgaaaggctttgagctggaggcttgctctctctgtagtaaaaccaaaaccaaaacaaaaagccccccacaactccagtttattttaatgccacctcatttcttaacctgccatctccttcctttctactcttccccaccactgagtttgagatcggagggat

SEQ ID NO: 2644 - DNA, 661 bp, Homo sapiens
  MFAP3
  misc_feature [331]..[331]: Chromosome 5, SNP identification no. = rs478020
  misc_feature [331]..[331]: allele = g, in linkage disequilibrium with rs375232, respectively
  misc_feature [331]..[331]: n is a, t, c or g
actcaattgaaacgctagttccctctttggctatgatgacatcatcatccgagtgggaacttgctgagagttcaaagcttgagggaaaggatgcattgtaagaactacgatttgcttccagtgaaaccatttggtcgaagtccacatcttccaaaacaaaagcagctggcacaataatacttgccactaaagtgaataagcaacaatgtagcttcatgggaaaatgggacaaaatcttgtttagatttggagaactcaaaaacttctacactacaacaaaagcacagcgggtaatttattgcttggtagagaaattttccaaacaagtggnagatccagttatattttctagtcttcaagattaaaagatgtgagtagagaacctaaaagaaagccagatacaaagtttaaccaactgagattcataatggggtgaaagtgcgtatgttccagaatgaatagatgttaattagaataattggtgctgacattggggagtaattagatggaacagtacctaaaaatctcacacagagacagcagaaaaagcaatgaattggtaaatagcagacctagattttggtcctagctttgccactaactagctgtacgaccttggcaagcagcattctctctgggtttctgttttctcctctgtcaa

SEQ ID NO: 2645 - DNA, 661 bp, Homo sapiens
  MFAP3
  misc_feature [331]..[331]: Chromosome 5, SNP identification no. = rs689715
  misc_feature [331]..[331]: allele = a, in linkage disequilibrium with rs375232, respectively
  misc_feature [331]..[331]: n is a, t, c or g
gactggctgtgagaagacactcaattgaaacgctagttccctctttggctatgatgacatcatcatccgagtgggaacttgctgagagttcaaagcttgagggaaaggatgcattgtaagaactacgatttgcttccagtgaaaccatttggtcgaagtccacatcttccaaaacaaaagcagctggcacaataatacttgccactaaagtgaataagcaacaatgtagcttcatgggaaaatgggacaaaatcttgtttagatttggagaactcaaaaacttctacactacaacaaaagcacagcgggtaatttattgcttggtagaganattttccaaacaagtggtagatccagttatattttctagtcttcaagattaaaagatgtgagtagagaacctaaaagaaagccagatacaaagtttaaccaactgagattcataatggggtgaaagtgcgtatgttccagaatgaatagatgttaattagaataattggtgctgacattggggagtaattagatggaacagtacctaaaaatctcacacagagacagcagaaaaagcaatgaattggtaaatagcagacctagattttggtcctagctttgccactaactagctgtacgaccttggcaagcagcattctctctgggtttc

SEQ ID NO: 2646 - DNA, 661 bp, Homo sapiens
  MFAP3
  misc_feature [331]..[331]: Chromosome 5, SNP identification no. = rs690542
  misc_feature [331]..[331]: allele = g, in linkage disequilibrium with rs375232, respectively
  misc_feature [331]..[331]: n is a, t, c or g
gaaaattaaataaaaatctgtcaaaaagtagaccttgaacacactatgtttatgtgatttttaagacataaacaaaaaatgcaaaaaaaaatttctcatttccagtaaattaaggtatagaatacaaaaaaaaaaaaaaaaaaaaaagagctggaagggcttacaagttccatagtgcccttctaattctctgagacctgacgtcaaagttttatgcacagattgatactcattttcaaaaatgtcctggatttcctctaaagtttatagtaactaatttcagagcaaaacttttttatttataacaaattttcttaagtctagccaaaanccttctggatgtattcacacagggccaccacactgtactactgacatagtagtctaggtgaagggtgctcccagagttgtgttgtataccacctgtacagctgtatgcagcagccctgatttactctaccttcaatgaagaagaaaaccaactgatcaggagagaaaatagctcattgtcatcatgtgaacatcttttaaatttagaatgattcttttttttcttcttctggttaaacaattataattactttgcattttctgataggtacaacactccagacctttcaaatgttttaaactattcaccttggcaccttatctttgagac

SEQ ID NO: 2647 - DNA, 661 bp, Homo sapiens
  MFAP3
  misc_feature [331]..[331]: Chromosome 5, SNP identification no. = rs2578369
  misc_feature [331]..[331]: allele = c, in linkage disequilibrium with rs375232, respectively
  misc_feature [331]..[331]: n is a, t, c or g
aaaagcttggcaaaaagaataaagttgcccttaagatgcctatgcttccattttcaacctaaaacatactgcctctcttccacacgtgaaggtattttcattcagggaacacgtatatagaagtatacaagtgtaagaaaagcaaagcatattgactacgcatcttgattcacatccttcaataacttggctctgactgcataattcctacttttgtgatacattcccaaagcactctgtgctttaactatgaaagccattcagagatgggaaggatgggctaacctgcagtgtggggatgcattccaatgactagaggaggtgtcccagnggaggttagcggactgcttgttaagcattacttgagtgcccaatcttcaaaatctctttcatccccaagattctatggttctggattattttagtggcacataaattagtaagcactctggattttgtccattttcatcatcatccaaacttatctcaatcctataggtattaatatatttaaaagccatcacttcactaatacaaaaagaggaaaacatgtagttatgaatatagccattttccataagcttctgttctatgaacttagagctatgaaaacgacaccacttgaatccaaggtatgatgaactacaaagactccattcat

SEQ ID NO: 2648 - DNA, 661 bp, Homo sapiens
  MFAP3
  misc_feature [331]..[331]: Chromosome 5, SNP identification no. = rs2578368
  misc_feature [331]..[331]: allele = a, in linkage disequilibrium with rs375232, respectively
  misc_feature [331]..[331]: n is a, t, c or g
catggtaaatgaaaagcttggcaaaaagaataaagttgcccttaagatgcctatgcttccattttcaacctaaaacatactgcctctcttccacacgtgaaggtattttcattcagggaacacgtatatagaagtatacaagtgtaagaaaagcaaagcatattgactacgcatcttgattcacatccttcaataacttggctctgactgcataattcctacttttgtgatacattcccaaagcactctgtgctttaactatgaaagccattcagagatgggaaggatgggctaacctgcagtgtggggatgcattccaatgactagaggnggtgtcccagaggaggttagcggactgcttgttaagcattacttgagtgcccaatcttcaaaatctctttcatccccaagattctatggttctggattattttagtggcacataaattagtaagcactctggattttgtccattttcatcatcatccaaacttatctcaatcctataggtattaatatatttaaaagccatcacttcactaatacaaaaagaggaaaacatgtagttatgaatatagccattttccataagcttctgttctatgaacttagagctatgaaaacgacaccacttgaatccaaggtatgatgaactacaaag

SEQ ID NO: 2649 - DNA, 661 bp, Homo sapiens
  MFAP3
  misc_feature [331]..[331]: Chromosome 5, SNP identification no. = rs2447715
  misc_feature [331]..[331]: allele = a, in linkage disequilibrium with rs375232, respectively
  misc_feature [331]..[331]: n is a, t, c or g
acttgtgagatgtattttttggcctgtgcttcagttactcttgccagaaaatcaacaaaagtttcttaacaacaacaacaaaaaattgatatgtgcaaggcataccagattaggcagttacttcaacaaatgcattaaattgctaggattttttaaaataatttcttcttgttatataatttcactatggaaagtgagcaaacacagttagaagaaaataaaaattactcataaaaatttaaaatactgttattttaaaccattgttttatatttctgagacataccctcatagtatatgaaaatgtattggttgcaatgtgatgtagacngacacatatgtataaactataagctttttttatgattagtcatttagcattttatagacatacctgtttcacagaaaggcttttgaagtctagcagtgaaaaggaagctatgttaattattagtgtcatgaaggaagatcttgatttccttttaagatccaagctaattaaattctgactctggacctcacagtctgccctttttttacatgatttaaacaaatggtagaatctaacaaatcagctaagttaaagtactttgataaagaggtggaatatggataaggcagcgggcatatttagtaatctttttgctataatttttttttc

SEQ ID NO: 2650 - DNA, 661 bp, Homo sapiens
  MFAP3
  misc_feature [331]..[331]: Chromosome 5, SNP identification no. = rs2255493
  misc_feature [331]..[331]: allele = t, in linkage disequilibrium with rs375232, respectively
  misc_feature [331]..[331]: n is a, t, c or g
gtaggtactgggttacagcattgtaggttacagctgacagttttcatatgccccatctttgtagttacagttagattctgcagatcctatatcatcaggtggactgaaatgactgctgccttgagactctgtatcaatacttttggtttctgactgaaggtggacagaaacctgaactgctatttcctggccttgttcattcagagagccatcatctgaatctcctcctggtgaattactccgtcccatctctgggttaatgacatagatgccaccttgagcattcaaggcaggtctctctttaattctttcacccaggtcatcagggtcntccactcgcacagcctcaaacatctcctcaacaaaggctcgacagtttagaataagaggtggaagagggacacttcttgccagttcttcaatataacgagcaaactccatggtcttaaattgtgtgactttggcgagctccagagttttggctgaggtaatgatggggatacgttttgcaatctcaaaggccttctgaagtttctcagccccttcagttctaaagaactcattgatagccttctcagtcttgcgaagatggctgctcatcatgcacagccgtgtgacattcaagatgagtgtgattgtaaaggcaatcaggcaaacaatc

SEQ ID NO: 2651 - DNA, 661 bp, Homo sapiens
  MFAP3
  misc_feature [331]..[331]: Chromosome 5, SNP identification no. = rs1382278
  misc_feature [331]..[331]: allele = g, in linkage disequilibrium with rs375232, respectively
  misc_feature [331]..[331]: n is a, t, c or g
gtcatatgaagaaacgtgaagccccaaatggagctccactgccaagttcttaaaattatatggcaccacgcttcctgtagctgaagaaattgttctgaagagtatttacaattccattatatcagatctcagccaggcaagaaatgtcatcataagtgtttattatatacagttgaagcaggtggcatcatccatcatttttcttcctcttgatgtctagatcagttgtgtgtgtattttaatatagtaacacaccctcacaattatctaatcttatttcaggttagtgcttcttggaaaggctacaaaagcagccatagctcagaattangtatctgaagtaaacaaaaataaaaacctcaacaacaaaatattaaccaaacaaacaagataaagacgcatgcaacctatagcaccatacctaagaccacaaagggcaggagggttgacagaggtcttaagaggaatccagttttgggttttctcctaggatgagatcccaaatatagaacctatttgtagagtccaatacttttaaaaagggaaagcctgagaaattctgttaacagaaatatgaaaatccatgattttccagaagacagatgatttgacactgttcttattctaaaagcatcaaagacgttataccttagaaataaac

SEQ ID NO: 2652 - DNA, 661 bp, Homo sapiens
  MFAP3
  misc_feature [331]..[331]: Chromosome 5, SNP identification no. = rs1382277
  misc_feature [331]..[331]: allele = g, in linkage disequilibrium with rs375232, respectively
  misc_feature [331]..[331]: n is a, t, c or g
gagcctctagctgaagtaatgcttcaataatcagaagtcatatgaagaaacgtgaagccccaaatggagctccactgccaagttcttaaaattatatggcaccacgcttcctgtagctgaagaaattgttctgaagagtatttacaattccattatatcagatctcagccaggcaagaaatgtcatcataagtgtttattatatacagttgaagcaggtggcatcatccatcatttttcttcctcttgatgtctagatcagttgtgtgtgtattttaatatagtaacacaccctcacaattatctaatcttatttcaggttagtgcttctnggaaaggctacaaaagcagccatagctcagaattatgtatctgaagtaaacaaaaataaaaacctcaacaacaaaatattaaccaaacaaacaagataaagacgcatgcaacctatagcaccatacctaagaccacaaagggcaggagggttgacagaggtcttaagaggaatccagttttgggttttctcctaggatgagatcccaaatatagaacctatttgtagagtccaatacttttaaaaagggaaagcctgagaaattctgttaacagaaatatgaaaatccatgattttccagaagacagatgatttgacactgttcttattc

SEQ ID NO: 2653 - DNA, 661 bp, Homo sapiens
  misc_feature [331]..[331]: Chromosome 5, SNP identification no. = rs1046621
  misc_feature [331]..[331]: allele = a, in linkage disequilibrium with rs375232, respectively
  misc_feature [331]..[331]: n is a, t, c or g
ctatagttaccatcaagacttttagactgtagttgaagttcaaaaggttgatttaaaaaaaagataacatgaggcttaattatatatgaagagtatttgattagatacagaaaacattagtaagtgtggttttcttcctcttgaaaactagctttacgaagtaataccaactccaattaaattttgacctactttaattcctcatcaatggcaccataagctggtacactcaaagtaaaccagttactttggccaccaaattaggccacctctgtttctaaaataactaggatacaacggagtagcatgcatttagttactatacagtatngtgcaaacttacagactttaaaaacatttcctccatttttccaaagttctgtttcttaggactttgattttaaacatgtctaccttagggttctaaataataatgtctcctatgagaacatgtggggtaaaaccattctctaatttgacaagctatattctaaaagattactgcaaacctgctatgttaggacagggttgaaagtactatctgaaatctgagggatgtttagaggactgacccccagacaagggatttaaaatgttttttggccaggcacagtggctcatgcctgtaatctcaacactttgggaggtaaggcaggaggat

SEQ ID NO: 2654 - DNA, 661 bp, Homo sapiens
  misc_feature [331]..[331]: Chromosome 5, SNP identification no. = rs816025
  misc_feature [331]..[331]: allele = g, in linkage disequilibrium with rs375232, respectively
  misc_feature [331]..[331]: n is a, t, c or g
gcttgttacccacaacctccatttttcctcctttcttaattacagaagcccaaactttgggacaatgtgtccagttaaaaataaacacgctcctctccgcaagctttcttagttacagcaggtagccatgtctcctagttctggccgctgcatagcagaagttggttgaggcttcgggaaagctatcactttctcgataaaaaggtacaaactcagctgctgtgtcctttgtcctttgaccttctacccttctccctgtctggaatgcagacacgatactggaggtaaaacagtcgtcctatgtagcaggtgctgtcagtgctctgcccantattcgttgacagtcaccattctatttaccacaggcttcctgttgaaaactccttttctctacccgaggccttttgctagctacagaatcatgctgagcctgtagaatgcagtctgaaagtgggggttagtgaccctgggagcagcctttaactaatgacagatggtagttggtggataaatatcccagctctttggccttgaggtgggacaactgaggcatgagctacatacacctggggcagagagagctccctgaggtccccagcgggactgaacactggttgcccacagcagtaacccactcattaacacatcctgtgtaggcttt

SEQ ID NO: 2655 - DNA, 661 bp, Homo sapiens
  misc_feature [331]..[331]: Chromosome 5, SNP identification no. = rs816024
  misc_feature [331]..[331]: allele = a, in linkage disequilibrium with rs375232, respectively
  misc_feature [331]..[331]: n is a, t, c or g
aagaaaagccaactatgccccagcagaatctgataacctgtctgcggtttgagctacgtgtactggagacaacagaaatgatgacttgaagatttagcctagcacttactgcttctgattcttgttttgttcatgtatgtgatcatcttcaaggaacatggtttgcaattttatccaccacagaaccacgttttgctcctgtcattcatgtgaagctgaccttgtcacacactgcttgttacccacaacctccatttttcctcctttcttaattacagaagcccaaactttgggacaatgtgtccagttaaaaataaacacgctcctctcngcaagctttcttagttacagcaggtagccatgtctcctagttctggccgctgcatagcagaagttggttgaggcttcgggaaagctatcactttctcgataaaaaggtacaaactcagctgctgtgtcctttgtcctttgaccttctacccttctccctgtctggaatgcagacacgatactggaggtaaaacagtcgtcctatgtagcaggtgctgtcagtgctctgcccattattcgttgacagtcaccattctatttaccacaggcttcctgttgaaaactccttttctctacccgaggccttttgctagctacagaatcatgctga

SEQ ID NO: 2656 - DNA, 661 bp, Homo sapiens
  misc_feature [331]..[331]: Chromosome 5, SNP identification no. = rs1438588
  misc_feature [331]..[331]: allele = g, in linkage disequilibrium with rs375232, respectively
  misc_feature [331]..[331]: n is a, t, c or g
gcctaggactcaggtatccattcccagtgcgagttctttcaccctaaccatcttccccttagatcttccatatgtatataggtgtcttggacaatgttgagtggaatttaattgaggatattacatgtccagtaatgtaacagaactccaataatgaggttcctttctgaaactggcactcccctaacctgaatactcccttttatttttgcccttttcccatgtccttgagcaccatctgttaattccatagtctatgaaaggtgggttactgaggcaccacttactttaacttcatctaaaccaaaaatatatgtgaaagcaaaggttngttagttctttagctttcttctaacatatattttgaagtgcaacactgatcatgtaactcctctctttaaaaccatttaatttgttcttagaatgaagataaattcctagcctcagcttatgagggggctctgcaattggctctggccctctctgcaatatcgggagccatgctggtcttcttttgtctgctcaaatgcaccagcaccttggctcttagcttttatagactttgtacatgcttttacatctgcttggaacattcttcccctgagcatctccttcacaggaatcagctaaaagactgcttctttgcagaggctttttgcaa

SEQ ID NO: 2657 - DNA, 661 bp, Homo sapiens
  misc_feature [331]..[331]: Chromosome 5, SNP identification no. = rs816034
  misc_feature [331]..[331]: allele = a, in linkage disequilibrium with rs375232, respectively
  misc_feature [331]..[331]: n is a, t, c or g
gcagccactagccttgtaagaagctctttttggagactgacattagcagtgatatgctcatggtctggcaaacatataggaggatgctattcagagttttcaaactttgaagaacttatcttgcagataaactacttcaagtgtgcagtgacatatctccagagatgtttgttgcagagatgtttgtaaaagcaaaagattggaaacaaacatccacaatgtccatcaagaggggttggctaaagggtacattccattaatggaatcccagcaagtcactcaaaagactcaaaagaatgaggcagatctgtgggtactggtatgtaaaaangtccaagatataggatctgtagagtacagtcacatttttataaaaatacaattatatagaatatatacaggaagggaggtgggaagtaaagatggtatattatttgtgtaaaataaagacagttatggagaatatatatagaaaggaaggaaggaagggagggagaaaattcctggaaggatgcataaaatactgaatatatgggtagtataactagggagccggaggtgggaggcaaagaaaagagtgtttcttttttaacctaaaaaccttctacactgttcatatttttaaacaatgtgcatggattaaatttataattttaaactg

SEQ ID NO: 2658 - DNA, 661 bp, Homo sapiens
  misc_feature [331]..[331]: Chromosome 5, SNP identification no. = rs2351022
  misc_feature [331]..[331]: allele = t, in linkage disequilibrium with rs375232, respectively
  misc_feature [331]..[331]: n is a, t, c or g
ctaagagtaaaattaacattacttggtttaagctggcaattacttttctttacatactcaggctaatacctaccagctacaaattgatttcattttgttgaaaatgtgaaggcttcttggagacttagccagagaaaatttctaatattgaagcataatgttttgtagttttccctttaccatctaaaaaggactttcttgtcccattggacattcctcttaattgctgagtttcccaaaaaaaagtgccacctaaaattaactaatattataccaatccattgactgtagttatatttagcctcaggacttggagataaattttgactgnttgttcacaaggataaaggcaacataactaatagccaccatttatttggcaactatgatatgccagatattcattaagcactgtgttacattatcaccaatcttcacaataaagattaacaacttttacagtattgatttttcccttgctgtcaaataaggcagccactagccttgtaagaagctctttttggagactgacattagcagtgatatgctcatggtctggcaaacatataggaggatgctattcagagttttcaaactttgaagaacttatcttgcagataaactacttcaagtgtgcagtgacatatctccagagatgttt

SEQ ID NO: 2659 - DNA, 661 bp, Homo sapiens
  misc_feature [331]..[331]: Chromosome 5, SNP identification no. = rs816030
  misc_feature [331]..[331]: allele = c, in linkage disequilibrium with rs375232, respectively
  misc_feature [331]..[331]: n is a, t, c or g
gtaagatgagtactgagaactgaccactggaattagcagcctggaggtcacagaagaccacaacatcatgggagggtttgggagaggggcaagggcctctttgtagaatgggaggagaagatttggggacagagagaataaaaattcttttgcaaaatttcactgtaaagggagggtgttggagaacagaatcaagaaaggtttttttgtgtgttttaatatgagagaattagcatgtttatatttttgttggaagagatcctccagcacaggaaaaaatgagtagatactttaatagaaacaaacatttattaagcacatttttatattnctgacactgtttaatgctgcacatgaattatttttcctcacatttctttctcactacaatcctatgaggaggttttattattattatttttaacttttaatttttgtgggtacataataagtgtatatatttatgggttacatgaaatattttgattcaggcatgcaatatgtagtaatcatatctgggtaagtcccctcaagcatttatcctttgtgttacaaacaagccactcacactcttttagttattaaaaagtgtacaactaaattatttttgattacagtcaccctgttgtgctagcaaataccaggtcttattcattctttc

SEQ ID NO: 2660 - DNA, 661 bp, Homo sapiens
  misc_feature [331]..[331]: Chromosome 5, SNP identification no. = rs816029
  misc_feature [331]..[331]: allele = t, in linkage disequilibrium with rs375232, respectively
  misc_feature [331]..[331]: n is a, t, c or g
tggatagagaatggactaaaggggccaagggaagaagcaggaagtatagttgggaggctattgctataatagaggtgagacatgcggctggctcagacctcagtggaaacagtgaaggtgaagagaagtggttagattctagatttatcttaaaggtcgaactctcaaggtttgctgatggattggatgcagggtgaaagagaaaagtgaaaagtcaggatgacttccagagttttactccaagcaactagaaggaggcagtttccatttgctaaggtggggaagactgcagaaggaccaggtttcaccagagaggggaatcaggagttcnatttcatacatgttaagttagagatgtctatttgagatccaaatagagatgctgaaagggtgtgttcaggagaaatgttcaggctggatatctaagtttatgtgccatcagagatggtatttaaagccttatggctggatgggatcagttagggaggaagcaaagataaaagagagaagtccagggaatcccccagggcactccagtataggaaggaaataggtagagagtcaggagtgagtgatgctccaggaacccaagtgaaaaagtgttttaagaatgaaggagttgtcaatagtcacgagctgctgaccggccaagtaagatgag

SEQ ID NO: 2661 - DNA, 661 bp, Homo sapiens
  misc_feature [331]..[331]: Chromosome 5, SNP identification no. = rs816028
  misc_feature [331]..[331]: allele = g, in linkage disequilibrium with rs375232, respectively
  misc_feature [331]..[331]: n is a, t, c or g
gtccatcaaaccccattgagtatttgttgaaatgctctcactttggtgtgttcccttcaaaaagcttactcaatatgggctgcagctgatctctaggagccaacagggttggtgttgagcacgaggctctgggggggcgataataaacatgtttccacgtcccagctgtccgcttgaccacctaggtgcccccctgctgttcccactcaaaactctgctaggcctgctggctgtggaagagcagctgcccgctctcctgtccattccacgacacaacagcggcctcttgtggccatcaccagctctacaggtactattgtctggtctcagngggtttcagggttttcttcattctttcgatttatacttagtgagctctactgtgtgccaagcatggtcctaggcactatggacagagcagtgagcagaacaaagtccttgctctcctaagggtgggcaaggtgggcctgagaagtgcttcatggccagtgtgggggctttgacttttattctgagaagccattggaagtttctgggtagaagagtaccacaatctgacttaagaaaagaaaaggaaaaaacccatgcttgtgcctgagtcctatccccaaagattctgattagattggtctgagatatggcctggagattagaatttcta

SEQ ID NO: 2662 - DNA, 661 bp, Homo sapiens
  misc_feature [331]..[331]: Chromosome 5, SNP identification no. = rs816026
  misc_feature [331]..[331]: allele = g, in linkage disequilibrium with rs375232, respectively
  misc_feature [331]..[331]: n is a, t, c or g
tgacctcaggtgatctgcccccctcggcctcccaaagtgctgggattacaggtgcgagccaccacgcctggtcaataatattattattcttaaactgtatgcaaacaacatgcaaataaatcctgtggctcccctggatctgtggttggatgggtcttctgttaaattcctggtggcttcaagtgccactagtaaaagctaataagtcatcccaccatcatcagaaaaaccatcctgatcccagcactttgggaagcaaaggtgggaagatcacttgaggagtataagaccagcctggacaacatagtgagaccctgtctacacaaatgcntgcactcacgcatgcgtgtgttccccccgccccccccacacaattagctgggtgtggtggtatacacctgtggctccatctacttgggaggctgaggtgggagaatttcttgagcctaggaggtaaaggctacagtgagctatgattgtgccactcactccagcctgggcaacagcgtgagatcctccctctctttgactctctctctcacacacacacacacacacacacacacacacacacaaaagaaaaaccatcctgacatttccacaattcacaaggagggtttacaatatttcatcatttgattaatacccatgaagtagggaa

SEQ ID NO: 2663 - DNA, 661 bp, Homo sapiens
  misc_feature [331]..[331]: Chromosome 5, SNP identification no. = rs13155109
  misc_feature [331]..[331]: allele = c, in linkage disequilibrium with rs375232, respectively
  misc_feature [331]..[331]: n is a, t, c or g
gtgccactgcactccagccagggtgacagagtgagactctgtctcaaaaaaaaagaataataatattattaataataagagctaaaatttatggagcctttgccataggcacttaaacccattacatgtaattttatttaatcatcacaacaaatatatggggtaagaactattctaatcctccattatatatagatgaggaaactaaaattcagagaggttaagttgccccaaatgccaggctaattaataaatgagacttggaccgaggcaatcagctcccttccccatcctccacgtcagagcctgctgaatgagccaggaggatgangaaatcagacttctcagaaaatggcagcaggatgtggtaaacccgctttgaatcttagggtcatgcagacctggtgtgcattccagctttactacttcttttgttgttgttgtattttttttttttttttttttttgagagggagtctcactctgtcacccaggctggagtgcagtggcgtgatctcggctcactgcaacctccgcctcccaggtccaagcaattctcctgcctcagcctcctgagtagctgggattacaggcacatgccaccacgcccagctaatttttgtatttttagtagagacagggtttcaccatattggtcagg

SEQ ID NO: 2664 - DNA, 661 bp, Homo sapiens
  misc_feature [331]..[331]: Chromosome 5, SNP identification no. = rs7709154
  misc_feature [331]..[331]: allele = c, in linkage disequilibrium with rs375232, respectively
  misc_feature [331]..[331]: n is a, t, c or g
gtctacccctgtgtccccattaaagatgaaaaaaccaaagcaccaagaggctaaatgtcttagcccctgtgacccagtgtgttcccctagactttgtagtcagtcctcaggccatctccagatgagattttatccttgctgcagttagtagtctaggacctaaacttttctcagttctctcttagctaatttctgatcttctccctcctgggatcctgagagagagagagctactggaagcctttatgcagcctccctcctttcttgcttaaaaggataaatgagggaaggagaggctaaaagctcccttggtcatcaagagaattaaggngaggagaaggggtaatgtggagggcagagatcagtggctcaggtcacgcctgctctccagtcaagagcctcttagctctaagccacccacttaggtacagcaagattcacttagtggcacagtctagagtcacatgtggtattagagctgaaaaagaccatagagattattacattttcagccaagctttatatgtggtagatgaggcatcatagggagattaacttgctcagagactctcattaacagagctggcctcagcaccccagggtcctggctccctgtcctctttgccttgtaccactctgactcccatgaccttgctagttc

SEQ ID NO: 2665 - DNA, 661 bp, Homo sapiens
  misc_feature [331]..[331]: Chromosome 5, SNP identification no. = rs1478350
  misc_feature [331]..[331]: allele = c, in linkage disequilibrium with rs375232, respectively
  misc_feature [331]..[331]: n is a, t, c or g
aaccaccatagaaccatttgagtccactatcagtcatgaacatgggggagtttattacatagcagactttcttttgaatcttacagttgtttaggatgttggaaaggtgagttttgatagagaaatgggcataggggaagctttgggacctgggtttttgcctagagaaggcaccttagtgtggggtcgtgggtagccagaagcctaagtggtacacagcagagcaagagtactggggagaagatggcagtgggagggtaaagttcaccaccgtagcgttgactatgccaagttccagggccaatggctctgcagagaactagcaaggtcntgggagtcagagtggtacaaggcaaagaggacagggagccaggaccctggggtgctgaggccagctctgttaatgagagtctctgagcaagttaatctccctatgatgcctcatctaccacatataaagcttggctgaaaatgtaataatctctatggtctttttcagctctaataccacatgtgactctagactgtgccactaagtgaatcttgctgtacctaagtgggtggcttagagctaagaggctcttgactggagagcaggcgtgacctgagccactgatctctgccctccacattaccccttctcctcgccttaattctcttg

SEQ ID NO: 2666 - DNA, 661 bp, Homo sapiens
  misc_feature [331]..[331]: Chromosome 5, SNP identification no. = rs4958693
  misc_feature [331]..[331]: allele = a, in linkage disequilibrium with rs375232, respectively
  misc_feature [331]..[331]: n is a, t, c or g
cagtcaagagcctcttagctctaagccacccacttaggtacagcaagattcacttagtggcacagtctagagtcacatgtggtattagagctgaaaaagaccatagagattattacattttcagccaagctttatatgtggtagatgaggcatcatagggagattaacttgctcagagactctcattaacagagctggcctcagcaccccagggtcctggctccctgtcctctttgccttgtaccactctgactcccatgaccttgctagttctctgcagagccattggccctggaacttggcatagtcaacgctacggtggtgaactttnccctcccactgccatcttctccccagtactcttgctctgctgtgtaccacttaggcttctggctacccacgaccccacactaaggtgccttctctaggcaaaaacccaggtcccaaagcttcccctatgcccatttctctatcaaaactcacctttccaacatcctaaacaactgtaagattcaaaagaaagtctgctatgtaataaactcccccatgttcatgactgatagtggactcaaatggttctatggtggtttctttttaaaactgatctcctagagaaatgaacctttactcgaaggttaaggcacttaaggtagaattctgg

SEQ ID NO: 2667 - DNA, 661 bp, Homo sapiens
  misc_feature [331]..[331]: Chromosome 5, SNP identification no. = rs1871157
  misc_feature [331]..[331]: allele = g, in linkage disequilibrium with rs375232, respectively
  misc_feature [331]..[331]: n is a, t, c or g
cataacgtggagaagaaacccattacatctggcaccaccatcattttcattattaccatttacctagacagcattgtaagaaagaggtaaagtcctgtgggaatgaggcatttgaaacttggtgcttgagaattttagaaaggggtgaatgtaattgcctcgggagttgctataagaagcagtaacagggcagctgggaccctcctcgcctttcctgcactctcttgactgcaggcactgggtggaaaggagagatggattaaaagagagctccaaggaaatggagatgaatgcctttagatttggtatgataagaagaagggcatttctnagatacataaaagagaccagatcattatcaagatagtgcttgaaaacacacatacctctaacccaggactagtatcacatggtggcaatggtggtggttgtctcaactgtactcttggaggtgtgctgggaggattttctgcttcagaattcccagaattctaccttaagtgccttaaccttcgagtaaaggttcatttctctaggagatcagttttaaaaagaaaccaccatagaaccatttgagtccactatcagtcatgaacatgggggagtttattacatagcagactttcttttgaatcttacagttgtttaggatgttggaaag

SEQ ID NO: 2668 - DNA, 661 bp, Homo sapiens
  misc_feature [331]..[331]: Chromosome 5, SNP identification no. = rs816005
  misc_feature [331]..[331]: allele = g, in linkage disequilibrium with rs375232, respectively
  misc_feature [331]..[331]: n is a, t, c or g
ggactggccttgcacattgccaagcacatggtaagattgcaacgtgagtcacctccaattctaaagttacagagcatacattgtacaacttcatttgtggactcacctaggcaggaaagtagactcttgaggatgttttgcattggaaaaacctggacttgtaaccagacagactagcattcaaatcccagctgcaccactcactagttctatgaccctgggaatttaaatgacctttctgagcttcaccttgttcatctgtgcaatggggattaaaatctcagagttgttgtgaagggaaaataagataaaggtattagaaagcactccntatgaactcaataaatgctgcctcttatcattacatttgcccaggtacacatccagggttcactggtaagggaagaagcagatctagccctgtgctctttcagttatatcttatggtctctggggactgcattcttcttcctccattgatcaaaatgttgtcctaagccatcggcattatttcccactctaaatccttctcaagctctccccctctttatcatggaaattagaaacaagaaaaggaagcatcatgatgacatgcagctggccccagggtttttggattagaaccaaatttcatgtttgtggaactgatgtcaatttgctg

SEQ ID NO: 2669 - DNA, 661 bp, Homo sapiens
  misc_feature [331]..[331]: Chromosome 5, SNP identification no. = rs816006
  misc_feature [331]..[331]: allele = t, in linkage disequilibrium with rs375232, respectively
  misc_feature [331]..[331]: n is a, t, c or g
gaacctacgtttcaggtgcatgggattgaattcaaaagattgggatttgggctaaggtatgaagtatgacgctacctcattcgaaaatagtgtacaaagcatctggcctgttttttgttttacataactatatccctgtagcataaaccatggcccaccagccaaaaccatcctgccacctattctggtagcgttttactggagcagagctatgcccattaatatatgtatgcaatatgtctgcttccttggaactatggaagattgaattgttgcaacagaaactgtatggactgcaaagggtaaaataatgtgctatctgaccctctanagaaaaaggttgcaaccctgctctagggcataataccactttaagttttaataatgataattacaagaatacgtggtgctgagtgcttactctatgctgagtgccgttctatggctttatatgtatatcttatttgtacttgcaataaatccatgatatacacaattattcctattttatgagtaaggaaacagacagaaagaggttaaataacttgctggagatccagtggctggtaaatggcacagttgggattctaacccaagtagtgtcaagtattacatttccttggaagtttgcaaacacattttctttcctgatcaacttgac

SEQ ID NO: 2670 - DNA, 661 bp, Homo sapiens
  misc_feature [331]..[331]: Chromosome 5, SNP identification no. = rs12523627
  misc_feature [331]..[331]: allele = c, in linkage disequilibrium with rs375232, respectively
  misc_feature [331]..[331]: n is a, t, c or g
gtgagaaagccattccctttcaagttcactttaacatgacaaatctcccttttaacagagagagtgaacagtcttttcacacacagcagtaccttgctaaaatttaacttctaaattaaacttttaaacttaaattttaaattatatttaaaatttaatatatttaaaatgtattgcttcatttcatagcatgtattttttgtggtcaccttttatttgtggaaaacaatccttgttttctcttcacagcaatttcctttcaaaagaaatttatttaaggataaaaaaatacagtcgattcagatattaagaccatgttaataatggtgcngagggtgtgtaaatatgacacaaatcatgaccgtggtacagaaatgaatgacagagaccaggcgcagtggctcatgcctgtaatcccagcactttgggaggctgaggcaggaggatcacttgaggtcaggagcccaaaaccagcctggccaacatggtgaaaccccatctctattaacaatacaaaaattagctgagtgtggtggcgcacacttgtaatcccagctactcaggaggctgaagcaagagaattgcttgaactcaggaggcagaggttgcagtgagctgagatcgtgccactgcactataacctgggcaacagagcaagact

SEQ ID NO: 2671 - DNA, 661 bp, Homo sapiens
  misc_feature [331]..[331]: Chromosome 5, SNP identification no. = rs4958354
  misc_feature [331]..[331]: allele = c, in linkage disequilibrium with rs375232, respectively
  misc_feature [331]..[331]: n is a, t, c or g
aacctgggcaacagagcaagactccatttcaaaaaaagaaaaaaaaaaaaaagaaatgaatgacagagataggaagccctgcccagagcactggcccaggagtaaggtgtcgtagccctcagcccagccagcagcagtttggtatatggctgtggacagattgtcccctccctgagctcagattctctatctattgagtaaggagtttaaattaaattatctctaacattctgtggcatcctagtttcttcttcttggcctggaatttactatactttaactcgagccaatattaaatgagacgtgttagagatccaccctttcaagcccngtaaagacaaaggactccactgcacccactatgtcttttcctctttgagtgagtctattaattcctatctagattcctgccgaaaaaggtgaggagataaatgcatgtagtgcaggattcaatttgtgcttcttgcctagaaattaaacaggtctgggttggtccaaggtgtttacaggagaaagataagttctttgacatgtcctcattcacagcgattccacctgggcccagcaggccttctgatgggttttctctccctttggagggctctgtgtctgctcacccagagacagctgtggccatacctcatgatggctggggaaaaaa

SEQ ID NO: 2672 - DNA, 661 bp, Homo sapiens
  misc_feature [331]..[331]: Chromosome 5, SNP identification no. = rs11167658
  misc_feature [331]..[331]: allele = g, in linkage disequilibrium with rs375232, respectively
  misc_feature [331]..[331]: n is a, t, c or g
ccctattttatatgtaaggaacttgagattcagaaagattaattcatgcagctagtaaggggtaaagcccagattggaacagaggtctgactctctgcaggccttttctgtgcacttcctcacatgtagcctcaggaaaactttatagtaagagaaggcaaggggcaagaatttctcctacatgtcagatcataggggcatggacctcgcacaacatcttcatatttcattcctcattgtgtgtcaagaattcctacgtggtcaaaatgatgcatcctttttccccaggcatccacagagatttgaaccatctgtcagcccttcctaatgncagctgatggagacatctgtggccaaaagccaccactgccagcaaggagcaggttaagaacctgttctctgtcttgattaaaattctttcccacaggctctgcacacactgtgaagcaaaagtcatctgcaaggcccaaacctctgtcctcagggagtccccatctgtagtgggcactatcgatgccccaaccagtgcccctcagatcccctttaccccttctgtgatccgtctgccagcttctgtgtgctccgctcctaatggctcacatctgtgactttcttcagaggcctgccctggggctgccggatctgctctgccctcactttt

SEQ ID NO: 2673 - DNA, 661 bp, Homo sapiens
  misc_feature [331]..[331]: Chromosome 5, SNP identification no. = rs12515633
  misc_feature [331]..[331]: allele = g, in linkage disequilibrium with rs375232, respectively
  misc_feature [331]..[331]: n is a, t, c or g
tgcagatattcttaattgtgatagacattaattgtgttcatcatctggtccagataattatctggtatgaagaatggcctaccagaccttaaatctgctactgtggactgtgaagcttcaaactgagattgtggctactccaccatctctacctcaatgacaacaataatagcagagtcccctgccaactcaaaatgagcatatagtatatgcaagaagcaaactgttgtttcaagccattgggatttagtagctgtattcgtttgctaaaggtgctataacaaagtaccacacactgagtggcttaacatcagaaacttattgtctcacngctctggagcttagaagtccaagatgaaagtgtcagcagggttggttccttcaaagggctgtgagagagaatctgttctgtgcctttcacctagcttcttgtaatttgctggcaatttgtgtggcattctttggcctgtagaagcatcaccccacactcagccttcaccttcacgtgacattctttgtgtgtgtgtgtgtgtgtgtgtgtatacacatgcatgcatgcacatgtgtccaaatttccttattttatatggacaccagttatattttattagggcccactctaatgaccttattttaactaattacatctgcaacatcccta

SEQ ID NO: 2674 - DNA, 661 bp, Homo sapiens
  misc_feature [331]..[331]: Chromosome 5, SNP identification no. = rs816010
  misc_feature [331]..[331]: allele = a, in linkage disequilibrium with rs375232, respectively
  misc_feature [331]..[331]: n is a, t, c or g
agtcccctgccaactcaaaatgagcatatagtatatgcaagaagcaaactgttgtttcaagccattgggatttagtagctgtattcgtttgctaaaggtgctataacaaagtaccacacactgagtggcttaacatcagaaacttattgtctcacggctctggagcttagaagtccaagatgaaagtgtcagcagggttggttccttcaaagggctgtgagagagaatctgttctgtgcctttcacctagcttcttgtaatttgctggcaatttgtgtggcattctttggcctgtagaagcatcaccccacactcagccttcaccttcacntgacattctttgtgtgtgtgtgtgtgtgtgtgtgtatacacatgcatgcatgcacatgtgtccaaatttccttattttatatggacaccagttatattttattagggcccactctaatgaccttattttaactaattacatctgcaacatccctactcccaaataaggtcatatgaggtactgagcattagggcttcaacatgtggatttggagggacacaattcaacccataacagtggatgtttattacaatggtatagtttagcctatactggccaatgcaagggattcttcttatgcagttttttgacctcctattttcacttcat

SEQ ID NO: 2675 - DNA, 661 bp, Homo sapiens
  misc_feature [331]..[331]: Chromosome 5, SNP identification no. = rs816012
  misc_feature [331]..[331]: allele = a, in linkage disequilibrium with rs375232, respectively
  misc_feature [331]..[331]: n is a, t, c or g
caagttgacaagacacatgttgtgtttactccaattttctcattaatttctctggctgcctgacagtctctgccttctcagattagatttctggaattagactgatcttaatgctgcaagagaacaacagaccctatgccctccttccaggcagaagtccccatccccattttgctgattaaggcaactgaagccctgccagggaagacctttctaaactgttggggagtttcgaaagtgttggggagactagccttcatgtgtaggtcaagtgctttgcctaacctgcaagacaacctcaccaaaacatttctcaggctgcctgcctctntgctgcagtgtacaacattagtccaggtttacatcgggtattttttaatgcagcacttacctggaaggattgctataatatgccattaatgcttaactgtaaatgaatttgatcaaattgacctcagcctctgatagggtcagcagggacaaattctaatgatggaaaggacttcaaaaaaaattgcaaaggcagaagtaataagggccccaggcaccaggaacagcaaatggacactgggcacccagttagggagatgaaatggagaaaggccaagagagtccagagagatggagcagacaactcttaaccacccagcaaccgtaggag

SEQ ID NO: 2676 - DNA, 661 bp, Homo sapiens
  misc_feature [331]..[331]: Chromosome 5, SNP identification no. = rs707181
  misc_feature [331]..[331]: allele = t, in linkage disequilibrium with rs375232, respectively
  misc_feature [331]..[331]: n is a, t, c or g
aacctacctcactgggttgtcagacagttttaataaaacaatgtgtgtgaatcccttagtgccacgttgggcacaaaataaacactcagtaataacagtttagctgccgtgtatcatcctcatcctctcagacccaccagtgtcttttggtaggtgatagctcagcaaggtcatggtgaatggcatgggttctggagtcagaccatcctggtttcaaatacgggctccagtgagaaccaggtatgtgaccttgggcaactcatttatactgagtttcgattctttcatctgtaaatgggagtgattaaaaatggcttcctctgaggtgagnattaagtaagacaatacacataacttgctgagagtggtggctagcacaccgtaagagcctagtaaataggagatgaaaactccctttctcttcctctgcctttctctctctgtatctctttctctctttgctgacagatgtggttgagtagggagaatgagatccagttctatcgatgatcaaaggtagatgtaaaaaccttgcttttcaaccagagagacaaagaagacccagtgaaccatctcaaggagccaaatctggttttatccagctcttgtagtagtgttctggcttttgggctgcagtacagaaaattagttcccctgcagt

SEQ ID NO: 2677 - DNA, 661 bp, Homo sapiens
  misc_feature [331]..[331]: Chromosome 5, SNP identification no. = rs11954307
  misc_feature [331]..[331]: allele = g, in linkage disequilibrium with rs375232, respectively
  misc_feature [331]..[331]: n is a, t, c or g
ggaacagcagggtctgaccaatgttttcctggaatcatacccaaagccaatgacctccttccttctaagtttgagtctccctcctggagcgttgctctttccctttcttttgtcggtgcctctttctttttccctttagctctctgtttccttctggctctcagaactactctcctctcccaacccctgcaaattttcccacctctttctctcaaaactaccatactatgaggtacttgtataattaggtgttcattccttaatttgtgagacatttactgaatattttctaggtgctaagaatatagaaaagaataagatgggctccccnttctcagggcaatggactgatgaacaatggaaggatcttccaaacaactataatatggtccgacaaatgcttttccagaagtacacacaagcgtgggtgtatacggcaagtgccaaattctggctgggtggggcccagaggagcagatgttgggcttgagacatgaggagtgagtctaggttttaaaaataaatgaatcattcaatcaactgtgtagttcttgatcctcattcaaacacctgtgacttaaacatgcatttgtgaaacagaaaccaacattcctaaactaactgacatatggtgtgtgtaacccccactttttccctccat

SEQ ID NO: 2678 - DNA, 661 bp, Homo sapiens
  misc_feature [331]..[331]: Chromosome 5, SNP identification no. = rs816016
  misc_feature [331]..[331]: allele = g, in linkage disequilibrium with rs375232, respectively
  misc_feature [331]..[331]: n is a, t, c or g
ggtattagagcttgggagtgtgtatcagtgaaggaactataagttgggtatgtgtggcgcagctaggagaattgtccgtcctgggttgcccgaaaacaagctagctaggaccaggatcccccctccttctccacaccagaagggctgcccccacactcagctttctacaggactgctggcttccttcacctgggagggaggactctaattttctatgcaccgtaagatgaattgcaggacagctggtgtccccacactatttctttacatggttggccccataattctggactgatagcaccgagtagcctatgtgttccaccctcttcanagactgttttctcacttttggtctacaaatgggagaagaacagggcccacttggtccctactggcaatcagatccttactgcaggcccagaaatggctcctccctgtgaagtatagaagcaccagctttgtaagttttccatttcctcaataaaccttattcgttgtgccatgtcaatcaatttaaaccaaaccatgatgcatcataggcagagatccacaagggtccacctcatatgacatgggcctggggaccctgcagaggtaggcagcaagggtatcctggtgtgtgcagggtatgaactatcctggtgtgtgcagggtgtgaact

SEQ ID NO: 2679 - DNA, 661 bp, Homo sapiens
  misc_feature [331]..[331]: Chromosome 5, SNP identification no. = rs13173253
  misc_feature [331]..[331]: allele = c, in linkage disequilibrium with rs375232, respectively
  misc_feature [331]..[331]: n is a, t, c or g
atagtaaagaagaggggatagtgtgcgctaggagtcatgggacttgggacagcagggacggccggaacctcttttgggcaaggcctttgcagcagacatctgttgtttctgcttgcctgccttcttcccgttctattgctaatagtacatcaatgtttctctgaagaaacttcctttcccataccatgcagtctggcgggcctgttagtgctggccattctctggccaaggaaagagctaattcatgccatgagaacctctcagggatttaaatcctgagcacaatcaccaggaactgaaaaccatggcacagactcaccagatggagtcnctagggagtgagtccattcttgccctggatccctctgctagccctgcttgaggtgcccacctttcctttgattctgtcagccccacagtcttccaccaggtcccctttgggcctgagttaacttgagccaatccgcaatttgcaaacaaagaagcctagtggccagtcttgaacactgaagctcactgagtgaatgccatcccagggcaagagtaacattagaatacatgcctgatgtctgtatggtactgtgcagtttcctcacactattagagatattgaaaagtcagattcagaaaatttggggccatctggcttagtgctgtgacc

SEQ ID NO: 2680 - DNA, 661 bp, Homo sapiens
  misc_feature [331]..[331]: Chromosome 5, SNP identification no. = rs707183
  misc_feature [331]..[331]: allele = a, in linkage disequilibrium with rs375232, respectively
  misc_feature [331]..[331]: n is a, t, c or g
acttgtactaagccttttgcttaaataccacttcctcagagaggccttcttgactcctgtaataaatagaataatgcctactccccctcttgaagatgcccacatcctaatccccagaccctgtgaatgtgttaccttacatggcaaaaggaactttgcagatgtgattaagtatcttgagatgggcagattatcctgaattgtcctggtgagcctgatgtaattgcagaagttcttataagaggagggtgggaaaggcagagtgagagaaacagatttaacagcagatatagaggttggcatgatgtgaggaagcggccctgaactgagnaattcaggtggcctttagaagctggaaaagtgaattttcccctccagaatctgaccttttctgtaatcctaaaacttctctaaaaaataaagtctatgaatagtaataagaaagagagaaaaacatgcagacccctttggtttaaatctgggtcaggcacttgcaagttgggaactcttaggaaggttatttaatctctcagcctcagcttactcggctgtaatatatgtctctttctacccacccgatggagctgttgtgaaaaacaagttaatgcctagtgtagttcctggcatcgtgtagcaagcactcataagtattaggcttagg

SEQ ID NO: 2681 - DNA, 661 bp, Homo sapiens
  misc_feature [331]..[331]: Chromosome 5, SNP identification no. = rs7705478
  misc_feature [331]..[331]: allele = g, in linkage disequilibrium with rs375232, respectively
  misc_feature [331]..[331]: n is a, t, c or g
ccattactagtctcaaacttaaccgtttattagtgtccatccatgcacttaccacaacttgaaattattgtatttgattgtctgcttgcttagttttggtctctgtgactgctagactggaagtcccaagaggacaatactatgtctttctagttcatggctgttatcccaaaatagagcaactgtccagcaactgtaggagctcagcagatatttactgaataactaaattggttattaaatagtttgcctcgctattgatttcaggtgccctcatttgagtatattgcaagttgaaaatgtccctacttaaaggtggaatttatgcttnaactcagccaggtgcaagtatttctctaaagcataagaaacaatcagagattttaaggaaatcaggcagcaagcccaatgacaaaacaggcaatattcccaagataaattcatgttctgtttcttacatgcttgctactctcagtgtcaccagggagcttgttagaaatgcagaatatcaagcctcaccccagagctactgaatcagaatctgcattttaacaagatgtccagaaaatccatatgcatgttaaagtttcagaattgcggcaccacatatttgattaaagggaagtgctcttcagaaaaacgagctacaagtataccttcc

SEQ ID NO: 2682 - DNA, 661 bp, Homo sapiens
  misc_feature [331]..[331]: Chromosome 5, SNP identification no. = rs7705235
  misc_feature [331]..[331]: allele = c, in linkage disequilibrium with rs375232, respectively
  misc_feature [331]..[331]: n is a, t, c or g
cacttaccacaacttgaaattattgtatttgattgtctgcttgcttagttttggtctctgtgactgctagactggaagtcccaagaggacaatactatgtctttctagttcatggctgttatcccaaaatagagcaactgtccagcaactgtaggagctcagcagatatttactgaataactaaattggttattaaatagtttgcctcgctattgatttcaggtgccctcatttgagtatattgcaagttgaaaatgtccctacttaaaggtggaatttatgcttgaactcagccaggtgcaagtatttctctaaagcataagaaacaatnagagattttaaggaaatcaggcagcaagcccaatgacaaaacaggcaatattcccaagataaattcatgttctgtttcttacatgcttgctactctcagtgtcaccagggagcttgttagaaatgcagaatatcaagcctcaccccagagctactgaatcagaatctgcattttaacaagatgtccagaaaatccatatgcatgttaaagtttcagaattgcggcaccacatatttgattaaagggaagtgctcttcagaaaaacgagctacaagtataccttccatgggcagatgcagcaagcactatcaaccccatcacagcctgagt

SEQ ID NO: 2683 - DNA, 661 bp, Homo sapiens
  misc_feature [331]..[331]: Chromosome 5, SNP identification no. = rs863639
  misc_feature [331]..[331]: allele = g, in linkage disequilibrium with rs375232, respectively
  misc_feature [331]..[331]: n is a, t, c or g
ctaggctgaattctctgtggagccagacaaagaggtgatgaatttttaggcacccataagttcaatcagaactaggcttgagcaggggaagaaaccccttcccaccaatgatggtggtagtggtggtggggtctggctttgttgactcctgccctgcattattcttccaggagtggaagaaactagaaactactgaaagcctctaggtagctgggtcaggagtaagcctactgagctactgctacccagaaaaacccctcacaccaccccatgtgtcctacaataaatgtttgctaaaaaaatgtgtttgttagtgcagatgggacccccntatgcatggattcactatctctgtgcttcaaaaagctcttgttagtcctttccagtggccaacactcagtgcagcatgtggagcataatagatatgtaataaatatctgttgaatgaatagtgaatctacagatggtctgttgggaaaactgagccatactgttcttatagtacctaccattcttcacctgtattggcaagtccttgtagtagcaaatatcagaaacccaaccaaaatacacttgaatgaaaaagaatgtacaggtgcacatgaatacagtttgattgtgggtgtatattatatccttatgacctaatttctctttttca

SEQ ID NO: 2684 - DNA, 661 bp, Homo sapiens
  misc_feature [331]..[331]: Chromosome 5, SNP identification no. = rs3822710
  misc_feature [331]..[331]: allele = a, in linkage disequilibrium with rs375232, respectively
  misc_feature [331]..[331]: n is a, t, c or g
tgagctactgctacccagaaaaacccctcacaccaccccatgtgtcctacaataaatgtttgctaaaaaaatgtgtttgttagtgcagatgggacccccgtatgcatggattcactatctctgtgcttcaaaaagctcttgttagtcctttccagtggccaacactcagtgcagcatgtggagcataatagatatgtaataaatatctgttgaatgaatagtgaatctacagatggtctgttgggaaaactgagccatactgttcttatagtacctaccattcttcacctgtattggcaagtccttgtagtagcaaatatcagaaacccanccaaaatacacttgaatgaaaaagaatgtacaggtgcacatgaatacagtttgattgtgggtgtatattatatccttatgacctaatttctctttttcatttctcccacaaatgatcctgttctcagacacattctcccttgggccacaatagagctgccactgctcctcataccctctcagcttcaaatttatgaactctcaatgcaggtttcattggttcccactaggtaacattctcattcctaaatcaatcccctgggaaatgcaattcagtaatgggtttaagtctggtcttaggttccgcacctgccgtatggcagtggggtga

SEQ ID NO: 2685 - DNA, 661 bp, Homo sapiens
  misc_feature [331]..[331]: Chromosome 5, SNP identification no. = rs4312933
  misc_feature [331]..[331]: allele = g, in linkage disequilibrium with rs375232, respectively
  misc_feature [331]..[331]: n is a, t, c or g
ttccaggagttttttttgactaaaatatagggacaataattgtacctacttactggtttgtcataaggattacatgagaaaatgatacagcatacttatcatacagtgcctgacacataatacacgagcaatagtggcaactactaaatataattggtactaaatttgcttatgtttacctaccattccagttgagtattagaaatcatatttaccgtcctgaccctggactgctcattattttgttctgtgtagattccagggtctgagagagagccaagatgaatatggccttccaagaagacatgctgacaagaaaagactcagagtncccaggagcttccccttcctaccaaccctgcagcctggaaccctagccatacctctccctgactgtggacagtacagcctttgagctgagccaagctgctcccctggcgatttccataagagtaccacttatcagcaccttggacagcatacaaatgattctgcatctccaggtaaggcaggtgtcagttccttgacatgatatagggttggtggcagcaagaagggttgcagaaatcttctttccctgtgaccaaattcctagggaaattgcacatacaagggaataaagcactcaaactgagaataaaacctcccgtatgtctggttt

SEQ ID NO: 2686 - DNA, 661 bp, Homo sapiens
  misc_feature [331]..[331]: Chromosome 5, SNP identification no. = rs2882468
  misc_feature [331]..[331]: allele = g, in linkage disequilibrium with rs375232, respectively
  misc_feature [331]..[331]: n is a, t, c or g
ttgtaacaatgccagagaaacggagctggcaaatcagccagtcctgtgaaatgcacctacttggttccaatcactctctttggaatgaataccatccttatttgtttttttgtatcccaaatttctaataagcagtgggctttctgtgggaagtggagaataaaaaccagacatacgggaggttttattctcagtttgagtgctttattcccttgtatgtgcaatttccctaggaatttggtcacagggaaagaagatttctgcaacccttcttgctgccaccaaccctatatcatgtcaaggaactgacacctgccttacctggagatgnagaatcatttgtatgctgtccaaggtgctgataagtggtactcttatggaaatcgccaggggagcagcttggctcagctcaaaggctgtactgtccacagtcagggagaggtatggctagggttccaggctgcagggttggtaggaaggggaagctcctgggcactctgagtcttttcttgtcagcatgtcttcttggaaggccatattcatcttggctctctctcagaccctggaatctacacagaacaaaataatgagcagtccagggtcaggacggtaaatatgatttctaatactcaactggaatggtaggtaaacataagcaaat

SEQ ID NO: 2687 - DNA, 661 bp, Homo sapiens
  misc_feature [331]..[331]: Chromosome 5, SNP identification no. = rs6580052
  misc_feature [331]..[331]: allele = t, in linkage disequilibrium with rs375232, respectively
  misc_feature [331]..[331]: n is a, t, c or g
gctcttgctcttggttgcaagatgggaaccacaaactcttggcttcattcttctagcctagcaaccccagtgaaaagagagcttctttgtctcaatggttccagcaaaagtcccaggactcacacccattggcctggagtcagtgaggtgggacaagcactgactggccatgcctgattcaaggacccatagctggagctgggggaaagcctagcactccaatatcgcactggttgagagatggagcagggttatttctgcatgaaattcgacttgcagcttcaaaagaaggaggaaaggagacaagcagacaacaaaaaccaatgtccantgtagccaccctgctgacaagcagctgcattcttcccacagtcacatgtgtatcactagtgcacatttggctttatcaggcttctgctctgggaccatgctatgctactaacagagataatattttatgttcccagtgggttccaaaggagaagaccagaaaattatgctaggtaattgagattacaacctgataccttctccagatcaaccattttccacccttgggctgattgataaccaggaagaaagtgatcagggttgttctgatgaaaggacatataacttattatcctgcccaaggaacccacatataaaaagttgtgcctct

SEQ ID NO: 2688 - DNA, 661 bp, Homo sapiens
  misc_feature [331]..[331]: Chromosome 5, SNP identification no. = rs815633
  misc_feature [331]..[331]: allele = a, in linkage disequilibrium with rs375232, respectively
  misc_feature [331]..[331]: n is a, t, c or g
ctgatgacttccctctccctgctcagtgttcctggccaagacgcacagcagaaggaaggcagccctcaccagtctttccacaacagagccagctgggtgcctagagcaacagacgctgcctgatccacagcagtggccaaagatgccagctgccacctcgcagtctttggatgatgcaatgattcagggaagtgccattgctaactcatttacacctctgtgctgcatgtcacagccacagagccgcagcaagggtgcagaggtgggctttcacttgcagacactgccaatgatgggcagtgggctgggaaggctcattcctgcctgcagncaagcaggtatgccctcctagttctcaggttctgagcttggaattccacagctacagcttttctgagtttaccaccactcaggcaactaacgagtgatgcctgctgtctaaagttttcctttatgtggaaacagaggcatggagcaggcaatgacttgttcatagtcgctgcaattatgagcaccagcttgaacttaggaactcttataaatttctgttttcaaccaagtattgagtgtctgctatgtgtcagacactgtgctaggtgctgaaatctcacttctactgaggaagacaggaacataaatggtgatgatcattgcattagaa

SEQ ID NO: 2689 - DNA, 661 bp, Homo sapiens
  misc_feature [331]..[331]: Chromosome 5, SNP identification no. = rs4958695
  misc_feature [331]..[331]: allele = g, in linkage disequilibrium with rs375232, respectively
  misc_feature [331]..[331]: n is a, t, c or g
tcagcctcccaaatatatgtgtttttaaatacttgcttagaatattatttaaattaattcactgttgtgtgcctctccgccactagaacctaagttccatgagggcacagaccttgccagtgttggtccctgctgttcttccagcaccttggtcaatgcccggcatgtggtaggcatttgaaacataatagttgcataaatgagtaagtgaatgaatgaatatcaactcattttataaactctaaaatattctttagaagttataggttactattactactaaagccagactagaggctgcaactaacttcctgtatctgagaagacaganagtgacgaggagggtttcatagggagaatggggcttgggggcaggtagagagtattacaagtaaaaaaggtacctatgagttcagatgttcaagcaacaagcaataagagtctatggagaagattcctgggggacaatgccaagtacatagagattcaccgtcaccaaagttatcaccatcatgatcatcatggccaccaagtattgaacgctaactgtctgcctgacaccacattaagtaaggagggaaccagtatttatagcaagaaaagtatctacttactcttaatatcatctacacacttacatgcattcacacatgtaagtgtg

SEQ ID NO: 2690 - DNA, 661 bp, Homo sapiens
  misc_feature [331]..[331]: Chromosome 5, SNP identification no. = rs815631
  misc_feature [331]..[331]: allele = g, in linkage disequilibrium with rs375232, respectively
  misc_feature [331]..[331]: n is a, t, c or g
ctgcctcctttccctttcctgtcattcttaacccactcccttaccatctcttctccagatcacctcccaagtaaactacatgcatcccgatcttggtctcagagtcttcttttggaggaactcaacctcagacagatggtgtgtgtgtataagtgtgtatgcacacttacatgtgtgaatgcatgtaagtgtgtagatgatattaagagtaagtagatacttttcttgctataaatactggttccctccttacttaatgtggtgtcaggcagacagttagcgttcaatacttggtggccatgatgatcatgatggtgataactttggtganggtgaatctctatgtacttggcattgtcccccaggaatcttctccatagactcttattgcttgttgcttgaacatctgaactcataggtaccttttttacttgtaatactctctacctgcccccaagccccattctccctatgaaaccctcctcgtcactctctgtcttctcagatacaggaagttagttgcagcctctagtctggctttagtagtaatagtaacctataacttctaaagaatattttagagtttataaaatgagttgatattcattcattcacttactcatttatgcaactattatgtttcaaatgcctaccacatgcc

SEQ ID NO: 2691 - DNA, 661 bp, Homo sapiens
  misc_feature [331]..[331]: Chromosome 5, SNP identification no. = rs707184
  misc_feature [331]..[331]: allele = t, in linkage disequilibrium with rs375232, respectively
  misc_feature [331]..[331]: n is a, t, c or g
attcaaggttatagtgagctatgattgtgcctctgcactccagcctgggcaagagagcaagatcctgtctctgaaaaaaataaaataaaaaagagaatatgcatgtgttactcagatgttggctgcctccatgtgccactgctttgttcagtctgaatcagctccaaagcaggattttgtatttgatcaactctctctgctcccaacccccctcaagtgtagtacatgaccttaagaagattttactgaggagacagagatggcttataccatgctgtgcacagcaacttacatcaaattctttataaacatatctttttcccttcaaagnctaccctgggctaccatatagttattactctctatctgttgacaagccccatgctccctctgagaccctcctcatcactctctgcattctcagaggaagttagctttagcttgcccccctccaagcttgtgtcctatgtccatcacttaatgtcttgaggtacagtacacccacgccccacagcaagtgagacttcagttgtccagatccatcccctgaaatggtgtagcaggtagcagacattattcttgcctgaagacctcatgcagcctaaaaatgggcaggacagaaatgccaggtgttgactctgttgggtgatggatgggagtt

SEQ ID NO: 2692 - DNA, 661 bp, Homo sapiens
  misc_feature [331]..[331]: Chromosome 5, SNP identification no. = rs707185
  misc_feature [331]..[331]: allele = c, in linkage disequilibrium with rs375232, respectively
  misc_feature [331]..[331]: n is a, t, c or g
atgaagcatgcatggaaagcaaggaacatcttcctttccttcctgcaggaaaccagggagcatcttcgcctcgctgggagcatctgggaagcagagagagaaacagctgtgttccctgaccttctgttgaagtgcaggaactcagaggcgtcacttctcttattaatccagctgtgagcattttttaggctagctgtccccccatccctgaacccctgaggaatgaggtgcagagcctccaaacaatatcattaaaatgcttcccaggaagagactgaagcccagcgggtgagaagctgacagcagcacttagccatgccggtggagatanaggctgaggctgagacgggaagtgcctcctgtctggctctgcacccactagtgagccaaccttggacacatcccctcacctctgggccttggttttctcacctgtaaaatgaagattggcctagatgatctcagatgatatttgttcccctgacattccatgtttttaaaaggaaactatgaaatggctacactacccccttgctaagattttggggaccattttttctgataggatatagaagaaaatgaaatggaggcaattccccaggtaattctggctccctcaaaaacctctttatatgcaaaatctacacaattgcaagctcag

SEQ ID NO: 2693 - DNA, 661 bp, Homo sapiens
  misc_feature [331]..[331]: Chromosome 5, SNP identification no. = rs1428122
  misc_feature [331]..[331]: allele = g, in linkage disequilibrium with rs375232, respectively
  misc_feature [331]..[331]: n is a, t, c or g
catgcctttgagcagcttctaatacagtcagggagatcagcaatagctagtccatcagtgtgctatcagagtttgtctgctgagagtattgtgggagtcaggctcagaggagggagttctgatcctgtggggagtcaggaaagactggttggaggaagaggcatctgactcacacaataaacatgaagcatgcatggaaagcaaggaacatcttcctttccttcctgcaggaaaccagggagcatcttcgcctcgctgggagcatctgggaagcagagagagaaacagctgtgttccctgaccttctgttgaagtgcaggaactcagaggngtcacttctcttattaatccagctgtgagcattttttaggctagctgtccccccatccctgaacccctgaggaatgaggtgcagagcctccaaacaatatcattaaaatgcttcccaggaagagactgaagcccagcgggtgagaagctgacagcagcacttagccatgccggtggagatagaggctgaggctgagacgggaagtgcctcctgtctggctctgcacccactagtgagccaaccttggacacatcccctcacctctgggccttggttttctcacctgtaaaatgaagattggcctagatgatctcagatgatatttgttcc

SEQ ID NO: 2694 - DNA, 661 bp, Homo sapiens
  misc_feature [331]..[331]: Chromosome 5, SNP identification no. = rs11948898
  misc_feature [331]..[331]: allele = c, in linkage disequilibrium with rs375232, respectively
  misc_feature [331]..[331]: n is a, t, c or g
tccctggtttcctgcaggaaggaaaggaagatgttccttgctttccatgcatgcttcatgtttattgtgtgagtcagatgcctcttcctccaaccagtctttcctgactccccacaggatcagaactccctcctctgagcctgactcccacaatactctcagcagacaaactctgatagcacactgatggactagctattgctgatctccctgactgtattagaagctgctcaaaggcatggatccaatctgattcatctctcctccccacgtctcagcaacagcacaccttgcacacagtcataaactaattgctaccatttattcaaanattgtcatagaccaggttcagggccaagcactttgcatactttatctcagtaagttcttctgccaccctgcaaggaaggaattattgtacccattttatggatgagaacactgaaagttaacttgttcacggactttatcgcagaattaggaaattcaggcagggcacagtggcttatgcctggctcatgcccagcgtgttgggagtccaaggtgggaggatcgcttgagcacaggagtttgagaccagcctgggcaacatagggagaccccatgtctaaaaaaaaattaaaaattagccagtcatggtggcatgcacctgcagtcacag

SEQ ID NO: 2695 - DNA, 661 bp, Homo sapiens
  misc_feature [331]..[331]: Chromosome 5, SNP identification no. = rs4958697
  misc_feature [331]..[331]: allele = c, in linkage disequilibrium with rs375232, respectively
  misc_feature [331]..[331]: n is a, t, c or g
acactcccttttccctggggatggaaagacatgagcacatgcagttaaaaaaaaaatgtggctgggtagaactccaagcctaaagcttctctgtagaatcatataaagtggagattggaaggcacctttgggttggatcatctggtccagcttttcattttatatctatccaaagcccagagaggtgagggatcaccctaggtcacactgagactcaatgcagagtccaccctgaaaccccaggctcccgattcccaccccagggctctgttcattacatcaatattccttacttagtagatagtccagtgtgatgggcagaataatgatnccccaaagccatccatggtctactaataattcccatcacttgtgaatatgttaccttatgtggcaaaaaggactttgcagatatgattaaggatcttgagatggggagattgtcctggattgtctgggatagtcccaatataatcacaacattcagataacaggaagatagaggtgtcagaataagagaagatgtgatgacagaagcagaggttggagtgatgcaggaggcctccagaatctagaatagacaaggaaagagatttttcccctagaacttccagaagggttgtagccctgctgtcccattttagacttctgacctccagag

SEQ ID NO: 2696 - DNA, 661 bp, Homo sapiens
  misc_feature [331]..[331]: Chromosome 5, SNP identification no. = rs815624
  misc_feature [331]..[331]: allele = t, in linkage disequilibrium with rs375232, respectively
  misc_feature [331]..[331]: n is a, t, c or g
tttccaggggctgggctgtagcagcaccttccactgaggagtggagagaaggtggcagattctgctttcctctctccaggtcccccatcttctctcccctttcctaagtttagccacttatacaatgatgtgctgataagtgtttaacaactggctttccaagcaaatacaaaaggcactgatttatagctattgccaattgttgtggtgtaaacattcccaccctggccaattttaagctgccaatgtaatgtctgtgatggaggagttgaaagagatgtgcacagtgagatctgagcagctggtgcaggctggctccagcacaccatcncatttacacctgagtaataatgtataccatttataccctgagtaagaatgaccagcatttacgaagcactcactatgtaacagcaacagttgccagcacttcatatctgctaactcccaacaaccctatgaggtggaagctcgtaatatcccaattacacagaaacacagtctcataggttcaacaacttgctaaggtcatgcaggtaggagatgatggagccaagattaaactcagagagtctgattccagagcctgtgctcatcagatgaatttatttttctattttgattttttaatggtttaaaactttttaattatagtataact

SEQ ID NO: 2697 - DNA, 661 bp, Homo sapiens
  SGCD
  misc_feature [331]..[331]: Chromosome 5, SNP identification no. = rs4438860
  misc_feature [331]..[331]: allele = c, in linkage disequilibrium with rs17053557, respectively
  misc_feature [331]..[331]: n is a, t, c or g
gtcagcagtgtgatctgaggaccctatagtgtgtagggtagggtgtgacaaggtaaagagggtggactctgtagccagtttgtctgtgactatcttctgtgtgactctgagaatgtcccctggtctctctaaatctaaattttaacatccattaaagtaggtgatgaggattaacaatatatttaaaattttaatacaaatattaacatagcacaaagtgcaaatacaatacatgtggccaagggttataatcatcgtctgcattatcacattgaatggatgaatcactggacttaagcataaatatctgagtttgcaacttttaaaatgngtgttgtttaaaaagtcagctgtaattcaggaaattcagtttctcaactgtaaagtaagggtgctaatagtcccttgcgatgccgccatatatcttaatgaaatgaaggatgtggaaatattttcagaagtacaaagcctcatacagatgtaggtggtattttcctgatggtgatccccttggggctccctcactctttagagcttcggagcactccaagtgttggagggatggggcacaagtgttggcttttttgtttgtttgtttggatgtcattacattgaaatcagcccaaaccatctcaagctcatcccagtagtccagaaagtt

SEQ ID NO: 2698 - DNA, 661 bp, Homo sapiens
  SGCD
  misc_feature [331]..[331]: Chromosome 5, SNP identification no. = rs6862189
  misc_feature [331]..[331]: allele = g, in linkage disequilibrium with rs17053557, respectively
  misc_feature [331]..[331]: n is a, t, c or g
tcatagttaatgtctagagctttgtataaaccatttgaaaaggtgttgcaacatgtccctgttagcaactttagttcttttagcactacgtatattgaatgtattaggagtttctcaaatgcaagaaatactaggtcacactgataaaatacttacctttgtatggctcctgtttcagactctaagacatttgctatcttgcagcattacattatcatctcagtataacagtgatagatagcaacaagacactcatatctaccccatccatacattcaacaagcattttttgaggtccagacatcagaaataaagtggtgaagaatggacngggtcttcaacctcttagagcctacagtctggtgggacaagaagacactgaatacatgtggcaaaaggaaactgtgtagtagtgaaatggggaaagttcccttgccccctcttaggacgttccatgagggtgtggcttgcttcttcagtgtgcactattcaaacttctaaggggagcatacagataggcaggttgtagggctctgactccatggcagtgtctaggggtgaatgtttacagctgaaggcccggggggcatgtgttacagggtgctcttttagtttaaccatcataggcagcttgtgttagctcaattagacctctgactta

SEQ ID NO: 2699 - DNA, 661 bp, Homo sapiens
  SGCD
  misc_feature [331]..[331]: Chromosome 5, SNP identification no. = rs17053531
  misc_feature [331]..[331]: allele = g, in linkage disequilibrium with rs17053557, respectively
  misc_feature [331]..[331]: n is a, t, c or g
gggtctcgggtttttataggcacaggatgggggcgtggcggggaaattcaacatttgggcagaaaaacaaaaatgcctatcctcacctaggtctgtgggcacaggcccagggttggagccctagccagggatcatgccctcctctacccagcacttccctgccccgcttccatatcatttaaagggaccacgcccttctcttctcagcatttcgcttctctatcagtagggaaaccaagagacagggacaggacggacatgcttgaataaatgaaatgtaattaagcagttcctttactatgtggtgatctaagacctcaaatgttagggntatttattttcacaagaatcctatagactacattcatacaagcttcacgctgtttgtggtacagtgaagccagctcacactggctcatgagagccaattgttaaatgttcaagaattttaccaataagtcagttgttaaacagctattattaaaattaaatcatttataaacatacagttaaataaattaaaagataataaatactcaaaactcatttcttcctacatttatggctgttgatgctcttgctgtgatttagtttattgtatctgtgtagcggtggacgcaccacatgatagcgtgctcctgtgcatctcttctctgctcca

SEQ ID NO: 2700 - DNA, 661 bp, Homo sapiens
  SGCD
  misc_feature [331]..[331]: Chromosome 5, SNP identification no. = rs6869537
  misc_feature [331]..[331]: allele = c, in linkage disequilibrium with rs17053557, respectively
  misc_feature [331]..[331]: n is a, t, c or g
gtgccatggagaagctggatgcagctaactaggactagggcatcctatgtgattggttaggatgtatatttggctttctctggttggtcctaagttggaagctgagacaaaattagggaagctgtcagttatttaatgacgtcctggccattttaggccagattgttagagttattgtttagcttcctggattgtcagtagagacagtagtctggcttcctgcaagtctgacttttagctggctggctccatgagttgtttattgtagatgggggaatggttttctgggaaggttgctgcattttgtgggactcagttctgttttatatanggtctggccatcatccatttgtatattcagtctttcaacatgtaccaagctctgtgctaaactgtacatctaatcctcttcatgatcctgtgaagaaggtactccaacatttgcagagaggaaaaggatcattagcgaggttacatgatttgttaggaaggggtagagcctggtttcagacacatatatatctgtctgtagcctgtgggctttacgaccctgccctacagggatacagcttccttcgttgcaaaatgaggagataaactaagttaatctctagagttccttctaggtcaaatttgctaattcaaaacttgacacaaggag

SEQ ID NO: 2701 - DNA, 661 bp, Homo sapiens
  SGCD
  misc_feature [331]..[331]: Chromosome 5, SNP identification no. = rs2135028
  misc_feature [331]..[331]: allele = c, in linkage disequilibrium with rs17053557, respectively
  misc_feature [331]..[331]: n is a, t, c or g
tctagagtttgggaatttgtcagtaaatacaacagaaaattttccatactcaaagagctcattgttataggccatgtgacttagctataggatttctcaaggtgcaaatttaggcaaatccaggatttttgaatccattatagcagcaatattctctataacctgtttttcaaatttcagctacattctgagcagcaggtccaccaaaccagaagcctgcctttaggagtccaaaagatcagaggacctaagagaaaatagttctgtctgtgaggatatccagtgtggctttactggccagcttccttgatgaccatgacctttccagggntcttgtacttggggcttcccgaaagtgtgtctgagtgcagtagtctttttatatctgctggaggcagatgctttagttcccttagttaagacaacgaagacaagagaaagatgaaaatggcttgcaaagcagattaatgacccaattaatgctgaattgtccatttcccttgttaatgtgccctgccttctccctacactgtgtggacttcacacataacattctctacacgttcattgtttatctttcttccttactggactgtacatcctagagaagaagggattatgtctgtcatatctaacgtcgtatttctggggcctggaacat

SEQ ID NO: 2702 - DNA, 661 bp, Homo sapiens
  SGCD
  misc_feature [331]..[331]: Chromosome 5, SNP identification no. = rs7731517
  misc_feature [331]..[331]: allele = g, in linkage disequilibrium with rs17053557, respectively
  misc_feature [331]..[331]: n is a, t, c or g
aaggaaaaaaaatgtaagggaaattataatctactcagttaaattttctatggtaaggccattactggtttcatgaggagtgtcttgagcttttgtttaattgaaaggaaaaggagattttcaaggggaaataccacacaaagtgggggaaataaaggaggaaggggagtaagtctatttctctcacaggtatatgattgttattatatcagtggtgtttaattttgcttacttaatgattattgtataaagtctgctatatgccattgtggagtgttcaggggattggttttaagacattccactcccaaagctcatttttacaaacttnccaccttatggtgttgtccttaacatatgtggaggaggaagatttttatcccctaaagtggagggtggtggcatttaatgcttggtttcgggaatattcatgtctacctcaaagatggtattataaagaaggagtagctgtgaaaaagtgatatttacattctcatcttaatattgctgttgaatatgtaatttgagattatgaaatcataccacattctaccaaaagtttattactatcctcttagctcttttgtcttttcatcttgaagtatgagtgtttcttgaagctttaagcattttacaagggataagaggacatccagtaaca

SEQ ID NO: 2703 - DNA, 661 bp, Homo sapiens
  SGCD
  misc_feature [331]..[331]: Chromosome 5, SNP identification no. = rs7731883
  misc_feature [331]..[331]: allele = g, in linkage disequilibrium with rs17053557, respectively
  misc_feature [331]..[331]: n is a, t, c or g
ttatatcagtggtgtttaattttgcttacttaatgattattgtataaagtctgctatatgccattgtggagtgttcaggggattggttttaagacattccactcccaaagctcatttttacaaacttgccaccttatggtgttgtccttaacatatgtggaggaggaagatttttatcccctaaagtggagggtggtggcatttaatgcttggtttcgggaatattcatgtctacctcaaagatggtattataaagaaggagtagctgtgaaaaagtgatatttacattctcatcttaatattgctgttgaatatgtaatttgagattatnaaatcataccacattctaccaaaagtttattactatcctcttagctcttttgtcttttcatcttgaagtatgagtgtttcttgaagctttaagcattttacaagggataagaggacatccagtaacaacaaaatgaggaagccacattgcactccttggacatgtgcgtacaggatgtgtagtagatacaaccctgaaaagcctggtttaacctaatcgggctcctgtggaggaacccaagttggatttttttttttttttttgagatggagttttgctcttgtcacccaggctggagtgcagtggtgtgatctcggctcactacaacct

SEQ ID NO: 2704 - DNA, 661 bp, Homo sapiens
  SGCD
  misc_feature [331]..[331]: Chromosome 5, SNP identification no. = rs6879264
  misc_feature [331]..[331]: allele = c, in linkage disequilibrium with rs17053557, respectively
  misc_feature [331]..[331]: n is a, t, c or g
tatcataaactttgagtaacccatcacttttatttgctccatcccaaccaatccccgggcccggctgggcccttatttgcagcatacccctttcctttccttgtgtttccttcccttctctcgttcttacattctgtagacagattagttgcattgcatctatgcccagcctcagaataattgtgtggcctttgacaaactacttagcttgtctgagctttggtttcctaataggtaatagaaatagtaattataatttttacctctaaaagttaatgtgaagattaaataaaataatggataaatagtcctatctactcctatgctaaanagctgacacatggtagctattaatattatctgcctcacaccatcccagcctcctcattcggttctttttactggaacaaggaccagcagtcatctcattttagtcccattatttttctttcctccagtcttctccatccaataccacagaaaccctgtacaaatactagatcaatattaccactgcatagttgggaagatgtatgaagtaatatgttaccacaagaatacgggctttggcttgaatttttattctgtatcttgatagctgaataatttcaatctggcttctgaacctctctgagtttcagttgcctcatgttgaagattg

SEQ ID NO: 2705 - DNA, 661 bp, Homo sapiens
  SGCD
  misc_feature [331]..[331]: Chromosome 5, SNP identification no. = rs6879407
  misc_feature [331]..[331]: allele = c, in linkage disequilibrium with rs17053557, respectively
  misc_feature [331]..[331]: n is a, t, c or g
cccggctgggcccttatttgcagcatacccctttcctttccttgtgtttccttcccttctctcgttcttacattctgtagacagattagttgcattgcatctatgcccagcctcagaataattgtgtggcctttgacaaactacttagcttgtctgagctttggtttcctaataggtaatagaaatagtaattataatttttacctctaaaagttaatgtgaagattaaataaaataatggataaatagtcctatctactcctatgctaaacagctgacacatggtagctattaatattatctgcctcacaccatcccagcctcctcattnggttctttttactggaacaaggaccagcagtcatctcattttagtcccattatttttctttcctccagtcttctccatccaataccacagaaaccctgtacaaatactagatcaatattaccactgcatagttgggaagatgtatgaagtaatatgttaccacaagaatacgggctttggcttgaatttttattctgtatcttgatagctgaataatttcaatctggcttctgaacctctctgagtttcagttgcctcatgttgaagattgcaacactattcacaattgctaagacatggaatcaacctaggtgcctatcagtggattgg

SEQ ID NO: 2706 - DNA, 661 bp, Homo sapiens
  SGCD
  misc_feature [331]..[331]: Chromosome 5, SNP identification no. = rs905788
  misc_feature [331]..[331]: allele = g, in linkage disequilibrium with rs17053557, respectively
  misc_feature [331]..[331]: n is a, t, c or g
tattacttctagcacttccacatatatgattccacaccaagaaataaacagtcaaattgtatttgtccatcatacagatttttcattttcttcacaattacaagtacagacagattgtcatcttttgagatgaatgtctctctgtaaaaatatctgaggatgtccttagtatatcctcaggggaatatactgcaaagggggaaatcccatttccaatgtttaattcacaagttgcacgccactaactacacagggaatctttgtgtctagggcacaaattaaaatgcgttaagctgtgtagccctgagcaagtaataccgcctttctgtgnctcattttcttcttgtaaatagaatggcatgaattagataatccctaagaactgtttctattcctacagtctatgaatcaaaataaaagaacatttctacaggaattaattaatcctctggggataaaatgagttaagtatttgcttttattctacattgctctgcagatgatctttcctttacaataatcagatcttaagaaaaaagtccacatgacacgcttaagtgtaactagacttttctaagagatagtataaattgaggaatgattttatgaagcaagatgacttgcttggcagctataattttgcctcctcaatgactgagcc

SEQ ID NO: 2707 - DNA, 661 bp, Homo sapiens
  SGCD
  misc_feature [331]..[331]: Chromosome 5, SNP identification no. = rs17053557
  misc_feature [331]..[331]: allele = c, t
  misc_feature [331]..[331]: n is a, t, c or g
gtattcatggaatcttgtgtttgatgtgctagttttctttctaatacttattttaaagtattattttaattgccatccttgtaccatgtaagtcatcttacatgtaatcaatggtacatatgttgtggtttgggatgcaacttcctcattattttagttggattctgtcatcttcccattatacttcaaaggggagtattcataccttttcagaagaaatgttttatggtctaatttaaatgaaaataaagatgttatcctagagtcatcttagttcctctgaagtattgtctatggcaaaggagagctgacagtcttattttgaaatcangccctgagctatttggttattattaaagaatgacagatggcacaaaggatgctaaggtagaaattaaggtttctttgtaggtttggcaaatgttatagcatacaagggctgtttcagtgctgtgattgaacaatgcaaacagtattgcattagcatctaaattttacatcattttcaagaaaacagagtcccggtaacagatggacaagactgatatttatctagcaacaaaggggagtcacaatttgactgctggatacttaaatctcagccaacaggggagatggcaattcagggaaattgaagaggagatagctagtgtcactcttt

SEQ ID NO: 2708 - DNA, 661 bp, Homo sapiens
  SGCD
  misc_feature [331]..[331]: Chromosome 5, SNP identification no. = rs17052633
  misc_feature [331]..[331]: allele = g, in linkage disequilibrium with rs17053557, respectively
  misc_feature [331]..[331]: n is a, t, c or g
aattaggtgagttcatggctggctgaacagtcatacccaaaggaccttgattaatgcatagatttcaacaagcaggaaggtccctgtggtgttgataagagtatgtttaatagatattatgttcagacagtccccaggatgtgtcctgttaaggaatttttaaagaagtgttgatctgtctactccagataccaaaatcttgacaaaacttcccatcggagtccattaggcaatgatggagcagtcttggaagaatggaatcataaaagtagagatgatagccttgaaattgctatgggcacagagaaatctgccctccagcactgatttnctaccaagcctggagaagttttgataactaaaggttttaccaagaagacaaaagttatgaaatatttgctaaatccttactcagtgaactgctgagtttgctaaatagttaacctgatgtgcagtagaagaatatcaaactacaatatggtacaggcaattacttacacttcattctgtctgcactgagaagttattgacatacttagctaatgaataatgaaaatatttctacctggttccatgttagataacaaagccattggcctttgttgagctgtcgttctgtgccagatactgctcaagactctatataacttagctcattgat

SEQ ID NO: 2709 - DNA, 661 bp, Homo sapiens
  LOC134541
  misc_feature [331]..[331]: Chromosome 5, SNP identification no. = rs10516032
  misc_feature [331]..[331]: allele = a, g
  misc_feature [331]..[331]: n is a, t, c or g
ttgcagctaactcactactctctctttccctctctttctctgatgaaaaaaattgtttatggaggaagagtctcatatagtcaggtgaatgtacatgtttgtaatgctctcacataggataactgattggtatagtttttaatactgaaattgatttttaatttcgttggaattttcatcagcagaaaaccatctccaactagccaggctcctggacatttcatttttatttatgaactgccagtttttcagcagaacccttttgttgtggctgattttgggttttccaaattgggctttgttcagattggaatgggaaaatgccaccacntcagaggagaatgccaccttcacctttttctttgaaagttataagcttacaggaaaacctaggatactggaaactcttctgtcttcactagccatcttggtgtttccttgatttagtatgtgtttattaacattggaatggttctagttacaaattgtaaatgtttggacacatcagaagatatttatatagattaaaataatgagtctaaaagtttacaaatatcaaaatatcaatctcttaggtgtcatatattaaaaaatgtaattcttaaagcacacttctgaaatataaatatttggcttaaacttttatgaataataatgcatg

SEQ ID NO: 2710 - DNA, 661 bp, Homo sapiens
  misc_feature [331]..[331]: Chromosome 5, SNP identification no. = rs251253
  misc_feature [331]..[331]: allele = t, c
  misc_feature [331]..[331]: n is a, t, c or g
aaattcttaaaataatttttttattttcgattacctaacatatatagatggtacaaaattcaaaaggcacaagaaagtattcagtgaatatcaagtctctgtcctgttgctgtttcttggctactcattttcccttccagaggcaaccacagttacccacattctgtgtcttcttccagagatatcctttgtatgtgcaggcattttacctactttaaaccttcatgtgtttggaacactgttcttggagccaagacccctatttgagctttaccactaactataagatccaaggtgacctctctgagttccagtttcttcaccacaaggnatcaaaagtaaaactgggtattctctatgatctttttaacttcaacactgagcgcacatcctgaaagaattaaaatggttggcacaggtcctaactttccatatgacctgtaggtcataactttgcgctgtgtgtaaatcttcattacagtagattgagctctgcctgctgctcacatagacatcttttaagagagtgttatcatttcaagtctaaatgttttctttccggacccctctaggcctgtgtgatttgttaaataagacttcacagctttagaagtgagattaattaactcaaagctggaagatctccaggaaaagctgtgtc

SEQ ID NO: 2711 - DNA, 661 bp, Homo sapiens
  LOC153222
  misc_feature [331]..[331]: Chromosome 5, SNP identification no. = rs29776
  misc_feature [331]..[331]: allele = g, in linkage disequilibrium with rs251253, respectively
  misc_feature [331]..[331]: n is a, t, c or g
ctggatttgaatccttgtttcaccacgtgtaaagcaacacaaattaacctctgtgaagctcaatttcctcctctgttagtaccttctggggttgatgtgagaactaagtgaaataattcatataaagcacttatcatagtgcctggcatatagtaagcactcaatcaatagttgaattattaaattgtttaagggcatcatttggaagatgtactgtagactaaatagcaagtacagataactttagactttagcaggttaacagccactaaaataatacttctgtacacaaaatgaatagataactatatgtagatacctaacaggaaantaaaagcataaatctctcctctgtagccgccacaataccaaccacatagtagggcctccatgcccaatgaaggaatgagtatttcccctactgcaaagtgagtaccaggattataatttttttaaatctaacacataccacattctaattttccacatcagctggaatttaaaattgaaaaagaggaaaactagctgggaagtttgaggcaggttaccccgactcgttcacatgagattcatgcatcaaatctccccggcatacatgacagaccatcctctcttgtaacactatatttgaaaaagctccagcagatggttagaccttcca

SEQ ID NO: 2712 - DNA, 661 bp, Homo sapiens
  LOC153222
  misc_feature [331]..[331]: Chromosome 5, SNP identification no. = rs251248
  misc_feature [331]..[331]: allele = a, in linkage disequilibrium with rs251253, respectively
  misc_feature [331]..[331]: n is a, t, c or g
cagcctggccaacttggtgaaaccttgtctctactgaaaatacaaaaattagctgagcatagcggtgcacgcctgtaatcctagctactcgggaggctggggcaggataatcgcttgaacccaggaaacggaggttgcagtgcgccaggatcacgccaccggactccaacctgggcaacgcagttagactccgtctcaaaaaaaaaaaaaaacatatatatatatatgtattttttaaataaatatatagatgccgatcttgactgaaaattaagctttaaaagcaaacagtgatttcagttctctttatcttttaaaaactgagttatantaacagaatcaacacacaaacttactgtacttcactgtcacttgtatttaaccaccaccaggaaccatgctagttattcctttacttcttacactagtatcccagaacccacacacatccaccctgtaaactaagtagacaccctgtaaactaagtagaacattgtctatataaaagcttgctttcacctgccatgacagagaatgatggtaaatggagcatccagactctcttcgggagctatttagcctcttctatgcttatgaatataaaaaacccaaagctgatataccagtcatatgaaggaattatacccaaataagttctatt

SEQ ID NO: 2713 - DNA, 661 bp, Homo sapiens
  LOC153222
  misc_feature [331]..[331]: Chromosome 5, SNP identification no. = rs427684
  misc_feature [331]..[331]: allele = c, in linkage disequilibrium with rs251253, respectively
  misc_feature [331]..[331]: n is a, t, c or g
cagctactcgtgaggctgaggtgggaggatcacttgagccccaggtcaaggctgcagtgaaccatgactgtgccactgcaccatcctgtctttaaaaaaaaaaaaaaagaagaagaagaaaaaggaaaagaaaaggaaagaaatataacccaaagggaataaagagagagagggagggagggtgggaggtgaaataaacgcaagagacaaatagagtcagaatgaaaggtactttagtaccaacacattagaaaaggtgggactaaaagaaaaatggaacactaggggaaaaaaccaatcaaccaaagtcagaggtacagggagctacagngaaaagagactggagacctgacagcatagaacagactgaagagaattagaggacaaagtgaaagcaaaaaaagctatttcctcctaaatcttacacatcagtttcctcctcttccattctccctcccacctctgccttagctcaaaccatctcatacccaaccccacactacacatcttttatacttcagctgtactagaatgcctccttcactaatcttcaaaactaagttcaaacaccactttttcaatgaatattcaactttccccaggcagagttagcagtccttcttccatatttcagaacattttgttctgaaaaaccatcgta

SEQ ID NO: 2714 - DNA, 661 bp, Homo sapiens
  LOC153222
  misc_feature [331]..[331]: Chromosome 5, SNP identification no. = rs251243
  misc_feature [331]..[331]: allele = c, in linkage disequilibrium with rs251253, respectively
  misc_feature [331]..[331]: n is a, t, c or g
ctccgcctcccaggttcaagcaattctcctgcctcagcttcccgagtagctgggactacaggcgcccaccaccacgcccagctaattttttgtatctttagtagagacggtgtttcaccatattagccaggatggtctcgatctcctgacctcgtgatccgcccgcctcggcctcccaaagtgctgggattacaggcgtaagccactgcgcccggccctaaaaagactattaaagcaagtttctggattaatctgagttgaatgggaaggactactttttatttctgaaaactatcaattgcaaggtattggaggctttctgcagccttgntatctgtcaattaagttgttcagagcacaagaataagagcatggaacaattttagacagaaccagagaatgcatttctaatcccagccaactttgattaccactggggacaaaatattcagtttgtatgtatctgtgtagctgtttacagattaaagtacatttctaaaccctgtcatttaataaaacaacttggtgaagtaacaaggaccagtattttgataaaacatctaggtaatatagtcttggtatcaggataaccactatcccccagtccctgtccaaccctttttacatcaataaataaaaagtacagcaagggtaagagatt

SEQ ID NO: 2715 - DNA, 661 bp, Homo sapiens
  LOC153222
  misc_feature [331]..[331]: Chromosome 5, SNP identification no. = rs3097320
  misc_feature [331]..[331]: allele = c, in linkage disequilibrium with rs251253, respectively
  misc_feature [331]..[331]: n is a, t, c or g
tgagacagagtctcactctgttgcccaggctggaatgcagtggcatgatctcagctcactgcaacctccacctctggggttcaagtgattctcctgtctcagctgcccaagtagctgggacggcaagtgtgcaccaccacgcctggctaatttttgtatttttagtagagggggtttcgccatgttggccaggctggtctcgaactcctgacctcacgtgatctgcctgcctcatcctcccaaagtgttgggattacaggcatgagccaccgtgcctggccacctcccatattttaaaaactctccgaatgtgaggataaaagactattanattgatcaggtatacagagtttgcaaggtggtatggcaaaaggatcacagattcttacaaggtcattataagtactgctttggctaggaaaatgatcttttttcacccaatctgagggaaaagatacactttcttccttactttcctcttttcccattgtccttccttaaagactagcagcagcagaatttggaaaataaataatgggcatgttttgctaataatcatgacaaactataataatctgttttgaattttacttgcctgtttctaaattttggagtctagagaactgctatcaaagggtaaaatatagtgattcacctgcag

SEQ ID NO: 2716 - DNA, 661 bp, Homo sapiens
  LOC153222
  misc_feature [331]..[331]: Chromosome 5, SNP identification no. = rs3095842
  misc_feature [331]..[331]: allele = t, in linkage disequilibrium with rs251253, respectively
  misc_feature [331]..[331]: n is a, t, c or g
cctgtaaccaaaactgcaggtgaatcactatattttaccctttgatagcagttctctagactccaaaatttagaaacaggcaagtaaaattcaaaacagattattatagtttgtcatgattattagcaaaacatgcccattatttattttccaaattctgctgctgctagtctttaaggaaggacaatgggaaaagaggaaagtaaggaagaaagtgtatcttttccctcagattgggtgaaaaaagatcattttcctagccaaagcagtacttataatgaccttgtaagaatctgtgatccttttgccataccaccttgcaaactctgtntacctgatcaatgtaatagtcttttatcctcacattcggagagtttttaaaatatgggaggtggccaggcacggtggctcatgcctgtaatcccaacactttgggaggatgaggcaggcagatcacgtgaggtcaggagttcgagaccagcctggccaacatggcgaaaccccctctactaaaaatacaaaaattagccaggcgtggtggtgcacacttgccgtcccagctacttgggcagctgagacaggagaatcacttgaaccccagaggtggaggttgcagtgagctgagatcatgccactgcattccagcctgggcaacagagtg

SEQ ID NO: 2717 - DNA, 661 bp, Homo sapiens
  LOC153222
  misc_feature [331]..[331]: Chromosome 5, SNP identification no. = rs2560325
  misc_feature [331]..[331]: allele = a, in linkage disequilibrium with rs251253, respectively
  misc_feature [331]..[331]: n is a, t, c or g
gaaagtccaagaacatgacactggcatctgttgagggtcatcccatagtaaaaggtgagaggatgagagcacgtgagacagaggaagttgagctgaattcattttttctatcaagagcccactcctgtgtccagtgataatgtcattgatacctacctcttaaagggtccaccttccaatactgttaggatggcatttaaatttcaaacatgttttggaggggacattcaaaccgtagcatcttccttgcctgtcttcctttctttcctttcttcctctttcaactttactgaggattaagtcttaggagaaatgatttatttaaattagnggtcatggccaggcatcagtgtctcgcacctgtaatcccaacactttaggaggacaagatgggtggatcacctgaggtcaggagtttgagaccagcctggccaacatggtgaaaaccggtctttactaaaaatacaaaaaaattagccaggcgtggtggtgctgcatgcctgtaatcccagctactcaggaggctgaggcacagcaatcgcttgaatccaggaggtggaggttgcagtgagctgagattgcaccactgcattccagcctgggggacacagtcagtctcaaaaaaaaaaaaaaaaaaagagagtgtttagaacagtttctg

SEQ ID NO: 2718 - DNA, 661 bp, Homo sapiens
  LOC153222
  misc_feature [331]..[331]: Chromosome 5, SNP identification no. = rs1002620
  misc_feature [331]..[331]: allele = a, in linkage disequilibrium with rs251253, respectively
  misc_feature [331]..[331]: n is a, t, c or g
aagtcacagtcacatacagtgtggcctagaaaacagaggggcaagacaggcttcacccactttcatgagtttcatcaaatactggatctactcaagggtggaaagaaaaggcaactttcaaaaaggagtatgttattaaatgaggcatttactatactccttcctgagagcaccagatggggaacatgttttctaaactagatctaggaagtggatccttcctcctccccttaagggctatctactggttaatgaattaaaaaaacaagactgaaaaacaaactgcacactcccctcaaaaaaagaggaggaaaaacaacaacaacaacancacaccaagatgtcccagattactctccagggtggaaccagggaacagcttcaacaattccaattagtttgttacagagtcatccataagcatgccttgcttttaaacaaataataataaagttttaaaacaacaaaacaaaaactggtactaatcacttttctgacgatacacaattactcaaaattaactagtactgggagggggaaggggggaccatacctgtgggccttgtcccacacaagtgcatgtgggtaggtacgcggcatttgtcattattgcaaaaatgattttttttcttttttatttttatttatgtatttttgagac

SEQ ID NO: 2719 - DNA, 661 bp, Homo sapiens
  LOC153222
  misc_feature [331]..[331]: Chromosome 5, SNP identification no. = rs370164
  misc_feature [331]..[331]: allele = a, in linkage disequilibrium with rs251253, respectively
  misc_feature [331]..[331]: n is a, t, c or g
tcctgaccttgtgatccacctgcctcagcctcccaaagtgctgggattacaggcatgaccactgcgcccggcctgtctgtgtatgttttaacagctttactgaagtataatttcacataccataaaaccaacctatattaagtagacaattcaataatttttagtagatttatgcatttgagcactcagttttccagtttttatatatttttgtgttatttcaattttatgtaattaaaactgtttttaaaatgtttttcttctgaattttaagtgtctatttacctcaagaataaatgattaagtatatgcagatcctgtttggaattgntatttttgtgccacattctttatgtcattcacatgccttgctcaatgttttccagctgaaaagcccattatctttatcaaaaactagatttgaagatatttagataatcttttaccatttttgatgcattcattttttttttttttttttgagacggggtcttgctcttgttgcccaggctggagtgcagtggtgcaatctccgctcactgcaacctccgtctcccaggttcaagcaattctcctgcctcagcctcctgagtagctgggattacaggcacccaccaccacacccagctaattttagattgcgccattgcactccagcctg

SEQ ID NO: 2720 - DNA, 661 bp, Homo sapiens
  LOC153222
  misc_feature [331]..[331]: Chromosome 5, SNP identification no. = rs807428
  misc_feature [331]..[331]: allele = a, in linkage disequilibrium with rs251253, respectively
  misc_feature [331]..[331]: n is a, t, c or g
tgtttagtgaaaattacaaaataaattctcattctgtgagcccattcttagccttacaatcatgtaatttcatgaccccaaacagttgtagcctgtccacagaaaaggctctattaaaatttgggagccaatccagaaaagagactaaaactccattttgcacctttcctgaaactttgtaggctcgtgaactgttgtagccaagtgccaagaaacagcatcaagggagctagtcatcacaaaaggacctttgtaaactgtcagctataaattaaaccaatcaatccaccctaaactagcactgaagaaactatagctatccttactcttntgctacaaagaatttcttcctgtttctcaccagtaactcacttttgcatctttaaagtcacttgtttagctcttctaggaaaaggagaaaattttactagcaaatgtgaataaagtccaaataataccacaaaattaacacaattttgtggtgaaagcatgctgctcattaacatttgtgagaactgtccaaataatattaaccaaaagggttttacttcaagtcaactgaaagtgaatgaattaaatgccatccacaaatttgggataattgtcaaataggtccaagaagagaacttgaccctgccaaatgcctgctaatgtataaagc

SEQ ID NO: 2721 - DNA, 661 bp, Homo sapiens
  LOC153222
  misc_feature [331]..[331]: Chromosome 5, SNP identification no. = rs793356
  misc_feature [331]..[331]: allele = t, in linkage disequilibrium with rs251253, respectively
  misc_feature [331]..[331]: n is a, t, c or g
cacatttactgcctaaaatttcaatcacacatctctggttagtacagactactgtcaataagctggtaaagtcaactgtgaagatgtttagtgaaaattacaaaataaattctcattctgtgagcccattcttagccttacaatcatgtaatttcatgaccccaaacagttgtagcctgtccacagaaaaggctctattaaaatttgggagccaatccagaaaagagactaaaactccattttgcacctttcctgaaactttgtaggctcgtgaactgttgtagccaagtgccaagaaacagcatcaagggagctagtcatcacaaaaggncctttgtaaactgtcagctataaattaaaccaatcaatccaccctaaactagcactgaagaaactatagctatccttactcttttgctacaaagaatttcttcctgtttctcaccagtaactcacttttgcatctttaaagtcacttgtttagctcttctaggaaaaggagaaaattttactagcaaatgtgaataaagtccaaataataccacaaaattaacacaattttgtggtgaaagcatgctgctcattaacatttgtgagaactgtccaaataatattaaccaaaagggttttacttcaagtcaactgaaagtgaatgaattaa

SEQ ID NO: 2722 - DNA, 661 bp, Homo sapiens
  LOC153222
  misc_feature [331]..[331]: Chromosome 5, SNP identification no. = rs251236
  misc_feature [331]..[331]: allele = g, in linkage disequilibrium with rs251253, respectively
  misc_feature [331]..[331]: n is a, t, c or g
cacaaaaattagccagggcgtggtggtgcacgcctgcaatcccagctactcgggaggcacagacatgagaatcacttgaactcaggaggcggatgttgcagtgagccgagattgtgccgcagcactccagcctgggcaacagaatgagacgctcactctgtctccaaaaaaaaaaaaaaaaaaaaaaaaattttgtagagacagaggtctcactatgttgccaggctggtctcaaactcctgggttcacaagcagtcctctggcctcagcctctgaaagtgctgggattacaggcatgagccaccatgcctagcccagctgtatacacttntatgatggtgttctactaggcagaattctatgtggcagcattagttttcttcctacctgtcacaccacttcttttggaaaagtataaaagatgacggttctcacactggctatcagataaaaaacttatatgcctattccagttaatattttattgaaagctatttgtattaacgtcactgtttaagaagggggtattttcctaataggaagtttcagaaaatacttaattctgagttgctagaactgttggtcagacccagtattgaatgacctataaatctaaaataccctcagagaatggccacctctgatgtactccagatcatta

SEQ ID NO: 2723 - DNA, 661 bp, Homo sapiens
  LOC153222
  misc_feature [331]..[331]: Chromosome 5, SNP identification no. = rs251237
  misc_feature [331]..[331]: allele = c, in linkage disequilibrium with rs251253, respectively
  misc_feature [331]..[331]: n is a, t, c or g
agcctcccaaagtgctaagattacaggtatgagccactgcgaccggcccagaataaagaacctttagaagagaaaccaatttttttaaatggcaaaatatttgaacagacacttcacaaaagaaaacatatgaacagccaataagcacaggaaagaggctcaatgttattaatcagagaaatgaaaagttaagaccacaatgagataccatcacacacccattagatttgtaaaaataagaatataggccttgccatatgttggcaaggctgtggaccaactagaaccctcctacactgtttttaagaatgcaaaatggcacagtcagttnggaaaacagtttagcagtttcttatagaagtaaatatacacttatcttatgaatcaatcattctacatctaggtatttaaccaagagaaattaaaacatatgtctacccaaatacttgtacacaaatactcatagccccgtggttatagccaaaaacttgaaacaacctaagtatccatcaaaaggtgaagagataaacaaattgtagtacatccatacaatggaatactagttagcaataaaaaggatctaactattgatacaggtaacaacatggaggaatttttaaataattatgctgagtgaaagtagccaggcaaaaatgtaaac

SEQ ID NO: 2724 - DNA, 661 bp, Homo sapiens
  LOC153222
  misc_feature [331]..[331]: Chromosome 5, SNP identification no. = rs166122
  misc_feature [331]..[331]: allele = g, in linkage disequilibrium with rs251253, respectively
  misc_feature [331]..[331]: n is a, t, c or g
acactgtagccaggtgtggtggtgtgcacctgcagtcccagctacttgggaggctgaggcaggggaatggctttagcccaggagttgcaggcagttgcactaggatggtgactgtgaatagccgctgtgctccagcctaggtaccacagtgagaccccatctccaactaaaaaaaatggcaaggaaaaaagacaacacactgtagacatgcatcgatgtccactaacctgtaagcaacttgccctacttgtcttcattgctttaagacctgatagtgcctgctatatcgaatcacaggaccttagtaaatgtttattaaataaatcaaacnaagtccctcaaaaacaaaagctttaaaaacagatttccccaccttgaaaagctttaaaacaaaacagaacaaaaagcaagttaaggccaggcgtggtggctcacacctgtaatcccagcactttgggaggccaaggcgggcggatcacggggtcaggagatagagaccaacctggctaacacggtgaaaccctgtctctactaaaaatacaaaaaattagttgggcgtggtggcaggtgcctgtagtcccagctactcaggaggctgaggcaggagaatagcatgaactcaggaggcggagcttgcagtgagccgagactgcgccactgc

SEQ ID NO: 2725 - DNA, 661 bp, Homo sapiens
  LOC153222
  misc_feature [331]..[331]: Chromosome 5, SNP identification no. = rs3131913
  misc_feature [331]..[331]: allele = g, in linkage disequilibrium with rs251253, respectively
  misc_feature [331]..[331]: n is a, t, c or g
attttacaagacctggatttttcataaaaataaaataagatggggagactgatgtagactaaagaaaacaaaagaagagatatgactaaatgcaatgcatgatcctcgactggatcacacacacaaaaaaatgctataatggacattattgagacaactgggaaaatggattccatattagatattatatcaatgttgaagcactaggatgtgacactggcgttgtggctaagagaatgtccttgttttcaagcaatacaggctaaaatagttagagacaaagaatcatgatttttacgagttattttcaaatattccctgtccaaaatanacatgtagatagaggtagaaataaagcaaatgtagcaaaatattaacaactggtgagggctgggtggggtggctcatgcctataatcccagtgctttgggaagctgaggcggaaggatcacttgagcttagcctgggcaacacagcaagaacccgtctctacaaacataaaaataagtttgctgctggccacgtgagctggctcatgcccgtaatcccagcactttgggtggccaaggtgggcggatcacttggggtcaggagtttgagaccagcctggccaacatggtgaaaccctgtctctactaaaaatgcaaaaacattagccagg

SEQ ID NO: 2726 - DNA, 661 bp, Homo sapiens
  BNIP1
  misc_feature [331]..[331]: Chromosome 5, SNP identification no. = rs29795
  misc_feature [331]..[331]: allele = g, in linkage disequilibrium with rs251253, respectively
  misc_feature [331]..[331]: n is a, t, c or g
agagaaactctggaatgacatatcagtaacaaaagtggttacctgtttggaagagtggaacaaaaaacaaaactggggcataactgagacttttcactgaatgttgatacttatagacagacacatacataaaacatgtaaaaggaacatcttttcaaaaataaaaaattaagatgattaaatcagtactggagatgaaggcaggaagagatcagctaggtatggtgacgctgctgaaaatcatatagttaactccaatagcaaaaattacacattttcaaaattgcccttgaaaatctctgaggtaggcaaacacaggacacagacatantgtttctcaggggtccaactggccagcttttctaccagctttagaacagactgtcttcctctgttaagcaacaacagagttgctggtgggctttgggggccatgttatatgaaaagcacaagtcttttttttttttttttttgagacagggtcttgctccgtcacccaggctggagtgcagtggcacaatcttggctcaatgcaacctccaactcccaggttcaagcaattctcatgcctcagccacccaaacagctgggattacaggcacgggtcaccatacccagctaatttttatacttttagtagagatggaggttgaccatgttg

SEQ ID NO: 2727 - DNA, 661 bp, Homo sapiens
  BNIP1
  misc_feature [331]..[331]: Chromosome 5, SNP identification no. = rs255292
  misc_feature [331]..[331]: allele = c, in linkage disequilibrium with rs251253, respectively
  misc_feature [331]..[331]: n is a, t, c or g
atgctaggtaacatataacacacatccttttaaatctatagctaagtccacaaggaagtaaggaaaacccctatggcccaaaagtgggaagggaacaagagctggaatagtcagcctgggagtgatgcacggctgtcctggcgtcagagctgctgctcctgtcacctagggcaggcccgaaaggaaaagaaaaacaatgacgaaatacaagcacactgatcccccacttagatatcattaaaatatcaaactgctgttcatttccagatactcacaatttctgtgcctatttaattaaagacgagtaataggcagtttgagcgcttgaagntttgagagctcgtgcagggacagaaaaatgaagccctgagccatctgaggctgaggttgagaagctgaactgagatcaccacaaatctaaaacccacgaaaggttacagacacaggaaaatggtataaaaaaatgtccatctaccagcacagagggaaaacatagatgcttgcctttttttgctatgagttccaaatagaggggttaaaaaaaaactcccctgagaatttataaccaaccagggagctgctccttccactgatctagggttcaatttatcttccctgagtggttcgtgaaactccatgaagagaaatgaacataaacagt

SEQ ID NO: 2728 - DNA, 661 bp, Homo sapiens
  misc_feature [331]..[331]: Chromosome 6, SNP identification no. = rs9392499
  misc_feature [331]..[331]: allele = t, in linkage disequilibrium with rs6938454, respectively
  misc_feature [331]..[331]: n is a, t, c or g
aattaattccacgtattaaagtgttccagaatcagaacattccattccctgagtgaacatttttagtatggatgatggccttaccagtgtcttaaaaatgtggattcttcatttattcttaaaagattcactgaactcatgccatgtgctgtgtactataagatgatggacaaccccccaaaggttaatgggactaatatggaattcactgtctggttagcagctgataacagtgtttcagatcttgataaaataaagtgtccagcatacacagataactcctgctctagataggggttcacagcagtcttagaacatgcaatccttaaantccatccaggtagaggctttggagttatctaggtaacaatatgggcagtggacagaagggacagaggcagcaggagcagttttgtgtagcctacctaggttttaatatacataggaatgacccggggcttgtgaaaatgcagattctgaaagtctgggcgggggcctgagaatgtgcatttatttccaagatgctgctaggtgatgcggctgttggcaaacctcactttgagtagtgaggggagggaaggagtcctaccaggccatttagggacctgcaagcagctcaggaggactcagaaaggggctcaggtcaccttgttccagatgc

SEQ ID NO: 2729 - DNA, 661 bp, Homo sapiens
  misc_feature [331]..[331]: Chromosome 6, SNP identification no. = rs9378801
  misc_feature [331]..[331]: allele = a, in linkage disequilibrium with rs6938454, respectively
  misc_feature [331]..[331]: n is a, t, c or g
atgtatgcattcgtttacttattggtgaatatgtaagtcatttttaattgttcattctcaaaaacaatgatttgcagggatttttgtgtatccggaatactcattccctatcagtttcatgcattacaaatatattcctccaatctgtggctccttttgtccttgatactggctttaactttgtttctgttgtcttttgttatataaaaatattacattttcattttgtcaaacttatcaatctttttctgttgtggcttatgcttcttttatcttatttaagaaatgataaagatgcactctgtaactcaggattttgtaaacagtaagnatcagtggagaagaattaatacaatactgtgggtgaacttgactgcagttttcttaacaattttcttaactattaagaacattctcaggcccccgcccagacttacagaatcagaatccacattttcacaagccccaggtcattcctaagtgcattaaaacctaggtataggccacacgaagctgcttctgctgcctctgtagcaccgtggaccagttttgcggtagacaattttcccattgatggaacggggctcggggggcgggaggtgatggtggtttcaggattaaactgttccatctcagatcatcaggcgttagattctcataa

SEQ ID NO: 2730 - DNA, 661 bp, Homo sapiens
  misc_feature [331]..[331]: Chromosome 6, SNP identification no. = rs913534
  misc_feature [331]..[331]: allele = g, in linkage disequilibrium with rs6938454, respectively
  misc_feature [331]..[331]: n is a, t, c or g
caccagggtttggagaagttcaactcttccgtgcaacgctttttcctcaccacccccttcctgctgccttcacttcttctctgacctagactccgcagcccaccaccttcacaaaatctggttaatatcccaaaccccactgtttttttttcttctaatctgctctgccccattcttccaaaaccctatccctagacccatctttttctcttcttcgtgctcctaaacttaggctaccaagctttgctggggaaagcactccaggtgggtgttactacaaatcaccgtctgctgacccactggtactacctgacagcctttgatatttccngagtcaatacctgctttccattctccacagcatctaatataagtcatggcttctcatctgtcctgcttccccgcttcgcgttcaccactgtgagcacaactccagctgcacacgcaatgacagctcctgttgggttctctcctcctcatgcctcctcccgtccctggttgccactcctttcctctgtccctccaccccttggggtggtaacagcttcccactgctgccagactctgggtgccatgacacccgtatatcccgcttctcccacacaaagtgggtgccctaagattcaattcaatcctgacactaacaaagttagcacggatc

SEQ ID NO: 2731 - DNA, 661 bp, Homo sapiens
  misc_feature [331]..[331]: Chromosome 6, SNP identification no. = rs4959843
  misc_feature [331]..[331]: allele = a, in linkage disequilibrium with rs6938454, respectively
  misc_feature [331]..[331]: n is a, t, c or g
aaactcagatgtagtcagaaggggcttgttatagataacaaaatacactcctatggctcaggaaatctcaagagttttaggagctctgtgccaggaaccgggggacaaagaccaaatacacacattttcttacaccgcaacccccagttgtttccccttctccacctgcaccttttcagacgaaccacctgtgtggaatttgtttcccagcaggacgctggcagacacagcgggccgtcctgcgtgcccacacgtggtgccatcagcgcagcatttatggccccacattgcagctttctgtgaacctgctcacgttcctcactaaatcacngactccttgaggcagaaacacgtcctggtcactcctgtatccccaccattctagccaggtgcctggctcacagtggtcggcaatggtttttaaaatggatcagtgagtgtttgcatctcttattctgggcataaattcattcagcaccttgtatgtcagagactgctgtaggtgctgaacacagagagaggtgccccagtcactgctaggctctggcactcctgtgcggcacacacaccatgctggggagacagaagggccacccacgtggagttgcctttctgccacatcctggacataccttggagcagcgcaagtctccttcataga

SEQ ID NO: 2732 - DNA, 661 bp, Homo sapiens
  misc_feature [331]..[331]: Chromosome 6, SNP identification no. = rs4959244
  misc_feature [331]..[331]: allele = c, in linkage disequilibrium with rs6938454, respectively
  misc_feature [331]..[331]: n is a, t, c or g
ctgtgccaggaaccgggggacaaagaccaaatacacacattttcttacaccgcaacccccagttgtttccccttctccacctgcaccttttcagacgaaccacctgtgtggaatttgtttcccagcaggacgctggcagacacagcgggccgtcctgcgtgcccacacgtggtgccatcagcgcagcatttatggccccacattgcagctttctgtgaacctgctcacgttcctcactaaatcacggactccttgaggcagaaacacgtcctggtcactcctgtatccccaccattctagccaggtgcctggctcacagtggtcggcaatngtttttaaaatggatcagtgagtgtttgcatctcttattctgggcataaattcattcagcaccttgtatgtcagagactgctgtaggtgctgaacacagagagaggtgccccagtcactgctaggctctggcactcctgtgcggcacacacaccatgctggggagacagaagggccacccacgtggagttgcctttctgccacatcctggacataccttggagcagcgcaagtctccttcatagacactgaggcatccataggactgactgactccacggtggctctgggctgaggattatccttacagctcctgcctctcacattccag

SEQ ID NO: 2733 - DNA, 661 bp, Homo sapiens
  misc_feature [331]..[331]: Chromosome 6, SNP identification no. = rs7761353
  misc_feature [331]..[331]: allele = a, in linkage disequilibrium with rs6938454, respectively
  misc_feature [331]..[331]: n is a, t, c or g
attcattcagcaccttgtatgtcagagactgctgtaggtgctgaacacagagagaggtgccccagtcactgctaggctctggcactcctgtgcggcacacacaccatgctggggagacagaagggccacccacgtggagttgcctttctgccacatcctggacataccttggagcagcgcaagtctccttcatagacactgaggcatccataggactgactgactccacggtggctctgggctgaggattatccttacagctcctgcctctcacattccagggacctcttggcctcttttctaggacctggggaacaatggtttatttganccttagcattttccagctactgggaagactccaccattggtgagaacagaagccccacagactcttctctctgtctgagaggtgagggagtggagattaggggttccaactccgcctggctcaaattctgcctccacactcccctgcacaagttacttaactcggtttctacttgccttagtttctgcatttataaaatgaggtgagaataatactaatacctcttagaattgattcaaggagcaaatgaacacttacagcctgtcatcaatactaataaatataaactgccattactttttctcctttataatatcctttatggggtaa

SEQ ID NO: 2734 - DNA, 661 bp, Homo sapiens
  misc_feature [331]..[331]: Chromosome 6, SNP identification no. = rs2770306
  misc_feature [331]..[331]: allele = t, in linkage disequilibrium with rs6938454, respectively
  misc_feature [331]..[331]: n is a, t, c or g
ggagattaggggttccaactccgcctggctcaaattctgcctccacactcccctgcacaagttacttaactcggtttctacttgccttagtttctgcatttataaaatgaggtgagaataatactaatacctcttagaattgattcaaggagcaaatgaacacttacagcctgtcatcaatactaataaatataaactgccattactttttctcctttataatatcctttatggggtaaaaataagaagatatgtctacatattcataaaggaatgttggagagacacactagaaattactgaataggaggtggcagaataacttttcaangtacagattttttaatcaaattttgttgcatccaacagattttaaaattttgcccctgtgggtatgtacaatcatctgaagctaaacacacacacatgcacacacaaccacacactctgatgccactcacctctgtccctcctcagtgcacatgggtcacagtagacatctccagaggcttattctgtgacctcaccattcatctgggctgagctagaagaagagcattcagattaaaggccagtgtttgagtcagggcagaacacatcccattggcaatgtcctatttatgtggacttgtatttccattgacgatgacaacgggaaaca

SEQ ID NO: 2735 - DNA, 661 bp, Homo sapiens
  misc_feature [331]..[331]: Chromosome 6, SNP identification no. = rs6596979
  misc_feature [331]..[331]: allele = a, in linkage disequilibrium with rs6938454, respectively
  misc_feature [331]..[331]: n is a, t, c or g
agttgactcggtttgtcagaagtctcaacacatgccctccgtccaagtaggccagcttccttgtggtcccctaagacaccatgctctttctcacctctgtacctttgctcccacaatcacccacacaatgacgcttccctctttctgtactctgtccgctcaagtcccaaccccaccttgtccatctactcctgtacccagtcctcttcttggccctcgactgctgtaccttcagcatccacatcaaaacacaatgaagcacctggccactatcctcagcattactcttgccaccccataaaaggaggacgctgcttccctgtacagaccnttttgtgtttcttttgtgtctcctgcagtagcacctagcacaatcttaaactcccagtagatattcaacagctactagttgattgatgtgaatagatttcaatttaggcagctgggctgagcaaaagtcacagtactaatcagtttccaacatgtcagctgtgctcttttaaatctatttggggtgtgtagtcctggtctgagattcctgacagtggctaagaggttctgggtctccacatttggaaaaaggcagctttcagggtcatttgagggcaaggctgggagtgtggcgagctgggtgcaggactgcatgggaagcagtagaaaa

SEQ ID NO: 2736 - DNA, 661 bp, Homo sapiens
  misc_feature [331]..[331]: Chromosome 6, SNP identification no. = rs7763703
  misc_feature [331]..[331]: allele = a, in linkage disequilibrium with rs6938454, respectively
  misc_feature [331]..[331]: n is a, t, c or g
ctgcaggcatcttctgaagaaatagtgctctgtggaaaggcagcttggattcctggctctgaactcgggggtgagcagggagatagaaggctgggctgctgcagctcagactgtctccaagggaaaagagtaaaggtcagggccaaagaccaccctactccttgccgctcatggccaccacctctcacggttcccaccctccctcctgctaacgctgcaccaatctgggtgaatgaaataatctgaaaaatcagagagcttgcctctggctagtgagagcttgactttccacttctccatgggccgatgctcatttatcaaatactcaccnagcccctgtgtgtgcaggcactctgcagggcactgggactgcagggagcaaaccatgcaaacagactccatcatgtctgtgatggccgatgtgcccggcatcatgctggacaccggagactcctcaatggagatagcacaggcttcccaagaagggactatggtcaggaagaaagagttgcatgcaggcatttacaatatcagggtggcactcacactgaagagtatttagaacttgatgctcatatgtcatatgtttggacaaaaataaaataaaactctttaacaggggaatatttttgtaaatgtttaaatttttttttttgaaaca

SEQ ID NO: 2737 - DNA, 661 bp, Homo sapiens
  misc_feature [331]..[331]: Chromosome 6, SNP identification no. = rs7750549
  misc_feature [331]..[331]: allele = c, in linkage disequilibrium with rs6938454, respectively
  misc_feature [331]..[331]: n is a, t, c or g
cagcttggattcctggctctgaactcgggggtgagcagggagatagaaggctgggctgctgcagctcagactgtctccaagggaaaagagtaaaggtcagggccaaagaccaccctactccttgccgctcatggccaccacctctcacggttcccaccctccctcctgctaacgctgcaccaatctgggtgaatgaaataatctgaaaaatcagagagcttgcctctggctagtgagagcttgactttccacttctccatgggccgatgctcatttatcaaatactcaccgagcccctgtgtgtgcaggcactctgcagggcactgggacngcagggagcaaaccatgcaaacagactccatcatgtctgtgatggccgatgtgcccggcatcatgctggacaccggagactcctcaatggagatagcacaggcttcccaagaagggactatggtcaggaagaaagagttgcatgcaggcatttacaatatcagggtggcactcacactgaagagtatttagaacttgatgctcatatgtcatatgtttggacaaaaataaaataaaactctttaacaggggaatatttttgtaaatgtttaaatttttttttttgaaacagagtcttgctctgttgcccaggctgttgtagaatggtgtg

SEQ ID NO: 2738 - DNA, 661 bp, Homo sapiens
  misc_feature [331]..[331]: Chromosome 6, SNP identification no. = rs1205040
  misc_feature [331]..[331]: allele = a, in linkage disequilibrium with rs6938454, respectively
  misc_feature [331]..[331]: n is a, t, c or g
gggaaatttggtttttaaatattttatgcttttaattgacaaataataattgaacatattcacggggtcgggggtacacagtgatgtttcaatacatatagtgcatagcagggatccccaacccccaggccacggactgctactggtccatggcccgttaggaaccaggctgtaaggggtgagcagcctgtgggtgagcaagtgaggcttcatctgtattgacagccacgccccatcttttgcattactgcctgagctctgcctcctgccagatcagcagtagcatcagattctcgaaggagcatgaaccctgttgtgaactgtgcatgcnagttacttatgataatctaatgcctgatgatccgtcactgtctcccatcaatctagttgcaggaaaacaagctcagggctcccactgtttctacattatggtgagttgtataattatttcattatatgtcatcacaatgtaataatagtagaaataaagtgcacaataaatggaatgtacttgaatcatcctgaagccatccaccaccaccccatccatggaaaaaatgtcttccatgaaaccagtccctgctgccaaaaagattggggaactgtggtgtatagtcatcagatcagggtaatcagcatatctgtcagctcaaacatgtat

SEQ ID NO: 2739 - DNA, 661 bp, Homo sapiens
  misc_feature [331]..[331]: Chromosome 6, SNP identification no. = rs978700
  misc_feature [331]..[331]: allele = a, in linkage disequilibrium with rs6938454, respectively
  misc_feature [331]..[331]: n is a, t, c or g
cacctcttctcacaaatttggcagctggcctgtgggtcatcaaacggaagccaactgaacggcactgtcagggaggtccagcctgagacccctggagcaccgctgccactgaacaagttgggtttatcacgagttgcagtgtgggaggacgcccaccatgggagacatggggtgtctccataggagggtgttaggaaggttccatgataggatttgagatttggttggatgatttggggaggctgtcaagaagtggaggtcggctctagattagatactgtcagaaagatgggcaagtctgtgattgggtgtctcaacaactctctataangaagggagatgagaacaagacagagctgtcatcagcaaagtggtagtcattcattttagccaaaagaagggctttagggggatatttttgtgggtggcatggtgaccttgattttggtctatgcttatgccgtcaccttgcctcattgtgtcatggttgcagactggcatctgagattgatattctgtgctgcggtgtatgcccagctgtgagtatcaggccagtctctggatgtcaggggttgcaatttgttcattttccctgcaccacattaaagaaaaaccaattcattcagccaatttcattcacccattatttttcatgcacagc

SEQ ID NO: 2740 - DNA, 661 bp, Homo sapiens
  misc_feature [331]..[331]: Chromosome 6, SNP identification no. = rs748270
  misc_feature [331]..[331]: allele = c, in linkage disequilibrium with rs6938454, respectively
  misc_feature [331]..[331]: n is a, t, c or g
caatttgttcattttccctgcaccacattaaagaaaaaccaattcattcagccaatttcattcacccattatttttcatgcacagctctaagctgcagtgagggggtctcagtttatctcatgcatcccctgtatcaggtgagggcatacaataggagctttataatgaaagagcaggatggatacccatgcattggttcagccagcatacctttaccaaggcctcctaagagccaggctaccctgggcgtgagcagttcctggatgaacactactccatccctaagatgccaagctgtttgctacaagtatttggggtgtcggggtgaangggttgtatttgtgtgtgtctctgtgtctgaatcttctcttataaggatatcagtctgactggataaaggttcatcctaatgactttttttttgacatgaagtctcgctctgtcacctgggctggagttcagtggcatgatctcagctaactgcaacctccatctcccaggtccaagcaattcttgtgctcccaagtagttgggactacaggcatgcaccactactcctggctaatatttgtatttttagtagagacggggttttgctatgttggtcaggctggtcttgaactcctgacctcaagtgatccacccaccttggcctcccaa

SEQ ID NO: 2741 - DNA, 661 bp, Homo sapiens
  misc_feature [331]..[331]: Chromosome 6, SNP identification no. = rs4959245
  misc_feature [331]..[331]: allele = g, in linkage disequilibrium with rs6938454, respectively
  misc_feature [331]..[331]: n is a, t, c or g
gtcccagggataaggtagagatgggtagggtgctctgcaggctgcaaggacggaggagcaggcattgccaaatgagaacacaggtctcagagtttttggaggggcagtgatgggccaagtcatcacagatgagtgatgactctcgtgggcacaggggttgggggagggctgtggagaggtgtcctaaccacgagaaggggaaataggtgtgtggagggaagtacaggcggggcagctggtgcctcttgttccctgtaaaatttggggaagttaacggaactctgggctctccacacccaggtactgcttaccctgtaggaactgcctgtcntcctgagctttctaagaacgtgccctcccggctgggcatggtggctcatgcctgtaatcccagcattttgggaggccaaggtgggcagatcatgaggtcaggagttcaagaccagcctggccaacatggtgaaactccatctgtactaaaaatacaaaaactagctgggcatggtggtgcatgcctgcaattccagctactcgggagactgaggcaggagaactgcttgaattgagacccgggaagcggaggttgcagtgagccgagatggcaccactgtactccagcctgggctacagagtgaatctttgtctcaaaaaaaaaaaaaaa

SEQ ID NO: 2742 - DNA, 661 bp, Homo sapiens
  misc_feature [331]..[331]: Chromosome 6, SNP identification no. = rs1831194
  misc_feature [331]..[331]: allele = c, in linkage disequilibrium with rs6938454, respectively
  misc_feature [331]..[331]: n is a, t, c or g
taaatttttaacatgtttgttgtttgttctatgattcctttctggccctgagtgagcaaacctgttcgtttgaatgtcttttatgtgaacccgcattctcctctcagctctgtaaattatttgctgagtgactgagacaagtcaaagcatacctgggcctcagtttcctcatccataaaataggagggttgactggctgactttcaaggttcctttttatagtaaacacgaaatgacttctctagcttactggaggccctttgaatgttctgggctgtaacaagcttctgagtcagcacatcttgaagagtaccgcagagctgattgtgcntggattgcttctgagtgtcccttgtctctttcaggtgtgttccttgcctcccccacaatcatggaggaaggaaaagaaagagggctgagccagctgctgcgaaagcccctcacatattccttagggcagcccttgggagcaggtggcatggtcccattttccagatgaggaaattgagcttaggaagtcgcctgctcagttagccagttggcatgggatggagctgagatctgagcctgtgaaaggggctgggggtggagaggtaaacataaaaacagccaagaccagaacacccccagagggtccatccagagtgggcacactcctggg

SEQ ID NO: 2743 - DNA, 661 bp, Homo sapiens
  misc_feature [331]..[331]: Chromosome 6, SNP identification no. = rs9392500
  misc_feature [331]..[331]: allele = a, in linkage disequilibrium with rs6938454, respectively
  misc_feature [331]..[331]: n is a, t, c or g
gtcatttcgtgtttactataaaaaggaaccttgaaagtcagccagtcaaccctcctattttatggatgaggaaactgaggcccaggtatgctttgacttgtctcagtcactcagcaaataatttacagagctgagaggagaatgcgggttcacataaaagacattcaaacgaacaggtttgctcactcagggccagaaaggaatcatagaacaaacaacaaacatgttaaaaatttatagatattagctaatgtttgtacatggtctttaccatgtgacaggcatttattctaagtgctttatccctattaagtcagtcagttctctttanaatctatgaagtaggcagtactatgaagtgctcgcattatttcccttctaaagatgaggcaccaataagtaattgcccagggtcacggagttagtgagttgtggagcaagggtttagatagaggtggtctttcagaatctatgttcgtcaccattatggtttactgccttgtaaccagtgtagccagtggttctcaaagagtggtccccagaccagcagccctcacatcccctggtgctatggtttgaataacagtgtcccctgcagaatgcatgttgaaacttaatccctaatgcaacagtattaagatgtatggcctttgggagtgat

SEQ ID NO: 2744 - DNA, 661 bp, Homo sapiens
  misc_feature [331]..[331]: Chromosome 6, SNP identification no. = rs6938454
  misc_feature [331]..[331]: allele = a, c
  misc_feature [331]..[331]: n is a, t, c or g
acttcttgatttgcctttccaatactaacgagcacatcaatggagggaggcaatttctgacttctgccataaagcagccatggtatcaactttcattacttcaaggatgtccaaccttttggcttccctgggtcacactggaacaaggagaattatcttgggccacacacaaaatacactaacactaatgatagttgatgaactaaaaaaaaaaaaaagttgcgaaaacatctcgtagtgttttaagaaagtttacgagtttgtgttggactgcattcaaagctgttctgggctgcatgtggccggtgggccatgggtcagacaagcttgnattacttttctcaattcagagctgtgaaaacatgtaaaatacagagccttaaaattttttaagtcatgtaagcaaattctaaaatagaaaacagtagaacaggtttggttctgtgctgggtagcctgtttctaaacagatcatgtgttttgaaaaaaaaaaatactccatagagatttaaaaaaaacaagttgaaagacaccctgagggaactcggtgactcagactgcagacaaataaattacacctttggttcagactaattctgtgtgcgcttctaaaaaaaatatgcaaacagatgtaaagagttacttagggtttaatgggttta

SEQ ID NO: 2745 - DNA, 661 bp, Homo sapiens
  misc_feature [331]..[331]: Chromosome 6, SNP identification no. = rs4960473
  misc_feature [331]..[331]: allele = c, in linkage disequilibrium with rs2327112, respectively
  misc_feature [331]..[331]: n is a, t, c or g
aaacagtgttaggaatctgatattgacatccagtttctaaagcctttcctaaattgttaggcaaacaaatgtttagtattcaatttacacaatgatattcactaccacttattaaactgttgcttgtgtcgccccccccccttgtattatgtcacataattgtgtaactttgtggtgcaatcaatactattgataaacagtcagtgcatcttggctagtcaagatgttgtccgtcaagagtgtttagcttgatagaattcagccaagtgtagtgagaacattgcacactgtgtagcattggtcacataactcaataatacacaatcatagngatgcacaggtgacaatagtctaaccagtagctgctttttgtttgtttgtttaagatgatttccttcgatgctctgcatacagcttcaggaaaatatagaatgccagtctaaagtaaaaccctttccaatgcatttttaaaaattgtgttaagaagaaataacatgagttctaccctcttaacaagtttttaagtgtaccatacaacattgttaggtgcaagcacaatgttgtacctcggacctctagaacctttttttcttgcttatctgaaattgtatacccattgaacaatcattccccatcttctccccctacctcccggtaacca

SEQ ID NO: 2746 - DNA, 661 bp, Homo sapiens
  misc_feature [331]..[331]: Chromosome 6, SNP identification no. = rs9405431
  misc_feature [331]..[331]: allele = a, in linkage disequilibrium with rs2327112, respectively
  misc_feature [331]..[331]: n is a, t, c or g
catttctggaacaaatgaggcactcaggattcttcattacttcaggtacctaggtggatttcccttttggtcgcaaacacaacttgacatcttattttttcctacttaacgtctccggcatctatctcttcctttcagttcccactgcccccaaatcatcatctcacattaggatacacttcataaccaactgggctccattcctggtgtcgctaccttttaatgtcactagaaaattcttcctaaaaacctcattttaagagccatcggtcgctaatcctgtcagagccctccacttgattttcaaggctgtaatctaaccatgtcttgnccatccaatctgatctcccattccttgccagtgtgaactctgcagatcagcccacctcctcatagctcagaacatggcatgtcatgctcagctcaatgactctgctcctttccccacataaggaattgtctcccttctccaccacctatgtccgactcccctcctttaagtgtccacactgatttatccactgttgtacctctgattggaaccgagcctggaacatggtagagactcaatgactagcccttcggagtctgagtgaacccagaggccactttgcctgtgatgtttatctgaatattcaggtcacagtggcttctcttttct

SEQ ID NO: 2747 - DNA, 661 bp, Homo sapiens
  misc_feature [331]..[331]: Chromosome 6, SNP identification no. = rs9406229
  misc_feature [331]..[331]: allele = g, in linkage disequilibrium with rs2327112, respectively
  misc_feature [331]..[331]: n is a, t, c or g
ggaatacaggcgcgagtcactgcatctgtcctgtgactgactttttcaagtcagatctttatttatgatatgaaaaaatctatctcctatggttcacataaagattaaataaaattatatttacaaaaatatagaatgttatttgttatattgcaaacatttgaataagacaatggttactgtttttgttattgttagtatttcattgaactccagcatggaatcactgactttactacaaattagtgacaacaaactagtaacaatgtgagttgtaataattcttatgtgttttgagacatgtctcaatcatgtgagaataaaattaggncatagcaatttcaaaataatttgaaattctagctctattgcctttaatgaatgtgtttgctcttttcctgttttagttccattgtccatcaaatgaaaatcagaatacttacatcataggaatctgagtagttttgtttgatattgagaacattttgacaatacaaagcactgtaactgagtattaaatattttaatgaattttaccttgtctattagtccattctcgtgttgctataaagaacagctgagactggataatttataaagaaaagaggtttaattggctcacacttctgctggctgtataggcatggctgggaaggcctca

SEQ ID NO: 2748 - DNA, 661 bp, Homo sapiens
  misc_feature [331]..[331]: Chromosome 6, SNP identification no. = rs9379274
  misc_feature [331]..[331]: allele = t, in linkage disequilibrium with rs2327112, respectively
  misc_feature [331]..[331]: n is a, t, c or g
atggctgggaaggcctcagaaaactttcaatcatggcggaaggtaaaaaggaagcaagcacatttacatagccagagaaggaagaagagagtgaaggaggagggctgtagacttttaaacaaccacttcttgtgagaactagctatcatgagaacagcagtggggacatctgcccccatgatccagtcaccccctaccaggcctcttctccaacactggtggttacaattcaacatgagatttggatggggccacaaatccaaaccatatcaacttgtataaagagatagcagtagccaccagtgtagtctgtttaatacctgagacttanggccttctaactcaggttgtcctgagctttggaatcagactgacccacgtttgaatctaggctctgcaccataactggggcaacttacctactatgttctctgtcagtttcctcatctgtaaaatttgggtaataaactgtatcctgcaggtttgttctaaggcttaagtgagaacacggctgtacatattaatgctcaataaataacaatgatctacaatcctacatttgtaaacaagttaacatgttgagtcaacaatgacttattaatcacccggacatgttcatgggttaaatccaggttgaggcacagtgagaggatttgaaagt

SEQ ID NO: 2749 - DNA, 661 bp, Homo sapiens
  misc_feature [331]..[331]: Chromosome 6, SNP identification no. = rs6597377
  misc_feature [331]..[331]: allele = a, in linkage disequilibrium with rs2327112, respectively
  misc_feature [331]..[331]: n is a, t, c or g
aaaacaatcaaaatggttgactgtgagatgatggatatcttcatttgtttcaccttagtaacctttttagtatctctatatatcccataatatcatgttgtataccttaattatacacaataaattcattaaataaataaataaacctttccaggaaataagaaaaagaaaggaatgcatacattgatgttacaatttacttctatagttaagtcataaaaatttgaaacttaaaaaaaaaaaaaaacaaggaacaggaaatttaactaaaggcctaaaacaacagttgccaagatgttctaagaaaggaaatggttaattgtcaagtgantgttataaacaaatgtccaagaagttttaagtcatgtaaatcattttatacatgctatgtaaataacaaacatgtttatgaaagtttttcccaaactcactttactctcaattcagtctgtgtgctgagtgagcaagggctgtgctatgtcatttgtgcccccaaatgggtggttccctagggtaccatgtcagcaatgagtattttggggatatctaataaacagaatttgcactgttttattctgttagctaataaaaacattcaatttccaaagctcctagaagagcagcttttagactttgagatcaagctgaaggtctttaaggt

SEQ ID NO: 2750 - DNA, 661 bp, Homo sapiens
  misc_feature [331]..[331]: Chromosome 6, SNP identification no. = rs9505582
  misc_feature [331]..[331]: allele = c, in linkage disequilibrium with rs2327112, respectively
  misc_feature [331]..[331]: n is a, t, c or g
agtctttttttaatctatctacctgccgagtttattgccttgtaaacatgtttcttttgagttaaaatattctgaacctgtaaggccatgtcaatcaagccggatcaatagtagtgcacaaaaaaatgaatcaaaaaagagtgtaagttcaaaacatattatctatatgggagaaagtctcctcataaatgccaacaattattggcttgaattcaaaagtggaataaattttgtccttgagtacaagagtgatagcaaataaccaattttaatattttatagagagagttatagccatttcctgaactacctctgatattatttctggaantttttttaaattcttaagtgcttaatggctctggaggcaactatgatagaatggcaagtgcactaggctaggaggcagatgatcaggtctaagtctccacccttctagagagggaagtccccaaatccttatccagaaaatgggaagcataataatctcacagaggattattgtacagttgaggcagtgtagactgaatactgaaatgccaatcagtggaaaggcactatgaacatgatttaatttctgtttgttaaaaattattaaacctattaaacaatccttaaaggttgctttaaggattttctgtgacacagttttcccaggcaa

SEQ ID NO: 2751 - DNA, 661 bp, Homo sapiens
  misc_feature [331]..[331]: Chromosome 6, SNP identification no. = rs2327112
  misc_feature [331]..[331]: allele = a, g
  misc_feature [331]..[331]: n is a, t, c or g
aggtgcggtggctcacgcctgtaatcccagcactttgggaagccgaggtgggcggatcacgaggtcaggagatcaacaccatcccggctaacacggcgaaaccccatctctactaaaaaaatacaaaaaaaatcagccgggcgtggtggaggatgcccgtagtcccagctgctcgggaggctggggcaggagaatggcgtgaacccgggaggcggagcttgcagtgaggcgagatcgcgccaccgcactccagcccgggcgacagagcgagactccgtctcaaaaaaaaaaaaaaaaaagttttaaaaatgttcagagtccataggcctgnaaaattatgctatcccacaataaactggtaaatacattaatggcagactactggtttttttcctatttgagtagcatgtattcttaacacaaatagacttgtatcctgaagcagcaataaaatttaaacgagtcaggcactgataaagtaataggcaatgtctaaatatcattattgttattagagcaaaaaaaaaagatgtcagtatttctccagggtaaatgttttccattaaacatttaatggaaagaaatgttaatcatttcttattcccttgcacccacctttaattaattgatacgctacattttttcacgcatgtctttcata

SEQ ID NO: 2752 - DNA, 661 bp, Homo sapiens
  misc_feature [331]..[331]: Chromosome 6, SNP identification no. = rs578785
  misc_feature [331]..[331]: allele = a, in linkage disequilibrium with rs1233846, respectively
  misc_feature [331]..[331]: n is a, t, c or g
tcagtcagtgactgaaggaccagaacattcacggttcaattcattttttagtatgctgtactctctagcttttccctcagctcccaactctgatccaactaccatcaaatgacgtgtttgtgggttaaattattttctaaagaaacgtatcaactattatataatctcatgttcaaattttactcctaaattcaaaatacgtttcatatggttataattctaagaataaacctccacatactcatataagagtttacctgggtgagaattctcatctcctttgcagtcagttctgtagagtagccagttactggtgttttttgtttttttnaattgatgttggttcaggctaaatacatttgtcacaattattacttagaagataccagtataagaaaaatcttttagaaaaagtaaaaaaaaaaaaaagaatctgagcatgatttatctgctataccatgaatcatcacaaggtagcagtgttctatgatactgcaattctgaaaacaatttacaatagcctgtcttattaagaaaatcagtgttttgacaatttatggtttccttgattaggaaactaggaatttgaattccacttgaccgtttttttttgttgtttttttggtttttttttttgagccggagtctcacttttttgccc

SEQ ID NO: 2753 - DNA, 661 bp, Homo sapiens
  misc_feature [331]..[331]: Chromosome 6, SNP identification no. = rs1767771
  misc_feature [331]..[331]: allele = t, in linkage disequilibrium with rs1233846, respectively
  misc_feature [331]..[331]: n is a, t, c or g
tcatgaagaaaacaaagcagggcacatgatagagagaacggggtgggaagggagctgagcaagagatggcgcagtcagggaaagctctgtgaagacagcatttgagcccagacataagtatttaaccaaaagaatcagctctgcaaatatctcagggaaaggcaatccaggcaggaggtacatgagtagggggctctcagccgatgaccctgtgatggctaaaattatatgtccacttggctaggctatggcacccacttgtttggtcaaacactaatctatatgctgctgtgatggggttttatagatatgattaacatttacaatcagntgacttaagtatgttaccctccataatgcaggtgggccacatccaatcagtggaaggtcttaagagcaaaaactgaggttcctcagagaagaaggaaatgttttaagacttcagcatcaattcctgcctgagtttctagcctgctggcctgctctacaaatttcaagcttgctagccctcacaatcacatgaataaattccttaaaataaatctcatatgtgtgtatgtatgtgtatgtacgtatgtgtatattgctaactagctcaaatgatgagaaattgaagacaatgtttttccttatgctaagctgaaatcatccctatatgcaa

SEQ ID NO: 2754 - DNA, 661 bp, Homo sapiens
  misc_feature [331]..[331]: Chromosome 6, SNP identification no. = rs1233846
  misc_feature [331]..[331]: allele = a, g
  misc_feature [331]..[331]: n is a, t, c or g
ttgctgtctaacaccactggtttccccttgaattctttcctcagcagagccaagaactctcccaggctaagcctcaattttgaggctcatctgccctgcatcagctccagtttttgttgttgttgcttgaagcccttactttcttgcattacaaggtgctccagtctctccttgttcacctggaagtggtaatagaggagagccacttactaaaactgtataagacgttggcgcacaagcggccctgctgagatccctcccaggcaagtgtaacacgagctggtagagggccctcctctacttccacatttggccctggcaggctttaatnttctctcactctttactccccttctctttttttgcaccataaagtctcaggtatctcagctgacatgtggtgcccactggatgtcagtgcctgagagcagaatggtggagaacacattttttacgaaggatatttattggaagccatttcccaagccaggtctccaaatatttttataaaaacaatttataaagtttacagcaattgctattatctgggatgggatgatgggtatgggttttttctttctttttttaagttttgaggatttctgcaaaactttgataggccaattttcattttatattcatagtagcatctcaaggaata

SEQ ID NO: 2755 - DNA, 661 bp, Homo sapiens
  misc_feature [331]..[331]: Chromosome 6, SNP identification no. = rs6456719
  misc_feature [331]..[331]: allele = c, in linkage disequilibrium with rs1233846, respectively
  misc_feature [331]..[331]: n is a, t, c or g
gtggagaacacattttttacgaaggatatttattggaagccatttcccaagccaggtctccaaatatttttataaaaacaatttataaagtttacagcaattgctattatctgggatgggatgatgggtatgggttttttctttctttttttaagttttgaggatttctgcaaaactttgataggccaattttcattttatattcatagtagcatctcaaggaatacttgattatcctccgccttgaatttctgctactgtgatacagtcagttgggcagaaagaagactttttgctgggggaaagatggggaacattgagtggcagaganagagggcacatgagtacattcttcactaatactcttagttataggaatgtacacaacacttttgcctttattgaaaacatattcggccaggcacagtggctcacacctgtaatcccaacactgggaggccgatgtgggcggatcatgaggtcaggagatcgatatcatcctaacatggtgaaaccccatctctattaaaatacaaaaaattagccaggtgtggtggcaggcgcctgcagtcccagttacgtgggaggctgaggcaggagaatggcatgaacctgggaggcagagcttgcagtgagctgagatcatgccactgcacttcag

SEQ ID NO: 2756 - DNA, 661 bp, Homo sapiens
  misc_feature [331]..[331]: Chromosome 6, SNP identification no. = rs3843519
  misc_feature [331]..[331]: allele = g, in linkage disequilibrium with rs1233846, respectively
  misc_feature [331]..[331]: n is a, t, c or g
cctgtattttatctggtactctacttaatgtgaatattatcatttaatttcattcttgtccaaaatgtactaaatgacatttgaataaaccaaaaaactaaaagtgcatttatataaaaacaattcaggtactgaacacttatgaaaaaataatatttattttaactgtgtactctagtgggagaaaaaatattttattatcctttaaagtatacacatcaaagataaacagcacaagattttaaaaagcaaaaaaatcaccctttgacgttttcatttacaaacgacactatcagctgattgtcaacctatttactcatatttccattcnacttgggtgagataaagcaagagtgtcctttgaatgttacatcagtaatgtattttccattcatcagcccattagagttgggttttctgctcctctctcagacggctgagctacccacatagtgttatggtttgaatgataaatttgaatgacaagcatgaggcatgtcagggttgtgggcatgggggagaagaggaagaaggagaagccctctccaactgcagcgacctgtggctcttcagatgcagcagaagggcactactgggtaaaaatgccagccacctgcctttggaggcctccgcctgcggaaaataaacattctctcttcca

SEQ ID NO: 2757 - DNA, 661 bp, Homo sapiens
  GCM2
  misc_feature [331]..[331]: Chromosome 6, SNP identification no. = rs9379881
  misc_feature [331]..[331]: allele = c, in linkage disequilibrium with rs1233846, respectively
  misc_feature [331]..[331]: n is a, t, c or g
tgacgctgtgccttcttctcatcgctgctgtagatgaagcgcacatagccgtcaggccactctcggaattggtcaaagagggccagctcctggaagagtgcagaaggaagggtggtcagtctatccagtccaaactgcacacatcatgctctaaaatttctctgagcacattaggatacaaaccagttctttttaaatccagtaacgtcaaattccaaaatgccactctttctatgtaagacttcctgacaaccaggtaataattaatgtttatatagtgcttatctgttaaatgctatacatgtattagttcatctagacttcaaattanaggcaaacaattatttccaatttgccgatgaggacatggaggccagagaggttaatcgactcgcccaaggtcacatcacacagctagcaagatctggatccaggatttgcaccctggcagtcccattccagagcctgtacttcttaccactatgttatatcacttcttggtgtgtttaaatgttgaaaacatttttaagttaggtatcaaagtaccaggggaaaaagtgattggaatgttctatcactgaaatgcaatttaactggtaaatatctttaagtcagtgcattttcttcaaaagcacttggctctgtatgccaaacctgtcag

SEQ ID NO: 2758 - DNA, 661 bp, Homo sapiens
  GCM2
  misc_feature [331]..[331]: Chromosome 6, SNP identification no. = rs3756957
  misc_feature [331]..[331]: allele = t, in linkage disequilibrium with rs1233846, respectively
  misc_feature [331]..[331]: n is a, t, c or g
attgggtttcacttgctctcaagtgttggcatgttgtgtgtgtgtgtacatacacacacatagacactgaacctgatcgtagacctggaggagagtttgagatggttatctcactctaccacttgatgacaagtgagtaagtagcctgagactaaggcaaattcaaggactctctcaaggtcagacaggtagtttaacttgctcactcggttacccagagcagggcgatgctaagtttcttcacttctccatgtcccagtgtgcctggcccgtttgagatattacacacatgcttcctgcttaacaaccagtctcctaaaaaaaagttcanattgacatgggaagtctagcaaatgcttgagagatgaaccataattacattacttggatgtgacttttctaaaatgcaagatatgattgtttcctgtgaagatgtacatggacagaaacagaatgagatgcacttgctgtactgtggtccactttcatgaaaatggtaccatgtgactctaaagtaggcagactttaaaacaaaggagtgggccaggcacggtggctcacgcctgtaatcccagcactttgcgaggctaaggcgggtggatcagctgaggtcaggagttcgagaccagcctgaccaacatggagaaacccaatctctact

SEQ ID NO: 2759 - DNA, 661 bp, Homo sapiens
  LOC221711
  misc_feature [331]..[331]: Chromosome 6, SNP identification no. = rs12211124
  misc_feature [331]..[331]: allele = t, in linkage disequilibrium with rs1233846, respectively
  misc_feature [331]..[331]: n is a, t, c or g
acaagttgatttttacacaaaggatgtttggattggaggggtcttttttttgttttttgtggaaaactctagtccaatttaattttgccaccgtgttcacacaactggccacctatccgaatcagcctagccattggtacgcatacttgtcaggttaaaggaaataggcaaacaaagaaacaaaaaaacaaaaacaaaaacaaaactatttgctttgattaaaaaaaaaaattccccttcctccccaccacggtacttaaaaaacaaccaccaaacacactttgtgtgtgtgtgaaatcaggaatgtattaataatatcgggtacaagtcnggttaccataggaaagggttcggcttctgtctgcacacatcaatggaccaaaaactgctcctctggctgttttttttttgagacggagtctcactctgtcccccaggctggagtgcagtggcgagatctccgctcactgcaacctccgcctcccgggttcaagtgattctcctgcctcagcctccccaacagctaggattacaggcacgtgcaccgcgcccggctaattttttgtatttttagtagagacaaggtttcaccatgttgaccagactggtcttgaactcctgacctcaagtgatccaccagcctcggccacccaaagtgctg

SEQ ID NO: 2760 - DNA, 661 bp, Homo sapiens
  EDN1
  misc_feature [331]..[331]: Chromosome 6, SNP identification no. = rs1626492
  misc_feature [331]..[331]: allele = a, g
  misc_feature [331]..[331]: n is a, t, c or g
taaatagggaaatgtgtttggtgcagagccaatgtcattccaaaaagctctctcttttcctggtcagtcatgtgctgggacagagaagggatctggattaggcaacatcatagagttgctctgagctgctctttggtgataacccttccaaatcctaaactttttggaattcacaagctcaaaggaggaaacctactctctgatctaccacatgttctgcatttttctatcatggtctatggaaacttctcttagaaatccagtggcaagaagttctatgattaaagtgttctgagctcaggccaggcagtcatgaactacttctgagttntttactactgatttgtggggcagcctcagctatcggtttcttcacacctgcttatgagagtatccatatttatggtcgcaggccagtaatgctccccacgagatcagtttctgaactaacctggaattttttatgggtttttattatgccaactattaaatcaacattacagttcttccctctgtatttctcctgtaaaacattaggcctgcaaaaaaaaaaaatctttttaaaaataattgccataaagtatttgctctgggcctactgtatgcttcttttctttttctctcttttcaactaagtcaccgtcaatttattaagatggcc

SEQ ID NO: 2761 - DNA, 661 bp, Homo sapiens
  misc_feature [331]..[331]: Chromosome 6, SNP identification no. = rs12194574
  misc_feature [331]..[331]: allele = g, in linkage disequilibrium with rs12216318, respectively
  misc_feature [331]..[331]: n is a, t, c or g
gctctctgcaggggccccacggctgctgaaactgcctggtcagagtgagtcaggccttggcacccttggacatttgtgaattttgtcttctggccccctctctccttctgtcttgtctgttctgtgcagccttttcagtcttttccagattttttgatgctcctcctacccaaacctgctctcagtaaaggtacggatcttcacctgacatttgaggataaacttaggttgaccactatcttttgaaatggaaggatcattctcatgttttcctcaaatgatgcagagatgatcatgtcccctagaaaggctggagttagttaatacttcnggatttagaaagatttctcaaattccctgaaatcacaggattgctacttccttaaatatgattgactccagggggaatttttgcaaggtgtgaattcaaactgtaaaccatcaccagctgcctccagctgtctgtagaagggctttctacaaagaactctgattttttttccccagagaagctgggccaatccagaagtgcttctatcatgcctttatctacactgtcctggggaagtactgaggcaagttacctaaactcactgtgcctcagttttcctcattcataaaatggatataataataataatagcaccatcttataggaggg

SEQ ID NO: 2762 - DNA, 661 bp, Homo sapiens
  misc_feature [331]..[331]: Chromosome 6, SNP identification no. = rs7739575
  misc_feature [331]..[331]: allele = a, in linkage disequilibrium with rs12216318, respectively
  misc_feature [331]..[331]: n is a, t, c or g
gcaaggtgtgaattcaaactgtaaaccatcaccagctgcctccagctgtctgtagaagggctttctacaaagaactctgattttttttccccagagaagctgggccaatccagaagtgcttctatcatgcctttatctacactgtcctggggaagtactgaggcaagttacctaaactcactgtgcctcagttttcctcattcataaaatggatataataataataatagcaccatcttataggagggttaaatgtaatagtatacgtataaaatctttgaagagggctcgacacacagaaattactcttaggcctagttactgcttactnctgaggcttgaggagtacagaattgggacctaactttggaatagtgctacaggatgaggctttttgttttctattgttttaaaatcaaaaggataaaaattaagcagcaggtcctcttttctcactttgggcattttggggcccacatggtaggaacctacctctaggagcccctttggccttgaagaggttctcttactctagtagagtacatgtggacacagtcgcatttaatttactggcttgatttgccatgtacatttatatattaattttagtttgtatcatttcaactactgttctaaaaaagaacaaaattttctcttggca

SEQ ID NO: 2763 - DNA, 661 bp, Homo sapiens
  misc_feature [331]..[331]: Chromosome 6, SNP identification no. = rs9471684
  misc_feature [331]..[331]: allele = t, in linkage disequilibrium with rs12216318, respectively
  misc_feature [331]..[331]: n is a, t, c or g
actcaacatcaagggagggccttaatctacccataagggatctgtccccatgacccaaacatctcccattggaagattaaatttcattatgaggtttagaggggacaaacatctaaaccatagcagtgccctagtgcagataacacttcaatattgtgattccatgtttatgtgcctgcctatcttgctagatttagctttctgaagtctcctgtatcctctttgtatcccttaaagccagcacagaaggtgtaacaggtatgtgcaaacatcttacctagttattgacttaaccttcagttactgagagtagttggaagggctgagatgngggttattctagggatatacattctaataggagagagaggatcacatggtattcaagaaaagaggccaggtatgtcagtgccttctggagcccaggatggtgttgacaccagattgcatggatctccactctgatatgtccttgatgcagctcatttctctaatctctctctctctttctctctctgtctctctctcaaagcagaaactgccaaatgcaacacctcattctggatgtggaatccgggagtcttgactgctgtatattctcctacaaatgaaccttgtttggaagttctagcaggagctacttgtacacctgtgaacaagg

SEQ ID NO: 2764 - DNA, 661 bp, Homo sapiens
  misc_feature [331]..[331]: Chromosome 6, SNP identification no. = rs12216318
  misc_feature [331]..[331]: allele = c, t
  misc_feature [331]..[331]: n is a, t, c or g
cattgtgcatgcccgtattcttcttaggagtatttggcgttctctgttctgctcagaatagcatgcgaaacgactgcttgtggagctgctctccattgttagggagacaataaaaggatgtctgataagcatcttacgacagattttttctacagctgaagcatattggcggcataattttccaaatttgcattctacctgtggctccaaggggctaacctagactccttgccaagggaggacattgttccttcattttctagaggctgcaggcacttaccggattattattgatattgtctcagagctggctcattctcacactactaancggtaactatgaatctctggctgctcgaaagacttttgcactgtctcaatgtttcaggaaaacctctgtgagaagtacacgagcagatacaatgtagtctgtgttttcaaatatgtatttatatttaaatataacatatatttaagtaaacatgtaggaaatccagattgttttttaaaagatagattgaaaatgatgccttgctctatagaagagtcacaaaaagaggacagaaatttttcagactctgatgtaatcgctatgtttactctgctggaagttttcaacagaggctcaactcccattttcaagaacattctagaaggatat

SEQ ID NO: 2765 - DNA, 661 bp, Homo sapiens
  misc_feature [331]..[331]: Chromosome 6, SNP identification no. = rs12197800
  misc_feature [331]..[331]: allele = t, in linkage disequilibrium with rs12216318, respectively
  misc_feature [331]..[331]: n is a, t, c or g
caaggggctaacctagactccttgccaagggaggacattgttccttcattttctagaggctgcaggcacttaccggattattattgatattgtctcagagctggctcattctcacactactaaccggtaactatgaatctctggctgctcgaaagacttttgcactgtctcaatgtttcaggaaaacctctgtgagaagtacacgagcagatacaatgtagtctgtgttttcaaatatgtatttatatttaaatataacatatatttaagtaaacatgtaggaaatccagattgttttttaaaagatagattgaaaatgatgccttgctcnatagaagagtcacaaaaagaggacagaaatttttcagactctgatgtaatcgctatgtttactctgctggaagttttcaacagaggctcaactcccattttcaagaacattctagaaggatatatgtttatgtgagttggaaactacactagactttttttaacgcttgttctaagacccaatttttctccaactcctttaaataaaaaaatccctatatatttaaaatataattaaattaaagaaatttcaacatccatgcaagtctgtaggaatgcttgtttgctgaaacaaaactgttgtttatgactctttgaccaactctgttta

SEQ ID NO: 2766 - DNA, 661 bp, Homo sapiens
  misc_feature [331]..[331]: Chromosome 6, SNP identification no. = rs12199302
  misc_feature [331]..[331]: allele = t, in linkage disequilibrium with rs12216318, respectively
  misc_feature [331]..[331]: n is a, t, c or g
atccagattgttttttaaaagatagattgaaaatgatgccttgctctatagaagagtcacaaaaagaggacagaaatttttcagactctgatgtaatcgctatgtttactctgctggaagttttcaacagaggctcaactcccattttcaagaacattctagaaggatatatgtttatgtgagttggaaactacactagactttttttaacgcttgttctaagacccaatttttctccaactcctttaaataaaaaaatccctatatatttaaaatataattaaattaaagaaatttcaacatccatgcaagtctgtaggaatgcttgttngctgaaacaaaactgttgtttatgactctttgaccaactctgtttattatgtgtgtgcaatgtgtaaggcatgatacaaatattttggataccaagaaggtaaaggcacctcacttcaatctgaaatagctattgaggagacaagtcgtaggtcgatagataattactttttaaagtccaaatggttgattaaaactctatgcaggtgatttgtgggttctgattaaggagagaaaattccagactacaatattaaaagctttctttaaagaagtggaatttaaactgtcctctttgaagaattcttttacctatgtgtttctactgctt

SEQ ID NO: 2767 - DNA, 661 bp, Homo sapiens
  misc_feature [331]..[331]: Chromosome 6, SNP identification no. = rs9471691
  misc_feature [331]..[331]: allele = t, in linkage disequilibrium with rs12216318, respectively
  misc_feature [331]..[331]: n is a, t, c or g
aacagcttctctgggccactcatatatagagatttctctttcttgcaaatatttttaacaatataaaatatgttttagaaatcaaatgttggttatgaacttgcttcatgatagaatgatagtttcacttgacctgttaattattttaaacttttaaatagaattcataaaacgtgcttcccacttacttcatctgttccccaagtaattgggtttcagtcacttttttggtcttgattttcttggtgagccagaaggaagcaaaatcaatgtacaggaagcacccaacttcatccacctggggaaaatgaaaccgtttacatgtatttgnaggacatgtactcagcctgatgctaatgactcctttgtatataaagaagtgagccttagggcaaaccctcaacgagcttcccttcttactaggaaaagagggctccctgcaagggacctaattaaccagtaagagcgaacttgagtgagtcagactaacaatattaggagtaagggatacacaattgggaatcagagccatcagggaaatgcccaggagaaagtaggacctgaaccgatctttgagataaacctcattctggacaaccatgaaatcaacaaacactggacagaggccactatgtgtataggctggtgaaaaacaatcact

SEQ ID NO: 2768 - DNA, 661 bp, Homo sapiens
  misc_feature [331]..[331]: Chromosome 6, SNP identification no. = rs7744631
  misc_feature [331]..[331]: allele = a, in linkage disequilibrium with rs12216318, respectively
  misc_feature [331]..[331]: n is a, t, c or g
attacatctatcacatatttattatagtcagatatggcagtgttcagagcaatgactaagaacaaagaccttagagtcagaggcagattgggactgaatcccaggtctgcttctcaaaggcatatcaccttgaggaagttattttatttacctgggtcccagtttcctcatatacaaaatgggtacaatgatgataaaataataataatacccatctcatggaactacacgtgtatatttattatatttatatttatgtttttatgtagttactagaacagtgcttggtacagaagaagcaatcaattaggtattaactatgattactttntagtcacaaatgtccttaatatcgtaccataattaagtacttaacattttattgtatctacagagaacactacaaactctaggaattagatgaaaaggtttgagaaccaccaagccaaaaatgggaagcaattataatttttgttcaaaaactgacatgatgaaaatgatttttcaggagattagtttgctttcttctctttcattccttcttggtgtatacatttttcctaaacaatcttatccatctccatggtttcatttatagtatttcttatacgctggcgtgcaaattttttatctccaaacctgacccttttctctagctctt

SEQ ID NO: 2769 - DNA, 661 bp, Homo sapiens
  misc_feature [331]..[331]: Chromosome 6, SNP identification no. = rs9462757
  misc_feature [331]..[331]: allele = c, in linkage disequilibrium with rs12216318, respectively
  misc_feature [331]..[331]: n is a, t, c or g
gatcctatcagatgccaatttaagcaagccgttggccaaatgattttctctttgcaacagaaatataagaactttaaaacctattttttttaaaatacagactttaattagagcaccagaaatatcttccagaaagacaatacggaatatggatcattgtaatttaagttaaactacattttgtcttctaatattcagagaaaagaggaataatcaaaggtaagtttcaagtcaatctggaatttagtataattcattttccaaaagtatttttcctagtgcatataggaagcttgtgggaaaattatatccagtcatttcatttcatttntccttcattatttgcaatagtttttaacttattaagtctcaactatggcccatgtactttcaggtctcagtgtgctatgtaaaatgtagctataaaagataaacaagacactgtttctgcttccaaggagctcatcatccagagggaaaataagagtataaaatgagtacaacacaaaaaatgttatgtaagagtatatttgggccaggcacagtgactcacacctataatcccagcactttgagaggacaaggagaggggattgcttgagcccaggagttcaagaccagcctaagcgacatagtgagacctcatctctataaaaaatga

SEQ ID NO: 2770 - DNA, 661 bp, Homo sapiens
  misc_feature [331]..[331]: Chromosome 6, SNP identification no. = rs9471712
  misc_feature [331]..[331]: allele = c, in linkage disequilibrium with rs12216318, respectively
  misc_feature [331]..[331]: n is a, t, c or g
atttttcatgttttacaagggtaagaggcagaaatatggatccttttcttgatttgtaattaaagtagattcatggtcctactttcttatctaaataactgaggggtcaaatgttaataagcagagatgccgagtattccaaataaggcaaaatgctggtccagttgcactacaattattgatacctgactcttaccgagggaactagatgtcttttgatagctgggccagctgccatccagattcacacagagcaagaggtaactgaggacatctctggacagacgtctattatcacacctcttcaatgacccaagatctacaagcaaancttgtatcatatatcttttctttccttatgagttgaattacatgaccccccctaaaacaaaaaaaaagatatgttgaagtcttaagccctagtacctcagaatgtgaccttctatggaaattgggtcattgctgatgtaattagtgaaaatgaagtcatattggaataggctgggctcttgattcaacatgactgatgttcttctaagacagccatgtgaagacacagaaacatggggagaagcccaagcgaagatgaaggcagagactggatgatgctgtcacaagccaaggaatgccagaggctaacaggagctggaagaggcaaaga

SEQ ID NO: 2771 - DNA, 661 bp, Homo sapiens
  misc_feature [331]..[331]: Chromosome 6, SNP identification no. = rs12528246
  misc_feature [331]..[331]: allele = t, in linkage disequilibrium with rs12216318, respectively
  misc_feature [331]..[331]: n is a, t, c or g
cataatgccatattacctgctatttgcaatacctttctttattaattttattaattctagatgccacattcagatcatcagaaaggggagaaacttcagctcaagaatttttcatcaatcgtcttcagtaagctgaaataaatattattttcatggatcctgaaaacagatataaaatttgacccctggatgagtaatttggtcaacagcatcttttgttgttgattgttatttgatgatgtgggggcatttatacaggaattaaagtcatcgttcttgcccttgaagaacttacaattaggagagtttgtaaagtttcactaccaactanaaaatacaggaacaagatattcatccataaaaatgacagatgttcaagcaactcagtatttgtggggttaaggaggaagaatattagcagataaaattaagagccaggacaccccggtaaacaataggtatgatttttcacacaataaagtttcacttttagaaaagcaagatagaatctaaatcctttaattttatacaaatagtcccacatttgacatttaaagaaaaaaaacaagttgaatattgcagtggagaaaggtacagtataaaaattgttattggtagcttgagtttattttctataataagattcaacatcaactatatc

SEQ ID NO: 2772 - DNA, 661 bp, Homo sapiens
  LOC442165
  misc_feature [331]..[331]: Chromosome 6, SNP identification no. = rs9358290
  misc_feature [331]..[331]: allele = t, in linkage disequilibrium with rs9295456, respectively
  misc_feature [331]..[331]: n is a, t, c or g
agattatgactgaacttttattctcttcttatgtgtatgggtaagtttttgaaacagaagaattagttcaacctgaaaagtctgttttaatctctctatgtgcttttaattttcaaaaaaatatttcctctttcatctttgcttcatactctactacaaattatgctggttctattcctctagtgcatgaagctagtgagttgctatgtctcagctctccatgtgggttccggcatcaaagccttgggccaattttatttcatttgtatttgctgtcagaacaatgtctttattctaaaatgcccttctcaaatcacctctcaggtagttngatacaagcagcgtgcagcagaaaaatatctttaaaaaaatctatgttatttcttttatgttttactgtgaatactgaatgcatggcacacttagttaaacaacatcttgagttccatttttaagatgaaacgcaccttttattttaaatatctctgagacaactgatctgctctccttctatggaaggggtttttgtttggaggggggtggtctattcaaattactgctcagcaataaacatttttacaatctcgtttgttttagactgccagatgacacctagattgattcgattttgtagaaaattctcacaaaataaagactgaaa

SEQ ID NO: 2773 - DNA, 661 bp, Homo sapiens
  LOC442165
  misc_feature [331]..[331]: Chromosome 6, SNP identification no. = rs12194143
  misc_feature [331]..[331]: allele = g, in linkage disequilibrium with rs9295456, respectively
  misc_feature [331]..[331]: n is a, t, c or g
cacatgtatgagacatcagctccatctagaacaaaatttgctgccactcagaaataatgtttaacattaatctgttattctgatctgtactcactagatttttgatggacagatgaacttataaaatttttaatacagccattttctaaaaagctaaaacctgaagttacatttactcttggtaagaattaaccataattatctaatgtccatttccattgttcattctactctcattcatcttaaatgcctagtaagactctgtaggtatacacatagtatagataatatgctcaagattgtagccaaataattggtgttggcaaaattnagagtaagaaactacactacagcaccatcacaaataagcactaaatttatctactcacagatgcagacaacaatacattttaaatacttgtgttttccctaaagcaggaaaaagatggataaataaataaaaatcagcaatgctctgtccagggcctagaataaaaaatctatttttcatgagatgacattctgaattaaaataaacagtgaagatttaaaacacaaatgggaggccaaaatgagcgataagcaaacagaaaaagataagtaaaagaaaaggcatttgaaaaaccacagaaaatatcattcacttgaactgggaagagtg

SEQ ID NO: 2774 - DNA, 661 bp, Homo sapiens
  LOC442165
  misc_feature [331]..[331]: Chromosome 6, SNP identification no. = rs9358291
  misc_feature [331]..[331]: allele = t, in linkage disequilibrium with rs9295456, respectively
  misc_feature [331]..[331]: n is a, t, c or g
tatcattcacttgaactgggaagagtgccatcaccttaaatagtaacaaccccagaagcactccaggggacatccaggtggacactgtcttgtgtggatccccttcccaccttcaaatacaggaacccagtacagtctggtggtttcacagattcaagctacctttaatatttgaatattaaaaattaccctttgacaagggttatatactaatattcattctcccaaatcactagaagccaccgacaaatgaaaaacacctttttaaacaatgcaattatttaacattttataaacatttttatatttcaggatattttaacaacttatngtaaaacattcataactttaaaagtcttcattgtttctctggaattcaaatttaactgagaatcttgtatttttatttgctggctctgacaaacctactcctattctctgggaagcaataggtagttagctagctagttggggcatagctgagaccagaactcaaacctcaggactctcagctctgagcaccttccacagaggattaaacccaggaagaaagttacaactaacccaacctgagaagcaaatcatgaagcacaaaaatgggtggggttggaaaaatagaggagggaatataccttcctaactggccaggaaaaaaaaaggt

SEQ ID NO: 2775 - DNA, 661 bp, Homo sapiens
  LOC442165
  misc_feature [331]..[331]: Chromosome 6, SNP identification no. = rs9348404
  misc_feature [331]..[331]: allele = a, in linkage disequilibrium with rs9295456, respectively
  misc_feature [331]..[331]: n is a, t, c or g
actaatattcattctcccaaatcactagaagccaccgacaaatgaaaaacacctttttaaacaatgcaattatttaacattttataaacatttttatatttcaggatattttaacaacttattgtaaaacattcataactttaaaagtcttcattgtttctctggaattcaaatttaactgagaatcttgtatttttatttgctggctctgacaaacctactcctattctctgggaagcaataggtagttagctagctagttggggcatagctgagaccagaactcaaacctcaggactctcagctctgagcaccttccacagaggattanacccaggaagaaagttacaactaacccaacctgagaagcaaatcatgaagcacaaaaatgggtggggttggaaaaatagaggagggaatataccttcctaactggccaggaaaaaaaaaggttttcaaagcaactgcaattatttgaaaattattttcaaacaaatatcttttattttctgaaagtgtttctacaaaagtcagtgtcccaaacccacattagattctgtccaacaaaatcctattcagatctcacctggatctgaatttcccagagagattggatagaagtcaccagaatctgaaactaagatatatgccctaacatgca

SEQ ID NO: 2776 - DNA, 661 bp, Homo sapiens
  LOC442165
  misc_feature [331]..[331]: Chromosome 6, SNP identification no. = rs9295456
  misc_feature [331]..[331]: allele = c, t
  misc_feature [331]..[331]: n is a, t, c or g
tctaatcagaatagaaactcttgggtaggaggtagagaagatgcaatttttgttaagaattccaggcactctgcaggtaaaatgtgaattgttccatacaattcagtcaagtaaaaatataaaaataaatgtaaaaacaagaaaagtcatgaaactagttaagatacttaaattttaagatgcatggtggcaaatttcaagtttgtgagctctctttgtttaaaatgaagtttcatacgcaaaatacagaaatcattgattactgatagagagatgcatattttctcactcctgttataaaagtatataatataaaaatctgttaagcaangaaatgaccaatgtaagaagcaaaaagaaaaataccgcatttaacctaaagccaggtttttcaagcttgaacgtgagaatcaggagagcttgttaaagcatgtgttgttgagctccacccccaaggcctcagattcagcggtctggttagcacccaagaatctgggtgtgtaacaagttcctgggtgacactgatgctgctggtctggggctacacttgaagaaccactgtcattgagaagagataacagtttttgatatagcaggaggagcactggtatgggaatcagaaaccttctgtgccaaatgcaggtttaaaggtagaggctct

SEQ ID NO: 2777 - DNA, 661 bp, Homo sapiens
  LOC442165
  misc_feature [331]..[331]: Chromosome 6, SNP identification no. = rs7749252
  misc_feature [331]..[331]: allele = c, in linkage disequilibrium with rs9295456, respectively
  misc_feature [331]..[331]: n is a, t, c or g
tgagaaaaaacgaagactcagagctgtaaagtcatttgaccaaagtcacacagctaacagggtgggaaccaagacacgctcttggctcttcagacatgcttttttcattatatcgtgaagcaaagagcaatttaaccaagggcatggaggaaaaaattagtgcatgatattcaagaaatagatcaatatatcgtggccaggagatttaatttagtaactattagcccataagatcagctggagctagaggtgggatagggcagaggacaatgatattcttgaaatccattttgagggtttatattttatcttgagatcactgggtagttantgaacatttatctggatacaagccagacttaagaaaacacacttatccattcacttattcaacaataattgattcggcactgattaggtgctaggttttgtaccaggttctgggggatgaataagacatggttccatctttaaggagatacagtgtctagtgagagagaaggaaatgtatataaaaaattataatggcatgtgataaatgtaatactaaaagtagaatgcagtcatgtgcaaacctgcatttgactgccaaaatatttatttgtagtgctcttctccattcaagtagatttagcattaaatcagttaccggtgagtaact

SEQ ID NO: 2778 - DNA, 661 bp, Homo sapiens
  LOC442165
  misc_feature [331]..[331]: Chromosome 6, SNP identification no. = rs9358292
  misc_feature [331]..[331]: allele = g, in linkage disequilibrium with rs9295456, respectively
  misc_feature [331]..[331]: n is a, t, c or g
tacttatttgatactccaggatactaaaatgagcaaacaaagaaaaataggtccagcctatctgccaggtttggaagggaagaaagcatataggaagaacttgtgcatgcatatgaaagaggaaataaacagagactgttctggaaatgttaaagggttggaggtgttattaatggtagtatatgaagcagaacctacatccccatggtgcaggggccatggagggacagagtggtggagactgtttgaggtagaataaaaatgaaaattgtgtgtttgaggtagaataaaaatgaaaatcgtgcatttaaaaaattttgtggtagcaccntacacttcaatggcctcactttgtaagtcatagtctatgttttaaggtattgttttgcaactggatttcctcccctcttactaggtgataaagccccagcttctctcaatttaaagacaatttaaaaaacaaaaaaaggaaacatctttcacagctaccatcggactagcaatgtagaaagcttactctccagtagaccttgctcagtggtaactggaaaccagaaagggcaggtctcagaaccgaggcagcagtgagcagcttccttcccagaagcccgggaacagaaggcccttctttcagccaccgccagaaccacaaggcctgtcc

SEQ ID NO: 2779 - DNA, 661 bp, Homo sapiens
  LOC442165
  misc_feature [331]..[331]: Chromosome 6, SNP identification no. = rs9350204
  misc_feature [331]..[331]: allele = a, in linkage disequilibrium with rs9295456, respectively
  misc_feature [331]..[331]: n is a, t, c or g
gacccagccgctgcccttgaccaaccacgtgggtcccctgcaggaggctgggttgggcaagagggaatctactggcctggccccattctggattctgaacctgggcgggtccaggggctccagcatcaagcacatgaggctaggattacattctggtcccaatccccctttacccaacccaaggtcacagattgtaccctcaagccagccagccatgagcaactccatggaaatcaacacagtgcctgatacctagtgggcactccacaattatttacagaagcaaacggaacgatgcttccctcaactcacttctgggaaaacaattcanagcacacagtggcagttcttgtttttaaacaaagtggagctgagagaggtaattaaagccaaattcgtccctgtgacaagtgttttggacagtttttcttgcacagaaaacattaaaagccatcatagatgggagtctcaataggcaggccaggtaaaaataagagttgttttagctggaccaagctaaacacatccccacttcaccaccacccctcaccttctctcctcccagttgtcccaggctcctatcaactcctcagggttcaggagagcacaattcaaaaatcactgcctcaaaacaaactgagatcaaatggcaagtgttagt

SEQ ID NO: 2780 - DNA, 661 bp, Homo sapiens
  LOC442165
  misc_feature [331]..[331]: Chromosome 6, SNP identification no. = rs9358294
  misc_feature [331]..[331]: allele = a, in linkage disequilibrium with rs9295456, respectively
  misc_feature [331]..[331]: n is a, t, c or g
caccttttcattttaaatttattccagcctcttttcttccggccttagcaaacctcatcaggaaagcagacagatgctatctaacctaagagtagtcccatgccagtccctcttgagtagtctggatccgctctcttctggaaaatatcgaccctctctgctcactcagctcaagcagaacactaagaatgagtattccagctatgctggcatcatgtgttatattaacattatgttaattaactgaaaagccacacattgatttttcttgagaggttccaaggatcaaatatcaatgcatggagtcagcaaagcctaatttactaatggntttttagcttacatggagaaaagagcttcaagggaaaagcaattttccatttgccagaagacatgaaggacttaccttgtccaattgatttagagaatttccacatgccaagaaagccaagaaaatatgtttataaacaagacttatgtttttctttaattgttgtagaaaaggtctaatggaaagaatcgatcttaaaacatgaacccaagttcaattaatattgagtatctgggaattgtggatcaggataagcataattcattaaacttgggcattaaaatctattctgtcaaggctttgaacaatattatatatcaaaaagtatta

SEQ ID NO: 2781 - DNA, 661 bp, Homo sapiens
  LOC442165
  misc_feature [331]..[331]: Chromosome 6, SNP identification no. = rs9358295
  misc_feature [331]..[331]: allele = c, in linkage disequilibrium with rs9295456, respectively
  misc_feature [331]..[331]: n is a, t, c or g
ctcatagtcattaccatcatccttttggctggtttccaaaaaccgcagtagggtgggggcacaaagcgtaaaaattccagttacaaaacaatagtctctgtcaacaaacaggacacatccttggtaccacagcctcatatgccttctctggttcaaaaagatactgggagttttttgtgaacatatgatgacctttcagcttgcttcctatggctctaacactgttgtcttgccatactcgtgtcactccagtcccaactgaaggaaagtttcatcccctcctgtgtcagagactactatgattcaccagaaccatttcctctttccccanagcacacagttatactacatttcccagcctcctttgcgattgcatggccatgtgattgagttccagccaatagactgtgggaggaagtgatggtcaccacttcctggcctggcccataaggcctccatgattccctgccttctttttctcttcctggttgtcagtgcctggggcaactttggaggccacatattgaagatgccagaacgtctctcagcctgggttcctacgtgactgagcaaggtctcccttaccacctatcatcccaccaccctgctcaataccactactgccacccaccaatgggtcttcatatgaacaaaatataaa

SEQ ID NO: 2782 - DNA, 661 bp, Homo sapiens
  LOC442165
  misc_feature [331]..[331]: Chromosome 6, SNP identification no. = rs7755724
  misc_feature [331]..[331]: allele = c, in linkage disequilibrium with rs9295456, respectively
  misc_feature [331]..[331]: n is a, t, c or g
ccaccccaacacagcagctagcatcaccctgctaacattctgcattgcccagagttactaggtcttacaggggaactgctttcactcctagcaccctagggcatctccagggatgcctcttttcctcctcacaccagttcccgtctctcaaggaatatggtgaaggttcttcgagactgagttgcaaggcaatatgaagacacttttcatctgtactcacaatgattgctctcttcctttcaaccagcattcctggactcagaatgagcatcttttttctagctccccattacacatggcaccaactgttactctcgggaaccaattgtcngattcaatcaaaccactcattgtgcctcccctgagcttatcaggcaaacccagactggccaatctgccagttaaacctccagacatgcccaagcacatctgaggcctgtacagcagttacctagtttggccttggcttcaagtctttctagccaaaaagttcttctaggtaatgaaatttcacttgatcctacgggaatgtgagcaggattcctccccatgttataggtaagggaattggaccttggagagtataagtgactttcccagggtcacagaacccaagtcacaaattaagcgctgaaacccaaactttctgcctctagagtgt

SEQ ID NO: 2783 - DNA, 661 bp, Homo sapiens
  LOC442165
  misc_feature [331]..[331]: Chromosome 6, SNP identification no. = rs10946358
  misc_feature [331]..[331]: allele = g, in linkage disequilibrium with rs9295456, respectively
  misc_feature [331]..[331]: n is a, t, c or g
ctctcttcctttcaaccagcattcctggactcagaatgagcatcttttttctagctccccattacacatggcaccaactgttactctcgggaaccaattgtccgattcaatcaaaccactcattgtgcctcccctgagcttatcaggcaaacccagactggccaatctgccagttaaacctccagacatgcccaagcacatctgaggcctgtacagcagttacctagtttggccttggcttcaagtctttctagccaaaaagttcttctaggtaatgaaatttcacttgatcctacgggaatgtgagcaggattcctccccatgttatagntaagggaattggaccttggagagtataagtgactttcccagggtcacagaacccaagtcacaaattaagcgctgaaacccaaactttctgcctctagagtgtgtgttcttgccactaagctcctctgtgtcccctgggtctgttgagatatacagcactgactacagaaaggcctggcaaggtgaagatgctaaaacattagcccagctgtagagggttttcaggagattcggagctgtatttttctttaataggaaaaaaggagttgacatcttccaccagtaatgagcatgaagtgggctatttcttccctgacccatatcatcttca

SEQ ID NO: 2784 - DNA, 661 bp, Homo sapiens
  LOC442165
  misc_feature [331]..[331]: Chromosome 6, SNP identification no. = rs10806911
  misc_feature [331]..[331]: allele = g, in linkage disequilibrium with rs9295456, respectively
  misc_feature [331]..[331]: n is a, t, c or g
agcttatcaggcaaacccagactggccaatctgccagttaaacctccagacatgcccaagcacatctgaggcctgtacagcagttacctagtttggccttggcttcaagtctttctagccaaaaagttcttctaggtaatgaaatttcacttgatcctacgggaatgtgagcaggattcctccccatgttataggtaagggaattggaccttggagagtataagtgactttcccagggtcacagaacccaagtcacaaattaagcgctgaaacccaaactttctgcctctagagtgtgtgttcttgccactaagctcctctgtgtcccctnggtctgttgagatatacagcactgactacagaaaggcctggcaaggtgaagatgctaaaacattagcccagctgtagagggttttcaggagattcggagctgtatttttctttaataggaaaaaaggagttgacatcttccaccagtaatgagcatgaagtgggctatttcttccctgacccatatcatcttcaattgagaggaaatcaagtagacggccctataatgcttttctgcttaactaatcattggtagtatacaaccagtacaacaaagtatgccttcttttttgtgtaccatgatatccatggtacacaataccagtacgta

SEQ ID NO: 2785 - DNA, 661 bp, Homo sapiens
  LOC442165
  misc_feature [331]..[331]: Chromosome 6, SNP identification no. = rs7775315
  misc_feature [331]..[331]: allele = c, in linkage disequilibrium with rs9295456, respectively
  misc_feature [331]..[331]: n is a, t, c or g
caaaacagactgctatggtctgaatgtgttccccaaaattcatgtgttggaaaccgaatccccagtgttggtgctggaagacccggccttttgggaggtgtttgggtccaaaggactccaccctcatgaatggattaatgtcattctgaaagcagcttgcaggagagagttcactctcagtgctcttctgccatgtgaggacacagcattcgtgctcccccttttgccctttcacctccaccaccatgaagcaagagggttcttaccagacactcaacttgctggtgactttccagcctccagagctgtaaggaataaatgtccgttcttnataagttatccaatctcaggtattatgtcatagcagcacaaaatggactaagagagagactgagcagctttgatctattagtggcataattcacagcggaggagatgactctccgctggaacatttctcgacagatctttggttgagagaggtgagccccagccccactccacttctcccaggggccacctaaaagcaaagatgcaactggaaaagagttgtgtgtctgcatatgaaaataacaggatgttaaggattgttcattgacagcttgagaggctgggctgaggtgtatgagggaactggaaaggaggaaggaagagaaataga

SEQ ID NO: 2786 - DNA, 661 bp, Homo sapiens
  LOC442165
  misc_feature [331]..[331]: Chromosome 6, SNP identification no. = rs9366325
  misc_feature [331]..[331]: allele = g, in linkage disequilibrium with rs9295456, respectively
  misc_feature [331]..[331]: n is a, t, c or g
gaaagcagcttgcaggagagagttcactctcagtgctcttctgccatgtgaggacacagcattcgtgctcccccttttgccctttcacctccaccaccatgaagcaagagggttcttaccagacactcaacttgctggtgactttccagcctccagagctgtaaggaataaatgtccgttcttcataagttatccaatctcaggtattatgtcatagcagcacaaaatggactaagagagagactgagcagctttgatctattagtggcataattcacagcggaggagatgactctccgctggaacatttctcgacagatctttggttganagaggtgagccccagccccactccacttctcccaggggccacctaaaagcaaagatgcaactggaaaagagttgtgtgtctgcatatgaaaataacaggatgttaaggattgttcattgacagcttgagaggctgggctgaggtgtatgagggaactggaaaggaggaaggaagagaaatagaagaaagttctagaggagaagaaaggggttataagtagaagctgaagtaggagattacggctcagtaagaaatgtcccgaattaagaaaaggcatggaatctttaagacacagaaatctacaattcattaaagatttttcttgtagca

SEQ ID NO: 2787 - DNA, 661 bp, Homo sapiens
  LOC442165
  misc_feature [331]..[331]: Chromosome 6, SNP identification no. = rs9366326
  misc_feature [331]..[331]: allele = a, in linkage disequilibrium with rs9295456, respectively
  misc_feature [331]..[331]: n is a, t, c or g
aaggaataaatgtccgttcttcataagttatccaatctcaggtattatgtcatagcagcacaaaatggactaagagagagactgagcagctttgatctattagtggcataattcacagcggaggagatgactctccgctggaacatttctcgacagatctttggttgagagaggtgagccccagccccactccacttctcccaggggccacctaaaagcaaagatgcaactggaaaagagttgtgtgtctgcatatgaaaataacaggatgttaaggattgttcattgacagcttgagaggctgggctgaggtgtatgagggaactggaanggaggaaggaagagaaatagaagaaagttctagaggagaagaaaggggttataagtagaagctgaagtaggagattacggctcagtaagaaatgtcccgaattaagaaaaggcatggaatctttaagacacagaaatctacaattcattaaagatttttcttgtagcacactgcattgttatcagcctcaaacccctcctctcccctaaggctgccaataaagttctgttctccacaacagcctttgttaggacactggggagaaggaaccagcattgagccctgcatgaaaagggccatccaagaagagagcagtctcaggaggcaaga

SEQ ID NO: 2788 - DNA, 661 bp, Homo sapiens
  misc_feature [331]..[331]: Chromosome 6, SNP identification no. = rs1291386
  misc_feature [331]..[331]: allele = g, in linkage disequilibrium with rs943068, respectively
  misc_feature [331]..[331]: n is a, t, c or g
ctttgctgctcccttacaaaaagattcagggcagacctacgtggaatggacaggatccagttccctctgttggacacacccacgcctcttgcatgactcctcccactcctgccccgactcccactcccctggctaattcctagttttctttatcgctcagctctgactctgcttcttcatggcaaccttttttgatagctccagcctgctaagatggcttcgtgcgtgttaagacagcatcttgcacttagctttttccgtagcacccaccacaactaatatgaatgcttcatttgtaaaaactgtggaactctatttccatgcacaaatnatctctggaatatgcttaatatgacatctgacgacactccatcatcctggtcccttttctttctccaattttttccgctgttgggaataccatttcctcttcttgacacatttgtaatgtttagtcttgcgactttctgtaacttttcatggaaaaacaatcttcatatttttctctgaatcctatccttttaatttttctttccctatctggctcataggcatagaaggtagtgaagatggccaggcacggtggctcacggtgtaatcccagcacttttggaggccaaggtgggaggatcacttgaggtcaggagtttgagaccagcct

SEQ ID NO: 2789 - DNA, 661 bp, Homo sapiens
  misc_feature [331]..[331]: Chromosome 6, SNP identification no. = rs11964874
  misc_feature [331]..[331]: allele = a, in linkage disequilibrium with rs943068, respectively
  misc_feature [331]..[331]: n is a, t, c or g
gagacagtctcgctgtcggccaggctggagtgcagtggcacgatctcggctcactgcaacctccacctctcgggttcaagcgattctcctgcctcagcgtcctgagtagctgggactacaggcgtgtgccaccacgcctggcaatttttttttttgttttgtatttttagtagagatggggtttcactgtgttagccaggatggtctcaatctgctgacctcatgatccgcccgcctcggcctcccaaagaagtgctgggattacaggcatgagccactgtgctcagccaagacacttttatcagtctcactctatccaagaaagtaatcncatatgagaaaaataaatctccctgaatggccagatttccaatatactggaaaacgattgaagacttactagagcctgcacccatgaaaacaaaacaataatagaggaaagaaaattatcttaatagatattgtaggcacatccatagatgatgtaataaagttactcttcttgttttgttttgtttttgagacagagtttcactcttgtctcccaggctgaagtgcagtggtgcgatctccgctcactgaaacctctgcttcctgggttcaagcaattcccctacctgggattacaggcatacaccaccacgcccagctaattttgtat

SEQ ID NO: 2790 - DNA, 661 bp, Homo sapiens
  misc_feature [331]..[331]: Chromosome 6, SNP identification no. = rs1291389
  misc_feature [331]..[331]: allele = g, in linkage disequilibrium with rs943068, respectively
  misc_feature [331]..[331]: n is a, t, c or g
ctctttgatatgttcaggtgtgttaggttaatccagctttaaaattaggtaaaggaaagaagaaacttctttattgagcactctggatgccaaatgttatcaataggtgacctatccccccccccccccaatctatttattcatctatctatcttgtatttatctaccttctcatgtctgtgaggcaggtattattccccactattaaagatgaagacacagcagcgatggcccataaaaccttgtctaatgtcaccagagcaaactgggagcttggactcagacctgctggtttccagcctaggtaacttcttctgtgatgacagctttntttgcagtgatgaccacattgcatcatgatggtctttttggctgctaccctctccaacggattataggttcttagttgcaggggtagtcacataataattatgatatccacatccaccagcaacatggctggcacatagcaggccctcagcaaatacatgtttaattgaactgaaaacatgttgcctgcactggtttcacagcattataaatccagatatttcaacagtctacatcttgcaaaatacagtgaaatggagacaaggactggtgtgaactaacctaaatgctatgtggtggccaattctttaccagcatcctcattattaag

SEQ ID NO: 2791 - DNA, 661 bp, Homo sapiens
  misc_feature [331]..[331]: Chromosome 6, SNP identification no. = rs1291390
  misc_feature [331]..[331]: allele = g, in linkage disequilibrium with rs943068, respectively
  misc_feature [331]..[331]: n is a, t, c or g
tctatctatcttgtatttatctaccttctcatgtctgtgaggcaggtattattccccactattaaagatgaagacacagcagcgatggcccataaaaccttgtctaatgtcaccagagcaaactgggagcttggactcagacctgctggtttccagcctaggtaacttcttctgtgatgacagctttgtttgcagtgatgaccacattgcatcatgatggtctttttggctgctaccctctccaacggattataggttcttagttgcaggggtagtcacataataattatgatatccacatccaccagcaacatggctggcacatagcagnccctcagcaaatacatgtttaattgaactgaaaacatgttgcctgcactggtttcacagcattataaatccagatatttcaacagtctacatcttgcaaaatacagtgaaatggagacaaggactggtgtgaactaacctaaatgctatgtggtggccaattctttaccagcatcctcattattaagttaaacatcacctgacatcaactcaattcacatgagaacaaggggaactttcacccattactttttttattttggcaagtgtggtttccatgtcctttttttccacccaaatatttatttccccaacactaggaaaattgtat

SEQ ID NO: 2792 - DNA, 661 bp, Homo sapiens
  misc_feature [331]..[331]: Chromosome 6, SNP identification no. = rs1291393
  misc_feature [331]..[331]: allele = t, in linkage disequilibrium with rs943068, respectively
  misc_feature [331]..[331]: n is a, t, c or g
atctctagtgtttgaggaacagagagaagcgagtgagtctggattagaatgctcaggaagaaggctatggggatttgagtttacagaagaaagaggcaactaaattttgtagaacctcacagattatggcttggttttatttagagggaaacgggaagcttctagaaggttctgagttgagtagtgacatgacaatgctgtggtaacaatggtttcactctgactgccttactgaagatgcataaaggggatctctggtggaattgggagaccagttaggagactactgcaatcattcaagagaaagatgatggagactgggaataaaatngcagcaatggagaaggtaaagcccacaggacgtgctgaagatggggtgtggcataagagaaaaagagagaacttcaagatgacgtcatttttcttgtcctgggtaaagttgatatttactgaattgaaaacgaatagagaaagaggaggtttgggaagtataaggtgctcagttttctgtatgttaagtgtgagatgtctgttagaaatcaaaaggaggtcacattagcagttggatatgcaagtctaggattcaagggagaggctaatgggattcctgtctaatatatgttcttttctgcactactcctatgacaatttttattgcatt

SEQ ID NO: 2793 - DNA, 661 bp, Homo sapiens
  misc_feature [331]..[331]: Chromosome 6, SNP identification no. = rs943068
  misc_feature [331]..[331]: allele = a, g
  misc_feature [331]..[331]: n is a, t, c or g
agaaatggaaagtgttaatgaaacaacttaaaatatattaccatgtattttgcaggcatttaaaaatgtcttgtaaatttgaaaatgtacaatgcacttatttcccaaaagaatattctgtataaacttcaaccaatattttttattaaatacaaattaaatattaaatttatttattataaattaaaaactaatgtataatattagaaaagaaatatccaaacattgagagctatcagtttgtggactacttttgcacaggatgtgatacacactgacactacagttactaaagccaagactaggcaaaacatgtatactgggactaganagagcacaggacaagttgcccgagtggttcatttctatttctgaatttctagaatttctgaatttctattataaaggactcattaaatagatacagaacatatttttaataaacagtttattaaacattacaatcactttttaaaaagttttattttgttttatttccaagatggtaaaaaagaggattttagtgtatctcagacacttggaaatagcacgatagtgcataaagatcaactctgtgagattttttttttttttttcaagatggagtcttgctctgtcacctaggctggagtgcaatggcgcgatctcggcctactgcaac

SEQ ID NO: 2794 - DNA, 661 bp, Homo sapiens
  misc_feature [331]..[331]: Chromosome 6, SNP identification no. = rs1291401
  misc_feature [331]..[331]: allele = c, in linkage disequilibrium with rs943068, respectively
  misc_feature [331]..[331]: n is a, t, c or g
aattctcctgcctcagcctcccaagcagctgggattacaagcatgtgccaccacgtctggctaagttttgtattttcaggagagatgacatttcaccatgttggccaggctggtcttgaactcctgacctcaggtgatccccctgtctcagcctcccaaagtgctgggattacaagcatgagccactgtgcctggctcaagctttaattaaagaaggaaaatgagaatccaccagaatcatgaaggacaccccacactctggggaggaacataccatcatacagtccgtgtgatggtatgcagctgaaaaaagagagtgaagctccagtangtgagaggggaagacagtctctctctgtaactcaccctatcactgggaatctattccaggccgagggagagcactttgtttcttccaagccctggagctaatgtggggagaggcttggagatgctgtgagggaaagatactgggaaaagctgcagacattttcccagacccaggaccaagagcgggacatcatttttcatctgacagcataaaaagtcagtctttctttggtgacctggcagcatggctgtgcaggcattttagtctcaggtcagaaattgcagcatctgttctggagtagggtaagagtctccatagccggaactgtgg

SEQ ID NO: 2795 - DNA, 661 bp, Homo sapiens
  misc_feature [331]..[331]: Chromosome 6, SNP identification no. = rs1291402
  misc_feature [331]..[331]: allele = t, in linkage disequilibrium with rs943068, respectively
  misc_feature [331]..[331]: n is a, t, c or g
ctccatagccggaactgtggaaagtacctcagcagaacatgctagaattgtgttgtcccccactgcatgcctggggcaggaggagagctgctacagctgcagtttctctttagcgacaagactttcagccagggccaccttggcaacctggaaccagtaggcacatgccattgcttggtgcccccagctgttttcctgagatcatgatgcagtggggccctctccactccactcctagacaggaatccaggcatttggatcccctacttacctggatcagcagcttgagctgccccaactttcatggaactttcatggacatagattgtgntatagtaaggactctctgatccacactcaggcagatttctaggttttcagatcaccctttggcttgaatcagcagcctgagctgccctacccttcctgtgcatagatcaaaatgcagtgggggttttgctccacgtgtaggcagatcttcagacattcagagcacccacttgcatggactagcaacctgagttgtcctacccttcctgtgcggagattctggtacagaggggccctctcttctttacatccagacagatcaccaggcactcagagcactcgttcacctagtccaacagtcctatccccacctttcctgggcatagattgt

SEQ ID NO: 2796 - DNA, 661 bp, Homo sapiens
  misc_feature [331]..[331]: Chromosome 6, SNP identification no. = rs2022326
  misc_feature [331]..[331]: allele = c, in linkage disequilibrium with rs943068, respectively
  misc_feature [331]..[331]: n is a, t, c or g
cagcctgagctgccctacccttcctgtgcatagatcaaaatgcagtgggggttttgctccacgtgtaggcagatcttcagacattcagagcacccacttgcatggactagcaacctgagttgtcctacccttcctgtgcggagattctggtacagaggggccctctcttctttacatccagacagatcaccaggcactcagagcactcgttcacctagtccaacagtcctatccccacctttcctgggcatagattgtgaggcagtggggccctctctgctctatgcctaggcagatcttgaggcattcagagcactcacacacctgaatnagcaatctgactcaccctacccttcctgtgcagagatcttggtgcagggggggctctctctgctccacgtccagacagatttccagggatttggaacacctactcaccaggaacagtaacctgacctgccctacccttcctgtgcagagattcttgtgcaaggagatctcttcattccactctcaggcagatctccacatatttggagcacccactctcctagattaggagttcaggctgtccctcttcccacgtagagaacttggagccaaggaggtttcccagctccacacctaggcacacctctcggtgtttggtggccaaccactg

SEQ ID NO: 2797 - DNA, 661 bp, Homo sapiens
  misc_feature [331]..[331]: Chromosome 6, SNP identification no. = rs1291404
  misc_feature [331]..[331]: allele = g, in linkage disequilibrium with rs943068, respectively
  misc_feature [331]..[331]: n is a, t, c or g
cacagttccacatggctgaagaggcctcacaattatggtgaaagatgaaggaggaacaaagggatgtcttacatggcagcaggcaagagtgcttgtgcaaaggaactctcgtttataaaaccatcagatctcatgagacttattcactaccatgagaagagtgtgagggaaccacccccatgattcaattatctccacctgtccccaccttggtatgtggggattattaaaattcaagatgagatttgaatggggacacagccaaaccatatgaaatcaggaaaaaattaaaaccttgaacagaccaatatgagttccaaagtcaaatcantaataataagtctaccaaccaaaaaagacccagaccagatggatttacagacaaattctaccagatgtacaaagaagagctggtacccatcctactgaaaatattccaaaaaatcaaggagaaggactctctaactcattctatgaagctagtgtcacctggagaccaaaacatggcaaagacacaatgaataaaaaaatcctcaggccaatatctctaatgaacatagacaaaaaaaaatcctcaacaaaatactagtgaatttaattcaggagcacatcaaaaattaattcaccataattaagttgcctttattccagggaatgcaat

SEQ ID NO: 2798 - DNA, 661 bp, Homo sapiens
  misc_feature [331]..[331]: Chromosome 6, SNP identification no. = rs1291405
  misc_feature [331]..[331]: allele = t, in linkage disequilibrium with rs943068, respectively
  misc_feature [331]..[331]: n is a, t, c or g
gcaaaggaactctcgtttataaaaccatcagatctcatgagacttattcactaccatgagaagagtgtgagggaaccacccccatgattcaattatctccacctgtccccaccttggtatgtggggattattaaaattcaagatgagatttgaatggggacacagccaaaccatatgaaatcaggaaaaaattaaaaccttgaacagaccaatatgagttccaaagtcaaatcagtaataataagtctaccaaccaaaaaagacccagaccagatggatttacagacaaattctaccagatgtacaaagaagagctggtacccatcctacngaaaatattccaaaaaatcaaggagaaggactctctaactcattctatgaagctagtgtcacctggagaccaaaacatggcaaagacacaatgaataaaaaaatcctcaggccaatatctctaatgaacatagacaaaaaaaaatcctcaacaaaatactagtgaatttaattcaggagcacatcaaaaattaattcaccataattaagttgcctttattccagggaatgcaatcttggttcaacatatgcaaatcaataaatgtgattcaccggataaaattaaaaacaaaaattatatgattatcttaatagatgtagaaaaatcttt

SEQ ID NO: 2799 - DNA, 661 bp, Homo sapiens
  misc_feature [331]..[331]: Chromosome 6, SNP identification no. = rs1291409
  misc_feature [331]..[331]: allele = t, in linkage disequilibrium with rs943068, respectively
  misc_feature [331]..[331]: n is a, t, c or g
agactagaatcaatctaggtgcctatcagtggtggactggattaaaaaaatgtgatacatgtataccatggaatgctatgcatccataaaaagaatgaaatgatgtcctttgaagcaacatgaatgcagctggaggccattatcttaagcaaaataatgcaggaacagaaaaccaaatatcacatgctttcactcttaagtgggaactaaattttcagtacctgtggacataaagatggcaacaatataaactggcatctactaaaggagggaagaaagggtggaaaagggctggaaaagtacttggctactatgctcagtacctggtgangggatcaatcatacttcaaacctcagcattatgtaatatacctaggtaacaaacttgcacatgtaccccatgaatctaagaggaaattagaaattataaaaaaaatgacaacccatgaacaaccactaaaatatatttatcttattttatgggttactcatttcattataaaggctttatgaacttacctaaggaatttacaatataatgggcaatctttttttgctgttttgtttcttttgttgttgttttaaatacaattatttatttaagcaattattaagcaaataatgcaaattgttaagcaaaagagctttcataacaatgctt

SEQ ID NO: 2800 - DNA, 661 bp, Homo sapiens
  misc_feature [331]..[331]: Chromosome 6, SNP identification no. = rs9356864
  misc_feature [331]..[331]: allele = g, in linkage disequilibrium with rs943068, respectively
  misc_feature [331]..[331]: n is a, t, c or g
atgaaaccactttttaatcacctcactttcaaactaagtaatcccaattcctttaacctgtcctcaaaggtcccattttacaactctttaatcatctctgtggctcttctctgggttctctacaagttccccatatccctaagaggctttggagcccaaaactcagtaataatttgtctttctttcatctgttgtcatgtggtggcagttgtggttttggcttctcctacgacctagattgtagacaatttgaggataaacattatgttctttgcttatgaagcatttctgttgatcgtaatttcctacagaattaggtatatcacggatncttactcatttgttttttcttctgttttgttttgtttactgtagcagtctcattatcattgagtataaaagaagcacctcatggcttttgtgttacataaacttatttatgtactttgaacccctttcttattttgatctgccatataaaagtcaaatgtccattctgctgaggaggctctcaacacaagttctatagaatttaccagttttcaattaagactttaggttttttatttgtctttcagtaaactaaagggaaaacaagatatttgttagtaaatttttgccaatttcttttcaagttggaaatgtgtgattttatcaattc

SEQ ID NO: 2801 - DNA, 661 bp, Homo sapiens
  misc_feature [331]..[331]: Chromosome 6, SNP identification no. = rs6936349
  misc_feature [331]..[331]: allele = a, in linkage disequilibrium with rs943068, respectively
  misc_feature [331]..[331]: n is a, t, c or g
cttttgtgttacataaacttatttatgtactttgaacccctttcttattttgatctgccatataaaagtcaaatgtccattctgctgaggaggctctcaacacaagttctatagaatttaccagttttcaattaagactttaggttttttatttgtctttcagtaaactaaagggaaaacaagatatttgttagtaaatttttgccaatttcttttcaagttggaaatgtgtgattttatcaattcaaactgtgacgaagacggggaaaaaaagccaaaacattaatttctcttttatttaaacacatttgtactaaaactgagtatgcgnaacacatggaaaaaaccagcacacaccaaggagaagcatttcttaatttggggtaaagagctaaggaagaaataggaagactattgagcatggaatctagactattaaagtaatagtaataaatcattgaaaataaaatgatgaccaatgtactatagagttgaataaagagttttccctagagagaaatttggaggactggacaaaaacaaacaaacaaaacaattgtcttacattaaaggcaaaaaaatagtaatatttcatacaacctaaattacttattaaaagtactttcaaaacacattcatagaaggcagaactttgttgatc

SEQ ID NO: 2802 - DNA, 661 bp, Homo sapiens
  KCNK16
  misc_feature [331]..[331]: Chromosome 6, SNP identification no. = rs4714237
  misc_feature [331]..[331]: allele = a, g
  misc_feature [331]..[331]: n is a, t, c or g
gcggatgcaggtggccatgggttctgacttcccagttttgtgaacctgggcaagcagtgtttcgtcacagaggcaatgtttaatactgcttttaatactagttactcaactcgccctgtgcgtctgagagttcaacaggaatgtgtcttcttccagaatctcaccccagtgttcttctgccacccagctcaactgcccctggcaaggaagggtctctcctgaggctgaggactctcagggaaagggatgtcctgtcttccctggggaggccccaggggctaatcagtggcaatcccttcggggctgcaatcaagcggatggcctcctttcntcttggttagcagagcgagttaggttgcagctaccaacccttcccacgccctccagcttggctctcacctccaatgcagagctgagggaggagatttcagcttctccagggcctctgccttactcccagggttttgggaggcccctgaactgttctcaaccctgatgtggtactatggtcccccaactttgactaaccttatccatcagggagaagagagtaaaacctgaagctggaggcctcacttcctggtctctcacagctacagaatgttgtctgtgaccacccagcccacgcatcatcttctaggccagctgttctcagtcttca

SEQ ID NO: 2803 - DNA, 661 bp, Homo sapiens
  KCNK16
  misc_feature [331]..[331]: Chromosome 6, SNP identification no. = rs1885622
  misc_feature [331]..[331]: allele = g, in linkage disequilibrium with rs4714237, respectively
  misc_feature [331]..[331]: n is a, t, c or g
ggttgcagctaccaacccttcccacgccctccagcttggctctcacctccaatgcagagctgagggaggagatttcagcttctccagggcctctgccttactcccagggttttgggaggcccctgaactgttctcaaccctgatgtggtactatggtcccccaactttgactaaccttatccatcagggagaagagagtaaaacctgaagctggaggcctcacttcctggtctctcacagctacagaatgttgtctgtgaccacccagcccacgcatcatcttctaggccagctgttctcagtcttcagggtcctcaacatcacctggagngcctgttgacacacagcctgcaggacccatccctagagttcctgagtcggcaggtgcggagtggggcttgacatctccagttctaacaggctcccaggtgatgctgattctggtcccgggactacactttgagaactgctgcttcaggttgcatcctgcccccagcacttatgctaatttgtgtggtgaagacccggggctccagagccagaggcctgggagtgaatgctgtctctaccagtagctgtgcagccttggtcaacatattctacctcagttcccatctacaaagtggagatagggattgtaataggtaattatgagaaaaca

SEQ ID NO: 2804 - DNA, 661 bp, Homo sapiens
  KCNK16
  misc_feature [331]..[331]: Chromosome 6, SNP identification no. = rs1109773
  misc_feature [331]..[331]: allele = c, in linkage disequilibrium with rs4714237, respectively
  misc_feature [331]..[331]: n is a, t, c or g
catcttctaggccagctgttctcagtcttcagggtcctcaacatcacctggagagcctgttgacacacagcctgcaggacccatccctagagttcctgagtcggcaggtgcggagtggggcttgacatctccagttctaacaggctcccaggtgatgctgattctggtcccgggactacactttgagaactgctgcttcaggttgcatcctgcccccagcacttatgctaatttgtgtggtgaagacccggggctccagagccagaggcctgggagtgaatgctgtctctaccagtagctgtgcagccttggtcaacatattctacctcanttcccatctacaaagtggagatagggattgtaataggtaattatgagaaaacacctgtaacacgctcagtgtcaggtgatgagtggatcatgattggattaagctggtcatgaccaccctgcttcccactgttttaggcacattgtgaatgctcagtaaatgccagttatcaaggtgatttggcacttggtctgttcctttgcaggggatgttgtcactcgctccagtgcctatttcagatgcattcacctccctccacaacacctggttttgtcttgtttctgggaaagaggaaaccagaaaggacccaggcagggggtgacccactct

SEQ ID NO: 2805 - DNA, 661 bp, Homo sapiens
  KCNK16
  misc_feature [331]..[331]: Chromosome 6, SNP identification no. = rs2894423
  misc_feature [331]..[331]: allele = a, in linkage disequilibrium with rs4714237, respectively
  misc_feature [331]..[331]: n is a, t, c or g
gctgtgcagccttggtcaacatattctacctcagttcccatctacaaagtggagatagggattgtaataggtaattatgagaaaacacctgtaacacgctcagtgtcaggtgatgagtggatcatgattggattaagctggtcatgaccaccctgcttcccactgttttaggcacattgtgaatgctcagtaaatgccagttatcaaggtgatttggcacttggtctgttcctttgcaggggatgttgtcactcgctccagtgcctatttcagatgcattcacctccctccacaacacctggttttgtcttgtttctgggaaagaggaaancagaaaggacccaggcagggggtgacccactctgttaccaagagagagccccatttgggtgcagtgctggcaagctcagtcaccttggccattgcccaccaaacccaactccaggtgcaaacaggccaggaaaggacagcttggtggtggctgctcctggcatttatctgtgtctcccacccgcagccgtctgcccagggatatgagctgggagagggcagaaggagctgcagccctggagttggggaaggggaagtatgaaagtgtgggaggaggaaatttggatagcgttgataacgctgacatatagttcccattcatccagcaagt

SEQ ID NO: 2806 - DNA, 661 bp, Homo sapiens
  KCNK16
  misc_feature [331]..[331]: Chromosome 6, SNP identification no. = rs4714238
  misc_feature [331]..[331]: allele = g, in linkage disequilibrium with rs4714237, respectively
  misc_feature [331]..[331]: n is a, t, c or g
gatagggattgtaataggtaattatgagaaaacacctgtaacacgctcagtgtcaggtgatgagtggatcatgattggattaagctggtcatgaccaccctgcttcccactgttttaggcacattgtgaatgctcagtaaatgccagttatcaaggtgatttggcacttggtctgttcctttgcaggggatgttgtcactcgctccagtgcctatttcagatgcattcacctccctccacaacacctggttttgtcttgtttctgggaaagaggaaaccagaaaggacccaggcagggggtgacccactctgttaccaagagagagccccntttgggtgcagtgctggcaagctcagtcaccttggccattgcccaccaaacccaactccaggtgcaaacaggccaggaaaggacagcttggtggtggctgctcctggcatttatctgtgtctcccacccgcagccgtctgcccagggatatgagctgggagagggcagaaggagctgcagccctggagttggggaaggggaagtatgaaagtgtgggaggaggaaatttggatagcgttgataacgctgacatatagttcccattcatccagcaagtgacagcttagagagtgcttttaatctgctgtcaaatgtctgcagtaccgatat

SEQ ID NO: 2807 - DNA, 661 bp, Homo sapiens
  KCNK16
  misc_feature [331]..[331]: Chromosome 6, SNP identification no. = rs9462529
  misc_feature [331]..[331]: allele = c, in linkage disequilibrium with rs4714237, respectively
  misc_feature [331]..[331]: n is a, t, c or g
gtaaatgccagttatcaaggtgatttggcacttggtctgttcctttgcaggggatgttgtcactcgctccagtgcctatttcagatgcattcacctccctccacaacacctggttttgtcttgtttctgggaaagaggaaaccagaaaggacccaggcagggggtgacccactctgttaccaagagagagccccatttgggtgcagtgctggcaagctcagtcaccttggccattgcccaccaaacccaactccaggtgcaaacaggccaggaaaggacagcttggtggtggctgctcctggcatttatctgtgtctcccacccgcagccntctgcccagggatatgagctgggagagggcagaaggagctgcagccctggagttggggaaggggaagtatgaaagtgtgggaggaggaaatttggatagcgttgataacgctgacatatagttcccattcatccagcaagtgacagcttagagagtgcttttaatctgctgtcaaatgtctgcagtaccgatatggttattcttgttgccttatagatgaggctgtttgggtccagagaggttaagtgacctgttcaaggtcacacatcaatccagttgtagacctggggccagaatccaggattagatctcaccaggctctctgttccc

SEQ ID NO: 2808 - DNA, 661 bp, Homo sapiens
  KCNK16
  misc_feature [331]..[331]: Chromosome 6, SNP identification no. = rs1109798
  misc_feature [331]..[331]: allele = a, in linkage disequilibrium with rs4714237, respectively
  misc_feature [331]..[331]: n is a, t, c or g
caggcggaggctcagtccagggaccagtttcagttggagaagctgcgcttcctggagaactacacctgcctggaccagtgggccatggagcagtttgtgcaggtgaaggggagcgatgtgggattgggatggagaggcttgggaaggttggtggaatggggttcctgtggcagatccacagtcctcacccaggagctgatgccccatttggaagaagagtgtggtgggaacagagagcctggtgagatctaatcctggattctggccccaggtctacaactggattgatgtgtgaccttgaacaggtcacttaacctctctggacccaaanagcctcatctataaggcaacaagaataaccatatcggtactgcagacatttgacagcagattaaaagcactctctaagctgtcacttgctggatgaatgggaactatatgtcagcgttatcaacgctatccaaatttcctcctcccacactttcatacttccccttccccaactccagggctgcagctccttctgccctctcccagctcatatccctgggcagacggctgcgggtgggagacacagataaatgccaggagcagccaccaccaagctgtcctttcctggcctgtttgcacctggagttgggtttggtgggcaatggccaag

SEQ ID NO: 2809 - DNA, 661 bp, Homo sapiens
  KCNK16
  misc_feature [331]..[331]: Chromosome 6, SNP identification no. = rs3734619
  misc_feature [331]..[331]: allele = t, in linkage disequilibrium with rs4714237, respectively
  misc_feature [331]..[331]: n is a, t, c or g
aggctgtttgggtccagagaggttaagtgacctgttcaaggtcacacatcaatccagttgtagacctggggccagaatccaggattagatctcaccaggctctctgttcccaccacactcttcttccaaatggggcatcagctcctgggtgaggactgtggatctgccacaggaaccccattccaccaaccttcccaagcctctccatcccaatcccacatcgctccccttcacctgcacaaactgctccatggcccactggtccaggcaggtgtagttctccaggaagcgcagcttctccaactgaaactggtccctggactgagcctcngcctgcctctctagcagctggaagatagtggcaccgagcagcaggtagcagacataggccagcagcaggggcagcacccggccaccccagcagctgcagagcccagcactgggcatgctgtggccaggaccctgccagggccgtggggctggctatgggggagaggtgggaaacaggtgaggagtaagcacctaggggcctgtgcccaggctgccgcctgccctgccctcctcctcggcacaggtgtctggaggctggggagactgtttgaacagtgcggctcagcttggctgcactaagtgctatgctgtgagtgcaaacaggccggcc

SEQ ID NO: 2810 - DNA, 661 bp, Homo sapiens
  KCNK16
  misc_feature [331]..[331]: Chromosome 6, SNP identification no. = rs3807045
  misc_feature [331]..[331]: allele = a, in linkage disequilibrium with rs4714237, respectively
  misc_feature [331]..[331]: n is a, t, c or g
tataaaaccaatgaatccaacttatcagcagaatcaaccctgatactcttaccatcaggctgagtgagacaatcacctgtctatttactttgccctgatttgtcacgcagtttactcatcctgaggttcccccaataggcagttcaattatcctgccccattttgtagccaaggcaactgagtagaaggtttattcatacccattctgacctcttcccagctcctaagctggggtcttacagccttcaagggtgaagacgctgggggcggccgagagagcccactggggcctggacagagtgagcacacctatccgatttagcccagaaanatctatccaacttggagacagagagagagacatgaagcactcaggagaacctggtaggtctctttgaagggtccctgacactgacttgctgctgtccatggaaacaaaggccgggtgggggtggccggcctgtttgcactcacagcatagcacttagtgcagccaagctgagccgcactgttcaaacagtctccccagcctccagacacctgtgccgaggaggagggcagggcaggcggcagcctgggcacaggcccctaggtgcttactcctcacctgtttcccacctctcccccatagccagccccacggccctggcagggtcctggc

SEQ ID NO: 2811 - DNA, 661 bp, Homo sapiens
  KCNK16
  misc_feature [331]..[331]: Chromosome 6, SNP identification no. = rs12333231
  misc_feature [331]..[331]: allele = t, in linkage disequilibrium with rs4714237, respectively
  misc_feature [331]..[331]: n is a, t, c or g
agaatgggtatgaataaaccttctactcagttgccttggctacaaaatggggcaggataattgaactgcctattgggggaacctcaggatgagtaaactgcgtgacaaatcagggcaaagtaaatagacaggtgattgtctcactcagcctgatggtaagagtatcagggttgattctgctgataagttggattcattggttttataactcttgctaatttgtcttgcatgaagccctctagtgggttaccttcagaggatatgtcggtgaaatatatgtgtgaattaaaaagaaactataagtatatcctgatcctgggatggtaagagnggctgtctctgagtggatggaattgagagtgctttcctttctctttgcctgtgtgtgtgtgtgtacacatgcttgtttatgtacatgtataacagctttatacagatataattcacatgctgtatcgtccacacatttaaagtgtgcaattcagtgggttttagtatattcacagggtcttcaagatccagccctgttgcaacatgtaacagtacttcttccttctttctggctgagtaatatttcattgtgtggctataacacatttgtttatccatttgatttctagttgatggacatttgggttgtccctgtttccttctattaaga

SEQ ID NO: 2812 - DNA, 661 bp, Homo sapiens
  KCNK16
  misc_feature [331]..[331]: Chromosome 6, SNP identification no. = rs12332819
  misc_feature [331]..[331]: allele = c, in linkage disequilibrium with rs4714237, respectively
  misc_feature [331]..[331]: n is a, t, c or g
aatggggcaggataattgaactgcctattgggggaacctcaggatgagtaaactgcgtgacaaatcagggcaaagtaaatagacaggtgattgtctcactcagcctgatggtaagagtatcagggttgattctgctgataagttggattcattggttttataactcttgctaatttgtcttgcatgaagccctctagtgggttaccttcagaggatatgtcggtgaaatatatgtgtgaattaaaaagaaactataagtatatcctgatcctgggatggtaagaggggctgtctctgagtggatggaattgagagtgctttcctttctctntgcctgtgtgtgtgtgtgtacacatgcttgtttatgtacatgtataacagctttatacagatataattcacatgctgtatcgtccacacatttaaagtgtgcaattcagtgggttttagtatattcacagggtcttcaagatccagccctgttgcaacatgtaacagtacttcttccttctttctggctgagtaatatttcattgtgtggctataacacatttgtttatccatttgatttctagttgatggacatttgggttgtccctgtttccttctattaagaacaaagcagctatgaacctctgtgtatgagttttttttgtggaca

SEQ ID NO: 2813 - DNA, 661 bp, Homo sapiens
  KCNK16
  misc_feature [331]..[331]: Chromosome 6, SNP identification no. = rs11758408
  misc_feature [331]..[331]: allele = t, in linkage disequilibrium with rs4714237, respectively
  misc_feature [331]..[331]: n is a, t, c or g
gatcctgggatggtaagaggggctgtctctgagtggatggaattgagagtgctttcctttctctttgcctgtgtgtgtgtgtgtacacatgcttgtttatgtacatgtataacagctttatacagatataattcacatgctgtatcgtccacacatttaaagtgtgcaattcagtgggttttagtatattcacagggtcttcaagatccagccctgttgcaacatgtaacagtacttcttccttctttctggctgagtaatatttcattgtgtggctataacacatttgtttatccatttgatttctagttgatggacatttgggttgtcnctgtttccttctattaagaacaaagcagctatgaacctctgtgtatgagttttttttgtggacatgtgtttgcattactcacaggtacatacctaggagtagaatttctggactatctggccactctgtattgaactttttgaggaactgccaggctattttccaaagtggctgaaccattttatattctcactagcccagggcgaggattccaatatctctgctgtgttttctgctgtttcctttaatgagctgtggctgcagacactgtgagttgcctgctgagtatcctttccctcctccccagctagcagaaccccggctttgtaa

SEQ ID NO: 2814 - DNA, 661 bp, Homo sapiens
  KCNK16
  misc_feature [331]..[331]: Chromosome 6, SNP identification no. = rs1328385
  misc_feature [331]..[331]: allele = g, in linkage disequilibrium with rs4714237, respectively
  misc_feature [331]..[331]: n is a, t, c or g
gccagagctcccaggaaccaggctgaggctgggactgtggtgccttgtttggctttctcctcagcctggccctcttgcccactgtcttatgggtcttcagtgacttcactgctctcaggggctgagacagaggggagcaagattagcactatgacttagaccaattatgctcaattacctggggttaacacttacaaagccggggttctgctagctggggaggagggaaaggatactcagcaggcaactcacagtgtctgcagccacagctcattaaaggaaacagcagaaaacacagcagagatattggaatcctcgccctgggctagtnagaatataaaatggttcagccactttggaaaatagcctggcagttcctcaaaaagttcaatacagagtggccagatagtccagaaattctactcctaggtatgtacctgtgagtaatgcaaacacatgtccacaaaaaaaactcatacacagaggttcatagctgctttgttcttaatagaaggaaacagggacaacccaaatgtccatcaactagaaatcaaatggataaacaaatgtgttatagccacacaatgaaatattactcagccagaaagaaggaagaagtactgttacatgttgcaacagggctggatcttgaagaccctgt

SEQ ID NO: 2815 - DNA, 661 bp, Homo sapiens
  KCNK16
  misc_feature [331]..[331]: Chromosome 6, SNP identification no. = rs5006081
  misc_feature [331]..[331]: allele = c, in linkage disequilibrium with rs4714237, respectively
  misc_feature [331]..[331]: n is a, t, c or g
ttccttctattaagaacaaagcagctatgaacctctgtgtatgagttttttttgtggacatgtgtttgcattactcacaggtacatacctaggagtagaatttctggactatctggccactctgtattgaactttttgaggaactgccaggctattttccaaagtggctgaaccattttatattctcactagcccagggcgaggattccaatatctctgctgtgttttctgctgtttcctttaatgagctgtggctgcagacactgtgagttgcctgctgagtatcctttccctcctccccagctagcagaaccccggctttgtaagtgtnaaccccaggtaattgagcataattggtctaagtcatagtgctaatcttgctcccctctgtctcagcccctgagagcagtgaagtcactgaagacccataagacagtgggcaagagggccaggctgaggagaaagccaaacaaggcaccacagtcccagcctcagcctggttcctgggagctctggcaggtgaagtgcaccccagtgagtcccagcaggggacctgggccttcatatccccacattagtccgtcactcatgcatttctggctttgcgcacgtgcaggaaagatggctccaggagcttgtggagagacccctgaaggagagc

SEQ ID NO: 2816 - DNA, 661 bp, Homo sapiens
  KCNK16
  misc_feature [331]..[331]: Chromosome 6, SNP identification no. = rs1328384
  misc_feature [331]..[331]: allele = a, in linkage disequilibrium with rs4714237, respectively
  misc_feature [331]..[331]: n is a, t, c or g
ctcctccccaggctttaatgtgtttttctcccagtggcctagcctgcacctggagctctccttcaggggtctctccacaagctcctggagccatctttcctgcacgtgcgcaaagccagaaatgcatgagtgacggactaatgtggggatatgaaggcccaggtcccctgctgggactcactggggtgcacttcacctgccagagctcccaggaaccaggctgaggctgggactgtggtgccttgtttggctttctcctcagcctggccctcttgcccactgtcttatgggtcttcagtgacttcactgctctcaggggctgagacagagnggagcaagattagcactatgacttagaccaattatgctcaattacctggggttaacacttacaaagccggggttctgctagctggggaggagggaaaggatactcagcaggcaactcacagtgtctgcagccacagctcattaaaggaaacagcagaaaacacagcagagatattggaatcctcgccctgggctagtgagaatataaaatggttcagccactttggaaaatagcctggcagttcctcaaaaagttcaatacagagtggccagatagtccagaaattctactcctaggtatgtacctgtgagtaatgcaaacacatgtcca

SEQ ID NO: 2817 - DNA, 661 bp, Homo sapiens
  misc_feature [331]..[331]: Chromosome 6, SNP identification no. = rs993629
  misc_feature [331]..[331]: allele = c, in linkage disequilibrium with rs7766954, respectively
  misc_feature [331]..[331]: n is a, t, c or g
agaaagctcataaaaacatgtgttcacttccctttgccccaccccttagctgaattctaaaatactctctagaagaaggcggggtggaaataaagtcccttttaataagtagacccaaacactgaataaaatacgcctataatgaagactttcaaaatgatgtctatctaatcctctgcaattctgcagtttctggatgaattgtgtgcttttatagattgcagaaaataaacatgcttctttctttctcctccttgtccttctcctcttaatcttgctctcatctttcttcattttgaaaagtagttgctgaaaacagtaagagaaaagnaagagaaagaaaatagagttatctctgtttctctctctttgacttttaaaatgtctatttatagataataaatgtctctgttcacaaattagttaattgggcaatgaaagagagatatgtaattttgtaaaacctaatttggcctttgaaagtctcagcactcataggaaacccatgtcaaagtttcagaaaagtctgttaacgtatttagtatataaatgctattgacagtgaactcttccagtgttgccataattactgatattaaaggtcttgtagctatttatatacgtgtttttgtataacacatagtactttttcaatctaata

SEQ ID NO: 2818 - DNA, 661 bp, Homo sapiens
  misc_feature [331]..[331]: Chromosome 6, SNP identification no. = rs9349529
  misc_feature [331]..[331]: allele = a, in linkage disequilibrium with rs7766954, respectively
  misc_feature [331]..[331]: n is a, t, c or g
gcactcataggaaacccatgtcaaagtttcagaaaagtctgttaacgtatttagtatataaatgctattgacagtgaactcttccagtgttgccataattactgatattaaaggtcttgtagctatttatatacgtgtttttgtataacacatagtactttttcaatctaatagtgattgttcaaatccttgaatcataaaggatggttatctagctgccctttcaacatgagaaatccgacaatgaaatattttcacttttaaatacacaatcatgctttgagtgctaaaaagcacaagtaggtcaggaaccagttatctaaggtatttntttgagggtgacagtaaattcaagctggaatttaaggaacccttatgcaaccattctggatttcctatctaagtacaaaaatatttggagaaaagtttcattttcaattttaaatatgccttggggactatgactatctattgctaaacttgcaaaaaattttgaagcttataaacataaatattttggctaaattttaaactatatagatggcatatatggtgagggaacccaaaggaattcaactcaaaattacaaaactgccagagagatagaaatctaccaacaaaatctcaccattaatgagaatatcattttcaatcccaaagc

SEQ ID NO: 2819 - DNA, 661 bp, Homo sapiens
  misc_feature [331]..[331]: Chromosome 6, SNP identification no. = rs9369947
  misc_feature [331]..[331]: allele = g, in linkage disequilibrium with rs7766954, respectively
  misc_feature [331]..[331]: n is a, t, c or g
acaatcatgctttgagtgctaaaaagcacaagtaggtcaggaaccagttatctaaggtatttctttgagggtgacagtaaattcaagctggaatttaaggaacccttatgcaaccattctggatttcctatctaagtacaaaaatatttggagaaaagtttcattttcaattttaaatatgccttggggactatgactatctattgctaaacttgcaaaaaattttgaagcttataaacataaatattttggctaaattttaaactatatagatggcatatatggtgagggaacccaaaggaattcaactcaaaattacaaaactgccagngagatagaaatctaccaacaaaatctcaccattaatgagaatatcattttcaatcccaaagctcttatttctagtactaaataacattattctatattactaattgtttactgtcctataggtgatggtgaaaaaaaaaaggtaggcaaacaaaaggtagttggtaaaaaaagaaaaaaaacattaccgaaattaccaaatattaatataaatgcatctatttttggcttttgttgccattgcttttggtgttttagacatgaagtccttgcccatgcctatgtcctgaatggtattgcctaggttttcttctaggatttttatggtttt

SEQ ID NO: 2820 - DNA, 661 bp, Homo sapiens
  misc_feature [331]..[331]: Chromosome 6, SNP identification no. = rs9395581
  misc_feature [331]..[331]: allele = c, in linkage disequilibrium with rs7766954, respectively
  misc_feature [331]..[331]: n is a, t, c or g
aaatgtaaaagtgttaatataaatataattaacttttctgagtatgcttaaaataatgtattttatattagtttttttatttttgctaaatttggaattatgcatttattaactagtatttgtagaagagacatgatatgatgtaggcttttttccaaagcctaggacagagaaattatacattcttctatttctttaatactccttttgaagaaatggactatatattcttttttcctagtaaattggaactaaaaataatttttgactcaatgccaactatttaacagcatagtctgatatctgtgaggaaatttagtttatacataanaagcttgatgcgacataataggttctcctcaaaaatatctggacatctgaaattcaggcagccagcattctatcaggctgtgtgctttggacatgtagcatttgtaatccaacttgctgatcacggaaatcagaatagaagtttaattggaacccctattctccatcatcaactgtaataagaaagaaaagtagcatctttcatgtaagatctttggttacaactaaatgaggctttgggctttgacaaacacaattcctttactatatttttaaaaaatcagagtcagtgattagatctctttctattaaaaaagtatcacatttgcaa

SEQ ID NO: 2821 - DNA, 661 bp, Homo sapiens
  misc_feature [331]..[331]: Chromosome 6, SNP identification no. = rs1492623
  misc_feature [331]..[331]: allele = c, in linkage disequilibrium with rs7766954, respectively
  misc_feature [331]..[331]: n is a, t, c or g
tgttaatataaatataattaacttttctgagtatgcttaaaataatgtattttatattagtttttttatttttgctaaatttggaattatgcatttattaactagtatttgtagaagagacatgatatgatgtaggcttttttccaaagcctaggacagagaaattatacattcttctatttctttaatactccttttgaagaaatggactatatattcttttttcctagtaaattggaactaaaaataatttttgactcaatgccaactatttaacagcatagtctgatatctgtgaggaaatttagtttatacataacaagcttgatgngacataataggttctcctcaaaaatatctggacatctgaaattcaggcagccagcattctatcaggctgtgtgctttggacatgtagcatttgtaatccaacttgctgatcacggaaatcagaatagaagtttaattggaacccctattctccatcatcaactgtaataagaaagaaaagtagcatctttcatgtaagatctttggttacaactaaatgaggctttgggctttgacaaacacaattcctttactatatttttaaaaaatcagagtcagtgattagatctctttctattaaaaaagtatcacatttgcaaactgcagtatg

SEQ ID NO: 2822 - DNA, 661 bp, Homo sapiens
  misc_feature [331]..[331]: Chromosome 6, SNP identification no. = rs6911488
  misc_feature [331]..[331]: allele = t, in linkage disequilibrium with rs7766954, respectively
  misc_feature [331]..[331]: n is a, t, c or g
agtttaattggaacccctattctccatcatcaactgtaataagaaagaaaagtagcatctttcatgtaagatctttggttacaactaaatgaggctttgggctttgacaaacacaattcctttactatatttttaaaaaatcagagtcagtgattagatctctttctattaaaaaagtatcacatttgcaaactgcagtatgctactgagaaaatggcacaatttaataaaaaggagatagaagtaccccgctctcactattatcatcacatttgggtttctgtaatattttgtgcaatcattaaaagcaaggcaacggtaatattttagncatctcaatacctagaagatttctattactttggctaggaacgttttccttggatggttggttggcaatatccaaaggataattttaggtcctcaagaattaagtacaggtctatttttatgaggtgggacagattggaaacagttctttttgcttgttccaatgaaattggaaatgaaaagaatgtgtgtcatatgagggacaagtgtcatgaagcccatctgaattatacttcatacccctctttatagcctaatgttcaacaatatccattttcctggcagtattgcacccatcaaaaacaagttattgacacttatgtctcatata

SEQ ID NO: 2823 - DNA, 661 bp, Homo sapiens
  misc_feature [331]..[331]: Chromosome 6, SNP identification no. = rs9367391
  misc_feature [331]..[331]: allele = t, in linkage disequilibrium with rs7766954, respectively
  misc_feature [331]..[331]: n is a, t, c or g
ttttgctttcttttttttttataaaattgaagtctatgccatagccttataaagaagattaatattttttgccatccacatagcaagaaaaagtaggaggtacaggctgataaaaaattaacctgaagctacataacctaggaactagctgaaaaaaatataattaaaaatctattaaatgttggcctatgaaatattgctgtaaatacccaatctagcaaattttcagtattcagaaaaagaaaaatccttagccttattccttagggcaatatttttaattcttttgattttaggcataaaagcctaaattttacaatttagaaaattnaaaaaaaatggtttcttacatatcactctgccttcatgggtttgtcctacatttgcactctccaaatccaacattgtactccaataattggaggtacattatcctgtaaaccatgctgaactcattacagttctgaaacccttatgttttccattgatctgcttaatagtttgattttgaacctggattaattggaactaccaactaaaaaccaaggaaggaaggcctttttcctccaccactggggagctttgtgtctctagcctacactctcctatgccaacatccacattctctcattttgcttcctaatgttagaaaagaacagtg

SEQ ID NO: 2824 - DNA, 661 bp, Homo sapiens
  misc_feature [331]..[331]: Chromosome 6, SNP identification no. = rs1873740
  misc_feature [331]..[331]: allele = c, in linkage disequilibrium with rs7766954, respectively
  misc_feature [331]..[331]: n is a, t, c or g
aagcttatgtccaagaattttatatatatcatgcaatttaatatttaaaaccatcctataatgtagatgatattattattattattatgtttttacagataaactgagattgaggaaaaatccaagacaaattagaaagtggtgtagctacaatgtaagctgcatgcaatgtccaagttattactcagctcatgatgtccatctgtccatccatccgtccatccacccatttatccatccatccatccatccagccagccagccagccatccacaaaaagatgccctgccctggaagtaatgctatacattctactaaaatgttctgttcnccccttcgtaaaactctctgtatgccctttgcaaatccattatttatgcttttcctgctatcctccatgcaataaaaggccaaacctgccagattatctcaaaggttgtattcttgctagagagtcctgccggatagtcttcttagatttaggcagtaaaaagtactggctgaagatgcaatgagggaggaaagaaaggtccatgtatttcttttcttcttatcttctcctttggtgctttatctttggggtaattgttaattcttccataactactgcttttgcctagtggccccctcctctacagttccaattctcagctgatgtctg

SEQ ID NO: 2825 - DNA, 661 bp, Homo sapiens
  misc_feature [331]..[331]: Chromosome 6, SNP identification no. = rs1126287
  misc_feature [331]..[331]: allele = c, in linkage disequilibrium with rs7766954, respectively
  misc_feature [331]..[331]: n is a, t, c or g
taaaaggactcagattaatactacgaataaattatgtactttttttaaacagtagaaatacaattgtttgctactcttgctttctgtcagttgtgctaatgcctttcttttctttttcatttattactatgtcattatatttgcacatttatgccttggataacactatcaagtggaaatctcttactttttctgtaccctaagtacataataataatctgtagacaatttagtattaagatgggcatcatttgctgcattttcattttagcctcctgtgcccacaaagacagactccatgcctcgcaatacctcattttattttagccanttctagtcgcaagggtcttgaccttaatgtctgtatcttgcgtctggcctcactggccttcttggttttaagtatctatgccttctgtaactagtctaaccttagcacagattttaataattctttaaaaatatatttctatgcaatcaattaactacacagcagtttccaaattactcttcaagacgtcttgtaattgagagttttaattatgagaaaataatcatatatattgccttttccgtgtgtcatacattctgacaacagtgaagataagtattacaaagaaagtgtctcttatgactactcttttttgtctcatacctagaa

SEQ ID NO: 2826 - DNA, 661 bp, Homo sapiens
  misc_feature [331]..[331]: Chromosome 6, SNP identification no. = rs977831
  misc_feature [331]..[331]: allele = c, in linkage disequilibrium with rs7766954, respectively
  misc_feature [331]..[331]: n is a, t, c or g
ccactgtcgaaagcagtttggaaggtcctcaaagaacttaaaactgaactaccatttgacccagcaatcccattactgggtatatacccaaaagaatataatttgttctaccacaaaggcacatgcacatgtatgtttattgcaccactattcacaacagcagagacatggaatcaacccacattccatcaatggaagacaggattaaaaaaagtggtacatattcagcatagaatactacatagccataaaaaagaatgagatcatgttctttgcagcaaaatggatggagctagatactgtgtttattacctggtggtaatgggttatnaaataatctatacaaaaaatcctcatgacatgtaatgtacttgtataacaaatctgcacgtgtacccctgaatctaaatgttaaaaaaaagttctattaaatgttgtatgaataactcaatctatcttgagttatatacctcaaggcaaagtttgttctctcttattgtatcttaaatgtactgttgggtgcagggtctagaactagacaccttaaaaaattgggtgtgactcagaagtctagaggaatattccaccagtacacattgtaataaatctgggaacattattaaaatactgattcctgaattctaccaccggagatgcattt

SEQ ID NO: 2827 - DNA, 661 bp, Homo sapiens
  misc_feature [331]..[331]: Chromosome 6, SNP identification no. = rs977830
  misc_feature [331]..[331]: allele = c, in linkage disequilibrium with rs7766954, respectively
  misc_feature [331]..[331]: n is a, t, c or g
gggatgggacaaacagcttacagaatgggagtaacatttgcaaactatacatccaacaaagggctaatatccagaatctataggggacttaaacaaattaacaagccaccccattaaaaagtgagtaatggatatgaacacttaccaaaagaaaacatacaagcatatgaaaaaacgcccatatcactaatcactagagaaatgcaaatcaaaaccacaatgagatatcatctcacagcagtcagaatggctataataaaaactaagaaaatagcacatgctggcaagattgtggggaaaagggaacacttacatactgggtgtggtaatntaaattagtttagccactgtcgaaagcagtttggaaggtcctcaaagaacttaaaactgaactaccatttgacccagcaatcccattactgggtatatacccaaaagaatataatttgttctaccacaaaggcacatgcacatgtatgtttattgcaccactattcacaacagcagagacatggaatcaacccacattccatcaatggaagacaggattaaaaaaagtggtacatattcagcatagaatactacatagccataaaaaagaatgagatcatgttctttgcagcaaaatggatggagctagatactgtgtttattacctggt

SEQ ID NO: 2828 - DNA, 661 bp, Homo sapiens
  misc_feature [331]..[331]: Chromosome 6, SNP identification no. = rs7766954
  misc_feature [331]..[331]: allele = a, g
  misc_feature [331]..[331]: n is a, t, c or g
gcaaacagagttagtttgactttctgtcttcttatttggatgctttttatttttctcttgcctgagtgcaatagaacagatcttaatggaaagcaagtaatttaaaaataaagagagctttattagatatgcattgcctttttgaaccatagaattttagagctaaaagaaatgacaaacagtatctagtcagaaataataaagcatcttggatataagctattttaaagatcctcagttccccatacttttacctactaccaactattacaaaaatgagaaaaccaaggcccagtaaaggaaagtaaggaaattaaacggataaagttanttaggaacgagacacaattccagtccaagtctcctgaccctgaagttggtgttgttaaatctactttacattttaagtcaaaaattttgagataaacatgatgatttcatatttaattggggaggaggtgatattaaattattctattgtgatttgggttatatggaaaaaatgtgtttccaagaatctctttccctgtgtagttctgggtttgagttggtcaaaagggaagttgtggggaggatacagtgaggcggcacatgattctctgatgatatttaagtcagatgtggttgacagacaggtaataaatgatggcagattccatct

SEQ ID NO: 2829 - DNA, 661 bp, Homo sapiens
  misc_feature [331]..[331]: Chromosome 6, SNP identification no. = rs7749461
  misc_feature [331]..[331]: allele = t, in linkage disequilibrium with rs7766954, respectively
  misc_feature [331]..[331]: n is a, t, c or g
aataaagagagctttattagatatgcattgcctttttgaaccatagaattttagagctaaaagaaatgacaaacagtatctagtcagaaataataaagcatcttggatataagctattttaaagatcctcagttccccatacttttacctactaccaactattacaaaaatgagaaaaccaaggcccagtaaaggaaagtaaggaaattaaacggataaagttaattaggaacgagacacaattccagtccaagtctcctgaccctgaagttggtgttgttaaatctactttacattttaagtcaaaaattttgagataaacatgatgatntcatatttaattggggaggaggtgatattaaattattctattgtgatttgggttatatggaaaaaatgtgtttccaagaatctctttccctgtgtagttctgggtttgagttggtcaaaagggaagttgtggggaggatacagtgaggcggcacatgattctctgatgatatttaagtcagatgtggttgacagacaggtaataaatgatggcagattccatcttgttctacctctccttgtttcatgtccagctttctctctaactttttgacacttttgaccaacggcaaccacagacactgggccatgaactcacagaagcagtagg

SEQ ID NO: 2830 - DNA, 661 bp, Homo sapiens
  misc_feature [331]..[331]: Chromosome 6, SNP identification no. = rs9367392
  misc_feature [331]..[331]: allele = c, in linkage disequilibrium with rs7766954, respectively
  misc_feature [331]..[331]: n is a, t, c or g
cagcattttccaactaatgaaacccataccagttaaagagaaggaagaaacttcccgagttggcaagaaagggggttccagagcaattgcaaaaacacccactaggtctgtggtaacgaatagaggggggaatttagcccatccgataaaagctggcttgtcagagacagggagctggcagccttcctaagtctctagagcagaatttaagttcaagattttgtatttcacttggtttaaacctgtatgccggcagttggtgatcccttcaaacctttcgtgtaaagcattgataacagggattagaagctctagtctaacagagagatgnagagaatgagtctttagcttctgctaaaaagacaccagctcaaaagtatataacttttcaatgtaaacaggctggtaaggggaatgttccggtagtttatacttcaaccaatgaaaactccctcaactacatgcatatcagcaccaaattaatgacaacaagaaaagaatcatcaatagtcttagaatttttatttcagcttcaggtttactacagaatatcaagcaaccaggatgctggagatcttttccaacacccccaaactcaggccctgaaagacacagggccctggtaacatagtacagaaaaatgggggcaatccccagaaga

SEQ ID NO: 2831 - DNA, 661 bp, Homo sapiens
  misc_feature [331]..[331]: Chromosome 6, SNP identification no. = rs7771203
  misc_feature [331]..[331]: allele = c, in linkage disequilibrium with rs7766954, respectively
  misc_feature [331]..[331]: n is a, t, c or g
ctcagaactgaaggcagattttccaggtggaaactggcaaccattgattagagagggattcttacttccctaattgaaataacctacttctgagtttataagctttgctgacaccatacaaggcatattgtcttacaaatcccccaaatctgtctttaaaatgagctcttcctcacctgcttaatgtttgtgtttttttagcagcatgtgtttttttagcacatgtgtatgtgttaccaggatattttctgatatagccattactcaaatatttcaaaacttttttttaattcttgattctgtcttcaattctgtcatctgttcttcctanttttctgcctcgtaaatgtgatgagtatcccttctctattgggctttactgaaacatttcctagggcttggaggctttcagcattgatctttaatttaactatatttctctaataaactaaacatactagtatcttgtttattgaatcctctcaactgtctgtgagaaacacattattatttcatttttatgggagagaaaatagagttagaagagtgatatgtctgttcacaacagtgatgtggtgaagccagctgctatgggatcatgccagccagttgtccacatttcttctcaattctacatacagtgatatctctttgatagctt

SEQ ID NO: 2832 - DNA, 661 bp, Homo sapiens
  misc_feature [331]..[331]: Chromosome 6, SNP identification no. = rs1994782
  misc_feature [331]..[331]: allele = g, in linkage disequilibrium with rs7766954, respectively
  misc_feature [331]..[331]: n is a, t, c or g
gtggctttctttatctttgttcttctaaattttctattttagtagtacctcggcaaacccagctccccacaatattgattgtttctgtcctttacttaaaaatctgatttcagaaatattgtataatatggaaagggcctgaatattgaactatgaaggaagacattaagacctggttttgtttcttaccaacagtgtgtcattggaccagtgatgggctgctaaatgtctaacaacgggctctttatggtggctgggggttgcgggggggagctttaagtgttttctgttcttactgtataaattctatcatggccaatttcaagctatnaaagagatatcactgtatgtagaattgagaagaaatgtggacaactggctggcatgatcccatagcagctggcttcaccacatcactgttgtgaacagacatatcactcttctaactctattttctctcccataaaaatgaaataataatgtgtttctcacagacagttgagaggattcaataaacaagatactagtatgtttagtttattagagaaatatagttaaattaaagatcaatgctgaaagcctccaagccctaggaaatgtttcagtaaagcccaatagagaagggatactcatcacatttacgaggcagaaaagtaggaag

SEQ ID NO: 2833 - DNA, 661 bp, Homo sapiens
  misc_feature [331]..[331]: Chromosome 6, SNP identification no. = rs9357655
  misc_feature [331]..[331]: allele = a, in linkage disequilibrium with rs7766954, respectively
  misc_feature [331]..[331]: n is a, t, c or g
aatgcatgtggcatagcaagagaaagaacatttcagcaaataaaataattaatacaaattaatacaatttattctggacagtctcacaggatacatataaattttatgcataattttatagacaataaaactgttcaaactatttaaaactcagctttaagaccaatgacccaagaaagagagtaaaacagggaaggcatttgaaagggaagaaggcatcccattaatattcatcttgtatttaaattgggcacagttttcatcattgggaatatgtgccctactgttatagtttcttgggatgcttgatcaaatcattagtaaaactcantcagatttccacatgaaatagaaataatcctctcttcaaaacaagttattaaatcttgaatgcacattgcatatatgctatcaatagtgcacaaaatctttaattatgattatgagtatctcataaatattggaagatgagtaaactagttatgctcatcacatgcagaatcaccttctctgatcatttaagtttgaatataacttatcacacagcaacattttaaagttagaattttttaaagtgaaaggaagtaaacatccaattttgacatcaataacaatatacagatttatatgactcacctgagtgtttaaaatagaatttata

SEQ ID NO: 2834 - DNA, 661 bp, Homo sapiens
  misc_feature [331]..[331]: Chromosome 6, SNP identification no. = rs2397000
  misc_feature [331]..[331]: allele = g, in linkage disequilibrium with rs7766954, respectively
  misc_feature [331]..[331]: n is a, t, c or g
gacattagaattattgaaccaaccatatggataagggctataaataataagtgtaggcatattggtgcataggtaataaatgtagccttgtgtataaagcttgtgtccaaaaatgaaaaatgaattcattctctaggaaactgatatggttttgctgtgtccccatccaaatctcatcttgtagtccccataatccccacatctcatgggagggacctgttggagataattgaatcatgggggcagtttcccttatcctgttctcatgatagtgaattagttctcacaagatctgatagctttataaggggtttcccctttaaacgggcantcatttttctccttcctgctgccatgtgaagaaggacatgtttgctttccctaccaccgtgattttaagtttcctgaggcctccccagccatgctgaactgtgagtcagttaaacctcttttctctacagattacccagtctcaggtatgtctttttttttttttttttgacggagtctttctctgttgccaggctagagtgcagtggcgtgatctcggctcactgcaacctctgacttcctggtccaagagattctcctgcctcagcctcccaagtagctgggactacagacatgccaccatgcccagctaatttttgtatttttagta

SEQ ID NO: 2835 - DNA, 661 bp, Homo sapiens
  misc_feature [331]..[331]: Chromosome 6, SNP identification no. = rs9349534
  misc_feature [331]..[331]: allele = c, in linkage disequilibrium with rs7766954, respectively
  misc_feature [331]..[331]: n is a, t, c or g
aaaatgagtgcccgtttaaaggggaaaccccttataaagctatcagatcttgtgagaactaattcactatcatgagaacaggataagggaaactgcccccatgattcaattatctccaacaggtccctcccatgagatgtggggattatggggactacaagatgagatttggatggggacacagcaaaaccatatcagtttcctagagaatgaattcatttttcatttttggacacaagctttatacacaaggctacatttattacctatgcaccaatatgcctacacttattatttatagcccttatccatatggttggttcaataattntaatgtcactatttttcagtagtttgagcctttgttccccttgtttccctgattggcaaaaagcataggtgtccttattagaaaatatttgtctattgacaattaagagttgatgataggttttgctagtaaaatatctcctttatcatttgtgattagaaattattattcatagtatctgtcaagatttcccttatcatcttactaatatagtattcggtttgataaaaattgggagaacagagagagtgtttctaaggaggagaagaagaaaaagtggtgactgctctggtcagttggttctgctatttttcctataccagtttttat

SEQ ID NO: 2836 - DNA, 661 bp, Homo sapiens
  IBTK
  misc_feature [331]..[331]: Chromosome 6, SNP identification no. = rs2323642
  misc_feature [331]..[331]: allele = a, a, in linkage disequilibrium with rs507500, rs932614, respectively
  misc_feature [331]..[331]: n is a, t, c or g
acacattcattcacctagtctgtagaattcccagtgtttatagttgtactcctgctgctgacagttaggtgtggcaatggaaagtattagggataactgggtttttgcattagattgaagttccaaccaggcaaattttaaatttaatgtgaaaacactaagtatgtatgggatttggctacttctcaaaattaaatgtttcacttggagaaataatagaacctttctcatcagtcatcttcagtggaagaatactttttctttgtggcctggcttgatgtttgaatgtaaattctttcaaattccatttagagctaacccatacaatatnaaacaatttcaattatttaatattttaaagctaaaatattatttagagtaaaattacagggcttcttttgctgaggagcaaaattctggttaatttttatgcaggtacaaatgtctaaaattcttctccataaattttctgtggctgttaaggtagaaaatagctggagcttgtgagttaggaaaataaaattgtgggaaatcaggtactgtttccaattatggcatagtcagtggaaagaacagtaaaacataattgaagaaatctgtttgtcaatccttatgccagtatcacacaatcttagttcattttgtgctgctgtaacagagt

SEQ ID NO: 2837 - DNA, 661 bp, Homo sapiens
  misc_feature [331]..[331]: Chromosome 6, SNP identification no. = rs540814
  misc_feature [331]..[331]: allele = g, in linkage disequilibrium with rs507500, respectively
  misc_feature [331]..[331]: n is a, t, c or g
cttctttttagcctcacaattttgctttttgtagaccaatcaaagatttctatgtgtgtcttcaaagaaatattacaagacaaaccctctcctggtacaagagctacagaattatttgcatatataatctcttcttgtgcctcctgctagcatgggccttttcgtcttcaatcctcatggtataacaaaagaataaattatggtactactgatagaacgttaaactgacaatcttctgaggcaccggcagtttaatggaaaccaaagaaaattcaagattatacattttctcataaatgtatttctttttcctgtcttctctttcacatantatcaattttcttgccttcttattattcagtttcctatctgtcaaataacaaacccaaagctgccttcgagccaatctcctgtcaatggaaccgtacttgctgatagaggattaaggtattggcaaatctgttacaaggtgtttaggtttataattaaagatttagttaaattaataaacagcagcaatttcaagaagactaaaaggattgccttacctgatattttgcctcctttctgactactaagggaagatgtgaaaagtgaaaatgaaggtgtttatatagtgccatctagcgacagatacctaaaaaagctctgtatcatttat

SEQ ID NO: 2838 - DNA, 661 bp, Homo sapiens
  misc_feature [331]..[331]: Chromosome 6, SNP identification no. = rs2753211
  misc_feature [331]..[331]: allele = c, in linkage disequilibrium with rs507500, respectively
  misc_feature [331]..[331]: n is a, t, c or g
taccttcttttatatttttctaaatattgatctttatttcctttagtcaaggaaggtgtggaatgggcagaaggcagcaagataaatggtcatatggagttgggataaaataaaaaataaaccccctgggtgttgtaacatgaatggagtgtgcatattacaggtaagcgtaaatagtgttggcatctagaattgagatcttttgggacctaagattgtgttgtacatgccctagtaaaattgtaaaagaagaaattttaggcaatgataatagctaagctaagattcattgagtatttccatgtatcaggcactttctaacaagttttantgaatcttcacaatcccatcctgagggaagtactatcattattcttgttttacaggtctaaaaaaatgaggcacagcatggtaaattgttaaaaatcacaaaactagtgaggatggtgtggtacttatattcactgcactaataccccattatacctataatccacatatacctatatatgcagatgtgtacacacacatgtgcatccacacaccacacatatatatgtaagaatattctcaaataataaaactaaatctgatggaggaaatgtactcttgaaggaagtgccttgttagaaagtgggacaggaaggaagtgggtttttgt

SEQ ID NO: 2839 - DNA, 661 bp, Homo sapiens
  misc_feature [331]..[331]: Chromosome 6, SNP identification no. = rs2753212
  misc_feature [331]..[331]: allele = c, in linkage disequilibrium with rs507500, respectively
  misc_feature [331]..[331]: n is a, t, c or g
acatgaatggagtgtgcatattacaggtaagcgtaaatagtgttggcatctagaattgagatcttttgggacctaagattgtgttgtacatgccctagtaaaattgtaaaagaagaaattttaggcaatgataatagctaagctaagattcattgagtatttccatgtatcaggcactttctaacaagttttactgaatcttcacaatcccatcctgagggaagtactatcattattcttgttttacaggtctaaaaaaatgaggcacagcatggtaaattgttaaaaatcacaaaactagtgaggatggtgtggtacttatattcactgnactaataccccattatacctataatccacatatacctatatatgcagatgtgtacacacacatgtgcatccacacaccacacatatatatgtaagaatattctcaaataataaaactaaatctgatggaggaaatgtactcttgaaggaagtgccttgttagaaagtgggacaggaaggaagtgggtttttgtccctacaatcattgaatggcttctctttcaacaaaaaatatagttatcccttggtatgcacaggcagtcggttccaggacccttttggagaccaacatctaaggatgctcaagtctcttataggaaatggcatagta

SEQ ID NO: 2840 - DNA, 661 bp, Homo sapiens
  misc_feature [331]..[331]: Chromosome 6, SNP identification no. = rs9344267
  misc_feature [331]..[331]: allele = g, in linkage disequilibrium with rs507500, respectively
  misc_feature [331]..[331]: n is a, t, c or g
tttgagaggccaaggtgggtggatcacctgaggccaggagttcgaggctagcctggccaacatggcgaaatcctgtctctactaaaagtacaaaaaattagccgggcgtggtggcaggcacctgtaatcccagctacttgggaggctgaggcaggagaattgtttgaacccgcgaggccgaggctgcagtgagctgagatctcaccattgcactctagcctgggcaacaagagtgaaactctatctcaaaataataataataataaataaataaataaataaatgaaagaaagaaaagtttaatttctcaggtaactgcaggaaggagganaggagaatggagaagaaaaaaaaaaactccctgggttggttaccctatagtactaacctcaagttcttagtctagaaccttcaagaaggaaaagggtggagggaagaatccaaaggacaaaagctaagatagcccttctggaaaaaacagctctggaaggattttgggtttaagagaatccagaggtaggcattcaggtgttattctgccaagagagtttctaagttaaagaatgcctgaattcaatccaccagatgctgactttggataaagacattttcatcttttttccccctataaaataatgataatcagcagggcccggtggct

SEQ ID NO: 2841 - DNA, 661 bp, Homo sapiens
  misc_feature [331]..[331]: Chromosome 6, SNP identification no. = rs62953
  misc_feature [331]..[331]: allele = a, in linkage disequilibrium with rs507500, respectively
  misc_feature [331]..[331]: n is a, t, c or g
atgaaagaaagaaaagtttaatttctcaggtaactgcaggaaggaggagaggagaatggagaagaaaaaaaaaaactccctgggttggttaccctatagtactaacctcaagttcttagtctagaaccttcaagaaggaaaagggtggagggaagaatccaaaggacaaaagctaagatagcccttctggaaaaaacagctctggaaggattttgggtttaagagaatccagaggtaggcattcaggtgttattctgccaagagagtttctaagttaaagaatgcctgaattcaatccaccagatgctgactttggataaagacattttcntcttttttccccctataaaataatgataatcagcagggcccggtggctcatgtctgtaatcccagcactttgggaggctggggtgggtggatcacgaggtccagagttcatgaccagcctggccaagatggtgaaaccccacctctactgaaaaaaaaaaaatacaaaaattagccaggtgcagtggcgggtgcctgtaaccccagctactcgggaggctgaggcaggagaatcgcttgaacccggtgggtggaggttgcagtaagccaagatcacaccactgcactccagcctgggcgacagggtgagactatgtctcaaataataata

SEQ ID NO: 2842 - DNA, 661 bp, Homo sapiens
  misc_feature [331]..[331]: Chromosome 6, SNP identification no. = rs529833
  misc_feature [331]..[331]: allele = g, in linkage disequilibrium with rs507500, respectively
  misc_feature [331]..[331]: n is a, t, c or g
cttgtgatagtgagtgagttctcacgcaatctgatggttttttaaagggcttttccccgtttgcttctcacttgtctctcctgccgccctgtgaagaaggacgtgtttgcttcccctttcgccatgactataagctacctgaggctttcccagccttgcagaactgtgaatcaattaaacctctttcctttataaattacccaatctaggtatttattcatagcagtgtgggaatggactaatacaagccttgaggaagaatcaaccttgtatcttttctctggcttttggaatctgtttgtgcctcacttgctatggtctaaatgtctgnccccttccaaattcatatgctgaaatcctaatcctcaaggtgacagtattacgaggtaaggcctttgggaggtgattatattgtaagagcatatccctcactattaggaatcatgcccttcttaaagaccatagagagctagctagccccttccaccatgtgaggacacatggagaaggtgccatctatgaatcaggaaatagacctctaccagacacctagtctgccagtgagatgttggggaatggaggcaggactttagtcattttgaggaatataaaataaaatagtccaagatggctagagaggttagggatgtcttaactggaa

(The sequence listing continues in the following parts.)
